United States Patent Application Publication US 2024/0084332 A1 - sequence listing, part 12

SEQ ID NO: 51532 - protein, 407 aa, Okeania sp.
MRTAYQYKLRPNKEQIATIELWLDLLRRQYNYRLGERFSWWEENRCPVNACPLITPIPQLKDCPDYYSQKKDLVNTKEKFPEYKLVHSQVLQDCTKRVKLAFDRWLKTDKNGQKLGRPRFKNQSRYRSFTYPQIKPDCIVNRRINLPKIGQVKLIQHRPLPDGFQIKTVTVSRKADGYYVTLSLEDKSVPLLNSEVKPTSENTLGIDMGLKDFLVTSVGESVPIPQYYRKSQQRLKTLQKRLSRKKKGSKRWLKAVKAVAKQHKKVADQRKDFHLKTANKLLTEAEVIAYENLNIKGLAKTRLSKSINDAGWGQFLTILTVKAENAGQKTIAVNPKNTSQDCSSCGEKVPKELNIRTHSCPHCDMVIDRDVNAAINIKNRAAGPSVLKARGVRRGTGTAKREAHAIP

SEQ ID NO: 51533 - protein, 186 aa, Okeania sp.
VDLTKQFIPQAKQELLWLKEVASTPLQQSLKDLESAYKNFFDSCKGKGKRIKVRPPKFKSRKSRQSARFVGTNYKIGQDKIYLPKIGKIKIVCSRKLPNKPTSLTIIKDSNNRYFVSFVVDTKSEPLPETNNSIGIDLGISTFATLSNGDKINAPKPLKNNLKKLAKFQRKFLVLKKAARVVKGIG

SEQ ID NO: 51534 - protein, 450 aa, unknown
  TnpB Polypeptide
MKNKENYTAEKHQIKKNDPLWKELDTLSYRSKNLYNQALYRVRQHYFNTRKYLSYNEVQKQLQKENQIDYVSLNTKLSQLVLKNLNQNFLSYFASIKTYKTDPSKYKAPPKVPGYLDKKGRYLVEFNIQTIGKKELRNKILKLSGTHSHIKIQNDIIILNKVRKGKPIKTLSLKSVKVVPCNDSYEIIITHELPIKKEKSKEKDPNKCGAIDLGVNNLATVTTNIKGVRPFIINGRPVKFINAYYNKSLSELKSEEDKTKSKRKKKRIRREIEKLTRKRNNKINDYMHKSSTLLVNQLDSFGVSTIVIGRNEDWKQEINIGSRSNQNFYFIPHYGFIKKVQYKSDRKTISVKLNEESYTSKCSFLDFEEICKHENYLGRRIRRGLFKSSEGLLINADVAGSGNILRKGVAGALSQWERAEVIQGFVVSPVCLTIDDPRNAEDLSRIYRLT

SEQ ID NO: 51535 - protein, 443 aa, unknown
  TnpB Polypeptide
MKKLNKKSSKMMIRSTFHHYRKFTNINKLESVDKLVMEYRSAILLCVNYLWDLKLEWGKKGKNKIWDRVHDLLECPSMISTKNIKYDGPLSARALKCVVTQACGIIKAVTEKRQKDLNKKSWLISINKIPGKTLLNRINKGMIKPDCQSINCELNSICMDIKFELDKHFDGFVNFKSLWNRSSGYSHGFSVRIPIKNYRRSNKWKKIGALKTSVLLNESSVTLRWDVPRPIKKIKGEILAIDQGKTICLTASDGQKSIKDIHGHDLASIIDKMALKRPGSKAFLKACEHRKNYINWAIKKLDLTKVKEIKLEDIIHINYGRNVSRKMKRWVNTLIRDSVKKLCEETGVLFTLTPTEYNSQRCFICGWVQKANRKGKFFKCKHCGHEDDSDFNASQNIRIRDTLFVLPYGFRERRLNLRGFFWKPEGLFDASGQEFTVPVVSED

SEQ ID NO: 51536 - protein, 306 aa, unknown
  TnpB Polypeptide
VAFAAVPEPLPAPGNGQVVGIDRGVAISAALSTGELLCVPGLTARERTRLRRLERKLARARRGSNRRAQVRHAIARLRARESDRRKDWAEKASTDIARRFDVIRVEDLRVGAMTRSAKGTPDSPGRNVRAKAGLNRGILRSGWGLLARRLQEKAPGRVEKVSPACTSQRCSACGRADRESRESQAVFRCTACGYACNADVNAARNIAAGHAVTARGGYRDAGPVNREPQLLASLTGGEWLESPAFRLERMSKHVSRERREQFYPVAVPRDIGLHLPHLTAGEALMDALGDDRPSPGAQRDEHRQVG

SEQ ID NO: 51537 - protein, 479 aa, Pusillimonas sp.
MQIGNRFRCYPTPVQQRKLLQWIGCQRFIYNAKVGEDRYYRNFARKSLSHVGKFAPIDQQYSQFKNPELTPWLYEVPSQLLRNGATKWKQAYSRFFSGLGGRPTIQTRHGKQSVWLTNELFSFVPATDPDTGEVTHTLHIGTKKHPIGALAFVAHRGYQPPSSIHLSVHARRWHVSFNYEDGVIAPTEEESAEWLRGFSAPELAAMTLGLDRGVNIPLAGSDGQQFDFSEVQKKRVAKQIKYKKRWQRRQARRVKGSGRWKKAKQRVARYQRYGADVRRDFCHQTSHALVTDTRYKLFVFEALNVKNMTASAKGSIKAPGKNVRQKTGLNRSILASGWVQIKLYTHYKARRAGKLSIEVPAHYSSQECSQCGFTHQDNRLSQAVFVCQRCHHTDNADTNAAKVLVKRGVSLILSDGLVKKSVKRVGITKQRVKEVGAGCSEPAGETQPTLVEIVVNRQGGNTLACVSLKRETPATTLGV

SEQ ID NO: 51538 - protein, 410 aa, Planktothrix sp.
MFQAYKYRIYPNTEQQIALAKSFGCCRWYWNYALNLCQETYKTTGKGLSRPAIQGLLPQLKKEYPWLTDAYSQCLQVVALNLSAAYKNFFDKRAKLPRFKSKHGRQSISYPQNVKFEGDYLKLPGKIGLVYCRRHREFEGTIKTVTVSKNSEGKYYASVLVDDGKETPNLSTNGKAIGIDLGLTHFAITSEGSKYSNPKHLIKHERNLKRKQQKLSRKQKGSKSRQKARLKVAKVHAKISRCREDFLHKLSRKIVNENQIIAVEDLAVKNLVRNPKLAKAISDCGWGMFCTMLKYKAEKEGKNYQEVDRFFPSSKTCNVCLNQVGSLPLEIRRWTCKHCQTTHDRDINASINIKNEALRILSLGTSDTANLRGCRSSGKTMCQAQASPTVLSDAIPIEVGSPHLLVEKCG

SEQ ID NO: 51539 - protein, 219 aa, Burkholderia sp.
VALLNKQSRAVDSVRNFCNDTQRHAIEWCKKWPAGFDPNVLTTGSSKELAIDSGTVNATCEQYAKSRSLYRRACLRYRGRISLGRVPLKGRDLKRDADAFRFVDNIFHVFFSRLLPEGMIKDGTSPAQDGRGDWFLNIVIEIPNVQARPIRSGIDLGLRDFATLSTSEKLRSARFGRCAAETPAKAQRTRKHKRHIAKLHAKVANACADFQHKLALDLV

SEQ ID NO: 51540 - protein, 402 aa, Escherichia sp.
VKRLQAFKFQLRPGGQQECEMRRFAGACRFVFNRALARQNENHEAGNKYIPYGKMASWLVEWINATETQWLKDSPSQPLQQSLKDLERAYKNFFRKRAAFPRFKKRGQNDAFRYPQGVKLDQENSRIFLPKLGWMRYRNSRQVTGVVKNVTVSQSCGKWYISIQTESEVSTPVHPSASMIGLDAGVAKLATLSDGTVFGPVNSFQKNQKTLARLQRQLSRKVKFSNNWQKQKRKIQRLHSRIANIRRDYLHKVTTTVSKNHAMIVIEDLKVSNMSKSAAGTVSQPGRNVRAKSGLNRSILDQGWYEMRRQLEYKQLWSGGQVLAVPPAYTSQRCACCGHTAKENRLSQSQFRCQVCGYTANADVNGARNILAAGHAVLACGEMVQSGRPLKQEPTEMIQATA

SEQ ID NO: 51541 - protein, 406 aa, unknown
  TnpB Polypeptide
MNRLSFTGFTFTVVSPSLNSSLRILATMNRTYKFRLYPSTSQQATLTQWLTTCRMLYNNSLAERRDAWTTEQRSVTYTEQANQLTDAKQTNPFLTAVHSQVLQDVLRRLDKTFQHFFQRIKKGEKTGYPRFKGKNRYDSFTYPQSGFVLEKKKLRLSKIGCITIKLHRQIPVEGVIKTCTITRDVDHWYACFSVELPVLHSQKEIKNAIGVDVGLKSLLTLHTGDTIDNPRWFRNSENKLAKEQRRKDRKVKGSHNRHKQNTKVAQVHRKIRNQRKDFHHKLSRKLVDTYDLIVYENLTITNMVKNHHLAKSISDAGWGQLMCFTEYKAEEAGTLVEYVGAYDSTQRCSRCGKRVPKTLATRIHRCPYCGLVLARDHNSAITILHRSTHYLEARSLSGQELPVEPV

SEQ ID NO: 51542 - protein, 396 aa, unknown
  TnpB Polypeptide
MRRTNTFKLSPTTEQEAELFNRADACARMWNQITYKRRQSFFNGQLDWNTDETYHHNKNIIGSASAQQIIRKNNEAWKSFFALVKQKKKGILPPHINKIRPPGYWKDKNTGRRKLKYLVRCNNYILTDTLLKLPFKLTIKWKGSNKWQGKQGRLEISCDELTGQWYAFMPVEVAPPHQPQGTKKAYVDLGVKVPIMAMIEGTTQVFGYRANSMLADWWYWNHQLAQHQSLLKTINNAHNSKTFSLLFRTRKRRFRDVINKVVNDFMMRCWSQGVSEIILGELTNIRTSAQFSKKSNSMIHLFWSHRYLVNRIKEKAEEYGITITEIDERGTSSVCPRCGAKRVVRKGRLFKCLRCRLEAHRDAVGCVNIRLAQGESLSAGVINRAVARPSFLSLEV

SEQ ID NO: 51543 - protein, 379 aa, Nocardia sp.
MRSKVVRRAYKYRFYPTGEQCEQLARTFGCVRYVYNRALAERSRAWMQQRRISYAESDKMLTQWKRDPDTHWLTEPSKGPLQAALRNLQSAYDKFWRKQAGYPQFKKKGRSKESATYFSNCFTYRDGRIRLAKQSEPLDIRWSRPLPDGASPSQVTVSKDACGRYHISILVEETIIEHVPTGSAIGVDAGITSLYTFSTGEKVSNPRHEKRDRERLAKAQRALFRKQRGSQNRAKARLRVARIHARIADRRRDHLHKLSTRVVRENQVIAIEDLSVRNMVRNRSLARAISDASWSQLRSMLEYKAGWYGRRIVAVDRFHPSSKMCSTCGRINAAMPLHVREWTCPCGAFHDRDVNAAKNIKAAGLAVLACGDGVRPPRS

SEQ ID NO: 51544 - protein, 340 aa, unknown
  TnpB Polypeptide
LKKNITALGKLKEQGYNVGELRWKSPREFRSFTYNQSGFELDKKGGQTVLSLSKLADIPIELHRPLPDDATVKEVTLKKEKTGEWFAIFGIEMDTDPPAKPLLADIDADEMVGIDVGILKYTHDTDGTAVESLDLSEERDRLEREQRKLSRKEYESNNWETQRQRVAECHLRIKRKRRDFLHKLSNYYAREYELVAVEDLDVKGMLESSRNSRNTASAAWNTFTDMLEYKCDREGTHFVEIDPEDTTKECAQCGVNTDKPLWVREHSCPACGFEADRDANAAWNILSRGLTELGVGHSEGTPVETALPAGTNIVPAKRVVEAGSPCLKERAATPRVSRQR

SEQ ID NO: 51545 - protein, 386 aa, Paraburkholderia sp.
MLPGRNLKRLVPPSVQTATATRVLRLRLKDRHARALREWAYHVNQVWNYCNELSVRIFERERRFVSAYELDRYTAGATREGLPLHSQTVQAISAELVTRRKQSRRVKLRWRVSGGARRSLGWIPFKASAIRYRNGQVFIASTPLSLWDSYGLSRYELGAGCISEDARGRWYLNITVKVESKPKPAVSGVARSVGLDLGLKDFAATSDGAALEAQRSYRELEPALASAQRARKKARVRAIHAKIAARRKDFLHKQSTALVRMYGAIFVGNVNAQALTQTRAAKSVLDAGWSAFRTMLQYKCDDAGVWFDEVNEAYSTQTCSACRARSGPKGLEGLRIREWTCACGARHHRDVNAAKNILAAGRGRLAEGIPVLLERAGRTSKTVSVC

SEQ ID NO: 51546 - protein, 446 aa, unknown
  TnpB Polypeptide
MQSVELTHTLSFKLTITTGEPSDLHEGCLEARRIRNETNRLDKQNWDWSDIKSVVVDNADHIKNTSQLLVDKALGELETYHDHKHDDWGRPYPYIDGTYPLVMNHGEGYRLLTDDDSDHIRFRITATRGTHVKGQLQGSADHLNRVQTALEDDAWRVGTAEVIHNHGEWRLHVTVTHEHAEVADKYDADTIIGVDVNEDCIALAAMTCDGELRDSVVFDYTDVKTQRHEFFTKRKRMQTANQTAFETTVQTEERDYVHDRLHKVSRRVVEWVSQFECPVIVFEDLNDMRDDIDYGTRMNRRLHSLPFSKLQEMVSYKAAWQGVPSDDVDPEYTSQRCPRTKCQHTERSNRHKKRFKCCECGFQDHADRKAAVCVVQEWVDDQTGNVPSLDRLPSGVEVRRAASGAGGGPDSHGPNSGSGVHRHGTSARPNMEVRKELKSVASAVQD

SEQ ID NO: 51547 - protein, 399 aa, Streptomyces sp.
MVGNLVKRAFKYRFYPTDAQAAELSRTFGCVRKVYNLALAARTEAWARQERVNYNQTSAMLTAWKKTEELAYLNDVSSVPLQQTLRHLQTAFTNFFAKQAKYPRFKSRKKSRRSAEYTTSGFRFRDGRLTLAKMPEPLDIVWSRPLPEGAEPSTVTVSQDAAGRWFVSMLCEDPSVKPFPCTDSTVGIDVGVTHLLTLSTGEKITNPRHERRDRVRLAKAQRDLSRKAPGDGANRRKARRKVARIHARIADRRRDGLHKLTTRLVRENQTLVIEDLTVRNMVKNRKLARAISDAAWSDFRSMLEYKAAWYGREVIAVDRFFPSSKLCSHCGKLARSMPLHVRTWTCEGCGTTHDRDVNAAKSLKAAGLAVSVCGAGVRPQRRTPGGQSATKQKSPRREP

SEQ ID NO: 51548 - protein, 243 aa, Fusibacter sp.
  misc_feature (109)..(109): Xaa can be any naturally occurring amino acid
LRNTLLKAVKIKQHRSIPKDYKLKSVTVSKTPTGKYFASVLFEYEQEIKAVQPKTLLGLDFSMKELFVSSDGISAEYPRYYRKSLDKLKREQRKLSLCQKGSKNRNKQXIKVAKIHEKVTNQRKDFLHKQSKQITNAVDAVCIEDLNMKGMSQALNFGKSVMDNGFGMFVSMLDYKLMEQGKQLIKIDKWFPSSKMCSECGKVKNTLLLSERTYHCEDCGMTMDRDYNASINIKNEGMRILLA

SEQ ID NO: 51549 - protein, 304 aa, Streptomyces sp.
  misc_feature (249)..(303): Xaa can be any naturally occurring amino acid
LDTAYKNFLDSLKGKRQGRKVGPPRYKSKKDTRQSIRLNTNAFSLQDDGTVYVAKAGNLKAKWSRPLAAAPTSLTVTKASSGRYFLSFVVDTEPDILPGLQTDAGLDLGLSAFAVLSDGSKIGSARFLRRAEKKLKRLQRELSRKARGSKNRAKARIKVARQHAKVADRLRDWHHKASTQIIRDNQAVYVENLAVSGLARTRLAKSVHDAGWSAFVGMLEYKAVKHGRTFAKVDQAFPSSQVCSACQFXXXXXXXXXXXXXXXXXXXXXXXXXXXXXXXXXXXXXXXXXXXXXXXXXXXXXXXL

SEQ ID NO: 51550 - protein, 116 aa, Limnoraphis sp.
MVKNHKLARAISDANWGELVRQLDYKASWYGRELIKIDRWFPSSKRCSNCGYISEKMLLNIREWVCPKCNSHHDRDINASINILAAGQAVSVCGASVRPEESKSRKATAKKQKPKS

SEQ ID NO: 51551 - protein, 415 aa, unknown
  TnpB Polypeptide
VREVTRTVIVPSVRLTEKKLRIFKELEELYKQVLIELVDYGFRNSVDSFTRLKRDKYRELRGRYPHLPSHYVHTACQDASTRIKSFNKLRKKGLARSEKPEVNRVSIWLDDHLWKRIGHTTILIYTHKGWVTLELEPHKQYWRYINDGWVLRTQPKVKIDYRCKRLLVYFVFVKDINVDGNGVKHVVSVDVNENNVAVKVLDKAFILETGIKRITIGYARYREVVQSVKGNGYVGRAVHGRERKRKKDIRLKIANIVANTAKNINAIVILEKLPKRCPRNMIRDVRDPVLRHRIYQAGFRGVVKAIEEECLERGVPIFKINPRNTSSICPFCNSKLMRGNASRQLKCPKCGFESSRDVVAVLNLEKKYLTSKGCVSFTPMPSEPTLEVVVLPMKEWVRRKSLDAINKHELIRMSI

SEQ ID NO: 51552 - protein, 257 aa, unknown
  TnpB Polypeptide
VEVVYKIPEHSEFFCSLNRNLAASIDIGLDNLATITFNDPTIQPIAVNGKPLKSANQWMNKEVARLRSQLGFGTSRRVQNICRNRNNFVHTYLHACTRLIVNELLAFGVTQIAIGKNEQWKSKINIGKRNNQSFVQVPHAKFIAMLTSKLEAVGVTVTVGEESYTSKASLLDWDNIPTYTPNSRESHNFSGKRVKTKEYRTKNGARIHADVNGSFNIGRKVIPNCFDCLKSIVERNRGCVVAHPRRISPKITHRNLS

SEQ ID NO: 51553 - protein, 523 aa, Virgibacillus sp.
MFLRKEWCFLAKEKNPTFILELKLSTELWQTHILNTRFEVARKLYNITLSYALKQLRRMKESKQYRQNIHEYRKYKSLFMKAKTKKEEQLYKKELTVRKQALNTLRKSHQLTKFSLHGVIAKHQRNYNTHIDSHTGQKIADAVCKSMEEALFKGNKAHFKKYGTLTSVEGKTNASGIRFKKEDNTLYWLGLKLPVIIRENDLFSQECIANHRMKYCRIVKKVIRGKDVFYIQLVMAGIPPAKRINTTGEFRHKITPSGRVGIDIGTSTVAVSSKTEVFLQPLAPKLPQFDQEKRRLLRKLDRSKRSMNSHNFNEDGTIKLGVKLVWKRSKNYIKTLYQLKELYRKRSVYVKEQHSKIANHILRCGDEVYVEKMSFKGLAKRSKMTKHNKKGKLQSKKRFGTSIGSYAPALLISIINQKLGYLNKEIYKINTYTFKASQYNHITDTYQKKKLSMRWTAIAHHRIQRDLYSAFLIMNSNLDLKKTNRGLCKRTFDGFIKLHNKYIDGLKLQTEVFPSSMGIKKAN

SEQ ID NO: 51554 - protein, 487 aa, Virgibacillus sp.
MFGGVNFKMTTYKTLQIWVKKGHRMHDYFQTMCQSAKNMHNTTNFYIRQVFTALKQKKELQPYQKEVLETIQTHLPKINDNQMIAYQRRIEKEKVKPELQQKEVKCNLFGMPSTENPYVSYHFLDALFKSMAQHDYRSLPAQSSQGIMKNVFQNWRSFYSSLREYKSNPTKFKARPKIPGYCRLKVKEISFSNQDCVIKENKFLKFPKTKEKLNIGKLGCTEGKLKQIRVIPKYGHYVVELIFQVHSESTMKESKNRFMSVDLGIDNLAAIVTNTGRRPVLVKGKHIKSINQQYNQLKARYTGILRQGKRANEIPFTSKRLEKINNKRWNKIKDLFHKVSHQMIKIALEEDIDTIIIGRNKDWKQHANMGKRNNQSFSTIPHSLLIKMITYKAQEHGIHVMLTEEAYTSQASFLDQDEIPVYDNNTKRNLFSGKRIKRGLYRSKDGQIIHADVNGAANIMRKVFKDAFHHTFFNMETLKRPIVLKVK

SEQ ID NO: 51555 - protein, 281 aa, unknown
  TnpB Polypeptide
LTKLVKKQNGFPKFKSAKHSRKSYTTNKQNGTVAIVENRSIKFPKIGEVKAKIHRMPEESWKLKSVTISQDSDGKFYASVLFEYEATITRVALSDNAIGFDYKSNGLYIDSNGYCPDKKKYYRQNQDKLAHAQRKQKHRTIGSNNYKKQQLRIANIQRHTSNQKFDYLHKESTKIANLYDVVCVESLDMKAISNKGFGNGKATLDNGYGMFLNMLADRGKYFVKIDKWYPSSQLCSCCGKQKKLTLTDRIYKCDDCGFAINRDLNAAINIKNEGLRIRKST

SEQ ID NO: 51556 - protein, 455 aa, unknown
  TnpB Polypeptide
MMKIFKTFQYRLRPTDDQNEILHRHGGNTRFVWNQLLEFSNDITELVIINKFSLQEKLVKLKNENEFLKETYSQPLQIQADRLDKTFKKSRSAEVRDQRRKKIYIASKIKEPEKKAKKLKKAESFGFPHFKSRHRQEDSIFYPQNFKIRKTRMYFPKIGWISYIHHRHFEGKPKNVTIKQDGKFWNCSVMCEIEILDVKPVPLEQAKLVGIDMGIKTFATFSDGSVVENPKFLKKFEKRIKIEQKKLSRKLLKVGKNPKGKEIKVSSNNRLKQLEKLQNQYRRLRNSRRNFIFQIVCRMIIKYDGFCVETLDIQNMIREAQKEHKKFMTRSIYDVSWFEFLRVLGYKCLWFGKYFQKIAQFFASTQTCPFCGHVQKEITLDDRVLTCPLCGRVMERDSRSSLAILNEGLRLLRGIPKEPGELKTVGENVENIFDESVTSSVASKRNENALAFSLS

SEQ ID NO: 51557 - protein, 464 aa, Rhodococcus sp.
MVGGYSISRCTWSPSPLNSTSREPKSSHTLRITCSQVVSSSSVRTPRRYLVTKTKWTCRAETTERPRLYSGSETIDQCYSLGVQLRYQYRVYPTPGQQDMLARSFGCARVVFNDCLRIHQDAYASGVKLSDTAVQKQVVTAAKKTPERAWLGEVASVVLVQACQDARRAYRNWFDSLSGKRKGRKVGAPRFRSRRDNRQAIRLTRNGFSNRPNGKLYVAKVGELEVAWSRDLPSEPSSVTIVKDAAGRYFASFVVETTDEPLPPVDAEVGIDLGLATFAVLSNGKTISSPKFLRRAERKLRKAQQVLSRKEKGSNNRVKARIRVAKAHARVSDARKDWAHKHSTAIIRENQAVFVEDLCVRGLARTRLAKSVHDAGWGMFTRMVEEKAARYGRTFVKVDRFYPSSQICSQCGVRGGPKPLSIREWACKACEAVHDRDVNAAKNIHAAGRAEWLNACGGAVSLLS

SEQ ID NO: 51558 - protein, 427 aa, unknown
  TnpB Polypeptide
LIELARKKKSSNGMPVQTLTARAKVVNLSDRDALLLGLLGFSATKLWNVANHHRRIVWNETGKIPNFAQQCRELKTNRWYKLLPSQSAQEVLGEQDDSYRSWFSHRKNGDVLAKPPGFRKKSTLSTVTFKQNAFEMLLDNRVCLKLPKTYGRREIVLEYQLPLDVTLGKVQQVKLIYEPRTGNWYLHITHRVSVKYKETGNVMALDLGIANIVAGLISDGFSFIVPGGELLALDRHFQKEKAKCTKSTSRRCIELNTKWGRQRNHYLHVLTRWLVNLAIAHNVSTILVGELKGIRADKDWGDAGNQKLHAWPFDKIIKLLTYKAALAGIRVIRVPEKNTSTTCPVCGKRVKKARVHRGLFVHCGRAFNADLVGAYNILQRYLRENEAVFMPLRAGVVGALARPAVNLFVWRKTTPKGREQGTFRQAV

SEQ ID NO: 51559 - protein, 440 aa, unknown
  TnpB Polypeptide
MFEAVKVALDPTPTQEQRLLSHAGASRFAYNVMLAHVKSSIDRGEKPEWSFWSLRKRWNAEKDTLAVDAEGSPWWQENSKEAYSSGIEALSKGLSNWSKSRKGDRKGRKVGFPKFKAKDRVTPKFTYRTGCFGLVKGDPKALKLPRIGRVHCMENVAALVGDAKVLRMTISQHAGRWYASLTVERDNKPAAEPPKGGSVGIDLGVKNLATLSDGTVVLNPRYLKKSERKLKRAQQALSRKTKGSKRRAKAREKVANLHAHVANQRIDALHKLTTWLIEKYSEISIEDLHVAGMVKNHHLAKAVSDAAFGELRRQLEYKAARTGARLHVVDRWFASSKTCSGCGSVKAKLSLAERTYCCDSCGLVLDRDLNAAINICVAGSAPETLNAHGETVKRGNRSGCATLVSVKCEPSVGANRVRLGAGGRKAVMQAAIKQFATDML

SEQ ID NO: 51560 - protein, 457 aa, unknown
  TnpB Polypeptide
MAKDTVIEYRRLANVLSSVFLTHWPEVCNLEMSGLESYFHDTKNSPNTIYGKWFSKNFYKFPCYLRRAATNAAMGAVSSFMARYQAWQKGDRRARDQRPPQWGGVSTWPVLYGGKGGTTTMIKHNGDIIQVKLLDKESGDWLWKSVSVVRRGKRHNTAGAIPLSPMLIMRGSRLSLGQPYNIKEHRLKHLPRDRVCSVDQGINTGAVCSIVDTSGTVIARKFISCSTHIDRRDKVLLQIREKARQTMGKGGELVKGFCRTLYSRAAGLNKHIACFISRQILRFAEAHHAGVIVFENLKQFRPKGGRKRSNLKAKFHGWLHRLLVQRTEQSAQELGLSVKFVHPRGTSSFAYDGSGKVSRDKTNYSQCQFQSGKRYNCDLSASYNIAARYLVRLLNRLKPVRGKSVGAKALPTAGPRVPVTLSSLWDSVETPTKAQRSLVVGAFIGTSKTPRQITKCL

SEQ ID NO: 51561 - protein, 398 aa, Streptomyces sp.
VKAKHVKRAFKYRFYPTDAQAAELSRTFGCVRKVYNMALAARTEAWALRRERINYNTTSAMLTAWKKTEELAYLNDVSSVPLQQALRHLQTAFTNFFLKRARYPRFKSRKRSRKSAEYTTSAFRFRHGKLTLAKMAEPLEIVWSRPLPEGAQPSTVTVSQDAADRWFVSLLVEDPGIRPLPDAEAAVGIDAGLNHLLTLSTGEKITNPRHERRDRKRLAKSQRELSRKARGNGSNRAKARRKVARIHARIADRRRDHLHKITTRLVRDNQTIVIEDLSVRNLLKNRNIARAISDAAWSDFRSMLEYKAQWYGREVIAVDRWFPSSKLCSNCGMLQDRMPLHMRTWTCGGCGTSHDRDENAAKNLLAAGLAVSACGAGVRPQRSTPGGQSAMKQEALRA

SEQ ID NO: 51562 - protein, 370 aa, unknown
  TnpB Polypeptide
VNRVWNYCGETQNAARRHKKRWPSGFDLIKLTLGSSKLLGLHSDAVQAVCKQFAIARDSCGKRPRWRGGKSLGWIPFQAARAIRVQGDTVVFRGRRYRLWLSRPLEGKILCGGFAEDARGRWYLNLQLEVAQDRKHGSGEIGIDLGLKSLATLSTGKKVGAPRIYRKYERALAIAQRAGHKPRVRAIHAKIANCRQHFLHEVSTRLVRENRRICVGNINSCGLARTSLAKSVLDAGWSQLRSQLRYKALRHGAEYIEVDERFSTQVCSACGARGGPQGREGLVVREWSCSGCGARHDRDINSAINLLVSGRNVGLQQTEIPPFREGKTLKPPPSSVVLCSDCTMPRRPMSGSLTAMRNYRSAIHARIDSA

SEQ ID NO: 51563 - protein, 187 aa, unknown
  TnpB Polypeptide
MKKKLLYIVNPISGTQRRLSRMQGSKKHEDKSNNYIKQLRKVNKIHRHIANQRLDNLHKISTEIANQYDVVCVESLNMRSMSNKGFGNGKATLDNGYGMFLSMLEYKLSDRNKYLVKVDKWYPSSQICHCQRPERRPHQGAAQCHQRNEIDGNLGWSKNHQQSTCYRQERTELQCHCLTDVLRNTRR

SEQ ID NO: 51564 - protein, 316 aa, Escherichia sp.
LRSAWDRCFDKSLTAEKPVFKKKTKGCDSIRFVNFSKYCGLDYGRVKLPSGLDWVKFRQSRKIEGVIKNCTISQHAGHWYVSFQVELAVTDPIHASTSAIGLDAGITKLATLSDGTVFEPVNSFKKNQDKLARLQRRLARMVKFSANWKKQKAKISRLHSHIANIRRDYLHKTTTTISKNHAMIVIEDLKVSNMSKSAAGTVDQPGRNVAAKSGLNRAILDQGWAEMRRQLEYKQAWRGGDVLAINPAYTSQKCACCGHTSKNNRRTQASFICTACGYTANADVNGARNILTAGFEVMAAGQILPSVRKGRARKAA

SEQ ID NO: 51565 - protein, 436 aa, unknown
  TnpB Polypeptide
VALARVFGCARVVYNDALALRRHAFEAGLPRLSASQLQREVVTLAKLTVRRAFLAEVGVDPLIQAVRDLEGAYGNYFASLSGKRKGPKIAEPRFKSRKDNRQAVRFTRNGFRLRGNGTLYLAKIGEVRVRWSRILPSEPPSVTVVKDARGRYFASFVVETDPAADLGRFPLDPDRAYTETGIDLGLTHFAVLSDGKKIDAPGFLRRAERKLRRLQQDLARKQKGSNNRKKAVVEVAAAHAHVADSRRDFQHKLSTTIIRETQAVYVEDLSVAGLGRTRLAKSVHDAGWSGFVDMLEYKAARYGRYFARIDRFTPTSQVCSACGVKDGPKPLSVRQWTCAGCGARHDRDVNAARNVLAAGQADRVNACGDQVRPGLVPAPVCEAGTHRGDLSSAQCASAPAAPNGAVGIPALGDREDVKGSPSVHRGTLWSPPVSRR

SEQ ID NO: 51566 - protein, 399 aa, Actinomadura sp.
MAKGVKRAFRYRFYPTDAQAAELSRTFGCVRKVYNLALAARTHAWVLRRERVNYNTTSAMLTAWKKTEELAYLNEVSSVPLQQALRHLQAAFTGFFAKRAKYPRYKSKKKSRKSAEYTSSAFRFTDGRLILAKMAEPLAIVWSRPLPEGAHLSTVTVSQDGAGRWFVSLLCEDPAVQPLPATRTAVGVDAGLEHLLTLSTGEKITNPRHERCDRERLAKAQRHLSRKAKGSANREKARRRVARIHARITDRRRDTLHKITTRLVRDNQTIVIEDLSVRNMVRTQSLARSISDAAWSEFRRMLEYKAGWYGREVIAVDRWFPSSKLCSTCGTLKDKMPLNVREWTCDGCAATHDRDVNAARNLLAAGLAVSVCGAGVRPQRESSRTGPSATKQKPSRREP

SEQ ID NO: 51567 - protein, 402 aa, Thermosipho sp.
MLITYKFRIYPTREQEEKLSKHFGHTRFVYNFFLNYASTIYKVMGRSTYYNEWASVLTKLKRMDKYSWLKEVNSQMLQQSLKDLERAFKNFFKKQAGYPRFKKKKFSQQTFRVPQHIQLYIKEDNPKYGLIFVPKFKEGIKVRLHRKITKDGKIKQATFIKTAMNKYYVAIVFEVKDVKVQNTSTNILGIDLGIKDTITLSDGRKYSMPDLFEYEKRLKRLHKRLSRKQKGSKNRDKARLRLAKLYEKIAKIKSDWLHKITHSLTSKNQVGKIVVEALNIKGMVQNHKLAKHIHMQSWGKFKELLEYKAKRCGIEIIKADRYYPSSQMCSECGYINKEVKNLSIREWTCPECGAHHDRDVNAAKNLAKYGLILSVGREPSEFTPVDRALAAEPKWGLRVITG

SEQ ID NO: 51568 - protein, 311 aa, unknown
  TnpB Polypeptide
MGQTRREGPLAHRHPCAGKPADTALYQRPCGLDHKSFVFTNMPLPLPRVSNGMLGLGRGCAHTLASSDGAFMDMPKPTKKEMARLRYLQRRLSRQDRTNEARGGKTAKFASKRRQRTLVEFNALQGRIVRRRNDWIEKTTTKLAKENILVAMEDLDVQAMTKRPKPRPNPDNPGHWLHNGAKAKAGLDRSILSNCWGRVMTRLRDKMAANGGRLAVVSAAYTSQTCHKCGHVAKENRESQAVFKCVECGHRANADVNAAENILSRALAKTGGDTALDVEDPHWRPDEASTPSFPQAGSSFGVRSVKGIPRL

SEQ ID NO: 51569 - protein, 390 aa, unknown
  TnpB Polypeptide
MPSETIKLTAKFKLKETPEGLDELFSTYREIVNFLITHAYESNITSFKRLKKEKYKELRKEYPELPSHYHYTACQMASSIYKNYRKRKRRGKANGKPVFKKDTIMLDDHLFKLNLEKGIIKLSTPSGRIPLEFHPAEYHEKFKGWKVGQAWLVRTLKGVFINVVFSKEVEVREPEAFVGVDLNENNVTLSLSNGEFVQIITHEREIRTGYFLKRRRIQKKIRSGKRRKALLEKYGERERNRLTDLYHKLANKIVELAEKYGGIALEDLTEIRDSIRYSVEMNGRLHRWSFRKLQSIIEYKAKLKGVRVVFVNPAHTSSLCPICGGKLSPNGHRVLKCECGFEADRDVVGSWNIRLRALKMWGVSVPPESPPMKTGGGKVIRYTTTSKSSG

SEQ ID NO: 51570 - protein, 528 aa, unknown
  TnpB Polypeptide
MRTYQARLTVTDEAPLRTYGAVFSRALRSLHTSRHSGMVVSKPDFMRAFGLTSRQYNAVKFSLDGMESSIVELRPGRIADLQHRIKAADRKLAKLLDPQPPRKASKRSVRKERAPRTFEEQRAQAARATASRALRIHNVERRRTDLARRLEALEAKGHPRICFGSRKLFNAQHHLEENGFNSHADWRAAWRAKRDAQFFVLGSKDESGGCQGCVMTHLGGNRFALRLRLDGQAQRWISLEVAFAYGLDHILAALKAKQAKSYRFLRDEKGWRVFVSTEVMPTPTCSDVRLGVVGVDFNVGFVSVSETDRFGNIIGSQDVPMVTAGLSKHATQTAISTAVATIIAIACKAQKPISIEFLDFAKKKAQLSYASPSRQRMLSAIAYTRFAQTVDARAHDAGIEVVEVRAAYSSKIGAQKYARRYGLSGHRAAAFVLARRGQKFPDRLKPSSRKRFATTCKDRGEPVPDRLKATSGRGRARLETYVRPPVRAILAAPRGRKRSATETSDVPRCKSAGVIATPNTRCGVGGYS

SEQ ID NO: 51571 - protein, 528 aa, unknown; identical to SEQ ID NO: 51570
  TnpB Polypeptide

SEQ ID NO: 51572 - protein, 372 aa, Anoxybacillus sp.
MTKQNKAFKFRLYPNKEQEELLAKTFGCVRFIYNKMLAERKEIYEKFKDDKEALKEQKFPTPAKYKNEFPFPKEVDSLALANAQIHLQNAYENFFEGRAEFPKFKTKKKKQSYTTNMVNDNIKLENGYIKLPKIKKPIRVKQHREIPADYKIKSCTISKTKTGKYYISILTEYEKNISTVKIQKVVGLDFVMDGLYVDSERGEKANYPRYYRQALDKLAKAQRILSRRKKGSTRWEKQRLKVAKLYEKTANQRRNFLHHKSKELAANYDAVIVEDLDMKSMSQALNFGKSVHDNGWGMFTTFLEYKLKEQGKQLVKISKWFPSTKKCSRCGNEKEMPLSERVYKCICGLVLDRDYNSAINIKKEGLCLLALA

SEQ ID NO: 51573 - protein, 393 aa, Thermoplasmatales sp.
MFKAYKFRLYPDKEQQILLEKHFGSCRFVWNYFLDLRNTQYVETGKGMSYKSMQSLLPSLKKENEWLKDINAQSLQVVLQNLDTAFSRFFRNIAGYPTFKKKKTGGSFTVPQHFTVNDNHLAIPKFKNPLRLFMHRNIEGEMRSLTISKTPSGKYYASILAETGIKIPEPVKIEAGTSTGIDVGITAFLTTSDGMQIHNPKNLKKSEKKLAILQKRLSRKQKGSKNRNKAGVKVAKAQEHIANQRMDFHNKVSDAMLKAYDTVITEDLNVSGMMKNHHLARSIVDAGWSSFVTMLKTKALSRGKNIIEIGRFDPSSKMCSKCGYIYNLKLSERTWTCPRCNITHDREWNAAKNIKKFGLIQTDVPTDSGEVTPMEISLTGCLIREGISHVSLK

SEQ ID NO: 51574 - protein, 340 aa, unknown
  TnpB Polypeptide
MWYNEGQMILTYKIKHNRDFSGELKLAQKVAEFAMENRDKLSSKYVSHLGLKSEITNQILRKYGRNKKAKFVSSVKLTIPSQGINFKDKTITIFSLKLTMPFDRECEKINQIEIDEIYAYVSVTVKEETPYVPEVSIGIDLNTTSHCAVVAIKETGKVYKLGKEAYHIHRKYSRTRRFLQKKGLYKVVKKIKHRESNKVRNLNHRISRFVVDLAKKNKGAIYLEKLQGIRDKKCGRSFKYALNSWSFYQLNLFIGYKASLAGVPVSYREPNWTSQICSQCGLMGERKGKEFKCPNGHVEHADVNAAFNHASPSESIVRLLAERDVNKRNTDIRQEATLCV

SEQ ID NO: 51575 - protein, 371 aa, Pseudomonas sp.
MTYTKTLKLRIKDKHAKTLLAMAREVNLVWNYCNEISHRAIRERRQWLSGFDLQKYTNGLSKCDGILIGSPTVQQVCEDYAKARKQFKRSRLNWRVSNPQSSKYSLSWVPFKARAIQYRNGQIQFAGFKFGLWDSYGLSQYALRAGSFSEDSRGRWYLNICVQVDSQPSGGTAAVGIDLGLKTAATTSDGQVLVGRQYRALEQKLGIAQRAGKTARVRAIHAKIKNQRKDAQHKFSTALVERCAAIFVGDVASSNLVKTKMAKSTLDAGWSQFKTMLEQKCQRAGVVFEVVDERYTTQTCSCCGSISASSPKGRAGLRIREWTCVDCGTAHDRDINAARNILAAGHRRLVVGIPALGAGRMSSLRGARLGC

SEQ ID NO: 51576 - protein, 443 aa, Oscillatoriales sp.
MSGTLTVKTLSDILAISPNICYSGVSTTLTQMRLVQKHIIDKHHGFYAECARLCFLSKNLFNYANYLIRQSFIFEAKYLNYNAMVKLCQGTADYTALPAKVSQQTLMRLHESWISFFEASKKYANCPQKFLGRPKLPQYKHKTDGRFVVTYTSQAVSQQWLTKGVVHLSQTDIFLTTRVREIQQVRIVPLPFHYAIEVVYEAIAQTQQGNEENIAGIDIGLNNLAALSSNVLGLTPLIINGRPLKALNAYYNKKKAQLQSQLKREQQTSNRIKQLTHKRNCKVDNYLHNASRLIINHLAANHIGTLVIGKNDGWKQEINIGKRNNQNFVSIPHARFIEMLKYKACLAGIKVVITEESYTSKCSFLDFEPMSKQQRYKGRRIKRGLFRASDGQLINADMNGSLNIIRKAFGNEAFASDSIQDLVVSPVRVTPYNIDPGFRGRSP

SEQ ID NO: 51577 - protein, 402 aa, Escherichia sp.
VKRLQAFKFQLRPGGQQEREMRRFAGACRFVFNRALARQNENHEVGNKYIPYGKMASWLVEWKNATETQWLKDAPSQPLQQSLKDLERAYKNFFQNRAAFPRFKKRGQNDVFRYPQGVKLDQENSRIFLPKLGWMRYRNSRQVTGVVKNVTVSQSCGKWYISIQTESEVSTPVHPSASMVGLDAGVAKLATLSDGTVFEPVNSFQKNQKKLARLQRQLSRKVKFSNNWQKQKRKIQRLHSCIANIRRDYLHKVTTTVSKNHAMIVIEDLKVSNMSKSAAGTVSQPGRNVRAKSGLNRSILDQGWYEMRRQLEYKQLWRGGQVLAVPPAYTSQRCACCGHTAKENRLSQSKFRCQVCGYTANADVNGARNILAAGHAVLACGEMVQSGRPLKQEPTEMIQATV

SEQ ID NO: 51578 - protein, 547 aa, Streptomyces sp.
MAEPKKKLRQISRPFVADGPTGVSIRDRLKGLTGEDERILRLVSEHMGRLASLDLARRCRDGLEHSADTWAARKRDLTVLSSSRWAGSVTSNTHDQWGLSRRAQHAHLQSLGAGISMVRHRLSLPVGEKGSRGKPGGYRSKHEWFTKTRRLAILEGEFERVTAAREAGKVSIVRGGRKLLNNRHNLAAAHLTAEQWRDRWDAARWFLTADGESGKRLGNETIRVTLDGEISIKLPAPLAEYANAPRGRYVLAAKVTFPHRGDEWRDRIEGNRAVAYRIHYDVERGRWYLDASWTRKELPVVPLDALRAGGVIGVDMNADHLAAWRLDTHGNPTGNPRRFDYDLTGTAPHRDAQLRHALTRLLHWAKATGAAAIAIEDLDFTDSTTREKHGRKKRFRQLISGVPTSKLRARLLSMCAETGIGVIAVDPAYTSLWGGQHWQKPLTTPKRPVTRHQAAGVAIARRALGHRIRRRTAPPRQHQSDAGGHRTAQARPGDRRREGNRPRVPGPRTRSDGAERGRNAATQNTQNRSGCSAEYEFWQQDSLPLSR

SEQ ID NO: 51579 - protein, 367 aa, unknown
  TnpB Polypeptide
MLRTISIKLLVSTQTHDALDAVRYAFANACNAIVPYAKDNRIFNNVKLHHLCYYDIREASKLGSQFTCNAIKAVTGKYKALKLKKYQAVPHIQFRPKSVHYDKKTYTLKNDNTVSLSTLGKRVDAKLIWGKHQKALFDKGLPKEAELIFKNGTWYFNLVVELTIPERSPSNKVMGVDLGENNIAATSTGKLIGGGKLRYDRDRFLAIRRRLQRNGSQSAKQLLKRLSGKEARHVKQVNHQVANAVIAEAIEHNIGVIALEKLTNIRKRIKAGKRVRARLHRWAWYQLQTFIEYKAQAIGIEVVYVNPAYSSKTCSKCGAIATRNKHRLTCSCGNRAHSDLNASQNLAWLGETAVSSRGAVNRPNVAA

SEQ ID NO: 51580 - protein, 441 aa, unknown
  TnpB Polypeptide
VQIEAKNYHRRVGLEAPYFSAGRKAFSGFSRLSIFFCTSSHCSDIIVAMEQVLTIVCRLQPTPEQAQKIEATLSGFASACNFINANVDPKLVNNVRVQTLIYHQVRSQFGLSANLTVRAIARVCANRKTAKLKNKPVKEFRATSADYDARIFAFREKDWSVSLTLIGGREHIKMAVGNYQIGKLKGKKPTSATLCKHKDGKFYIHIQIKEEVPKPHVQSEVLGVDLGRTDIAHTSEGDNWNRQQLTKVRDHYSTLRAVLQQKASKGTRSSRRRCRELVKRLSGREKRFQAWVNHRISTRIVERAKSLSACIAIEDLTGIRERTNQQPRNKTERRRSNSWAFYQLRQFLEYKAIRAGVRVWVVPPAYTSQTCHKCLHIHPDLAQSYRNGKQFKCGHCGWEGDADFNGANVIALLGAVVNQPRGSGLFCSLVEHNRLRATESP

SEQ ID NO: 51581 - protein, 338 aa, Halorubrum sp.
MHYAYRFRLNPTPGQHEQLDYHRDTCRQLYNYALNKFEQIPDSAGTLNQRVRQIRDQLTDLKEWWTELNDLYSTVAQAAVMRIEDSIKALSELKEWGYNVGSLNWKAPQDFRSFTYVQSGFEFDSKNGQPVLLLSKLADIPIVNHREIPDDVTIKEVTIKKEPTGEWFASFAVDGKQIPEKPTGPERCVGIDVGILKYAHDTDGTAVGSLELSDERERLERAQRDLSRKEHESSNWEKQRKVVAQRHADLKRKRRDFLHKLSNYYATEYGLVAVEGLDAKGLVELPGNSRNRASAAWGTFKRMLEYKCDREGTHFVEVDPKDTTKECASCDVKTEKPL

SEQ ID NO: 51582 - protein, 396 aa, unknown
  TnpB Polypeptide
MIKAMIKTIRVMLIPNNKQNTKLFQYANTARFAYNWALGKEKDNYKNGGKFIFDGDLRKEFTRLKKTKEYSWLNDVSSNVTKQAIKDACDAYKKFFKGYSRFPKFKSSKYSTPSFYQDNVKIKFTNTHVKVEGFASSKKKNKQRLNWIRLAEHGRIPIDCKYINPRIKYDGLNWYLTIGIEYEDSDSIPSNDGIGIDLGIKDLAICSDGNKYQNINKTQKIKKLEKRKRKLQRSISRRYEKNKKGGRYCKTSNIIKSEKELLRLNHKLTNIRQNYLHQITFEIIKREPSFICIENLNVSGMMKNKHLSKAVQQQKFYEFRRQIEYKSAWNNIPVVIADRFFSSSKLCSCCGSIKKDLKLSDRIYKCECGNVIDRDYQAALNLKQYGENVLREQSVA

SEQ ID NO: 51583 - protein, 397 aa, Ruminococcus sp.
MCYAASKLWNVCNYERQHYKETGIEQYPDWYYQKKAHKENLWYKQLPSQTAQEVCKLLDKAWKSFYALKRSGGIETPRLPRFKQESIPITYMQMGIVHERDTGRVRLCLPKALKKYMEETYQIHENFLYLENKIFRGMDQIKQLRIYPPEKGNCKIIVVYEVPDQEELPQNGHELAIDLGLHNLMTCYDSENGKTFILGRKYLELERYFHKEIARVQTQWYGQQSGKGVKHPVTSKHIRKLYKRKQDSVTDYLHKITRYVAEYCREQGITCVVTGDIRNIRREKDLGHRTNQKFHSLPYNRIYIMLEYKLKRYGIRFIKQEESYTSQCSPLSPKVGKRYAEPSKRKERGLYRDGNRTYNADAVGAYNILRKYHSVSGVKKELSVTGLKTPEIIKVAV

SEQ ID NO: 51584 - protein, 396 aa, unknown
  TnpB Polypeptide
MSRYRLLPSPAQEAVLRHHCAHARYVWNLAVEQHLHWHPGRTSPPGYLEQCRQLTRARAEHEWMREGSQMVQQQALRDFAQAMTAFFDPENPAGRPSWRKAGRDEGFRIVAVKPSEVRRLSRRVGEVWVPKVGWVRFRWSRAVTSGVKSYRVTMDRAGRWHVAFAVIPEPIPAPGNGEVIGVDRGVAVSAALSTGELLRVPGLTARERKRLLRMQRKLARAKRGSNRRGRVRLVIARLKARETDRRKDWAEKASTDLARRFDIVSVENLNVTSMTHSARGTAGAPGRNVRQKSGLNREIMRSGWGLLVRRREDKAPGRVEKIIPAFTSQRCSACGHVDAKSRERQACFVCTACGFTCNADVNAARNIAAGHAVTARGGFRDAGPLNREPHLLLQSA

SEQ ID NO: 51585 - protein, 189 aa, Thermus sp.
LGTNPHFLVTSEGEMVQAPRYLHKAQHKLAIAQRDLARKKRGSNRYEKARRQIAKLHRKIANQRRDFHHKIARRLVNRYGAIVHEDLNILGLGRSHVAKGVHDAGWAQFLRILAYKAEEAGRRVITVDPKYTSQDCPVCGHRERRPLWVREFTCPACGASLHRDVAAARNILAKAWTGPSGTGPAWAVP

SEQ ID NO: 51586 - protein, 433 aa, unknown
  TnpB Polypeptide
LEEQSKTLTKTVILDCYADKYARRGLKEIESAYKEMLVEMVEYAVKYKASQETLHSVFYEKFREKYPWLPTRVIKGAYRDAVRRAKSFRERRRKGKVYKDKPEVRRVTITYSDSQDWALEGGVIKLRTHGGWVELNYRNHKQLHRYLYSGWRLASELRLKILGKKIIAYLSFTRELEASYNPRNTVAVDVNENNVTVALFKDGALADVYRVETRLGEIVIAYSERRKRITRGNSTKIRGVRKKLKKLREKERKLDILRKTAKFIENLAVENRAVVVVGNINEKAKERMEEDANSKLRHRIHQWSVRKLVELLDGKPVHVIKVSERGTSSKDPFTGKRINKRFEPLVIRTAVKGLKKVKVLKIVLRITKVSGRILERDVVGAVNIGLKYLNSNGSPMALGSTCTHEVWVKLMNPHRGTTPLTEIQIFTNTIKHR

SEQ ID NO: 51587 - protein, 565 aa, Mycobacterium sp.
MGERRALRRIGDPVVAVAPAGVRVRTRIHLTDTEAVVLGAIGAFLGSVYRAELTARVELGRLDRPCHGRWRVERKQAVTAVASSRWAGAITRAVEDQYQLGMRALSAHVADLRQAVEVLEQRCALRPGQQDCMPTARGLRRRSGYRSANERFAKTRRLAVLRARLVVAEGALSSGRPSITVGGKRLWRNRNHLAEADMTAQQWRARWDAARMFLTADGESGKAGGNETIRVDETGRLRIKVPAALTAQYGTHLNIGAQVAFAHRGAEWAERVGGRRAVRYDISYDSSRGRWYLDASWKQDVLTAAPSIEDLRTGPVLGVDLNADHLACCVLDRSGNPVGEPITIPLDTAGFAASRRDARVRAAITALLDTAANAGCAAVVIENLDFADARAAGRETMGRGTRGKRFRRAVAGIPTARFRTRLTSMAARRGIAIIGVDAAYTSKWGAQHWAKPLQQQTSEPVTHHHGAATAIGRRGLGLRIRRRPAGPRTRQRMRVGTPPARPDQQPDHVGRHGSSDPPRRTRCAPVHRKTPASRGQHRSGRDRAAPTPTAAHSQGTVGDAGHGME

SEQ ID NO: 51588 - protein, 396 aa, Nonomuraea sp.
VTVRRSFKFLLRPTVKQAAALAACLEDHRTLYNAALEHRRTAYAKAGVSIRYGDQSADLKHIRADDAGGQDRWSFSSQQATLRRLDKAFRAFFDRVKAGRTPGFPRFKGRGWFDTVEWPKDGDGCRWDSQPEHPSATFVRLQGVGHVRVHQHRPVKGQVKTISIKRESRRWFVVLSCDDVPAEPLPATGAVAGIDMGVASLVTTSGGDHLANPRHLAATADRLSDAQRDLARKKRGSKRRRKAVARVAALHAKVRRQRLDHAHKAALALVAAYDVIVHEDLRIANMTRSASGTIDAPGRNVAAKSGLNRSILDAGWGVFLAVLAHKAESAGRELIAVNPANTSRTCARCGHVAKENRLTQAVFACTACGHAAHADVNAAINILRAGLALREAAQAA

SEQ ID NO: 51589 - protein, 487 aa, Sphaerisporangium sp.
  misc_feature (78)..(127): Xaa can be any naturally occurring amino acid
MVRQARVHVARLDLDKRQSAVLDGQAHAARALWNLLHEFTTFRQGRLASLKECDAAIRQARREIEWMGQLPAQAAQAXXXXXXXXXXXXXXXXXXXXXXXXXXXXXXXXXXXXXXXXXXXXXXXXXXKAVLKTYRQAWANFFNPDHPAKRPTFKGRFRSRMAVDVPQGRDLQITRINRRWGAVNLPKVGRVRFRWAKDLPGVTKGGPSGRITGARLVKQAHGWNIVFRTELLVSAPVPHTGPKAGMDRGITVPLALSNGEHLRHGPWLTSGQSERLLRLERKSARQRATREKGNPVSNRERRTYDQIARLRATAKRRAVDWQHQTTTDLARRFSVIVVEDLKITNMMASASGTVQEPGVNVAQKRGLNRSIAGQAWGRTVELLTYKTAGRGGLVAKVRPHGTSQECHRCHTTTPGSRETQSRFACKNLACGWIGNADTNAARNQLHRYNSAAGWAVTGRGDSGIPGPVKRQASCPTVSPAPALRAAA

SEQ ID NO: 51590 - protein, 519 aa, Richelia sp.
MQVNRINDMRAFIQLSHRNKSVNIKIICYSDTNIFIASQGSKGGDMYMATRRQTFRLYPNKAQERQLFKARRMHQYVYNACLAGRKYAWEIESKSLKYYDQQNKLPEFKKDNPEFAVLGSQTLQATVKRVDLAFGAFFKGLRKRPKFKPLRNYSGWTYPGFAGWKVYTNGRHGKVELRDLGLSIRMRGKTKQWGIPTTLTIVYRPSSDEWYASFTVDVKSVEPKFGSRSELEYESIIAYDLGTTTALTTYDGSEYNELSNPRFIRNSEQEIKRKSKMMRRKTAPNSKLNTKPSKRWRKSRKAVSKLQRKVSNQRKNWQHQVTSDIASRYDIGVTEELQVKNMTRKAKKGSKMGRPRVGARRKGTRPISKRQKAGLNKSVLDVGMSALNKMISYKIEAKGGLLLILDTKKLKPSQRCPNCGKVHKQWADLSNRYHVCHSCGFEIERDKGSALVMYQTALSRQPGDGIALVDVDARSSTSKKCSRKDTGSFKQLQQRKRSKLSKSSVEVRVSETPSSYEAG

SEQ ID NO: 51591 - protein, 463 aa, Halodesulfurarchaeum sp.
MKRTNTFAVRPLSDTGEQLLRDLLDASAALWNEVNYQRLMRYNDEDGFDGGVWDADTGRLEGKYKSVLGASTAQQVIRKNSEAWRGFFDTKNKYHDESNTSVTEHPEPPGFRGNEDDGRVLKGVIRNTSYTVEWGERSRLEILVGSELKDRYDHTGRLRLEIAGDPNWPEYEKQGRLDLWYDETDGTFRASQPVTLSAETRDTPLADEKAALDIGANNLVACTTTTGEQYLYEGRELFQRFRETTREIARLQSKLPERRSLSESRKTESSGRLREGRYSSKRIRRLYRKRTRRRDHAQEALCRDLLERLYAEGVDTVYIGGLTDVLERHWSVRVNAKTHNFWAFKQFTDRLVSTAEEYGISVEVRSEAWTSQECPQCGGTDRTTRHQDTLTCPCGFEGHADLTASETFLKRYTNKEVRPMARPVRLEWDSHEWLELSHSHRPKQQRTDPSTVHRDGNVASGES

SEQ ID NO: 51592 - protein, 404 aa, Halodesulfurarchaeum sp.
LVTDEQRDLLEDTITEWKRGCQLATDMAWGKCNAKSDVQPLAYDDVREQTDLSSQHAILATHQAAQAITGCIERRSKGKKATKPTFSAPTVKYDTRTMTLFEDDTVSLATTESRVRCELALPEDDDGYQRQYLDSEEWNVTESTLTTRDGDFFLHIGFRRHKTDTERDTAEDGTVLGVDLGIENLAVTSTAYFFSGRELTHDLREFEKVRTGLQQTGTRSAHRTLEQLSGRELQYIRDVLHRASNAIVDEARRYECDVIAFEDLTHIREQTGASWGHKWAFRTLYEQVDYKAEAVGISVKQVGPAYTSKRCAECGFTADENRSTRNDFCCQKCGTEANADYNAAKNIGMRYVRRGQQSSRRMGDSQLALKSGTVTPNGGFTAYPDGFEAEFTDKPHPPRAKSSD

SEQ ID NO: 51593 - protein, 361 aa, unknown
  TnpB Polypeptide
  misc_feature (186)..(189): Xaa can be any naturally occurring amino acid
MRRTYHELLEGGGMDMLKGYKYRLHPTPAQAEFLIKTIGCARFIYNKLLEDRIAIREEAKAGIVTRRNPATPASYKPLFPFLAEADSLALANAKLNLDTAFAKFFAGTAGFPTFKSRRRSRASYTTNNQHGTIRIENGKVRLPKIGFVKFEQHRPFEGVIRSATVSMTKTGKFFISILVEQDDEPXXXXTNDAMVSEKIDNPRFLRKSEEKVKKAQRALSRKKIGSKNREKGKLLLAKKHEKIANQRKDFLHKLSRRIVDENQVIVVETLTSKDMMKNHKVAKSIADVSWYEFVRQLEYKSNFYGRTLIKADPWYASTQICSTCGVKGEKKKLDVREWTCACGAHHDRDINASLNLLMLAD

SEQ ID NO: 51594 - protein, 234 aa, unknown
  TnpB Polypeptide
MRRTHHDLLEGGGTDMLKAYKYRLHPTPAQAEFLIKTIGCARFIYNKLLEDRIAIREEAKAGSGTRRKPATPASYKPLFPFLAEADSLALANAKLNLDTAFAKFFAGTGGFPAFKSRRRSRASYTTNNQHGTIRIEDGKVRLPKIGFVKFEQHRPFEGIIKSATVSMTKTGTFFVSLLVEQDDAPWIPAENKVGIDLGLKHFSTDAHQGRPLVRIDADLFFLWRQRREEDDGCP

SEQ ID NO: 51595 - protein, 392 aa, unknown
  TnpB Polypeptide
MIVTQSVRLFPTKKQEKYFHKACSARTHIFNKAKEWDDLHYEETGERLTKRELTELIAGYKPEFHKDLPFTIEHHTYRDGMHAYFDARRRAFAKKGGWPKYQSNKYRRVKSFYVRTDGNREFSTIVEDSPFVSIAGLSKVDPNRKYVLSDSQKRIPYYSLGIKSARVVWDGKYWSLQYTVDVDLPPVDSYTEPIGLDLGLANYVTDSNGITYDSVVSTPKYQRLQYRVKHYQRKLDRQRTAQKSEGREVPSKGYWRTRTKLQKVERDLAEYKKSFEISLAKEILKDNPSTVVMENLSIKVMQSKASKGLSSSIHRARWYSLRLRIKHEQDKIQGTFILADKYYPSTRKCSSCGAVKEDSLPLSVRVYSCSGCGMKLDRDLNAALNLKSLAYA

SEQ ID NO: 51596 - protein, 404 aa, Streptomyces sp.
MIRAYKFLMRPTMGQQIALGEMLLDHCSLYNGALQERRDAYRHTSKTSIKYGQQSAQLKDIRAFDPESQGRWSFSSQQATLRRLDKAMQAFFRRVKAGQTPGYPRFRGVNWFDTVDFPKDGDGCRWDSTPHDPVTRVRLQGVGHVKVHQHRPVVGKVKTVSVQREGRKWFVVLTAEQPQPEPLPKTGSVVGIDLGIANFLADSGGGFVPNPRHGRSAAAQLEAAQQTLAKFPRVRRDKRTANHRRAVEKVAKLHGRVRRQRLDHTHKTALALVREHDVIAHEDLKIRNMSKIPAPKPDPDQPGSFLPNGAAAKAGLNRSIADAGWGVFLAILNAKAESAGREVMAVDPRNTSRRCPECGHTAKENRPTQEKFHCVSCGHTAHADTVGALNVLRAGLVRREAQPA

SEQ ID NO: 51597 - protein, 476 aa, Acidimicrobiaceae sp.
MDQLSRPRAVLVPLDPTPAQAELLRSYCGASRFAYNWTVATAKENIDTRTKERRAGIDEADLTKSLSWSTWSMTPLWNSVKDDVAPWHIDVTMHAFRSGVTNATIALKNYDESRAGVRKGEMMGFPKFKKRHSKQSFTLIEFNRPGNWLSDDSRHVRLILPRSATDPRIARRREQLQWIHTTESLRRLKEKVASGEWTIQSVTMSFTDGRWHASFSVRQFVNPAPRIVRILPSLVGVDLGITHLATLSTAVKGLSDEHGHVSNPRHLNAELDRLEKLDRQLSRCMKGSKNCANIRLSRQRLYGRITRTRNLYLHRLTTTLAECFETVVLEDLHVADMVTKSKKHTNSASSRSILDAGWGELRRQLNYKTEDRGNRVVMVNRYFPSSKKCSHCGETKAKLALSERVFECSNCGISLDRDVNAARNIRDEGIRLLTNEASAVAGHQPETLNAVSRDRETKPPRRGRGDRYQSRTTQPS

SEQ ID NO: 51598 - protein, 177 aa, Phascolarctobacterium sp.
LTASDGNDIEAPLFFKQNASALAKANRNLARKQRGSNNRKRAKLALERLHEKTANQRNDFHWKLANYLVGEYADICIEDLNLKGMQKLYGRKINDLGFANFVKILEYKASRTGSKVLKVDRFYASSQECSSCGFKNIQTKDLRVRHWTCPNCGNAHDRDRNAATNILFEAMKLHDIA

SEQ ID NO: 51599 - protein, 342 aa, unknown
  TnpB Polypeptide
MARKTRKEYVAVNGKLLIANNIAKSKLLYTMRLFRDAVKMAHYLMRKGLVWRDIEKRLTSFISNAHYGHSAYQRAKLWKDQPYLKLRKKFLFSVGKSAEKGNRNIRLIPSDNCFIVKIKVPHADGRHEWIECKAKFGKRYISLLKKLSEENVSYGVEIGEDYKIHVYVPLELYTKYLGKKISRKGKSLHIAGFDLNVDRINMVIINSSGELLDFKTKHFPEVTQHGFPREKAKDIRLKALSELIDYACYHNVEYFVFEKLGKVKRKRTSNKNVNRKLSKFPKRQLLTHAKIMVVKRGKKFYEVNPAFSSQDAELIAKKLRLDMHTASAYILAYRALKSINVY

SEQ ID NO: 51600 - protein, 434 aa, Ruminococcus sp.
  misc_feature (103)..(111): Xaa can be any naturally occurring amino acid
LDEVMEQKIKTIIITHKDRFIRFGYDWFEKFCMKFHTTIVIVNKEELSSQEELVQDSVSILHVFSCRLYGLRKYKKQIERDEEIVKELQDGNQSHTGAENQDXXXXXXXXXIPNNPDKAWIKEAYSKAVKRSIEDGCTAFTRFFKHQSDFPKFKKKGKSDVKMYFVRNNPKDCVCERHRLKIPTLGWVRIKEKGYIPTTKDGYVIKSGTVSIKADRYYVSVLVELPDNKTADNSNEGIGIDLGLKDFATVSNGKTYKNINKSAKLKKLEKQLIREQRSLSRKYENLQKGESTQKTNIQKQKFKVQKLHHRIDNIRTDYINKTIAEIVKTKPSYITVEDLNVKGMMKNRHLSKAVASQKFYGFRTKLQAKCNENGIELRVVDRWYPSSKTCHCCGTVKKDLKLSDRMFKCSCGYVEDRDFNAALNLRDAMTYEVA

SEQ ID NO: 51601 - protein, 144 aa, Ruminococcus sp.
METDKDHIHYMIETEPTMSISKIVNMMKSYTTYHIWKRYPQYLRKHLQIKNMVKNHRLAKPISDVSWYELTRQLEYKAKWNGRKYVKIDRSYASSQLCSVCGYQNTETKNLSVREWACPVCGTNHDRDINAAKNILEEGLRQIA

SEQ ID NO: 51602 - protein, 404 aa, unknown
  TnpB Polypeptide
MLVKGVVFYLESDLPTEAMFLLEDFRLAVNSSIRAGLQARVTSRNALVKIAYKDFRLEHSRMYSQHLVSAFEVACGVLKNHRRRVRKGVTGRIPFVKRLMMKAENQAYKLDRKSGIIDLPIRAGCHIVLRLIVSQYHRKYLDDMTLSLGSLTVLPDRVMVAFRKDAPKPYAPNTVISLDTNERSLDGVFVEGDVANAVKADFPEVAIIQQRHHDRRKRLQKEKAHDRRISKELCRREGTREHHRIDYMLHQVANSVLKFAEERRSAIVLEDLTGMRPKRSKELNRRLSIWPRRRLHQIIEYKAQWKGIPVVKVDPRNSSRTCPTCGRIQDSRMGAEFVCECGWHLDRHINASINLLQTAISKGMAGGLRFNPGAFQHDVMMILYEPAMAARSEPNGTSGIVGVT

SEQ ID NO: 51603 - protein, 502 aa, unknown
  TnpB Polypeptide
MDITLIKESNMKEKETYGIVELRLQTNKYQVKQLNDIMYSYYEYYKYVLNKAKSQLKYMKRNRKRQQVLRQLKRWHIAKYTPTKEQKKHNTAQLKEITKSYHIESGFSFRTWVYNINKDKHKHLSSDIRGLIIDQVWKGLDNVIYGKGKKLGFTKFSDFTIVTKNYTSPFKISNNHIVSRAHNFNIKLAPFDDYRKEIMNNRELRYIRIVPKVKKNHTDYALQITYKGAVPLNNRKLGTNKSLGIDIGPSSYAYVTDTEARLGALFGDADKYNKRVEIIQKKMSRLDELANPDAFTPTPKGHKYIKGHRLHHTHHWYKLRRELQYIYRLKSQQRKFEFEALANHLISLSPNIKMEKLSVQGWASGLFGKSIGNNAPSMLMEIIKRKLAYHNVEPTIINTGKAKLSQLHHDTMQYEKSQLNERSKYIKEQHVQRDLYSAWLASHVTEDLYTVDKDIDNYFNAYLLLQEEAIQYLTNNLNVQLDSFGLRANNFTTKIELTQVAS

SEQ ID NO: 51604 - protein, 236 aa, unknown
  TnpB Polypeptide
MSTKTVKRAYRFRFYPTTEQENMLRRTLGCCRKVYNMALDARSTAWTLHREKVGYADTSRMLTAWKKTEEHSYLKEVSSVPLQQSLRHLQAAFKRFFDKTGSYPRFKAKHEGGSATYTVSAFTWDWERRALTLAKMHDPLPVRWSRTLPRKSRPSSVTVSLDAAGRWHVSILVEDEIRQHTKNGNMVGIDMGLEHFAILSNGEKIDNPRYLRKHLRKLGLAQRKLARKKKGSSKLS

SEQ ID NO: 51605 - protein, 201 aa, Raoultella sp.
MPPDDISSPAFASLNLYHWPIAASTVGIDVGLKDLFVTDTGFKQSNPRHTAKYAARLALLQRRLSKKARGSKNRARARLKVARLYAKIADCRLDALHKATRKLINDNQVVCVESLKVNNMLRNPSLSKAIADASWSEFVRQLRYKGEWAGRSVVAIDPYFPSSKRCSCAVSPCKKCLLMFVNGTALNAAQTMTVTLTRPGI

SEQ ID NO: 51606 - protein, 180 aa, Raoultella sp.
MRRAYKYRFYPTPGQAELLAQTFGCVRFVYNSILRWRTDAYYERQEKIGYTQASARLTALKKEPEFVWLNDVSCVPLQQALRHQQTAFSNFFAGRAAYPAFKSKRHKQTAELTASAFKYRDGRLYMAKCKAPLDVRWSRELPSAPSTVTISKDAAGRYFVSCLCESEPVSLADRRFHRRH

SEQ ID NO: 51607 - protein, 411 aa, unknown
  TnpB Polypeptide
MKYSHRYHAYPTEEVAERLEYHIDVHRQAYNYTRYEYENVDADNIGSAYKHHYRLPDWKKQFPVFSEVNGKALQRTVTRFYQNLSNLSEKKQKGNKVGKLKWKSPIEYQSMTYSQHGFKLNNTSGRHATLWLSKIGDIKIRCHREIPGNVDIKEVAIKKEITGEWFVSFGLETDIDDLPKKPDVDSLDTSNSVGIDLGILNYIHTSDGKTVDWLDLEDDYERLRHEQWKLSRKENGSNNYEKQRVEVAKIKRRIRRKVLDYQHKITTWLIREYDAVFVEDLNVQSMLQGDRNARNKQNAAWRQFITLLEYKADLHGCHVVQVPPEGTTKECASCGVETAKPIWVREHSCPSCGFKTDRDANAAMNVLKRGFSELGLGWPEDTPVETVTATDTTQFESVSASHVVETGSLRG

SEQ ID NO: 51608 - protein, 348 aa, unknown
  TnpB Polypeptide
MIEEIIELQLTKRQKNQLKKMEREYQKCYHDYHSDLIGIELVAWGHDYLKTLSLDMITSIIHGNDIFSCTANAYKDGEIHIKNIIIPYQKNELYDIQCIYFFFLLNHPYMKVVLDQKKKKKYKNILSMDVGVDNLGACASSFGDTFLMDGTKLKAWNYYYLKRVNNYMGICKESKHISKLKEKNYRYILSYCKKASDYLQRYCLLNQIDLFLIGKIPIKKKLSFEKFMSMEFKRDNVTSFSMSLFIYNVKEMCWKNGIECESVPEDYSSKCSFYDGESVKLHDTYMGKRTTRGLFRTGHYYYVNADVNAAFNFYRVYIKQNQRIQSAMNWNDCKQSLRLHPVRIKIMD

SEQ ID NO: 51609 - protein, 396 aa, Peptococcaceae sp.
MRRLFFMWRGGENVEENTEQVVTIKLKLFEPTKTKQDMYQTMADRTTDFANRYLGVEKPMRPKSSADAKLYTEPLPAIVLNQAIRDIEAKKNAKSFKRLWPDFNNQNFRVEKETLQDGGAAWKVSFPTLEKRVGVPIQVEKYQIKYLELLLSGQAKQGTAQLIKCGRQWYIHLALTVSVKAEKKPPKYMGVDLGLIDLAVASILGSTLFFSGAELAYVRRHYAELRKKLQKKGAHKALRKLGNKEHRWIMAINHTISRRIIEFAKAHGVSVIRLEDLRGARWTKSQRKKQRKDAGRSLHSWAFFQLRQFIEYKAALAGIEVELVNPELTSLTCSRCGEVRTSRPAGRWYTCPRCGKVKHIDANAADNIAQAISGLSEEKRAKTILKPKTRRRTTAA

SEQ ID NO: 51610 - protein, 431 aa, Malonomonas sp.
VEPDQVIKARQVRLKLSPEQEDLLREYQLEAAKCWNEILVIARDFYQQNDGKWISKNDLQKALKNQFKLHSQTVQALTDKFCANRKTTAELRRGGDKKAKYPYREKKFLTIPFKQMAIKRSEEQCVRLTLSKGIHLDTKVNVEGDINTAEILWSGCGYTLSYTADFPLAEESGVVLAGGDIGEIHPIAVCAEDGEGLVVSGREIRSIKQLRNKALARLARMISRCKKGSRRFKKLVRARARLISKTDNQLRDLFHQATRKAINWCIEKSVVELIIGDPQGVEQKTKKKKRLNRKCRQKVSQMEYGRVKDYLTYKAKEAGIKSCFVNERGTSKECPECGLENHVSGRIYRCKECGFEAHRDGKASFLMIRKKHKKLKTPDKFTMTHTQCVPKYRKRRLRERLKPPACVVGPGVVHKSLGYIVDPLDAAFSSI

SEQ ID NO: 51611 - protein, 469 aa, Lactobacillus sp.
LAKISVASFQWEMEAALFVYDFFSIRYEKRYKVNGVNNQREHVMVKLPKTQIGGGFMRDFGQLPYRFGIKVRIYPSDRQKQLIKRNAEAYRFVYNEHHAIQQRLEHLHQIKHPPTKVHTLIQYLTKSLDYQRMALNHPFLTDSRIDAHVRLQAIIDYHNRQTAYVLGRAKRPHFIRKSYTWRYQLACQYHHRSHGSLRNGSIAFTDAHHVTLPIIGRLRVAGSQHRLLNRETPIQINLVTLTKDAINHYYLSLQLSSPAPFVQHLDAQPHPVGIDLNTANFLTTSTGRTVASPHFNRRLSSRFRRAVRRLNLQRHLAQKERRPLRTAKNYQKQRQCVAKLLIKLHQQRENFLQQLSTQIIRHHDVVVAEELRGQDTARNYAMSWRFRDPGWISLLSMLHYKAQLYGRTFITVDPVSTTQTCSHCGYVLHGQQKLTCRERTWWCPHCLTFHRRDQNAAQNILNRGLLCLA

SEQ ID NO: 51612 - protein, 428 aa, unknown
  TnpB Polypeptide
MRAYRFALDATPGQRRALASHCGAARVAHNWGLRLVEYRLEQRHAGQDVDVPWTLPALRREWNRAKQEVAPWWAENSKEAYSSGLDGLARALKNWADSRAGRRGGRPVGFPRLKKKGRTRDTCRFTTGPLRVLSDRKHVQLPRIGVIKTHESTRKLARRLEQGTARILAATISRHADRWYVSFTVEAHCPIPPTNGRSNVVGVDVGIRHLAVLSTGPSFIPNPRALDQLLSKLRRLDRAVARRQPNSKRRARARRQRARLYARAANVRQDALHKLTTGLAREHGAVVVEKLNLAGMLHNRRLARALADTGMGELRRQLAYKTRWYGATLVTADPFYPSSKRCSGCGWTKAKFVLAERTFRCEVCALVIDRDLNAARNLARLAEPVAQSGWETVNARGADVRPDMSGRSAVKREAGTGSGPDQTGTVDA

SEQ ID NO: 51613 - protein, 376 aa, unknown
  TnpB Polypeptide
MKLMLQLQLLPSADQKADLLATMGGFNAAATFAAKVGFEAGVFGQVTLHRLAYYAIRERFGLSSQMAVRAIGKAVECFQRDKTKCPVFKPRSAVCYDQRVLSFKGLTEVSLWVMTGRLRIPFVCGAYQRERQGRIKGQADLVYRGGKFYLLRTIDLPESAPITPVDVIGVDLGIVQLATDSDGNSPSGEAVEKVRRKHHRNRKGLQSKGTKGAKKRLKALAGREAHFRRHTNHCISKAIVTLAKGTDRGIAVEELGGIRDRTQFRKRDRAKHSGWAFAQLRAFLEYKAKLAGVFVVAVDPRNTSRTCSACGHVAKANRKSQSSFACVQCGFSLNADLNASRNLRVLGLGACKRPSELAVVDSGWNPDEISRKAAAL

SEQ ID NO: 51614 - protein, 399 aa, Nonomuraea sp.
MRTAYKCRAYPTPEQVGVLNRTFGCVRVVWNRTLAWRHARYRNERAKTGFIQANAHLTAMKATDELAWLNEVSSVPLQQAIRHQQMAFTNFFAGRARYPRYKSRTGRQSAEYTRSGFRYRDGRLLLAKMDAPLAFVWSWPEVDLASIDPTTVTVSRDPCGRWYVSFAVDAAAPDRLPPSGGVVAVDLGVKDFAVTSDGDKIPNPRHLARRERNLARYQRRQARKTRGSSNRRKAGAKVARAHRKVRAARTDFLHKTSTRLVRDHDVIVIEDLAVRNMVRNRTLAKAISDCGWGAFRRMLEYKAARHGRRLIVVDRWLPSSKTCSVCGHRLEQLSLGMRTWQCPSCGTRHDRDVNAAKNILAAGLAVTACGGDVRHSGTTRVRSPVKQEPRPAKVGIPRL

SEQ ID NO: 51615 - protein, 326 aa, unknown
  TnpB Polypeptide
VATESLKSAITIKGKRKGLKSRCPQSNNPAIRYDKRSYTVWLDRDEVSLATIQGRQRFKIKVPDYFKQYLDWKVTSANLKYDKKLRKFFLNITVEKDVPDAEATDFLIGVDLGLRKLAVVSTPDGKINKFFDGGHIRAVSERYQALRKRLQPKGTPSAKRHLKKLSQREKRFRTAINHKVAKEIVELVPAGGVIVLEKLKGIRKRIKTSKQNRRWIHSLNFAQLQRLIEYKAQTKRIKVVYVDARYTSQKCSRCGHISRKNRRDQAHFVCERCGFRLNADLNASRNIVKGYLASLEGKSGHEAVYPSVWGAVNRPDVGSVGCAMHG

SEQ ID NO: 51616 - protein, 367 aa, unknown
  TnpB Polypeptide
MLKAYKYRIYPDNEQKIQIAKTFGCCRFVYNQTLAYRKEVYEKEKKSVSKTDCNNYCNRQLKKEYEWLKEVDKFALTNAIYNMDAAYQKFFKEHAGYPKFKSKHDNHKSYTTNFTNGNITVDFGCNRVKLPKLKGIKAKLHRNFIGQIKSATISQVPSGKYYVSILVETEHVELPHINQNTGIDLGIKELCITSAGKKYENPKIIRKYEKKLVKLQRQLAHKEKRSQNYYKTKKKIALCHEKITNTRKDYLHKMSHEIISENQVIVSEDLQIKNMVKNHRLAKSISDVSWYELTRQLEYKAKWNGRKYVKIDTFYASSQLCSVCGYQNTETKNLSVREWTCPVCGTNHDRDINAAKNILEEGLRQIA

SEQ ID NO: 51617 - protein, 549 aa, Streptomyces sp.
MGGVVVCGVRELAASFVVPGPCGVTVRDRLKHLTAQDEEVLRAVGAHQGALASRDLKARCADGLNHGAEPWATRKRELTKVSSSRIAGAITKATHAQWALARRCQSAHIRSLEAGIRMLTHRLSLPVGARGTKRAPGGYRSKSEWFHKSRRLQALEARHAAAIADWQAGRVRVVRGGKRLFNTRHHLAEAGLSQGEWRERWEAERWFLSADGESGKRFGNETIRVTPTGEVSIKLPAPLAHLANTSHGRYTLTGTVAFAHRGVEWADRIGANRAVAYRTHYDTTRSRWYLTASWQRPVVQTIPLEAARAAGVIGVDTNADHFAAYLLDPHGNPVGEPRRFGYDLTGTAPHRDAQLRHALTQLLHWATQSGVTAIAIEDLDFSADKTREKHGRRKRFRQLISGIPTGKLKARLVSMAAEHGLAIVAVDPAYTSMWGGQHWQKPLTTPRRRMSRHDAAGIAIGRRALGHPVRRRTTPPPHDRSDRVGHRTVQAVPGARRREGTRPPATERAHNARHRTGTPHGTRETSAPKTVRDARSARHWVQDSLLLTD

SEQ ID NO: 51618 - protein, 372 aa, Lysinibacillus sp.
MILAKKVRLYPSKSQEQKLWQSVGTARFVYNWTLAKQEENYKNGGQFISDGVLRKELTQLKKKELSWLKEVSNNVAKQAVKDACNAYRRFFKGLTNKPTFKSKRKSKKSFYNDNVKLKVKDGNLVLIEKVGWIKTNEPLPIGVKYNNPRVSYDNKYWYLSIGIEQETSQEELTDVSLGIDIGIKALAVCSNGAVYKNINKTNVVKKTEKCLRRLQRQVSRKYEMNKEGNRFVKTSNVIKIEKRIQLLHRRLSNIRKNHLHQSTNDMVKTKPYRIVMETLNIKGMMKNRHLSKAMAKQCLYEFKRQIQYKCEKYGIDFLEADKWYPSSKMCSSCGNIKKDLKLSDRTYECVCGHKMDRDLNAAINLAHFQLAK

SEQ ID NO: 51619 - protein, 580 aa, unknown
  TnpB Polypeptide
VRLPDEAQADALRLLDASRCVVNEALTLLWPSLDEFGTDRVGPAWKQVGKYTGSPQYHGDRQWRCESETVGRILRAQAERKKAFDLIHPILSDGFILPKTETRPAGKKRSAIKEAITTLQKSLDEDETSFIKLQNVLEQACNYFLHYDRFPLTYEELQPIPLLCVGQLTYAGDDGGAKGQAHRLAIEIEGEGEELQGVARFRFRHPDERGVWQWRKTDTVIALPRVIIERLKTGKLMAPTLREERKADGKRIAVLDFIVEMEKADLPAWDTVERVLGADWGVHTLLTAIAVDEHHQQVGRPFFLETGGFDGRQARTRHQIDELKQKVARYEHEREALPTDHPKRAWYTEQMRVLRLEIECCWRKYEQRSRALAHLASNVLLLLAGVYGCSLLSMESLKTLKTTGRGKGVRGRWRTYRNNATIRGEIWRLLRYKCHLIGLRFHTEQPRGTSHTCPHCGKPAKTYRSPSDRSEAVKWGRWLWCEACGFNSDRDYCASLNIARLGIAHLLQMKTLGKARACSITDPRVKPVSYTGAGSVLLLPPTGNHPARHVRGKICYCPGWLGSAFLQSSQHKAVFLRLCG

SEQ ID NO: 51620 - protein, 400 aa, unknown
  TnpB Polypeptide
MLKAYKYKLNPSEEQQTLLNKHFGCIRFVYNYFLNERKNEYETNKQSLTYVDNAKALTELKKLEEFSWLKEINSQSLQSSLKHLDDAYNSFFKKRTKFPKFKSKNNKNSFNVPQKIRLKDEKIYFNKFRDGIDIVLHRKFTGDIRQCTISKTPTGEYFVSILVETTHDVLPKTGQSIGIDLGLKDFVITSDGFKYKNNRYTKSYAKALKVAQQHLSRKTKGSNRYKQQKHKVASIHKKITNSRMDNLHKVSTDLIRKYDVIVLEDLNVKGMIQNHKLSKHIADASWGTFIQLLNYKAEWNDKQIVTIDRFFPSSKTCNCCGYINQNLKLDMRMWTCPQCNTELDRDLNASINILKEGYKLISSGTDDNRRGDEIRPANAGTIDETSKILGRSKKPKILKV

SEQ ID NO: 51621 - protein, 426 aa, Natrialba sp.
MNYNYRYQLRPSDALEEQLAWTVDTCRQVYNHFLHRLNRTDDTSAYSEQKLLPSLKKWWNDLKQVHSKVLQKVVQRLYDNLTTLRGRKENGYHVGTLNWKAPGEFRSFTYSQSGFKLKNKSGRTRLWLSKLGEIPLTFHRDLPDDAEIKTVTIKQEPTGEWYAILGIETAKSPPEKPENPEKCVGIDVGILKYAHDTDGTAVESPALSDKRERLEQAQRSLSRKEHGSANWEKQRRVVAQRYADLKRKRRDFLHKLSNYYAIEYDLVAVEDLDAKGLVELPGNSRNRAGAAWGTFLRMLEYKCEREGTYFVAVDPSGTTKECASCGVSTDKPLWVREHSCPACGFEADRDANAAWNILSRGIKQLGEGHSESTSSEPVGSDGLRKSLSDFRTPVETALPVDTDSVSAKRVVEAGSPTLKREPSGER

SEQ ID NO: 51622 - protein, 218 aa, Acidilobales sp.
MKITYERKKAIAQRKGIRELYERYKARERNRARNFRNKLSADLRMLFPNTIHVFEDLDKGDMVSRKRVERKRRKRNHRTPWKRIHKRISGVALTASVDPSNTSRECPRCGYVVKTQEGQIFKCPKCKLKMNRHKVASINIRRRHLEGGKKRKTRMQRFPHSNEPETSMKVELWAGVTPSELSPVTWIPMKRDPEGMKPREEGLSKNIKPNETRTPHNR

SEQ ID NO: 51623 - protein, 440 aa, Glycomyces sp.
LPRVARLNRVSCSITCSRVARFRVRLYPETAQEQFLSRTLGCVRVVWNQVLNWRKERWAKEGTFGSYRDTSGYLTKLKRHPDFEFLREVSAVPLQQALRHQHRAFESFYAKRSNFPRFKSRTHRGSATFAKTAFKIRDGQLHLAKMEQPVRWVWSFDIPVDELAVSSVTVTREPDGSWWAALCVELSEEQTPEPPEPTGKAVGIDLGIHTFGTLSDEEAEPLEAPDLRRKEANRQRYQRRMARKRKGSANRDKERKKVARAYRKERQAREDMLQKATTRLVEEYDTICVEDLHIAGLMKNRRIARHIARMGWSRFRRLLEIKCERAGKRLAVVDRWEPTSKRCSNPGCGFVLDELRLEVRKWTCPGCGARHDRDVNAAKNILAAGLAVLAGKRGSAAPGALPNSAVDKACGAYVRPRGLSPPRQRAAKQETILSDEVNPL

SEQ ID NO: 51624 - protein, 388 aa, Chloroflexi sp.
MLICKAFRFKLRPTPSQEQMFRQYAGACRWVWNEMLHERKETYRATGKSLSMYAQMRRLTELKQQPETAWLNDVHSQVLQEPIKNLHRAFINFFEQRARYPKFKSKRRGLGSFTFPQSVKVEGSRVWLPKIGWVRFRKSREVEGTIKRATIRHKVSGWYLSLLCEIEIPTPEPIPPTDNTTVGVDLGLTEFAVLSTGERIPNPRHLRKLERKLAHAQRAKSRKRKGSCRYRKSAHKVARLHERVANARADFLHKLSSRLIAENQGIMAEDLSVKGLARTRLAKSVHDAGWGEFLRQLAYKAEWTGKTFHRIDRFFPSSKLHMACGTLNDLSLSDRVFACQGCGVLIDRDLNAALNIKHRGLVELSPVGQPGVHARGLDVRPATVGCPG

SEQ ID NO: 51625 - protein, 490 aa, unknown
  TnpB Polypeptide
MKIAKTRFEVNRLQYNACLGECFRRIKRIRNDSRYEEAKDLPKQVNGRSNPERTKIYSTLREDYGFTNRSIQSYGSSLRQFFIREHVGAQEAQVLALRAYDAVNEWFVGKKGKPRFKGNGHGIHSLIVKDGNGDIRINKDGSGITWAGVDYPFELDPNDPVYLWAAIHVATGKLLRVGITKTEIRGRTTLRALLVLDGVPLQRYEVGNEKITLDPGLGYANIVTDTGAYREQLAGQNGTDPGIDYDRKRIRRLQRKLDRQHRANSPECFDEKGRHIKGNCYWKNKTKQSKSSLGTKAQLSEAHRKMAEHRATLHGNLQNRILGLGINGVVEKNNYRSFQRNYGRSVRDRAPGGFITGYIRKAESAGGYVHEGDPRMAAPSQSCVCGARKKKPLSQRVHTCEDCGIGPIQRDIFSAFLWRHIEPDGLLDAPKALEELSRRQDIAVHAASRDYKQQVPPARKRYGRVGGQSTPELFAAKPQNSIPMKNRKGA

SEQ ID NO: 51626 - protein, 413 aa, unknown
  TnpB Polypeptide
MLRAYKYRIYPTDEQKVLFAKTFGCVRVVYNWGLDIKSNLYKEKRETIGVVALTNRMKSELKAEKEWLGEINSQALQMAIRNLDTAYQNFFKKNGKYPNFKSKHDRQSFHNPQHCSVDFKRGVLNIPKAKNIPAVFHRKFKGDRIHDVTISKEKDGRYYASILVDTYENPLPKKPVTEDTAIGIDTGLKTFAVCSNGEEFASAHFLKEEKRKLKLLGRKLSKKKKGSKAFDETKRRIAKVHSRVARKRLDYLHKITHRLTHENQVGTICVEDLNVKGMVRNKHLAYDVSDAGIGMFYTLLAYKCQWYGINLVEIGRFQPSSKQCSCCGYINKTLTLSVRHWTCPECGASHDRDYNASVNIKNFGLATLRMERPEVKPVECPLVDDRASAPKKQRHHEAGKAISKCNLEAAIFH

SEQ ID NO: 51627 - protein, 273 aa, Okeania sp.
MKARFKYRIYPTPGQKYRLAKLFGCVRVVWNDSLACCQEKYQLGENKPTNSELQKQFITQSKKTEDREWLSEVSAIPLQQSLNDLNQAYQNFFKSTKGQQKGRPIKPPDCFVPRNAPRFKSRKSKQTARFTKGGFKVGQHKVYLAKIGKLKIVWSRELPAAPSSVTVIKDCRGDSRIAPTRYFLSFVVEIQPEVLPKTDSSVGIDLGIKTFATFSDGTKVDAPKPLKKRIKKLRKLSKSLSHKTKGSKRYEKARVRVAKFHAKLKDTLVRLST

SEQ ID NO: 51628 - protein, 459 aa, Bacteroidales sp.
MFGNGKIFVYLQAIKNLIYMISIAHKIELKPNNKQKTYFRKAFGCARLAYNWGLAEWDKQYKEGVRGIKGRNLRKEFNAIKKEQFPFVKEVTKWATDGAFEDLQDAYDRFFKHLTGHPTFHKKRDGGGSFYMGGCDTVLSETNRNMKHLKGVEHNKAGKHQYLGIPHLGFVKMAEHLRFNGHLNSVRISQNGDRFFASFSLKITEEEYVRTHPQALIDKQERKVGIDMGFHNAIILSDGIKIDDPKPLKQNLRKQKRLSRQLSKRQHAKTKQERLEGVKKSNNYKKLSRRLGNLDRHIANIRRDFTQKLTTVITTHYAEIAIEDLNVKGMQKNHRLARSASDVAMGEMRRQIEYKAAFNGVSVTKADRFYPSSKTCSCCGAIKQDLTLKERTYICPACGAVIDRDYNASLNLLSLITNKIGMDGPESTPADLTALLSRFIVNGIATSKVETGKQQKSYV

SEQ ID NO: 51629 - protein, 482 aa, Acidimicrobiaceae sp.
MPVYQAFRFELDPSTTTRSALGSHAGASRFAYNWGLALVKDRLEARQVLEVLAMRQGAGAGEARAWAAETAGPVPWTLYSLRKEWNRVKDESAPWWRENSKEAYNSGFDALARALKGYFDSRGGARAGKPMGFPSFKKKGGRPSCRFSTGVIRVLDDRHVQLPRLGVIRTKEHTTALSDQVVAGTARVLSATIKEEAGRWFVSFGCKVVRRDPVATYPEAIVGVDLGVHHFAVLSTGELFENPRPISQRARRMARLNRELSRRQKGSKRRARTRAKLTRCHARVANLRRDTLHKLTTQLATAYGTVVIEDLAVKNMTACPRPKADPENPGHHLLNGHAAKAGLNRSILDASPGELRRQLSYKMSWHGGHLVVADRWFPSSKKCSSCKKAKATLSLSTRTYRCEHCGLVLDRDHNAARNLAAYGREHLVAGSGPETQNGRRGDAWCTSDTGAHSPKGPRGRKRQDGSGQPVKAVTASSQGEAA

SEQ ID NO: 51630 - protein, 444 aa, Thermoprotei sp.
MMTKTIVKTVKFKLIPLTRSDKSQLVSLLNDYTLMVKDALDVIIKNDVRSRKRAHELCYRVLREKYPHLHNKFVQEAYKRALAMYRSYRKLLNKWKRLPKKKKNRLSPPSPPKVKDNRVIELHVDTYKLERRHEFLVLTVSKGSGVYLRFLVMEYDYARRELDEAKLGNSKIIVNGIEIYLLLTTHRNVEINVHKNKLIIDINEDSVDCLLVDYDRNKAVLFPIRHDIRKIRTNYRRIRRSIQKKVKTPRLRDKLLAKYGSRERKRVEDRLKKITTLLAEIAKEHNADLVRENLKDLRLNGKKRTRQLNYRLSTFPYRRFIEYIDYKFYERGLNVLEVDAKKSSLTCPICGYVDKRNRVDKETFKCRRCGFTFNAQYIACLNLFSRSDDGVVAIRSGGIYLITRKTAPVVAVDVAPDEPPNKMRWLREKPVPQTILRSLSIVGT

SEQ ID NO: 51631 - protein, 380 aa, unknown
  TnpB Polypeptide
MYPNDDQIEKISLFFKAKRLIYNKYIEKMKDNETISGFLHYRYSFENFQNDLKKIRQEYPWLNDIDGCIIRTTLQDVDNAFARFYNGEANYPKYKSYYQSQIYKTICIYHNNRKTKIQSVEIDLLKKTIKLPKLDKIKIAGYRKMEKFEKTILSVTVKKTGKKYYAHVLTREIIEFEFNFKEKKLSSIVGLDLGIKNMVVTSDGVKYPSLNIGRIEEQIRLLQKKLTASELKSKNHEKIALKIQKKYQTITNKRLEAIHFITNDLIKKYDVFVVENLSVKEMLQRNNSSLSNKIQNSAFYEIIKQLERKATLNGKIVIKVDKYFPSSQLCSICGFQNKKMKNISIRNWVCPRCGSNNDRDVNASINIRNEGYKLLQINNN

SEQ ID NO: 51632 - protein, 381 aa, unknown
  TnpB Polypeptide
MPAQKLNRAIKYRAYPTPTQQILLAKTFGCVRFVWNHMLADAQQFLNEAGTFFIPTPAKYKKEFPFLKEVDSCALCNAQLDLKEARKQHRENPKSYGAPKLKSKRKSKMSYTTNIHSYVKKDGQIAKTLALTEDAVLLPKVGYVKIKEHRAPGNGWKLKSATVSCTRSGKYFISLLYEFEEDIQPVTPTKETSLGLDYSSHDFYVDSNGDAANYPRFYRQSEEKLAKEQRKLSRMQFGSHNYDEQLHKVRVFQEHIANQRKNFCHTVSTAIAKQYDVVFVEDINLRGLAGSLKLGKSTNDNGFGMFRTMLEYKLTSRGKTFAKIDKWYPSSKTCSVCGFIKDNLTLADRVWTCSACGTTHNRDHNAAINIRNVGLLGLYPA

SEQ ID NO: 51633 - protein, 201 aa, unknown
  TnpB Polypeptide
MDGRKLKSINQYWNKQKAYYQGIADKQRQKKTHRLNALARKRNNRTQDYIRKVARYIINYCIEHHIGTVVCGYNGDFKRSMNLGKITNQQFTQISFGSLRGTLGGLCGRYGMRYIGQEESYTSKASCLDLDDIPVYNPGQPYTGAFSGKRVHRGLYQFADGRIANADVNGAANILRKSKQNFDFEELCKGLLGSPLRIRVS

SEQ ID NO: 51634 - protein, 379 aa, unknown
  TnpB Polypeptide
MKTFEYRIYVNKQQRSLLLQCLQESRIMYNEMLEMVKKQYEEKGTFPSKYDLEMAFRGRGEHVAATTIQCLADRLTKALKRFLACKALGITCGFPRFKKPNHWHSLQLRQYGNEKNHRDVMLASDNKHVFVPKKLGGLLKIKLHRPMEGTPKTAHLVLRADGHWYILIVCETVPHTEHSPSTCDHADIGMDVGLKSFLTDSEGNTIENPRYYRSSQRTLRRKQRQLSRCKKGSHRKRKAARNVAKTHLKISRQRRDHHSKVAKKYTGRYHHMVVEDLQITNMVKNHHVSKSIYDAGWGQFLDILTCKAASAGHEVIRVNPRYTSQKCFQCGEIVQKSLSVRTHICPHCGYIADRDVNAAKNLLKSFLAGAPPSEANVHQ

SEQ ID NO: 51635 - protein, 347 aa, unknown
  TnpB Polypeptide
MLVSKIIKCGIINPTKTKLNLLEQEYKNLQKFLQGDEHVKLYSANKQQARRYYKKIKPNKEYPLSIRKDLIKIEKKETKLVKYWIRIPVAGRKGGVWLPVKPHCEFSEDYEICESKVFKKNGKFFIYVTVRKEVEIKTSYSSILAIDIGERVIATAVLSVDKKPRFYGKDVRGIRRHFAWLRKRLGEKKLLKVIKRIGHKEKRTVDDLLHKISRELVRLAHQHNALILLGDLKGIRSSAKGKRFNRIVSNMPYYKLTKYIEYKANWLGIKVVKVKENGTSKTCPKCGSEGKRPYQGLFVCNTCGYQANADFVGAQNILKRFEDYMSSNGGAVNHPLTLPLSREAIGL

SEQ ID NO: 51636 - protein, 419 aa, unknown
  TnpB Polypeptide
MEAGRVWDTCCAIHREARSAETKWPNRQSLQVATKGGYNLHSQSVQMVVHAFLANVDTTRQLRKTHPHMGMRYPWKEKRFYPLMWPAQAVSVSANRLVLPMGRGRKSLIIPRPEGFPDDPGGVRICWNGAGYDLHVAVEAPEEAQSEAAPGVHATVDLGEIHQVAVSTITGKALVVSGRGMRSVKRYRNMALGQILRLRSRCKKGSRRYRRLGWTISRIMHRTLRQVRDLRHKGTRKAIAFCVENQVSSLYVGDPDGVRKRPSGRKHNQRMSQWEYGKDMQYLDYKSKKAGIECFSGTERGTSSHCPECGHRHRPKGREWVCRKCGFKGHRDVVGSVNMHPLAYGETVAFPSQITYRRAGLTQGTKQPLRVARRSRPDPGLGVSGPVLSRCANGPTTQVAGTPQGVGQAEGSRLEAHPL

SEQ ID NO: 51637 - protein, 214 aa, unknown
  TnpB Polypeptide
MIKNMVGIDVGLNNLLVTSYKEKIDNPRYLRKSEEKLSRIQRKHSRKKLKSKNRSRSRLKVARIHERIANQRLDLFHKLSNKLVNNFQFIAFENLNIKGMVKNKYLAKSISDVSWKRFLQMLVYKAEEAGRWAVGVNPKNTSQICSNCSKIVSKTLAVRIHKCPECGMMIDRDINAARNILRLALSTVGTTGINACGVERLLSTMKQEALRLQV

SEQ ID NO: 51638 - protein, 280 aa, unknown
  TnpB Polypeptide
MVSRKGYQFRIYPNKKQEIFFTKTFGCVRFLYNHMLDDKIKYYEETKKMKQTTPASYKKDHPFLKEVDSLALANAQLHLEAAFKKFFKETDIGFPKWKSKHQAKQSYTTNMVNGNIRLFSTIQNQTTYLRLPKAGDVRIHMHRIPQGILKAVTISKQQDRYIATCLFEYENKVESKEVVHVLGLDYSQKHLYVDSEGQVCDYPHFYCASEKRLAREQRKLSKMVKGSNNYKKQRNKVAKLHAHVAQNERIYQCPKCGHIEDRDINAAKNIRDEGIRLHRG

SEQ ID NO: 51639 - protein, 342 aa, unknown
  TnpB Polypeptide
MYLTIKLQLQATYDEKQTLRAYSRRFQDEVERIIRRYQKLGSVIFIPYKWVSSDIAFYSKNQVLHYAKTLYEERRLQHRAVYPSSFSCMAKSMQLEKNSIVFTFGQSFLVPELRIRTEIHKQQWKRLCSGELVKADIREIHHDFYAYLLLCVHTPNTAGILNEERKMGVDIGMRCPAVCYTCDGVIRFVGNGREIRYHTRRIRKRADEFIKRTQGKKKQQYHRLNDYKRYIDHCLAREIVNFAIEQKIQIICLEKLYHLQKKFSKHEQICWSYQRLQQFIAYKAKLAGIHIRYVNPRLTSKRCPSCGKINNVKGRTYTCRCGFHHHRDVVGAMNILHAPEIL

SEQ ID NO: 51640 - protein, 374 aa, unknown
  TnpB Polypeptide
MILNRAIKMRIYPDDEQRYKIDVTLSHCRYIYNKMLERNNVIYKRRKEHLNYYAMQNLLPEMKEYLPWLKEADSQALKYACRQLNDAFERFFHKKGGYPRFHSKRGRQSYTTTNMRSVHIRPYRIKLPCLGWIRTSDKRLPKGELCHAIISHDTDGRYYVSICYEKEVPDVEIIKPSVEKTIGLDYKSDGLFMDSNGHIEDIPHFYREAQRKRTKLQRRLSKKHGSRKGERKSKNFMKQLRKANRQSMHIANQRRDYLQKLSTEIANRYDAVCVEDLDMKAISNKGFGNGKATMDNGYGMFQNMLAYKLAERGKHLVVVDKWYPSSQICHCCGHRQPMPLKIRVYQCPECGMVFDRDWNAAINIKMEGLRLLSA

SEQ ID NO: 51641 - protein, 415 aa, Cyanobacteria sp.
MNYTYRIYPDLHQSALMLDWLETSRKLYNRALRELKDWINSRKCLADRCSLEREYIIPADLPFPSYHRQQNDLPKLKESWTDLKHVHSQVLQTTIRRLHDTWEAFQERGHGFPRFKKYGQLKSFVFPQFKRDPIVGDIIKLPKIGSVPMSLSRPIPDGFKVKQVRVLSKVRGTQWYVVVSIQSDVSVPDVPFHGRAIGIDLGLERFATVSDGSFFERPKFLLSQHRQLKLLQRRAARKQKRSANSEKAQLKVARLHHHIANTRKDFHFKTAHKLCDQAQTIFAEDLNAVGLNQGMLRKDCIDASFGAFLRLLEWVCWKRGAFFMRVNPNGTSQTCPHCGATVRKSLDLRDHHCPECGYHTHRDRAAAEMVLLRGLNLVPVDNRGMETACAGELAGDQTSSQVPKSRKRVTRKTKK

SEQ ID NO: 51642 - protein, 543 aa, Streptomyces sp.
MGGLREVVEPFVASGPAGVAIRTRIKQLTPEDEKVLRLVGAYLGALASKDLKARCADGLEHSTETWAARKRALTPVTSSRWAGAITKASHDQWALSRRCQLAHIQSLEAGVATIAHRLAQPVGQKGSKNTPGGYRSRQEWFAKSRRLHVLEDRLEGERSDRQAGSVHVVRGGKRLARTRHHLEAAQLTEAGWRERWECERWFLQADGESGKRYGNETLRVTPEGRLSIKLPTPLKDLANAPHGRYLLTGTVRFIHRRTEWADRVEANRAVAYRISYDPARNRWYVTASWQTPPTRIIPLESALADGVIAVDTNADHLAAWRLDVHGNPIGHPRHFFYDLSGTADHRDAQVRHALTRLLHWAKACGVAAIAVEDLDFTAEKTREKHGRRKRFRQLISGMPTGRLRARLSSMADAIGIAVIAVDPAYTSKWGAQHWQKPLTSKNRTTTRHDAAAVAIGRRAQGHRIRRRTAPPPQHQSDAVGHRTAQAPSGVPGREGPRPRIPGPRTRSVGAGCGANAGNQNAQHRSGRSAEHGSWQQDPLPLSP

SEQ ID NO: 51643 - protein, 399 aa, Alloactinosynnema sp.
LISMSRFRLQPTPEQERVLLEHCRHARFVWNLAVEQHAHWKPGRKAAGYTEQCRQLTEARADNPWLAAGSVIVQQQALKDHAQAMANFFGRTHRRPTWRSRGRGEGFRIVAVKPGDVRRVSRKVGEVRVPKVGWVRFRWSRAVAEGVKSFRVTRDRAGRWHVAFAVVPEPIAAPGTGATVGVDRGVVVSAALSTGELLSVPTLKGTEKARLLRLQRKLARAQRGSTRRGKLKAAIARLKARETDRRKDWVEKTSTRLALEFDVIVVEDLKITNMTRSAKGTREAPGRGVRQKAGLNRGILASGWGQLVTRLEHKAPGGVVKVDPRFTSQRCSACGVVDREARESQAAFRCRSCGFACNADVNAARNIRTAAGHVVSARGGPPLGGPANRDPQRDLLLMR

SEQ ID NO: 51644 - protein, 394 aa, Symploca sp.
MRKVLVLEYKAVVKKAQKIAISEAILTSQFVRNKVLRYWMDNPGIGKKELYRYNTQLRAEYSFVKELNSHACQASVENVERAIQRFFANCKSNKPGKKGYPKFKKHSRSVEYKQSGWKLHPTKRRINFLDLKGIGELKLLGKWDIHTFDVKLIKRVRIVRRADGYYVQFCVKVEHQSIAPISHAQVGIDVGLEYFYSDSNGHHEENPRFLRKAEQEIKRSQRNIYKKKKGSSGRRKACGIYARKHLKVTRQRNEHAKRLARNLCIAIAKVVLEDLNVSGLVRNHKLAKSIVDASWYNFRQWLEYFGHKFGRLIIAVPPHYTSIECSNCGARVQKSLSTRTHSCPHCGYIEQRDVNAAKVILSRATTEGHSGSNANGDVSSTSVGRKTCRGKKRR

SEQ ID NO: 51645 - protein, 383 aa, Psychrobacter sp.
MPKQILKAYKVRLYPTVDQQVFFAKSFGCTRFIWNRMLSDKIEHYKETKTELKNTPAQYKAEFEWLKEVDSLALANVQQNLRNAYSKFFKQGSGFPTFKKKGQRDSYTTNNQKGTVAVTHNSVKLPKISHIKAKFPNKIHGLIKSATISKTPTGKYYVSLLAETVVNESSKTGSNIGIDLGLTDFIVLSDGSKVANPKFLSKLQDKLAREQKILAKRREVAKADQRKLSDSHNYQKQKNKVAKIYEKITNSRKDFLHKLSFNIIKNHDVIAIEDLNVKGMVKNPRLAKAISDSSWSTFTTMLAYKAEWYGKELVKIDRWYPSSKTCSNCGHLLAKAELPLSVRSWTCPSCLQKNDRDINASINILNEGLRLVTLKTVGATGLA

SEQ ID NO: 51646 - protein, 439 aa, Mycobacterium sp.
  misc_feature (431)..(434): Xaa can be any naturally occurring amino acid
MPKFEVPDGWTVQAFRFTLDPTEDQAKALARHFGARRKAYNWTVATLKADIQAWHASGTVTAKPSLRVLRKRWNTVKDDVCVNTETGVAWWPECSKEAYADGIAGAVEAYWNWQTSRAGKRAGKRVGFPRFKRKGRDQDRVSFTTGAMRVEPDRRHLTLPVIGTVRTHENTRRIERLIKAGRARVLAISVRRNGTRLDASVRVLVQRPQQPKVVHPGSRVGVDVGVRRLATVATADGTAIEQVENPRPLGAALRELRHVCRARSRCTKGSRRYRERTTQISRLHRRVNDVRTHHLHVLTTRLAQTHGRIVVEGLDATEMLRQKGLPGARARRRGLSDAALGTPRRHLSYKTVWYGSALVVADRWFPSSKTCHACRHVQDIGWDEQWQCDRCSVVHQRDDCAAINLARYEETSSIVGPVGAAVKRGADRKTXXXXPGRWL

SEQ ID NO: 51647 - protein, 389 aa, Paenibacillus sp.
MIRCVKTTFRTSKTDLERLFACNRISAEIWNRCLILAKNYSLEHEGKWIGQTELQAALKNQFPLHSQSVQSVCHKYLFARDGAKQAQKQGLPVKYPYKNKTHFNTKWVDQAFKMEGNTISLSMGTQHGKRQPPIRITVSSIPNARIKEIELVYDRGLKVSLSYDDGKKVTENNGNQVVGVDLGEIHSIAATTTANRSIMITGRKARSIHRLRNKKLAEVQKLMSKCKQGSRQWKKYNRAKMYILSKSERQLNDAIHKTTRQFVTWCIENEVKEIVLGQVEGVQRHTKKKNHQSVNQKLSNWSFGKIQKQLAYKMEPYGTPVKTIDESYTSQQCPCCGRRKKTSARIYNCTCGYEEHRDIHGSKGILSKYLYGDIRYLGKSESMRYLRIA

SEQ ID NO: 51648 - protein, 601 aa, Rhodococcus sp.
MSGPGSTAPRQFAFTTRAHAAVDDATGEPVGLDDVDTRVRWLLDLIAAAGGELVSRLWQPVTFDVLTAGRDCAGRRLPAQGHVAAARLGWNPVYADKVYVPSRVTRVVTAQVMASLRTLAYRDAAIAALSERFDPATGRITPPTAAADGVPMGFARGVRRQLVAHARRTDGAQSARLRITDIQRPPQVTAMARLSAADRQLAQITATERELVLTVKLPTCPAPSGRAQWRWVRLTAAVPGHLLGRAITDWHLPTLVLDARGLLWRCAATELVPAGDLGAATVAVGVDWSPSTLGAAAITTENSDGLSSDYRGFTYDDRGLGIKLARLQAEGQMLHRKAARLTRLAATAPPEVRAQLEAKIAVLNDHRTAVGVKRGKINRELAFHFARQVTDYAAAAGAQVIAVEDLTTLETRGHGRVNNNRAAQSARRKATAALAHTAAGGGIAVVSVPARGSSAQCPGCDEPLARPGGYHTAWCSRCLVGGNRDHVAGVNLAKRALLGKGKVTRRRGRLPTIRVAEHAPVRKFRDKNGPTPSRPRHRRVRRSLPTATPRMGVTPKQHVPASQASVWDTVKPAPPNGDAGSRDTRRSPTIVTPLADSMRST

SEQ ID NO: 51649 - protein, 546 aa, unknown
  TnpB Polypeptide
MGSERGEGSEQALAMRTITLKLHKPSRRKREIIDKAMLNYSLAYQYLLDRAFSEIETIKKEYRDKRGGYRGNAVAKWIDKDISRELNRFKIEPFKDSLKMDFGMTMASYLNLSEIQQNVHYPIAYLPEEVWQEKVDTIVYDLAAGRRDLRECEREARKIIEKSTSLRPLFFCRYALNRDYCLLYDSVNNRYYAKIYLLNVKSEDRKHIKANKNRKLWYICKDDKTLENTGRKERFLLFPLSFGKWQERYLKEAIAKPEMLKTARLIKKDGEYYLAVNIRIEEAEKIKTNTFLGVARALAEPLHYTVTDSEGNVTDRGFIATELPGKKKEGGFCLSEIHKISNTIVRLALKNRSQVIVESLVDKGDRLQWSDRDRKRHMPVLNCFSYNRLVSVLEYKLAEKGLPPPIKVSPVNIFYTCPRCGLSSKQNRFSKDMFICTACGLNMDIECLGSLNLARKLCEYGKGPLKVKVERTLTGLRFVNKILGLDLHVDASQDYREEFVKEVQGIIRDFYENMGNYTRNKHFKQKYSLIKTIEGKKDILKLLRIV

SEQ ID NO: 51650 - protein, 238 aa, unknown
  TnpB Polypeptide
VRKLFVRVKETLYRYKDGRIRITIKPGELYLEFDLTKAWFKNRVEGYYLGELILKEGELLITFRVPLKERKKFEYIGWDLNMYSLNGFSLKYGWVKIDLSRLYHVHRVHEIKRRKAQSIASKKRSVELVVAKHGEREKNRAKDFVHKLTKELTNEFPNAIHGFEDLNKDSMYNRSKKHNRDINKQNWKQIVRCMSYKSEVKLVNPRYTSSTCPMCGGRMIKLRKGRVVRCTKCGIETR

SEQ ID NO: 51651 - protein, 403 aa, Mollicutes sp.
MTGSSATMRLVERHIVRDNRFEDICLKSGLLYNYVLYNVRQGIFSGNYLKEYEFSTKLGKENQFDFRNLPCHVSQQVVGQVFKDIRSWLKLKRDFEKNPSKYNNHRPRLPKYKKGEKQNIIIFDLTNCRIKDDNRVYFVNNIIDPIKTNVKNSELKQVRIVPQATCYVVEVIYERKEMDLNLNKSNFLSIDLGLNNLCSCISNVDANPFIINGRVIKSVNQWYNKEKAKLMSFVGDKGTSCRINKITLYRNLFIEDKLHKISRYIINFCISNNISKIIIGLNKEWKQEINIGKRNNQHFVSIPHSKLIDKITYKAKLLGIEVVIHEESYTSKVDHLVFESLNRHDVYIGKRIKRGLFQSSIGKLLNADINGAIGIARKVIGDSCIDMIIGSGLAFNPIRVNIL

SEQ ID NO: 51652 - protein, 453 aa, Moorea sp.
LPDSVWKFSTDWPEATLRERKWYNSIVILTYCYKIKPSPEQIAIMERWLELLRRHWNYALGQRLDWLNRTRSPIDRCSLISEPIGVIPEVVNYYTQQAALKETKRLFPEYKQIYAETQQVNLQRLNKAWDRWRKPDANGKRGGRPRFKKAGELRSFVFPRINSSKAGAHLADGILKLSRIGSIPVVMHRSLPIGFTLKQCTIVKKADGWYGCISMKDDTVPELLPIGSVKSAVGIDVGLEKFLTTSDGEAVPIPQFYRNAQDRLAKAQKVMSRRVKGSNNWKKAKHKVALMHLYLTRCRKEFHYQVAHWLCGKYDLISHENLNIKGLARTRLAKSINDAAWGAFLEILQAVAVKRGLLVQEVNPRGTSIECFNCGSRVEKSLSDRVHCCSSCNIKIDSAKPTLRERDWNSGINILNRGLLAVGLPLNGCGKSIQDIEEQQVSFVNLRSPHHNL

SEQ ID NO: 51653 - protein, 392 aa, unknown
  TnpB Polypeptide
MFRKAFKYRLYPTRQQEQALLWTLSRCRELYNAALQERRDAYRMAGVSLRCYDQINQLPDIKQERSEYADIHSQVLQDVLRRVDKAMQGFFRRLKAGQKPGYPRFQGRNRYDSFTYPQAGFALVGERLTLSKIGDVKVRLHRPMLGTVKTCTIKRDADQWYVCFSCEVEEEPLPASEEAVGLDLGLLHFATLSTGETIENPRHSRRGLKKLAIAQQKLSRCKRGSHRRERARKAVTRAHRTIRNQRRDFLHKAARALVNRYGVIVMEDLKILNMSKAPEPKPNPNQDGAYLPNGASAKAGLNTSLLDAGWGQFQQLCVAKAASAGRRVLFVDPHFTSQRCSHCGAIAKKALSERWHACACGCELDRDHNAAINILLAGKQPTTLRGRRSPAL

SEQ ID NO: 51654 - protein, 356 aa, unknown
  TnpB Polypeptide
MIIVHRFHIEPTEEQKQKLFQTLTLCRRLYNTALEQREICYQQRGWSPSYSLQQNEIPELKKKLSEYRQVNAQVLQNCLQRLDDAFQRFFDGLARYPHYKNRDHYRSLTYPQADKQNHFKRSGYIYLPKIGYVKMKDHFKFDPAKVSRINVKYHNGKWYVNLTSEIQEAEAVEILKKVGIDVGLLTFAALSNGTKIENPRHFRKSEKKLARLQRRLSRKKKGSNNRGKAKTKVVQIHAKIANQRKDFLHKASYNIVKNYDFIAVEDLQVKNMIQNHCLSKSIADAGWGTFINFIEYKAKKFGKVMVKVPPTGTSQTCICGHPVPKDLSVRVHKCPNCGLTADRDVVSAMVILQRAA

SEQ ID NO: 51655 - protein, 241 aa, Rhodococcus sp.
VKVAWSRELPSEPSSVSIIKDPAGRYFASFVVEITDEPLPEVDFEVGIDLGLTTFAVLSDGKVIESPKFFRRAERRLRKAQQSLSRKQKGSKNRVKARIRVARAHATVADARKDWAHKQSTVIIRENQAVFVEDLCVTGLARTRLAKSVHDAGWAMFTRLLEEKATRYGRTFVKVDRWFPSSQLCSACGMKDGPKPLSIREWQCTACGVVHDRDLNAAKNIHAAGRAEWLNACGGTVNPAV

SEQ ID NO: 51656 - protein, 488 aa, Erysipelotrichaceae sp.
LEKCRIAECTEKYYFVNSAVNAAKGSIQSVKELKSLHQDEVSAQIKDLKQKIKETDKELKRINKIKKMLIRASKSRQPKYKLDGIHESYHPNDGTFRVLSTNYKGETHTVHVYDNPYLFELKYVSPMMKMLKARSGSLNERLERLNQKYEGLKDQKIRICYGSRKLFHQQDGMVRECHRVHKYQNHSVWRQAWHNARVNSLMISGRKDAKQGNFVFRYDTETHELSYQSQSGAAVIIPNVEFPYGQKEVENAVNQTRDEQRAVTWRITETGGSFLIQCIVTIASDVNIMDDYTNGCIGMDSNCDNLSISECDGSGNILRHKVIHFDLENKSSGEAEQVLSSALDEVFHWCNSAGKPLAMENLDVKHPANRYSGKRRNAVTSKFAFSKITQLAESKAYRHGLGVRKVNPAYTSQQGKILFVKKYGLSIHEAASAVIARRAMGIKEKLPRSLYNQLSDKQKQENRFYQWKSMYNITKKLRVSQMYEYDFA

SEQ ID NO: 51657 - protein, 431 aa, Natrialba sp.
MKRTNQFVVRPRSEQDRELLHELLDASASLWNELTYERRQQYFDGESVWDTADYRKQYVGVLGSATAQQLIRKSKSAWRSFFPLKEDGEKCSPPGYWGNEDDGRALRTYVRNDQYTLELGERSRLEIPVGKELKEKYDLGYTERLRLEVAGDPKWDGKQGRLELYYDEPSDQFRAFQPVTVDNSRLDSPLADETAALDIGANNIVACTVSTGEQYLYEGRDLFERFRETTREIARLQSKLRDGRYSSNRIRGLYRRRTRRRDHAMDALARDLVERLYDEGVSTVYVGDLTDILETNWSVQTNAKLHNFWAFRRFVDRLVCTAEEFGITVEVRTEAWTSQTCPNCGSTEDTTRHQDTLTCACGFEGHASRRKRDVPEAARSRRTTADGTARAIRVGRPRLVGDTTLSRKSQRSAHKPEYPPIGESRSCGGSA

SEQ ID NO: 51658 - protein, 413 aa, unknown
  TnpB Polypeptide
VLVQRTEPHIINRQSKWYKMLMEKCHQAKNIYNHGNYIIRKKFINNGKWLRYIKVEQLVKNDNTYTDYWDWKLANSGQQVLRQLDRNWKSFFKSIKDWKIHKDKYTGRPKLPKYLKKEGVLEFTLTTQQVKLKSDNLIHFPKSMQGLTIQPQFIKKDNYVKFNACMVVPQNDRVVIELIYTINIEDFDYETKNIGSIDLGIDNFVTFVDNLGSKPIIINGKGLKSCNKYYNELVSKEKSKLDLNKNKNKYSHKLQSITNKRNDKVKHFMNRASTYIVKTCLDLDINTIIIGKNDGWKQGSNMGKVNNQTFVQIPYQLFINNLKYKCEEVGIKVILTDEAYTSGTSFLDNEQPIKDNYNKKRRVKRGLFKSNTGKLINADVNGAYQIMRKVFHDIEIPVDRGFVLNPVRINLDF

SEQ ID NO: 51659 - protein, 284 aa, unknown
  TnpB Polypeptide
MEHSHRYHAYPTQEVAKGLEHHLDIHRQLYNHVRWDYENSPEDDKPSEYDQNNKLPEWKRKWPVFGELHSKAAQATVARFHRDLSNLRKKKEKGYNVGRLKRQAPVDYRSVTYNQSGFNLDEKRGRDRFAYVRFSKIGWVKIRYHRPIPDHATIKEVTFKKETTGEWFVFFGLETDDADLSEKSKVNTLDASNSVGIDLGILNYIHPAMGRPWTGSTSKTTTSDSAANNASCLAKRGDRTTTKNNGSRLPRSSVTSVGRCWTTSTRLRRGSSASTTPCSLKTWM

SEQ ID NO: 51660 - protein, 404 aa, unknown
  TnpB Polypeptide
MIVNRVERHIIKQNNKYYKLFDEYCFKAKNLYNFANYKIRKRFLEENKWLRYNEIDKLLKQENMNFDYRNMPTAQSAQQCLRLLDQNWNSFFKSIKDWSKNKDNYTSRPKLPNYLPKNGRNIIVLPFNRYKVRNNIINFPNIFNGFTLKTKVKKLQQVRVLPRNKHIIIEVVYQVEVPELKQDDDKYFSIDIGLDNFATIVNNFNEKPIIINGKGLKSINQYYNKKISYYKSIAKRMNKLDYTNRMNQLNIKRNNKIEDFIHKASKFIIDCALESNVSTIIIGNNKGWKQKSKMSKKVNQNFIGIPHQKFINKIIYKAENVGINVILTEESYTSGTSFLDDEIPCKDNYNKNRRKFRGLFISNNGIKINADVNGAYQIMKKVFPNVFADGIEGVGLHPIRVNIT

SEQ ID NO: 51661 - protein, 523 aa, Chlamydiia sp.
MSQKNSENLTFTYQARLPLDHQGTLIFSHFALLMNKVEHSLFADIARGKKSFDLKSSYLKEFKITARHFNSVRSVLEGKISSVKEREKEDIASTKARISALESKIKKLIKKKANPRILHEKKRRYATLKARLQSKEKDAELGKIRLCFGSRKLFRKQFDLKANAYSSQDEWKKEWEDARSNNFFLIGSKDETAGNQSCVATLEGNSLSLRIRLPDALSEYGKYLVIEGIQLSYGQDAIVQALISEESVAISYRFVRDHKGWRVFISVPVKKQASVTRTGIGVIGVDINANHLAVVETDRYGNPIARKSFPLCTYGKTRHQASALVGDVAKSIIDWCLKAKKPLVLEKLSFSKKKCELREISSPKYARMLSSFAYNSIISTLKSRAFRSGVHVRDVNPAYTSVIGRVKFSRRYGFSVHESAALVIGRRFLGNSERLPRHQAIVPDGKGGYLTLPLPARNRGRHVWTLWGLAKRNLLKWCLQHTSGRKKLSSSRILPACCDMRFSDLVGETPAHESTTELLGGRV

SEQ ID NO: 51662 - protein, 356 aa, unknown
  TnpB Polypeptide
LNENYRLLNTDIAQQTMRVVDRSMKSFLGLLKAISLGRCDQKPKLPNYLPKDGYFPLIIPRVKLRDDGTFAVPMSQQFKREYGEIKIKLPERLKDKNISEVRIHPKYSARWFEIEYIYEDEKVETSVNSNKAIAIDLGVDNLCACIDTDGHQFLIDGKRIKSINQWYNKRNSLLQSLKDSQGIKSFTYKQAKLYQWRNNCLRDYLNKAARLIIDHCLSHQIGKLIVGYNPGIKQEINIGRTNNQNFVQIPFWQLRRKLEALCSRYGIVYQEQEESYSSKASFYDRDEIPVYNADNPSKHSFSGRRIKRGLYKTKNKHLVSSDLNGSANILVKSKHRLSFERVSSGFLANPLRIFIS

SEQ ID NO: 51663 - protein, 432 aa, unknown
  TnpB Polypeptide
MKRSVTVKLQPSKEQEKTLFELAQATAIIWNKLNYERLKQFKEFGKIDFATTEKEAYHTFKDWVGGSTVQQLARKNAEAWRSFFTLIKKKKKGELPSWLKPRPPKFVREKRGRKLFVIPLRNDQYRVEGNVIELRRLGKFGRVKIQFKGRIHLKGKQGRLEIVYDDVKRKWYAHISYTVEEKLEGNSWVKLPREPKGNLTAGIDLGVNNLMAVYVENGESFLVNGRPLKSIAFYWQERISEYQSKLNKSGAKASRKLKRMHEKAKLQARHYINTAVRQTVRRLYDLGVSRIVVGYPKKIAREPEKGKKQNFLLSHVWRFNYVIKRLKEVAEEYGIQVLLVDEDFTSQTCPLCGQRHSNGRIFRGLFKCRREGVVMNADLVGAFNILKKAVKTITPSLSGLTAGRGNGGKTLPEGLKTHFILGLNETPQTSPP

SEQ ID NO: 51664 - protein, 383 aa, Asgard sp.
MFQKSKIKRKNKVYLSYKYRMYPTPRQKKILYETIETCRRVYNDALLDRRENWEKVKHQEKEVRQTISYVDQVKGIIDKRKTNWWLQRVEAQVLNDVLNRVRKAYEKFISSLINNVPHGLPNLKKKGDYKSFTYPSMKKGRFGKVSNNKVFLSRRIGEVKIRYHRELPDNCKVKTLTVVKKLNEWYLIYKVELLKPDERSDLKICVGLDFGLTSLVTLSNGQHISNPAFIIQAYHKLKKTITRYQRKEKDLKNRRKATLEFLKVKQKVQHQRDDYRHKVTRAIINACDVVFYEGLHFFNLGKNTHMNIHISDAGWGTIARMLEYKARLEGKMVFSVPPQNSSQLCSFCDTKIPKTVEVKIHKCYVCGLEMDRDENASRTTVTY

SEQ ID NO: 51665 - protein, 470 aa, unknown
  TnpB Polypeptide
MKIPYQLEDKSQKELLLKYIKNYNSIYNLTFNFVLDNLRNGIKVESKDVLKFFKTKNNILLDTRFQTSSYYNVKEIITRLKNSGQLDKKIIFGGKKLFLERCKNKITSEEFKLKKLIPLYSVGQAFYSGNVKFQILSKNCILFKPSRDSHFNLKISLKKRNKYNSYLKKLIELQEQKRIPITYSLDLEFIYIRFEHTAIKIPKKTRKIKNRIFAIDMNPNEIGYSIIDWKNDSEFKLVKAGSVSLKSLLDEEKNYNVSPDSKIAKYFVDKRQYETYKVAHFLTRKANQYKCEIFALENLSINSKNYEKGRKLNRLINNQWNRNKLVNIIRKQCDYFGLYFHEAAPDYSSFIGNMLYRKLNLPDYCLASIEISRRAYEFYNQYITKTKKKEKNIVFLEKSKVEDLISQSLEELGIDETWNDLKELYYKLKSRKCSYRVQIHNSMILREIFNRKALIRHRNFFIKSGKFKIF

SEQ ID NO: 51666 - protein, 351 aa, unknown
  TnpB Polypeptide
MMHRMLLAYRYRVKSLEGLLKAQSRAVNFVWNYCNETQKSALKWNKRWPSGFDLNKLTAGTSKELRLHAGTINSVCEQYANSRSQKKRPYLRWRGKKSLGWVPLKGRDLRREGDAFRFAGNTFRVFYSRPLPDGKIKDGTSFSCDARGRWFLNIVIEVAAATPRQVAAAIGIDLGLKDFAALSTGETIGNPRHLRKLAVDLAIAQRAGKKGRARSIHAKISNARADFHHKLSFRIVREFDYIAVGNINAAGLAKTNMAKSVLDAGWSSFRNQLRYKAIKHGAWFAEVSEYGSTRVCSSCACETGPKGVKDLGIRIWICSECGTSHDRDTNAALNILFRSGHRTPVEGIPVL

SEQ ID NO: 51667 - protein, 562 aa, unknown
  TnpB Polypeptide
MPSLDEKFILYCIRATGSRDNRGKKAENETLQKELEDFYTKEFQPLLAHSEKHDLRNFTTLLPYLATQIHTGIHNNLKEHFITRLLRFINKTTSVYEEGLTKEEVKKERQALKNAVFAKEQVPIKYTEWAKEHLGHIVPTTWDVSLPYDVKVYPEKYITHSFYMNLVLERDGHKLFQPMSLRNTIVPHYITFDTASLINLFAEKGSKGAMLKKVKDNQEQVWNRLFNLDKRIFHQKNYHFNFTLQTDGIGVSLLFVHRNYNGRKSCPCCSTDDSYPFYYMEELSGDQLSGFHERNMVGADPGKFNLLYMADGNGNKLRYTAFQRRTESLSKRNHRILLKEKQHNGIIEKETKLSEQNSKTVDYNKFKEYLRQKNKVNYELSVFYKQDLFRKMKWRQFVYTQKSEDRFLNKIADVFGHNAIIAYGDWSRTTQMKHFMPTKGVGLRKLISKRFQTVSVNEFRTSKLCCHCHHELCHLKVKQETKNKKVFRCLVCNECVSSESKQPVFVTRDLNSAKNILHLANSWIKEQKRPSVFQRTEGLTFTPTGEKVGQSVDFTVGKATNS

SEQ ID NO: 51668 - protein, 407 aa, unknown
  TnpB Polypeptide
MLLTYRYKLKPTRAQYAALDWLLEAQRQLYNAALQERIEAWQKASKSVSKIDQNKSLTQIRSFDETYASMPVALSRWSLTRLDDAMAGFFARVTRGQSPGFPRFKPRSRWSSFGFVEWSGIRLSSDRLLFKPLAGGLRLNLHRPVPEGSSIKSCTFTRRGGHWWITMAVDVALAAAHAAPDSAVGLDVGIEHLATLSDGARVENIRPRSRREKELRCAQRALARCKRGSKRRRKVRERLAAVQRRIQQARASHLHEVSSSIAARYAFIAVEDLKLKNMTRSARGTAAEPGTNVRQKAGLNRALLDAAPARLIQMLTYKAERAGGMVVRVDPRRTSLECSSCGTIVEKTLSMRRHVCECGTTLHRDENAAINILNRALVAHGRAKPPGDGNVGHQPERRLGTAVAKAA

SEQ ID NO: 51669 - protein, 407 aa, unknown
  TnpB Polypeptide
MLLTYRYKLKPTRAQYAALDRLLEAQRQLYNAALQERIEAWRKAGKSVSKIDQNKSLTQIRSFDEAYAAMPVALSRWSLARLDDAMGGFFSRMKRGQSPGFPRFKTRSRWNSFGFVEWKGIRLRADRLIFAPIAGGLRLNLHRPIPKGSPIKSCTFTRRARHWWITMAVDVPAAEAHPMPESTVGLDVGIEHLATLSDGAHVENIRPRSRREKELRRAQRALARCRRGSKRRRKARERLAAVQRRIQQARSSHLHEASAGLARRYAFIAVEDLKLRNMTKSARGTAAEPGTNVRQKAGLNRELLDAAPARLIQMLTYKAERAGGMVVRVDPRRTSLECSSCGTIVEKTLSERRHVCGCGANLHRDHNAAINILNRALGAHGRAKPPGDGNVGHQPERRLGTAVAKAA

SEQ ID NO: 51670 - protein, 290 aa, unknown
  TnpB Polypeptide
VEGHQAILGQAVAEAARWWAPSQPASSDPGRIVDQVLHLHAARATLVDHHGRRRSRGRGSFGAGERGDIDVGIEHLATLSDGGHVENIRPRSRREKELRGVQRALARCKRGSKRRRKVRERLAAAQRRIQQARTSRLHQVSAGLAARYAFIAVEDLKLRNMTRSARGTADEPGTNVRQKAGLNRALLDAAPARLIQMLTYKAERAGGMVVRVDPRRTSLECSSCGTIVEKALSERRHVCSCGAGLHRDHNAAINISNRALQAHGRAKPPGDGNVGHQPERRLGTAVAKAA

SEQ ID NO: 51671 - protein, 300 aa, unknown
  TnpB Polypeptide
MSDHRLAYVYRICPTKAQETALTQTLETCRQVYNSLLNWRKHDYEVLGKSPSKVEQQAAFPRWKKEHPELTDVFSQVLQNVAVRVDLAFDAFFRRVKAGETPGFPRIKGHGQYDSITYPQAGFSIVQSRLRLSKIGDVAIRLHRPIGGDIKIGGDIKTCTVRRIRHKWYVCLSCMVGPELLPPSDEDEKTYIGVDVGLKTFAALSNGENVENPRFFRRDEEALAKAQRRLAKQVRGSRKRRKARKVVSRIHERIRNRRHDFVHQTARRLVNRFGVIAVEKLNVKGMVKNHSLAKSISDAA

SEQ ID NO: 51672 - protein, 376 aa, unknown
  TnpB Polypeptide
MYKAYRFRLYPNDSQRVLIHKTFGCVRFVYNYFLDKCKKNGYIKAYDMCKELKKLQEEYLFLKEVDNCGLRCSIFNLEDSYKNFFAKRSGYPCFKNKFCKQSYRTNCIRSIYKGTNYSNIAIFKKDNQIKLPKLGLVNIKGYRNLDSINGKIINATIERECTGKYYVSVIVEETEIVKNKKTPASIVGIDLGVKDLVITSEGKKYSNPKELLKREKQLKRLQRKLSRQVKGSKNYAKTKIRIARVHSKIRNSRKHNIINIVNDIVKDNDIIVSEKLNVKGMSKNHNLAKSIIDASFNMICNMLKWKTTIQGKYYYQVDTFYPSSKTCSRCGSKTDITNNLSVRKWTCKNCGNENDRDINASINIMFEGLKLHYKTI

SEQ ID NO: 51673 - protein, 443 aa, unknown
  TnpB Polypeptide
MTDQKSWDVPLQKDVQVCVVGKVFKPNRLKVLALNRALNEYFRLVRWYIGFNSKSKNFLHENCYAKAKGLFNLNTALIQTARDKAVEMLRSFEETKKEDDVLRLKRISIRFDRRCYKFSKTTNVLTPYWLTLSLNRKERVSLPIVFGEKQRQRIEEALRGEWKFTTIEMVKSCGQWYAHFVLKKTVEVPDEPETIIAIDRGEHNLAVAVAISKKNPNKPMKGQFWRGEEIKRIRGLYGHIRRRLQEKKLLKKVKELIGKEKRKVNQQLHIIANQIIEYAEQFPKPVMVMESLNGVRNSFKGSKKLNRRFHSTPFRKLQTIIEYKALLEGIEVRYLTKEETKNTSRTCHRCGHVARVKGRVFKCPKCGMEYDRDLNACINIAHRVTSSMGWGSCGPPKPADEVGGAKPQLNAGSFALKGGVAHFTPLCLYSSINSLIGSVRQRI

SEQ ID NO: 51674 - protein, 499 aa, Sulfobacillus sp.
MIYWSHEPAQGGGAVLTGYKFRLYPNPEQQQILLRWIGCQRLIYNAKVQEDRYYRRFQQRMVGTAGMEVPVDQQYSRFITDTTAFLKEVPSQILRNGAVKFRQAYSRFFQKLGGRPKLKKKSGRQSVWLTSELFQIIPFTDEVTGKIPGYQLYVGTAKFPVGIVPYVAHRPHALPASIHIAVEGGQWWLSFAAEDPDVTRPAQTVDAATEQIAENLRHLSADQLVERTLGGDRGVAKPLMTSNGQVFDLQPVQRTRIEKHRRQRKKWQRRASRRKKGSKNRQKAYRKAARYQQYERNVRQDYAHQTSHVLVVHDEYDLYVFEDLKIRNMTKRPKAQRDTTGRFLPNGAKAKAGLHRAILASAWGDVVSFTRYKALRQGKLVLTVPPHQTSQECAQCTFTSPDNRISQAEFVCQRCGHRDNADHNAAVVIAKRGIKKLLSGIPLNLGHKATRIFRKLGPERSEVTPGEISIRHSGPTAPAQQSMSQEPPGAIPETPTTTA

SEQ ID NO: 51675 - protein, 505 aa, Kitasatospora sp.
LWSILWFVQIVTARAVSVAYVRGRSGGGAVLSGWQYRLDPTYSQVELCETFGDICRAVWNIALEQRREYRRRGAWMNYEPQAAELAVAKREFPWLAEAPSRILQQALRDLDRACRERGTFNVRWRSKARWSPSFRFPDAKQIAVERTSRRWGRVRLPKLGWVRFRWSRAPGGRIRSATVSRRGGHWFVSFLIEDEQRTPACHALPGSVVGIDRGVKVALTTSAGHFYDRPFVSPGESARMRRLQQKLARQTAGSGRRRRTVAAIGSLAARARNRRADFCAWTANRIADQHAVVVLEDLRIKSMTASAAGTVDEPGRNVQQKAGLNRSILAKGWGLFELALRSRARCTGTRIVLVHPAYTSQTCNACKYRDAKSRESQADFRCTACGHCDHADVNAAKNILIAAGHAVPGRGDLGSARSVKRQPSGARPVGGSTRPNPCREAGRKSSSSAGPSAFIGLQGQRDTVDAITEVGGGSVSLAFEHVSKVAAATGAAHLDPSHAEAAVLE

SEQ ID NO: 51676 - protein, 650 aa, unknown
  TnpB Polypeptide
MGTHHVPRGFAQPLTYALRLPDDAQADALRLLDASQAVVKATVIQLWPSLDAFGPNANDRSGTAYKQVGQLMSSPDPHGDRQWRCEAETAGRILRAQATRKHAFNLIQPILTHGLILPQTDRRPAGKNRRAIKDALNALKQVQADAQSDPEGGETTFVTLQNVVEQACNYYFAHDGFPATYEEMQPIPVLEMGLLAYAGDDGPDKGQAYRLRLDLPQRDAPNPEDAGTARFRFRCPDTQGVWGWRAGEVLFPLPKRLTDHLRAGEALAPTLREVHHPAGERYVVLDLPVAVPAAAPVAWERVERVLGVDWGVHTLLTATALQVSGDVSVGDAGGTEIWTQIGRPFFLNTGGFDGRQARTRRQIDQLQAKRDRFQQERKALVGFPADYPKLRWYTERIDTLEREIAWCWRKYDLRNRALAHLAANVLLLLCELHNCSLIAVESLKTLKSTGRGKGVRGRWRNWRSNTTLRGEIWRILRYKCFVAGMRRHTARPHDTSHICPRCGMVAQTYRSPRAKQQAEAAVDWGRWLWCTDATCGYSADRDYAASLNIARLGAATLVQRQRTGVSRAITVRDLDVKTVKIVKTLMKNKPVPYTATGAVSLLPPPGSVPAQPTLPKRPRCRGTICYLPGWNKSAFLQSSLPQATFLRLCG

SEQ ID NO: 51677 - protein, 417 aa, unknown
  TnpB Polypeptide
MRLVEQHRIDRHDPRFVAIDTATFASKNLYNAALYRKRQAYIFENQRIISYADLDKLMQPTLEYRALPAKVAQWVVKQVCAAWDSYFAAVAEWQIHPERFKGHPKLPRYLAKTGRNLLVYTNQAISRDPKNAGWAVPSGVPIRVATKQASAAIAQVRLVPKATHYVVEVVYEREPEHPALDPTLIASVDIGVNILAAITSNKPGFTPLLVHGRPLKSCNQSYNKRRAKAQAQLPKEEFTSRALAEMADVRHRRIHSYLHTASRTIIDLLVREGISTLVIGKNVGWKQEVNLGKRNNQAFVFIPHARFIEMLTYKAALVGIQVVTIAESHTSKCSFLDLEPLQHHAQYLGKRVKRGLFVASTGQTLHSDINASYNILRRYAPHVVAQGVRSFQLRPTPLRLPDQRQDRGKQLPRRTCG

SEQ ID NO: 51678 - protein, 428 aa, Halonotius sp.
LKIVSDNDYHRRTAITRLAVSPTDESLLRETIEAWKRGCQVAVDKAWERCHSKSDVQQLAYDDVRENTHLGSQHAILACHQAAENIKSCISRRQDGKKASKPTYTSPTVTYDSRTMTIFPEKEQVSLTIHGDHARVRADLVLPDDEDGYQHQYLDRDEWEPTESTLHYRDGEWYLHLGFRKPKPDDEEATENGTVLGVDLGVTEIAVTSTARFFSAGELNHKRREFERVRGDLQECGTRSAHRTLETVSGREDEYVKHVLHSVANGIVEEALRYACDGIVFEELAGIRERLPDAAWHSEWAFNRLFEYVEYKAEAEGLFVDTTNPKNTSKRCAECGFIHDDNRPSRDTFECQQCGTRNHADYNAAKNVADVYLRREQQSSRGRGISQYALKSGTVTPNRGYTPYSHESEVESTDKPHLQRANPSGSAK

SEQ ID NO: 51679 - protein, 397 aa, Archaeon sp.
MMLKTYKYRLESNREQKQKLEATLDTCRYLYNDTLACRERQAELYRLPMTKQWITVEDQINALPGQKQEDKYLPLVHSQVLQDVIHRVDNSFKNFFRHLKHHEQSGYPRFKCYNRYNSFTYPQTGFKIVDRKLELSYIGKVNVKIHKSLRGKIKTCTIKRDIDAWYACFSVKIEDSLPEKTVIKSAVGIDVGINPLIAQSNGEKTKPPKFILQSEHKLAKEQRKLSRKQKESHNNKQRVIVAKVHRHIRQQRMDFHHKLSRELVAQYDFIAFEDLRIKNMIRNHNLAKSISDVSWNILQSFTAYKAEWAGKVVTFVNPKNTSQECSSCGKIVKKNLSIKVHKCPYCGLVLDRHVNAAINILKRGLIKVGLGYTDLMPVRGLARDTPMTQEVPCVSGE

SEQ ID NO: 51680 - protein, 378 aa, unknown
  TnpB Polypeptide
MANKGIKYRIYPTVEQEQQLLQEVGNQRFLWNSFLSKQISLYERKKKFKFYGDMQDYLVYTFKDKHEFLRLGSSKSLQQTLRDLEKALKDCYKLGFGFPKFKEKGKKDSFRVPQSFTVGRRSITVPKIGIIKINKSCSLNGKPKNLTISKDINGKWYVSVCVEFEPKPLKKTDKLIGIDLGTVRLATSSKNHIKKSFKEVKYVRELNRQIKTKQRELSRKELKSSNWLKAKAKLQKLHLKLKNKRLDRLHKFSTMLVTNFDTIVVEDLKTKNMTKNSKGTLEKPGKNVKQKSGLNRSILKEGWYILIHMLAYKCDWYGKEFIRVDPKFTSQICSSCGFKSKKNRKSQSKFECQKCGFKINADHNAAKNILTRGLALAA

SEQ ID NO: 51681 - protein, 407 aa, Rhizobium sp.
MLLTYRLKLAPTKAQYAALERLCEDQRRLYNAALQERVEAWKRNGISITKLDQFKSLTQIRSFDETYSSVPVAMSRWSIARVDDAFKGFFSRVKRGRKAGFPRFKPRSRWKSFGFSEWDGVRLRDGKLLFRGLTGGLKVRLHRPIPDDASLKACTFTRTGRFWFIAIQIDVPVAEGHAKPDTVTGIDVGVEHLATLSDGTHIENPKVGVKHQRKVRIAQRALARCKRGSKRRAKVREKLALLKRKTANARSAYLHQVSAKIAKDFAFIAVEKLNVKNMTGTAKGTVEEPGTNVRQKAGLNRAMLDAAVSRLISFVDYKAERAGGQMVKVNPYRSSQECYSCGAIVRKTLKDRQHRCKCGADLHRDFNSAIVILERALSAHGRAMPPWDGNAGGCSTRRPGKVVAEAA

SEQ ID NO: 51682 - protein, 443 aa, Rhizobium sp.
LQTGIRLRAYPTGPQKQTLSQWIGCARVIWNAKCDEHRYYSTFAKKHFPLGTYAPLDQTFASFKDKELTPWLSECPSQILRNEAVKWYQTYQRFFKKLGGRPKRKKKSDRGSIHLTRELFRFETCSEGVLRIFIGSKTNNIGLLSFKAHCRFGEPNSIRIVREAGNWFVSFSYETEEKPAQTEVKVFNSPEEQLQWLREQGEEWLTANIQGHDRGATIPVHSVSTVYDFSPEQKRSKKRLAKKGKRLQKRMSRQLVGSKRRAKTKFRLARTKAKVRYINNDFCHKSSRTMVDGPALINVFENLKLQNMTRKPKPKQDENGKFLPNGSAAKAALNKKMLASGLGRLVDFVRYKSFRAGKLMFLVPPNHTSQECACCGHVDPDSRRSQALFECTSCGHRDNADRNAGIVIGKRAVKLILDPGMGLSSRGVLSKRHALRHRTWSCR

SEQ ID NO: 51683 - protein, 615 aa, Rhizobium sp.
LRLQVSVQTRLDLSGGNHRFDHLFHDYAELMNKVERTIHAKLKAGREWRGDLAISLYKEFGISAKLIESAYFSLQGKLQSASELAKLHATELGDKIKAKESQIEKKTKKRKKNRQDLSKALLKFDGCMAKSKVLKDELDIAKLDKRIKTLQRYKSELGKLHGLRKKISELRHNIFQLGADLHQHKRRLETLRHKLKKAFARIKNPSICFGSKALFKAQFNLEKNGFASHKEWRAAWVEARNSTFIIEGLASAEFGNEYARLKPREDGLFDLELRLPEALKQHATKVKKVRKRDVYLTAIEGLSFTHNVDLLRESLIEETSVAVRFKHDDKGWRVYASFKVNHNEAAEDYSCGAIGVDLNAGFVSVARTDRFGNVVETFDIPMVTYGKSQGQSATIIKQVVVQIVEYAKRHNLPIVSESLDFAKKKRTLCDENPSYARMLSSFVYSSFDTALVSACARHTVFHRRVNPAYTSIIGRTKFASRYGLSIHAAAALVIARRAMKLSEKLPLSFKERVVTLPLNDAHHATLELPVRKKPGEQGVGTRHVWSDWNEVNKTLRRALAARRPSRRKRRRSIPVVGRNDLHSMVCRSRRDVLESSSESSGPRVGPGAMVSTVKR

SEQ ID NO: 51684 - protein, 269 aa, Rhizobium sp.
LITDVGEAFQAARDAYAANANGPLALDFGLKTLFATNEGDLLGRDFLRKLKALDETLSGIARHVQRSGRKPRTSKRYVRHAERTRGYIRTELNRIINRLIATRRPSRLFLERLNFRSSRFSRQMNRLLQNCGRSVLQTKLQALSDEFGIETTEVVSAYTSQTCSCCGYVDKRNRPSQEQFSCKWCGNKMHADVNASRNIGSERFRSFTVLRPGIRKAVLDVLVSEHIERNKRRRGSPSDPRETNPYFEDWKPEVRFLPLAASCEWQKGV

SEQ ID NO: 51685 - protein, 408 aa, Rhizobium sp.
MMLAHKIALDPNNKQRTYFAKAAGTARFAYNWALTEWQKQYAAWKADNSLARPSQMSLRRHLNRIKRTDFPWMMEVTKNAPQMAIIQLGEAYKNFWAGRAKYPAFKKKGVDDRFTLTNDKFTLNGSRIRIPNLGWVRMREPLRFEGKVQSATVSRKGDRWFVSFNVKLDNLKHLPKAENQGATGVDVGLTTHATLSNGEKVAGPKPHKKLLNRVKKLSRSLSRKVKGSKNRTKARVKLAKLHMRIANIRNDAMHKLTTDVTRRFHTIGMEGLNVKGMLKNRRRARATADMGFFETRRQMTYKADMRGGIVVAADQWFPSSKLCHCCGWKHDKLTLKERQWTCEECGAFHDRDVNASINLENYAVRHIAVSSTVAACGGEGAGRRRKSVKVKPSPAKQEINSKPENVYT

SEQ ID NO: 51686 - protein, 625 aa, Rhizobium sp.
MIRTFETRISAADDRHADLLGKIAEKMCVAERKIHAFLAAGKEWKADEYRQIYTKLGLSAVMFRSAKDSLDSRLRSISELAKVQAADLTLRVDQKKKQIEDKAESLAKARASLAGLQIKLDDLSCRISDLQANIEAASKPSVKAKAVAKLKVLLDKRSIVAEKLTGFANDIEQIPFSLHQHRRKLASLEYQLHRAEVRVEPPHICFGTKSLFRQQFELEANGFKSHTEWKSAWKQARTSSFAFVGVANMTGGNEVARLKLRKDGLFNLELRLPPSLRTSNHSFITFRKISFNHGHDAIVAALARQQPLTVRFVRDDTSWKVHVTIEQPTASVKFDDNRGCLGIDLNADSVALTLVDRFGNPIRSWTIPMVTHGLSSDQALDLTRKVAKQIIDLATKYHVPVVAEDLDFATKKAQLTSDTSPRYARMLSSLGYSSFQRALASACARNTVCLRQVNPAFTSLIGRTKFARRYGLSVHTAAALSIARRAMGFSERMPKPIEGKIILPLDDGGHVTLSRPARIEGRHVWSPWRTLNVRYKAALAAHRRTRHKSRSSGMVSGGPNPEELPLRRTNGPSPVGLVRMFPDETAKFRGGAIPGPGDIYHSHQKIGHWVGQPHDNPNSRGYVCP

SEQ ID NO: 51687 - protein, 599 aa, Rhizobium sp.
LSEAIKAEKRVLKLAVPDKEWAAVALALTRETKNLYNTCTFLIRQINSAYVFNPESRKYRLKDELHDHQRDALVSFNKVIDIVNSKRKLKLNDKTRFVTSLEPVMTISPLYIALDITVLDNVVRSHVDHEGQIVYRRLPASAAQQVVRSVIDVWKASLSSQRDFARHPEKYTGRPQLPNFQPKDGHFPLEIPYTAMTRGLPKPSTLNELGDIPVDQLERFCSYDLKKATVAVCEKRGWLNAKPQHIRIVADGASKVKIEAVVAINRAYPEGSLLHRITKEYQSSFTDLKTFEDREKFVLDHILRAGTKANLAGIDFGQTNIATVGFSTGHRAIVHSGERPNEIVDRYHQLMDKRLASCATPRMKELQRLQQELSEKGEKLGKAQRIELRKEQQKGFADPEYRNLSARLNRIKSDFEHKISTDIVDQCVNRKIDLIVIGKNKGWKSDIDSGKQQNRMFRAIAHARLISLIRYKAEAFGIGVVTTEESYTSQSSFIDGDELPVHAKVKTKKESSPTQTEADRSVPQHNFSGKRSAKNRTWFVRHNVVAEKRFSRIHADVNGAFNIIRKVFKSFCHHAGLTYKFTVRWISPRRGAVVPIACL

SEQ ID NO: 51688 - protein, 583 aa, Rhizobium sp.
MIRTFETRIAAVDDRHADILGKIAEKMCVAERKIHAFLASGKEWKADEYRHIYTELGLSSVMFRSAKDSLDGRLRSISELAKVQAADLKLRVDQKKKQIEDKEDNLAKARVSLARHQVKFDDLSGRISELQEKIEAASKPSVKAKAVAKLKLLLDKRAIVVQKLKGLANDVDQMPFNLHQHRRKLSSLKCQLRRAEERTEKPRICFGAKNLFRQQFDLEANGFKSHAEWKETWRKARTSSFAFVGVANMAGGNEVARLKLRKDGLFNLELRLPPGIRTSSQSYITFRKISFNQGHDKIIAALARQQPLTVRFVRDEISWKIHVTIDQPTTPGKFDDSRGCLGIDLNADSVALTLVDRFGNPIRSWTIPMVTHGLSSDQALDLTRKVAKQIIDLAREYDVTIAAEDLDFATKKAQLTSDSSPRYARMLSSFGYSSFQRALASACARNAVYPRQVNPAFTSLIGRTKFARRYGLSVHTAAALSIARRAMGFSERMPKPIEGKIILPLDNGDHVTLPRPARIAGRHVWSQWRTLNVRYKAALAAHRRTRRKSRSSGMASGGPNPEELPLRRTNGPSPAGFVRDVPR

SEQ ID NO: 51689 - protein, 427 aa, Rhizobium sp.
LKYLKAYRFKLYPNKQQANAFARHAGACRWLWNHLLALQKQQYAETKTFIFFHDMSKMLPGLKEKYEWLSEAPSNSLVRVCRNLDLALKKCFKEGAGFPRFKVRGRCRESFYVINQALRIDQDRNKVFLPKTGEVKFRSGRLPEGVVAGANVAWTGRGWELTIQCKIEADVPVVIPEAQTVVGGDFGLKELLVRSDGVKVKPPKSLRKALKRLARAQKSLARRTKGGKNRTRQARLVGRLHAKVRDTRRDVQHKTTSALVRDASAVITENLNIKAMVKNRHLALSISDAGWGEMNRQITYKCEWAGKQHIKAGQFEPTTQTCSACYLRKTGDDKLRLHNRTFRCDCGLVIDRDLNAAMNLRRLGLQALGLQHANQDVGQAMPERALRRRRRKADACGEASGGRAASATLSHASRRQEPARSSTELSG

SEQ ID NO: 51690 - protein, 562 aa, Rhizobium sp.
LAKRKEGKVGEAAPSIFRCDKLPTHMNAGKIQTLKVMLQAWRRSAKVISDLQWNCFFQTGGFNPFFDPAAVHRKQGVEVRTGVLRQISHHFGVEPTEFEKKRLPRMIPGLVDVLAPLKAALGAAEVQMVREQVLGTLNSYLSNRQNDFRQAVFGSCLSADEYETTRHALLVINKAKAWFNLKRELQIDGNPIDMRTRKLARNIMSQIMNRHRKPRFSRIGMVVDQRIATLSASTCGTSFDMWLKLRIAGLRETRKAAGQKNPDGFIHIPIRSYDRFNARKGARKQSFQIIEDRHTGTISVGMITDVGEAFQASREVYASSANGPLALDFGLKTLFATEHGDLLGREFLRKLKALDETLSGIARHVQRSGQKPRSSKRYVMHAERTRGYIKTELNRIINRLIATKRPSKLFLERLNFQSTGLSRRMNRLLQNCGRSVLQTKLQAINDEFGIETTEVVSAYTSQTCSCCGYVDKRNRPSQERFTCKWCGSKMHADVNASRNIGSERFRSFTALRPGIRKAVLDVLVSEHIERNKRRRGSPSDPRETNPYFKDWTPEVRFLPLAA

SEQ ID NO: 51691 - protein, 352 aa, unknown
  TnpB Polypeptide
MLVRYRFRVYPGAPQRRLLAKTFGCVRYVYNRALELRKDAYAENKTTISYAQTSAALTGWKKEPALVWLREVSCVPLQQCLRHLQTAYRNFFAKRAAYPRFKSMRGVQSAEFTRSAFGWDGKQFNLTLAKIGHLRIRWSRQFASEPSTVTITKDCAGRYFATLCLDETVAPLPKTGEYVGIDLGIGCLATLSTGEKMPNSKFLDRSLAHLAKLTTDVVRSFDLNCIENLDVSSMMDGRHRARQMADVGMYAFRQMLTYKCRWYGKELQVVDRYFPSSKRCSDCRHVLESLPLAIREWICPCCGTSHDRDHNAAKNIWSAGQAASVRGGHVRPQATRVARDDARRSVNQSALP

SEQ ID NO: 51692 - protein, 502 aa, unknown
  TnpB Polypeptide
MAKATTTIKQVLNYPPDLGVWFAANQALFNRVTAFYFGVIQAHEKVLDLSNKDALTTLEKLTHTTQKNPTPVMPLEDVLEDIPAMFRRAAINAALGSARSFSSHLKQWRKRKEKAEAKGKKFHERPPVPPRSWNKSATLYRGLWKERSGNSIVVKVWTGSCWSWIKVRITGRGLPTDAEMGSPSLIRHGHQWWLHTPIEKQIKSPGKIEIQVTTNAQTKMCAVDLNINEHLAVCTVQTVEGTILATKFIGGGKEISGFRKKQLGRIARNRSKTGIIAEGEQDNGALWNKIRHVDEQAAHLVSARIVQFANEHEATVVVFEHLGNLKPAKGKYSHRGNSKRAYWMKGRIFKYCKYKAYNEGLLTSRVNPRNTSRECARCHSLVARYDPGKPAEGYTYGAPLVSCRQCGMKGNADRNASLVIGQRLVMRYQKNGEGKPPTPLLVERVSRDTGVVVSQDAGCKEGPSIPSAGHGDSNEHGTAQETGTRMVASVSDIPCQLRLLLE

SEQ ID NO: 51693 - protein, 415 aa, unknown
  TnpB Polypeptide
MTVKMYEYKIEADIRKLKTRWKLLISARNRAQAKLDNLKAHPPRRIVFGSKKMYTEKDKEDMDIEVWRKEFYDKRHSSMSLPGRHTSKDCNFLVKRRNDVLIITCMDGKQAILSDFRLARDNEVWLAMLDAKPEGRKPVCYNFQLKRDGNGRLYLIPSVTLILENRYCNESLEDGCVSVDLNYDHVALTDIDKDGNRISGEILKFNPENKTSGQISDEIGRVMSRVGKYCENRKKPLIMEDLDTTITKHGMKYGNAKGNRHASVFAYRKMTACLENQSYKRSFGIIKIDPAYTSQIGKILYMRKLGISIHAAASYVIGLKGMGLLEKLRPEPEMTDRLTDSLKEGLADQNSMDSLMKAWKYISGKFSDVYTHSFYRQVPYGYKKSESLTKSGRPRRPKTLKTIAAEMKQWTACNC

SEQ ID NO: 51694 - protein, 376 aa, Alistipes sp.
MIAYKYKLYQTKRTKHLDAMLREASFVWNHALALQKRYYSLFGKYISKNAMQKHYAKRIKRTLLHSQTTQEIIERLDTAYQRFFKKLAKRPPKFRRAIDFYSIVYKQGGFSLNGNVLTVNTIKKRFKFSYSRPYEGRVKRIAIKRSRLGEYYLIITTDAEPKAYGKTHDGASVGIDFGLKTYMTLSDGTTVRNPLFLKSDLDNVRRKSRSLSKCKKGSNNRQRRRKDVCREFENITHKREDFQWKLAHELCRKYDYIFIEDLSLHGMTRMWGLKMSDLAHAEFVGKLECVTRKYSVTVHKIDRFYPSSKTCECGYVNRELKLSDREWVCPECGKVNDRDLNAAENILRRGISELWSGSKTVSDTASRACTQESHAL

SEQ ID NO: 51695 - protein, 299 aa, Mycobacterium sp.
VFDDTRRLRRLLAKDRARILFATINSRAGRWCVSLTVEATDLHPAHQHPRRPDDDAGGWVGIDRGLSVFLVAARADGDEVARITGAPKAFAARLNRQRRLSKSLSRKQKGSHNRRDAAAKLARHHHHVANVRRHFLHQVTNELVKTHDRIVIENLNVAGMLRNHHLARAISDAGWTEFARILEYKQVWRGGELIEADRWFPSTRLCPACGTINADMTLADRIFMCGCGHVSDRDLNAAVNLARWGQTRHREASPDPRTPKLRGRATNARRRDGSDQHSVRAGETGPKDAGTDVHTAPAG

SEQ ID NO: 51696 - protein, 412 aa, Streptomyces sp.
MVVFVQLRYNYRVYPDAPQRRALARAFGCARVVWNDCLRDREEAHMAGLSYVPSAELSRRRITQAKRTTERAWLAEVSAVVLQQSLRDLDTAYKNFFDSLKGARKGPKVAPPRYKSKKDNRQSIRLNTNAFSLQHNGTVYVAKVGAIKVTWSRPLPAAPTSLTVTKDASGRYCMSFVVDTEPHILPELDTEVGIDLGLTTFAVLSDGTRIHSPKFLRRAERKLKRLQKDLSRKARGSQNRAKARIRVARQHARVADRRRDWHHKASTQIIRDNQAVYVEDLAVSGLARTRLATSVHDAGWSAFVHMLEYKAARYGRYFGKIGRFEPTSQRCSVCGVKDGPKPLHVRQWTCSGCGAVHDRDDNASRNTLAAGRADRPNASQSAGKTRTKVPAQCVEAGSHPDGRPTATGIPRL

SEQ ID NO: 51697 - protein, 474 aa, Mycolicibacterium sp.
MARHTTFRFCLDPTLAQRVALARHSGASRFAYNQCLSLVKTVLADRKMDAKTVVPWTGFDLINAFNRWKKTEAAGRVWAVASDGTIDITAIGLSWRDDVCQQVFEEAAVDCGRALKAWADSRSGRRKGRPVGFPRFKKKVAAVPSFRLRNTHRTERRPAIRVGENNRPRSITVPRIGLIAVHDDTRRLRRMLANNRARILYVAVSCRGGRWWASLVVEAADLHPQRCHRSNSEGRGWVGVDRGLTNFAVAAAADGIEVARFDTAPRPLRAAMTRQRRLANHLSRKKKGSRRHRQAAQQLRKHHHRVANIRRHFLHQVSNALVKTHDRLVIENLNVVGMMANHRVAQAISDSGWSRFAHMLEYKQAWRGGQLVIADRYFPSSKTCSACGERNADLTLADRVFTCGCGFRADRDHNAAVNLARWVDNGHHLDRPPDPQAGGRANNARRRDGVNRHPRCPGGAGPDEAGTDVHTAPG

SEQ ID NO: 51698 - protein, 447 aa, unknown
  TnpB Polypeptide
MVRKQISKKKKTNSFLQRRKDKTETQYEYLVEKHIIRLNHSHYKLLDRYSHLANNIYNQGLYRFRQALFQGKWLTYANLDKSFKQSYQQRDCMLYQSMKNVHLAQQILKLICQNMNAWNKARKAYAKAPHKFTGRPRLPKYHTKGGKSIIIIDNQTAKLRANGVVEIPVLDNLKIKLQHQTTTKIQQVRIIPKNNVFVVEVVYKTNKLIEYKPDNQRYLTIDPGLDNAFTLATNVRGIRPLIINGRPLKSINRYYNKQRAKLTRIAKIVNHRTITHQLEQLDFYRNQKVLAFAHEASKRIVEFALSHELNTIIIGKNKNQKRSIDLGKRVNQNFVGIPHQRMIEMIEYKANLVGIVVIQHNEAYTSQTSFLDNEEPINQNGNQARKRKGLSPVNRRIKRGLFKANDGSLINADVNGALQILKKVVPNAFADGIEDIGLCPVKLNLNF

SEQ ID NO: 51699 - protein, 451 aa, unknown
  TnpB Polypeptide
MRTNSSYAVELKNVNRIFNQTIKVYQSAIKFCLSTFENEWDNLKDIESSKYQAAAARNLIHSTSKNTAKYQEFDKLFYKLPSYLLTNIINTSIGILNSYHTQLDVYNQSDKKGNPPRLQLNHNTFPTFYRNNMSLYTMGEDTIQLKLFIDNDWKYMTFRLKHTDINSIVKHMLPGSKVSCPTLEKHNKKWFMRFNFEDNVLLNKTPIRNQSVLAVDLGINTCTVCAVIKYDGTVTARKFIDFPVEKDHLSHLLNKIKRLQRRYKGHNTDKMWRRVKNLNTELARKTADEIVKMAVNYNVSAIVFEHLDMNGRKSGSKKQRLHMWNKCTIQDMTTTKAHKNGIRISRICTKYTSRLAFDGSGMVIRGKNAGFKNNKVCRFPSGKVYNCDLSASYNIGARYFIREIEKFYTLKPTSKYISLWSDIQTKVPGVSRRTQNTLSTLKLIHQCINAA

SEQ ID NO: 51700 - protein, 169 aa, unknown
  TnpB Polypeptide
MIKVKQHRLFEGKIKSVTISKTPTGKYYASILVETEIEKLPKTDKKKVGIDLGLKDFLVLSDGTKIENPKWLRRTEKRVKKVQRDLSRTQKGSKNYEKTRLRLAKLYEKIVNQRKDFLHKLSSKIIHDNQVIVLEDLKVKNMQQNPKLAKAISEVSWAEFRRMLEYKAR

SEQ ID NO: 51701 - protein, 406 aa, Cyanobacteria sp.
LLHKTVQVRLYPSQEQQLLLAQTFGSARWWWNYALSKSIETYKETGKGLGRSALNALLPALKKAEETKWLADCYSQVLQATTLNLTTAYKNFFDKRAGFPRFKSKHGKQSVQYPQNVKIVDGNVKLPGNIGVVKAKIHRPIEGKLKTVTISKTPSGKYFASILTEVEGENPSTTEGKIYGIDLGLKHFAVVTDGEKISKYDNPKHLAKHEKNLKRKQQKLARKQKRSNSRNKYRKAVAKVYERVSNSRQDFFHKLSHKLVSDSQAVIVENLHVKGMVRNHTLAKAISDVGWGTFINFLAYKLDRKGAKLVEIDRWFPSSKLCSNCYFIIDEMPLEIRQWTCPHCGTHHDRDGNAAINIRAEGIRMLKAEGSAVSAVGGEVRPKMGRKSHLRHSPMSTEAPSAYAVG

SEQ ID NO: 51702 - protein, 299 aa, Mycolicibacterium sp.
LPALRKVWNQRKDSCAPWWAENSKEAYNTGLDGLARGLDAWSKSRKGERAGRTVGFPRFKSARAPRSVRFTTGVIRCEADRRHISLPRLGAVRTHESTRKLARRIEAGTARILSATVRQDSAGRWHCSLHTIVAGKGRPAHAGRSTHPVVGVDVGVKADALLVVASPDGVEVDRIGAPKSLTAAQGRLRALQRRAARQHGHYDPGTKTKQAPSKRWRKTQARIGRTHAHAAAVRRDVLHKATIALAQQHDVVVVETLNAAGMRAKGGAYKRASTGRWLMPRWLRCGACWATKRGGMAAG

SEQ ID NO: 51703 - protein, 472 aa, Mycolicibacterium sp.
MAGKFEVPDGWVLQAYQYAIDPTQAQAAAMESHAGGARFAYNTMLRAVKANLDQREAERSYGITKADLTPTLPWSFQSLRNDFNKRKHRVAVREDGTPWWGENSKEAYANAVKNLSVALKNWEDSRRGARSGPRMGFPSFKSKRSTRSFAFTTGGIRVEADRHHVSLPRIGTVRVHESTRKLARRLEQGTARILRATVRFERGGWRVSFTVVVKRGVGRRAHTKRLAPVVGVDLGVKDLIVAATPEGQEVLRVRAPKELQRASRKVRALQRKAARQQGRWDAVAKAEQEPSNGWLRTQQSIAKQHVRVANLRRDRLHKLTTLLAQGFDVIGTETLAVKNMMASGGARKRGLNRAIADAGLGAFLRQIDYKTSWYGSVRVRADRWYPSSKTCSGCGSVKAKLSLSERRYVCDCGLVIDRDLNAAINLARYARSEQSACFANGGADRKTTAPAALVAVKPESSNGSASPQGEAA

SEQ ID NO: 51704 - protein, 346 aa, Acidimicrobiaceae sp.
VNGDAEIVGRSGEQPADTALRAEPKCLSPDEAGGEGLGGEPSGAAVAGGNLCSLVEQGPGVANRKSQPPGRMATMANSTVLEVKKKREPFVPPDGWVVQAFQFALDLTDDQRRICARQWGGRRYAYNWTLRTIKTGVDNYNATGVESEPPSFYRLRKQWNAAKDTLCVDSETGEMWWPEVGKEAFADGVRGAVEGYWNWQRSKSGNRKGRKMGFPRFKKKGRDQDRFTITTGVMRLEPDRRHLSISKLGCVRTHENTRKIERLVTSGRARILAVTVRRSGSRAIASLRVIVARPQQPSSGATSVVGVDVGVRTLATVANAEGRVLERVANPTPLANELSALRPPPS

SEQ ID NO: 51705 - protein, 376 aa, unknown
  TnpB Polypeptide
LSPLCKRAANGKSNESGIVFRDGAVVIARRKFPVKTAKAPREGSQPSTPYMYEQEALAHRVKYCRITRRWYPSGWKYFVQLVLEGEPPVKVNPKTGEVLHPMGKGRVGYDIGTQTLAFSSGSHVGLVELVPEAQDIQNELRRINRAMDRSRRVMNPKMFNPDGTVIDTPSLPPECLAKRGKRNWQNSKRYERLASQRRYLYSKQARLRIQQHQERANQLLGLGDDHYIEEMAFRALAKKAKPQEPAPGEKPKRRKRFGKSIANKAPAAFVNILEKKVLQNGGSFQRINTWKAKASQYNHLNHQYNKKKLSQRWNIMPDGRKIQRDLYSAFLIQHTNSTLDGFLQGQCDKDYPAFVVLHDTVISALRGTKLPSSTGV

SEQ ID NO: 51706 - protein, 382 aa, Sporosarcina sp.
VVSKKSRAAKEYRKNKAYRFRIYPTKDQEEFLIKTFGCVRFVYNKMLAERNDAYEQFKDNKALLRKQKFPTPAKYKAAFEFLTEVDSLALANAQMNLQTAFSNFFSGKTKYPKFKTRRSRQSYTTNLLNGNIKLLDGSIKLPKMKPLRMKQHREIPSHHVIKSCTISRSATGKYHISILTEYEHTPMKKEIKQVVGLDFTMNGLFVESEKGKKANYPRFYRRAEEKLAKEQRILSKKAKGSSRWEKQRIKVARLHEKVANQRKDFLHKQSWRLANRYDCVVIEDLNMKGMSQALRFGKSVADNGWGMFTTYLGYKLENQGKRLITIEKWFPSSKTCSDCGHVKAALSLAERTYSCECGFVSDRDWNAAINIKNEGMLIIGLS

SEQ ID NO: 51707 - protein, 358 aa, Cyanobacteria sp.
MKRTGRVYLNDLNAGKSQIVGQFLYQCHDVMQYFVDLFWQRKDFSGKLADLPTVHKARERFGMTTRLGQALAKQASECVRSQHQKERKRKPQLKWHTVTLFYHFVTIEPFKGKGFDWCIKLIGSGAPKLTIPVKSTGVINQRISDGWQLSKTIRMGIKKGRLWIDFIFEKERPALKTEGRVVGMDSNYKNGVVFSDSQVVGQSIYQRIQRFKKRQKCTHAEVKSMLGQALKSVDWSSIKVLSIEDLLKVKHGKRGTFSRVFNRRLSHWLYRTLVQLLERKCEEQGIQLVVKDPFKTSQFCSACNRWDRRNRKGDEFKCVHCGYLAHADHNAAHNLELLGTAGVYGLRSYLSSKRQSFG

SEQ ID NO: 51708 - protein, 383 aa, Oscillibacter sp.
MADVKQFTTFKVRLYPSPEQAELFEKTFGCCRYIWNQMLSDQERFYLETGKFFIPTPAKYKAEAPFLKEVDNQALIQEHNKLNQAFRVFFKNPESFGYPKFKRKKDDRNSFTACNHDFASGPTIYTTKDGIRMTKAGIVRAKFHRRPQAWWKLKRITVDKTRTGKYYAYILYECRNKEPEPVFPAPEKTVGLKYSVPHFYVTDSGEMADPPHWLKQSQEKLARIQRSLSRMQPGSKNYQEKVQRLRLAHEHIANQRRDFIHKESRRIANAWDAVCMRSDHAEDLIKGMNLSNTLDSGYGMFRECLRYKLARQGKPLILIDRYEPSTKTCSACGFIREAVHYKESSWICPKCGAVHRREVNAARNIKEQGIKQYFSMQKRRESA

SEQ ID NO: 51709 - protein, 385 aa, unknown
  TnpB Polypeptide
MKINIGKDNWMEKGGDRMKAYKIRCYPNEEQKELILKTFGCCRWYWNQALSDNINYYKDNKKSKIITPAQYKKEHKWLKEVDAQALCFTQMDLQSAFNGFFTQSKKRFPKFKSKKNPKNSYKTMTSKGFIVNENTIDKLPKLGKVKIINHRHKIGIAKSCVISMTPTNEFYISILWKEDEDEYIKVDNIGKEIGIDLGLTDLAICSNGQKFPVLKSLRNNLNKLKKEQRKLSKMIEGSNNYNRQKLKVAKLHQHISNQRKDYLHKISYKLTNENQVICLEDLQISNMMKNHNLALSISDVGWGMFVNMLEYKSKDRNGIVIKIDKWYPSSQMCSNCGTITGKKPLYIRKWKCPHCGAIHDRDVNASINILNEGKRILGVGSNPDR

SEQ ID NO: 51710 - protein, 383 aa, unknown
  TnpB Polypeptide
MPPLFTRTLRLKIRAEAYPWLSAAAVEANEVFNYCNETSFKAATRTDIKRKWMSGFDLCNLTAGATRYFDKIGADTIQSICTHYAQKRQAARRLKLRWRVSRGSRRSLGWVPFKAANLKRKGVCLRFAGKSFRVFETERLNGVQWQSGCFAQDAVGDWWLCLPVKVQAEDTGAPEEAVGIDLGLKAIAVTSDGQRLAAGRWTQEYAQKLASAQRHGHKRQAKRIHRKAARCRADALHKFSREMVNRYRRIVVGDVSSLKLAKTRMAKSVLDSGWGMLKNFLDYKSQQAARTFEVVNEKNTSITCSTCGALSGQRGVNGLIVRAWICRDCGESHDRDVNAARNILLGSRCRTSMRGNELSTWLIPPSNAYRVREAGIESAWAAA

SEQ ID NO: 51711 - protein, 383 aa, unknown; identical to SEQ ID NO: 51710
  TnpB Polypeptide

SEQ ID NO: 51712 - protein, 372 aa, unknown
  TnpB Polypeptide
VFLTYRYRIYPTKKQTFILSDIFSIAHSLYNYSLAYRRKKWKESRYSVSYYEQAAMWRDWRNEGEDNPLRILNMNAGQQVLRRLDKAYKEFMKGKRGKPRFQKSSRFNSVVFIAGNGAQVKNNHLYIQNVGLVKVRWHRLLPEGKVKTIIILRKPSGWYVLFQVEIPETQLAQNLKPDVGIDIGITHALALSDGTIIDSPRYLQKVLKTLRRSQRSLSRKKKGGNRRKKAVKKVSRIHECIANQRLDFWHKTTSQLVSNYGTFYLENLGLNFMLRNRHLSRVSYDTGLGIFRSLLSYKAIKAGASVKTVNPKNTSQVCSGCSCLVQKTLNVRVHSCPQCGLILDRDVNAARNILLLGRSSQALTQSVRVFVA

SEQ ID NO: 51713 - protein, 515 aa, unknown
  TnpB Polypeptide
VERESTRTFETRIKVDPLENRVLHTFAALYAHVSHRLFADIASGKKAADLKNDYLACYEITARQFNAIRVQIEGKIASIKQRRTALIEESKERIQALTKKLSRLKAGTPIFHQKKRRLDHLKAKLRQLQEDHQKGTIRCCFGSRKLFRAQFDLEAGGYASHAEWLLDWKNARSREIFFLGSKDEIAGNQTCSATLQPDGTIQVRIRLPDALAKEHGKYLIIPQIDFKYGRQELHALLKNTTKKAISWRLLHDDKGWRLFATFDVEYTPPASREETGVIGVDINADHLALVETDRYGNPVSKQSIPFNLYGKSSDQAKAVIGDAAAKAVAYAANAHKPLVIEELDFQKKKGDLREKNNGSYSRMLSSFAYRSFITHLKSRAMKEAVLVKQVNPAYTSVIGRIKFSRLYGLTIHQAAALSICRRSLGCSERVPLCLSKIPDGKDGHVTLVLPERNRNRHVWSIWRDLSKKLKTALAAHFRAAKSRSRSSCKSAPETGISPEVVGEIPTRESSEALLA

SEQ ID NO: 51714 - protein, 405 aa, Acinetobacter sp.
MKKPFLKAYKYRIYPNSQQKVQFEKHFGCTRFIFNWALALQTKVHSETQKLLSKKDIQDQLVAMKKQPEFEWLNEVNSQSLLSGLLHLHTAYNNFFQRLKKGKIEFRKIKGYKPKLDEKRPLSHIVGYPRFKSKKVPQRSYQCPQHATVSFEHGLLHLPKIKGIKTVFSRTFDGKIKTVTISKTATGKYYASILVESELELVAPTTVQPDQTIGIDMGLNHMLIQSNGDKVENPRHLRQAQNRLAIQQKIFARKQKESKNYQRQKLSVAFIHEKVRLQRLDLHHKLTHHLICENQATTYAVEDLGIKNMVRNRKLAKSISDVAWGQFLTILQYKAKWFGKNILQIGRFVPSSKTCSCCGYKMEKLPLSVRLFECPNCNLVEDRDVNASINIRNFALADALGLRAV

SEQ ID NO: 51715 - protein, 405 aa, Methanoculleus sp.
  misc_feature (168)..(168): Xaa can be any naturally occurring amino acid
  misc_feature (315)..(402): Xaa can be any naturally occurring amino acid
MTLLYAAGVPVPAVSDKGSDDPDRQAPRVLPVCVQLGAQPQEPDLSQRRYQPVRVRPHEPASDAQGRVAVAEGGQRPVTATVDAPPFACIHELFRGSCRRADLQEEARPGTVFHGSTVVYRGLQARNGKTPEDRCDQNRVPPHLRGNDEVCDGHPQIDRSVLHQHRGXPTFKKKHDPEQSFMVPQSYTVDFKQGTVKLPKIGAIKTVFHRTFVGTMKSATVIRRSTGRYFISIVVEDGRKSPKPADPIPDQTIGIDMGLSHYAVLSTGDAVANPKYLRNAQTRLAVLQRRLDRKKKGSRNRNKARFKVARCHQKXXXXXXXXXXXXXXXXXXXXXXXXXXXXXXXXXXXXXXXXXXXXXXXXXXXXXXXXXXXXXXXXXXXXXXXXXXXXXXXXXXXXXXXXTAW

SEQ ID NO: 51716 - protein, 395 aa, Methanomicrobiales sp.
MLLSYKYRAYPDATTEARLNGALDTCRWLYNKLLEECNAARENGLTPTMRGMQARIVTLKDENPALREVYSKVLQMVNYTLWSNIAALSQTKKRGGKIGKLRFKSASRYRTLNFNQSGFKIDREHSAITFSKIGTFPFTMHRPYTRKVKGVLITRSGDRWYVIVQAEQEVSEPKREGRSVGIDVGLNSFAVDSDGAVIENPRFYEHSLYRIKKLQQSIARKKRLSQNWKKAKCRLEKVYDHITNQKRDFLHKLSRQYVDTYATICVEDLDVKGLKEKGNFPGLHRSIHDASWGRFYSYLAYKAESAGTNLIKVDPRNTSQMCANCGSIVKKTLSERVHECPYCGFVAERDYNAAVNIHRVGMEQPFEPVETIPLHHISVVQVLSMKQEAPPFRAG

SEQ ID NO: 51717 - protein, 534 aa, Sphingomonas sp.
VRSEAIRMTPNPNPSPELREARNRLSHHEQMLDAQAGCVPCKLCGGKAVVSDAGEGYGYYIGCENGNKFRLSTGCIIDERRLGGWAYNVMEWWNRLHAQTATLPTDAQVREAMQTAWDDYCDDAKAFPGDLTKLSRGRIMFTAGTWADHTAMHLRAALSPQTLPAPGEVEGDLLATADKAVTFALDLACGYPTPEMDAGTVELRRQARAVNYVWNYCNETQKKAAQARRNWLSLFDLMKLTAGSSKELRLHSQSIQRICRAYDESRRQQKKAWLRWRGKKSLGWVPFNTNYVRFNGTGFVFHGVEYEAMHLRNSIQPGQRFGAGSFNCDANGHWYINLPVGVPCSEPVAGDGVGIDLGLKTLATLSDGDKIEMPRFYRESEAALAKVQRARKTKRARAIHAKARNRRKDFMHKASNDLCRKYGLIAVGDVSPSKLAKTRMAKSVNDAGWSGFKSLIRYKAIMHGRTFLEVNEAYSTQTCSSCGTLPASRPKGIAGLGIRDWECSDCGTVHDRDVNAARNILRIGLDTLAEGAFA

SEQ ID NO: 51718 - protein, 330 aa, unknown
  TnpB Polypeptide
LAIKMPAALIAKEAPKFLKIEGVHFEYGNEQVLQALANGTALTYRFHSDNHSAVGWRVFVSTDTIDTKLTTLQANLGTLGVDFNADHLAVAKTDRFGNAVQFWRFDLPFTSNASGQRDAILSDALDKVFALAKEHKCPVAMEDLDFSAKKKELTKLGMKHARMLSGLAYASYKQLSLAKASRLGVELIFVDPAYTSVAGSVKYAVRLGRTVHQAAAGVIARRAQGYSEKLPKSDAKGEYTFRAPLMGRMAVLTLPVESSKRTHVSLAVIRRSLSRHCAEQVRLRKESSNGRCKRANVSSNLLDEDPSSSREPVKLLDRRAIPPDFTDVPL

SEQ ID NO: 51719 - protein, 308 aa, unknown
  TnpB Polypeptide
VPVPRLSARRACTTASPSPTTSSTSTVPACVSPISAGCACARRCASPARSCRPPSPAWPTSGSSASPWTRPTVLTCPKPKTKARSVSIWACRRWRRSRRENPPIPGPKAHKALLDRLRRLSRGLSRKEKGSANRRKAKAKLAKLHARIATIRLDAMHQLTTDLTRRFHTIGIEDLNVRGMMANRHLARSIADMSFFEFRRQLEYKAAMRGGVVKVADRCYASSKTCSACGHKLETLPLSVREWTCPACGHRPRSRRERRDQPEEHGREFHGRRLWRGRLWPDAQAPDETGLGEAGSQLCSCLGRNEQV

SEQ ID NO: 51720 - protein, 317 aa, unknown
  TnpB Polypeptide
LHRARSEPRAGDVPGPRGGHTARFAYNWALAAWKRQYEAWKTDHSRPKPSQHALRRPLNAVKRERFPWMLEVTKNAPQMAIIPLGQAFQNFFAGRARSPSFRKKGVHDRFTLTNDQFDIDGSRMRIPNLGWVRMRETLRFTGKILSATVSRVADKWFVSITVDTPDSSHLPKAENQGAVGVDLGVSALATLSTGEPPHPGSEGPQGAAGPLAQALAWPVAQGKGIGQPPQGQGQTGKAARPHRHHPFGRHAPTHDGPHTPLPHHRHRGSERARHDGEPAPGPLHCRHELLRVPAAVGVQGGDAGRRGEGCGSLLRQQ

SEQ ID NO: 51721 - protein, 188 aa, unknown
  TnpB Polypeptide
MQKGVKFRIYPNKEQQTIINQTLGCCRLIRHPQFKSKHNRHQSYRTINQGDNIRIVGKYIKLPKLGYVKVRQSMEVGKINNVTIEHTPTGKYFAVLNVDFEPQPMLNQGGSIGIDVGIKEFYSDSNENTVSNPKYLEKSMRKLIREQRKLSRKEKGSSNRNKQRIKVALVHEKITNQRNDFYRNSLLC

SEQ ID NO: 51722 - protein, 260 aa, unknown
  TnpB Polypeptide
MKRNLGFLVVLPKDMPKPNIKPNVMGIDINSSKIAVSIISPNKVLKQTYYGQDVSTRQFHFEERRAKLQGYRDTVSRGKAGLKLKRLSGRQRSYVKTRMWQIANEIVRLAKQFNANIAIERLRHLRKRKGEWSRKSRRKTNRIPYGFFRHALKHVAEREGVIVREVKPNYTSQTCPKCGHAGRENWRGYVYFRCVRCGYEANRERVASLNIAEGAIHVADPKGQIPLGNAPVNGHALKDERCGRWRQKHPELQAPSVREG

SEQ ID NO: 51723 - protein, 509 aa, unknown
  TnpB Polypeptide
MRHTTFRFALDPTPAQAGMLARHAGASRFAYNQCLRLVTDALQKKAGDPTIAVPWSGFDLINTFNAWKRSEAAGRSFLAAPDGIITKQATGLVWRHEVSAQVFEEAAVDLGRALAAYEQGRAGKAKARKVGFPRRKRKGRCRESFRLRNKAGSGGACSIRVGDGHPRSVTLPRIGMVRVHDDTRRLRRLLRPDSRDDPETERSVVAPRARILFATCRRHGARWYISLNIDAPDFHPQRRHPSRPGDDHGGFVGVDRGISAFAVAATATGTEVGRFTAPKPLQRSMRSLRKQSRAVSRTQLRSSNHTKAIRRLSREHAHIANVRRSFLHEVSSQLVKTHDRLCVEDLAVANLLGNRPLARAISDAAWTELARQLSYKAVWYGAELVVCDRWVPSTKTCSRCGRVGPPMELGKRVFSCHGCGLVVDRDRNAAANLAAWAEAASMATSQAPDRQAGGRVTNASGGEGAGHRGSDGETSPREGGTDTLALAACHRTPEKGAAGRPRVEEPDRL

SEQ ID NO: 51724 - protein, 429 aa, unknown
  TnpB Polypeptide
MSALSARLFDSGPAVFPHHRARTHTDYRNPVQVRRAYKFLLRPTSGQVRLLEACLEDTRQLYNAALEERREAWRMQRTSVSYYDQQQQLKEIRAADPGQYGRWAVTCERAAIRRLDRTFAAFFRRVKVGEKPGYPRFKGRGWWDSIEWPDHGNGCKWDSVPHPTVTRVRLMGIGHVRVHQHRAVKGTIKTITVKREGDRWYAILACDDVPAEPLPATGAVIGIDMGIASFLTTSDGEHVPNPRPLAATVERLTAAQQSLSSKKRGSNRRRKARARVAKLHGKVRCTRLDHAHKTALALVRSHDVIAHEALQVANMTRRPKPRPAGDGTYEPNGAAAKSGLNKSIHDAGWGVFLDVLRAKAESAGRVIVEVNPRHTSQRCASCGHVAAGNRASQAVFRCLSCGHEAHADVNAAQNILRAGLALQGASDAA

SEQ ID NO: 51725 - protein, 372 aa, unknown
  TnpB Polypeptide
MALADRKNMWEQEGITRSYEDQASILTLERQNNPYLKGVLAQAEQDVLRRLNKAMDNFFRRVREGARKKGYPRFKGYGRYTSFTYPQSGFKLNGTRLMLSKLPGTIRAFVHRQIEGKIKTCTLKRDGQGTWFIIFVTEQEDPVKLEPKTALGVDLGISHAITTSEGQTFDYPKYYIQAEKKNRAAEKSLHRKKLGSKNRKKAQIRLNRINKRVTNLRDEFQHQVSRRLVNSADLIVFEDLNISGMLKNHHLAKHIQDVSWGKLIRFTESKAERAGKSVVLVDPRNTSQRCSDCGQIVLKDLSERVHRCPVCGLRLDRDHNAALNILTLGLRGIACGELTSGLGMRPGRRLFIEAGSPSPLGAREEVTNCAIW

SEQ ID NO: 51726 - protein, 403 aa, unknown
  TnpB Polypeptide
MNKTIYKSYKYRLYPSPEDKELLSLHFGHCRFVYNYFLKEKQEFYLKNKKTLNYNNCSQALTTLKKQKEYAWLKDVNSQSLQQSLKNLETAFGKFFSKKSKFPKFKRKDGNNSFNVPQNVAIKSDKIYIPKFRNGIKFVNHRPLKGKICSATISKKPSGKYYVSILTEQNVCIPDAADLTKAVGIDLGIKDFAITSDGKRYPNLKFQKKYQSKLSKLQKHFARKQKGSNRKEKLRIKIAKLHEKITNSREDMQHKLSSSLLNKYDVICLETLAVKNMMQNHKLAYAIVDVSWNSMIQKLEYKAAWKGKKIIKIDHFYPSSKTCHNCGYINQNLSLKDRTWECSKCGTVLDRDVNAAKNILTRGLTILSSATDDYRHGAEIRLDKPTKDLTSISNEVSKIDLNI

SEQ ID NO: 51727 - protein, 476 aa, unknown
  TnpB Polypeptide
MDARIKATLKTIRKLEKRKASAAKLHQKKRRLGILRDRQKAIRAEMKRPAPALCFGSAKLFNAQHHLEANGYADHAEWQDAWRDARSSQFFCIGSRDEASGNVSCTATLTAEGAIMLRLRLPDAVRDGGPKYAEIGPVSFGYGHDVVTDAIQAHATGQGEALSWRFVRDAQGWRVFVSLFQALPDTVPDFARGCLAVDMNAGFLAAAFLDAHGNPKGRFTVPMLTQHRRTDQVEAAIGNAAARLVSLAKRRGVPIVIEDLDFEAKKTRLREEARPRMARLLSAFAFNGFRTMLERRAAREGVAVLAVDPAYTSFQGRARFMERYGLSVHHAAAVVIGRRAMNSSERLPLSLALPAGDIPAARKRNQSHVTLVRPARIGRRHVRDQWARAMGAWKAALKGLRPTGRHKAAGPSPAKTARAAPAWDRSLEDDAAFLANPTFPPRTHDGAIPSREPAAKLLGGRPCATLLRDEQRCAGF

SEQ ID NO: 51728 - protein, 380 aa, unknown
  TnpB Polypeptide
MQRVISLNIPIKNEILETIKQYNTISNLHINKCFELKTNSKNKLHKALYRYIREQFPNFPSALIQCARDNAIEMLKGNKYKKKTTKKPYSSVRFDLRTSKVFLESGEVQLTTVEGRKKYFVKVPEYFHKYLSWKVKGIVVGVHKKLCRIKVVIENGIVEPTVNKEVLGIDLGINNFVACSDYTIVKANKTKGIKRKYSYLRQCLQQKGTCSAKRKLKKLSGRERRFMAVYNHCLSKDIVEKPFGFFVMEDLKNIRNGRKGRKFNRMRSNWAYYQFRQFLTYKAEDRGKTVILVDPRFTSLRCSKCGFVDKANRNKGFFHCKSCGFSHSADLNASFNIFQLGKALLDRLLVNQPIVATDEGTRCIKTPDVSYKPQFLNGGS

SEQ ID NO: 51729 - protein, 378 aa, Clostridium sp.
LIKGIKIRLFPTEEQEILMFKTIGCARFAYNWGLAKQEENYKNGGKFISCRKLRNEFTKLKKEEEYKWLNEVSSDAIRHPFDNLKTAYDRFFKKTGRYPKFKSKKKSRKSFYVRYDRMKFFKDKQLVSIEKIGRVEYKTNYNIPILKKYMNPNCHFDGKYWYLTFNYEYNENQVELNQDLSIGIDLGVKDLAIVNCLDKPIKNINKTIRVRKLKKRLKRLQRQASRKYEANRQGNKFIKTNNIIKLEKEIKLIHRRLSNIRLNHIHQATNMIVKLRPYRVVMEDLNISGMMKNKHLSKSIAEQCLYEFIRQMQYKCEFNRIEFIQADRFYPSSKTCSNCGHVKKDLKLKDRIYICPECGLEEDRDKNASINLGNYKIA

SEQ ID NO: 51730 - protein, 350 aa, unknown
  TnpB Polypeptide
MTATTTKTLEATLAPPTAHKERKLCDLLDTYRAGLHEAFEAVCETMTATSDVVTPYDLPYQAKAALCNYVPQLHDTYDAQELDDEHPVQLTNQAAEFDHSAARDYEFTWWVPQPGRGTNFWIPLRINPAQEGLWHALVDDESEAAAGQLRLQRHRTSWTLHVTVEFAVEEPDYEPTDSDVTPVGFDIGEAHLLVGCACEQDTPTDPLLINGGRARHLRKEMFTILKRLQERDAAQWRIDERFDHYQNTLTDIIEKASRQAIEYACRFEKPVLVLEDLSDIREDLDYGEWMNRRLHAWAFARLQQRIEDKAREAGIPVAYIRPEYTSQTCHECGHTGHRNGDEFRCQNDEC

SEQ ID NO: 51731 - protein, 398 aa, Streptomyces sp.
VTASQVKRAFKYRFYPTDAQAAELSRTFGCVRKVYNLALAARTEAWARGERVNYNQTSSLLTGWKRTEELAYLSEVSSVPLQQCLRHLQSAFAGFFAGRGKYPRFKSRKKSRRSAEYTSSGFRYRDGKLTLAKMSGPLAVVWSRPLPEGAVPSTVTVSQDAAGRWFVSMLCDDIPVPVPETVKAVGIDAGITSLVTLSTGEKVTNPKFERKDRARLAKAQRELSRKARGDGANRAKARRKVAGIHARIADRRRDHLHKLTTRLVRENQTIVIEDLTVRNMVRNHTLARAISDAAWTTMRTMLEYKSAWYGRTLVTVDRWFPSSKLCSACGAVAERLPLNVREWTCNGCGTTHDRDVNAARSILAAGLAVSVCGAGVRPQRSSPGGLSATKQKTPRREP

SEQ ID NO: 51732 - protein, 697 aa, unknown
  TnpB Polypeptide
MTLKRRKRSGSASASKRAKSNLRPKAEYHVVKDSLKNILRNPDDQAVILDAVLRAHKINIHTCQFIKLYFLQLLSTGQPLPKITEAFVTNIAKIISSESMNNKNRTNRSAQNEATVALNQTLRPWHIQHYKPTIMQDDKISLLGLSTPLGYMTRRIVTDLETNITEHYYDYLCRFLQAVYLPWTPRKTKNPFQYDHKVWAKHLSKLRKLIMNGQGASIVDEHLSAEQIRNLVPMRDLQENKVGYDIKCSPQDYIRPMYYMMQAVEGAEMKLFNLFPMRSSIVPKNIRFCTSSLVDLLVKPQHGLGTQRSLKSNITKHKPRIWNALFKSYKRSFCPERLNGPYAFDHQIETDGVSCSIVSKLKNNGRFEAVKNPFGDTYIDNCYETESLQKMNVVGIDPGKSDLIYCALPIGEKKDRAATQFRYTQDQRRHECKTKKFMRKQESMKKAMIEDKTVKQWEHELRFFNRKTLAFEAFKFYCQKKNQINARLQGFYAKLRFRQLKWYAKINRQRSEDNLINAFKTKFGSPLETIVAMGDWCEDKPRKSFEPTKGKSFRKMFKKAGYKTFLVNEFRTSCRCYNCGEEVAQHFLEVKNPRLEKKTKQCEFDPPCEGCQKAQVYVGKPYKQTVKCHGLLRCDSCETYWNRDLNGALNIRLAAVHAINGLERPLHLQRPPKNATTNITEPNSYGATGVTPSVFTS

SEQ ID NO: 51733 - protein, 404 aa, Alicyclobacillus sp.
MDTFLLCEYGRKRVQRYDPPVCRSPEEAWVNTMHKAFSFRLYPTKEQEQIIRRTIGCCRFVYNHFLALRKESYERDVTTLNQYACMKELPALKQQHPWLQEVDSTALQRAVEDLDHAFQRFFREKKSYPRFKSKKHPKQSYTSKRNGKEDDKATIRIEGNRIRLPKVGWVKFAKSREVQGRILSGTVRLAPSGKFFVSVLVDTEIQPLKPNFNAVGIDLGLKDFAVLSTGETIPNPRHLRKHEKKLKRWQRILSRRKLGGKNREKARLKVARLHEKVRNARLDFLHKLSTRLIRENQAICLEDLRVRNMQQNHKLSKSIADASWSEFRRQLEYKANWYGRQVATVSPVFPSSQLCSCCGHRNAETKDLSVRHWTCPKCGVAHDRDVNAARNILHEGLRLLNLSA

SEQ ID NO: 51734 - protein, 401 aa, unknown
  TnpB Polypeptide
MPTLTNKYHMYPTSDAEKKLVEALETCRWLYNRLLEEIRKAKEDGAPLRMYDCHNMIPMLKGENPALGNVYSKVLQMVSQTLWANIRGLSQLKKNGRRIGHIRFKGAGWYKTLNYNQSGFSFDGDVLHLSKIGDVRVKLHRPIQGNVKGVIVKREGEKWYAIVQIDTIVQELSKNDRIVGIDMGLKAFAVDTDGHEFENPRYLGRTLDRIKIAQRNLSRKKKGGSNRGKAKAKLAKLYEKVNNQRNDFLHKLSRFYVNTYGTICVEDLDIKGLKEKGHNHGLHRNIHDAGWARFLSMLDYKAESAGRRLVKVDARGTTQRCYRCGNNVPKELKDRVHDCPHCGLVADRDYNSAHNILIAGMGHPGEPVEPRPLLHLTAEQALAMNQEAKAFSLMQIRARPW

SEQ ID NO: 51735 - protein, 402 aa, Escherichia sp.
MKQQVSFKFRLKPDGQQECQMRHFAGACRFVFNRALALQNENHEAGKKYIPYTKMASWLVEWKKDTETEWLIDSPSQPLQQSLKDLERAYKNFFQNRAAFPRFKKRGQNDAFRYPQGVKLDQENSRIFLPKLGWMRYRNSRQVTGVVKNVTVSQSCGKWYISIQTESEISTPVHPSASMIGLDAGVAKLATLSDGTVFEPVNSFQKNQKKLARLQRQLSRKVKFSNNWQKQKRKIQRLHFRIANIRRDYLHKVTTIISKNHAMIVIEDLKVKYMSKSAAGTISHPGRNVRAKSGLNRSILDQGWYEMRRQLEYKQLWRGGQVLAVPPAYTSQRCACCGHTAKENRLSQSKFRCQVCGYTANADVNGARNILAAGHAVLACGGMVQSGRPLKQEPTEMIQATA

SEQ ID NO: 51736 - protein, 394 aa, unknown
  TnpB Polypeptide
MKAVRQRHQASGELLRLLDEFRRMVNVCVSVGIDENISSLKLLSSKSYHRLSSDLLSYYRLCAISTATGILRNYRKAKRKNSVTKFPYAKRLMLTTCYGFKIKESFLRLPVKPHQYVYVKLNSHTLQVLSGLNVRSVTLTPDSLSITYSKETAGIETEGFVGVDRNLCNVTTVSTDKIMRRYDLSKVTNIRSTYRYVKSRLQRNDARIRTQVFSKYGKKERNRVQPLLHTVSKRIVKEAKTRQHGIVMERLTEMRRLYRRGSGQSRNYRARMNGWSYGELQRQVEYKARWEGVRTIYVSARNTSKRCSICGYKTLESTQRQLWCPHCGTILDRDENAARNIAAGGLRFSPNGPPGEAMVEEREPADETLILKVDGGKLSQRARAISPDEDLTEP

SEQ ID NO: 51737 - protein, 395 aa, Methanomicrobiales sp.
MLISYKYRAYPDAITRTRLNTALDTCRWLYNKLLEECNTAREHGVNPTMRGMQARIVTLKEENPFLKDVYSKVLQMVNYTLWSNLRALSQTKKKGRKIGNLRFKGASRYRTLNYNQSGFKIDREHRTITFSKIGAIPFRMHRPYSGDVKGVLITRSGDRWYVIVQAEQTVSASKREGRSVGIDVGLNSFVVDSDGTVIENPRFYERSLDRIKKLQQSIARKKRRSQNWKKAKYRLEKVYEHITNQKRDFLHKLSRQYVDTYATICVEDLNIKYLKENGKSRGLRRSIHSASWGRFYSYLSYKAESAGTNFIQIDPRDTTQMCANCGSIVKKSLSERVHECPYCGFVADRDYNAAVNIHRVGMEQPFEPVEMIPLHHISVMQVLSMKQEATPFREG

SEQ ID NO: 51738 - protein, 213 aa, unknown
  TnpB Polypeptide
MTCYDSGNGRAFILGRKYLSLERYFHKEIARVQSVWYAQQSERGIKYPKTSEHIQRLYRKKQNTVKDYLHKVTRWIAEYCRKEDIRCVVVGDIRNIRKEKDMGHKTNQKLHSLPYNRLYIMLEYKLKRYGIQLIKQEESYTSQCSPLSPEVSKRYAEASNRKVRGMYMTDGERYNADAVGAFNILRKYLSVSGKHKKLSVAGLKNPEIIKVAV

SEQ ID NO: 51739 - protein, 404 aa, Nostoc sp.
VRTAYQYKLRPTKQQAQEIDRWLSMCCAQYNYLLADRFNWYEQNRCPVNACPLVCHLPELRDNPEYLGQKRTLPKLKKTHPHYKDVYSDVLQDVVKRVKFTFDRFLKGDSNGKRSGKPRFKSRNRYRTFLYPRVKPDCVSNGKISLPKLGNIKVVLHRHIPDGLKIKTASVTKKADGYYVTLSLEDSTVPTIKPDFNADSITGVDVGLKEFLTTSEGETVAIPQHYRKAQKRLRVTQKRVSRRKKGSNRRLKAVKQLGKQHKKVADKRKDFHFKTANNLLKKYDVVVVEDLNVKGLSRSKLAKSVLDAGWSSFLSILTNKAENAGLLVIPVKASSTSQDCSNCGVKVPKKLHERWHDCPNCGCSLDRDHNAAINIKNRAVGHPVLKAKSLLSDSRIVLEAYTVC

SEQ ID NO: 51740 - protein, 320 aa, Nostoc sp.
MKRTVSIPVELPSERFFPLMNQCAEIFNAHVDWSIANSTYNKNKAHKELYHLLRVQFPSVPSALLQTVRDNALEAIKATKFKSIPKKKPTSGLRYDKRTMTLRGKQLTLSCIGKRVTLILDVPEYFREVFETWDFCGATVTYTKNTKRKVRAEASSELNLSGREKRFMKDTNHCVSKKLSNQPGVAVFVLEDLSSIRTQRRGKKMNKWLGSWAFYQQEQFLSYKAEALGKRVVHQDPRYTSAKCNICKHIRRTNRHKSRFHCKNCGHRTHADLNAAKNIRDDYILYSTQGTEEQASVNMPDVSTDSLGQLQAPSTRGWGG

SEQ ID NO: 51741 - protein, 264 aa, unknown
  TnpB Polypeptide
MTIDVIKLMRFIEKLDPKYFKEIDLGRSTLYEYKAKPKKLYNARLSTVLKLNQYMIAFENQKDFRVDYSDQQNKDLTKVIKIEKFIGVDTGEMHLLASSNFDFTKTFSSHTPKLNKLTKDYKKSLEHANQLDFKTIKDTIKSKYITQIEGLVNEQVNTMIKNYRNDSIFIIGDNQGAEKEDEYSSRYIIWHLLKKQLNKKLHDKQRVIFVDETGSSIKCPNCDKSKKSNRTQQNQFKCKKCGFFHNKNDEVAAVNILNKYLKQL

SEQ ID NO: 51742 - protein, 391 aa, unknown
  TnpB Polypeptide
MIKKKNLDIKKFPKSRLKKIVKGISNEISETVLRCKKIIIKFSKIQRKIIRKWIDIYRWIYNFTIKYTRTSKMKSFYTLRKEIKESFTYGQKEYIYQMPSHILDQAINDVVKSYKTCMSNKKEGNIKRFRLRYKKKISNIQTICIPSEYFSKNKNSFVYSKLGIINSSESIKNIKQTCRLTWNKKNNIFILNIPVEKEKYKVGNREEICSIDPGIRTFQTLYSKKYISEFGKDIYKEIGTKIDKIENKKENEGTKWYRKYSTRLYDKIKHKIEDLHWKTSLDLVKSFDTILVGNMSTQRICQGNLNKKVKCIANMFSHYKFNLRLQQKAEQYGAKIIMVNEAYTSKTCGKCLKRNEKLGGNKKFKCPSCGFTWDRDYNGARNIMMRYFGIF

SEQ ID NO: 51743 - protein, 496 aa, unknown
  TnpB Polypeptide
LTGAGGSLRTNARPASASTPRNWKAAVGNSRLWNRFLAFCASLVRGGQRSRLPPVPGCGTLVPEQELSARESCRRVEGHQRLYAQEESPMRLVEQHVITRTDPHYRSIDAAAFASKNLWNAANYLVRQAFLKEGIYLNNTAVYHLIKGHAAYQALPRKVSNQVLLQLHQAWESFFEAMQVWREHPEQFTGRPKLPKYKHKTAGRNLLVYERGAIWKRELNRGLIALSGLGALGQTKQSRKTVDQVRLVPKADHYVLEVVYQREVTPAPVAPELFVAADLGVNVLSALVSNKPGFVPRLGNGHPLKATNQLYNKQRAHLQQQLAKANRFTSRQLDRLTTKRNRRVLQYLHTASRRIIKLLVEEGIGTLVIGKNPLWKQGVELGHKHNQEFVQILHARFIDLLTYKAELVGIRVILTEESYTSQASFLDRDPLSTYDPAREEHPHFSGRRDGRWYRASGNRLLHSDVNGAYNIGRKVVPTAFGPGIGAAAVRPRRLAV

SEQ ID NO: 51744 - protein, 289 aa, unknown
  TnpB Polypeptide
MAIIQLGQAFANFWKNPEHFKYPKFKKKYVSDSFTISNDHFEVKGSRIRIPKLGWVRMREPLRFKEAKLLWATVSRRGKRWYVSLTCELANLNHLKPAKNQGTVGVDLGVKSLAVLSNHKRFEALQPLKKSLSKLRRLQRKLARSQKGSKNRIKLVLEIGELHRKIFNYRQNALHQLTNYLTTHFSRIVIEDLNVSGMLKNGKLARCIADVGFYEFRRQLEYKAEQRGCEVIIADRFYASSKTCGYCGQINDELRLSDRRWKCAHCGAEIKDRDFNAAINLRRYTERPG

SEQ ID NO: 51745 - protein, 391 aa, unknown
  TnpB Polypeptide
MQGYKNVVMPMRWQSNDIPTIMMTEARKQCTRDHAVDYYEQKRELVDLKELRPEYQEIASHVLQDVMLRLKRTYDGFFRRVYNGERPGYPRFQGRNRYDSFTYPDGAGWKLEAQKRPLEKKGMIKVNLHLSKIGTVNVHLHRDLEGSIKTLTIKRGGDHWYAVFTCEVVDIPLPVSSQEVGIDLGVTHFAALSDDTFIEHPRYFRRTEKKLAKAQQALARKKKGSHRRAKAVRRVAMCHRKIRNQRKDFQHKASRKLVNQYQMIVLEDLQVKNLTKAPAPKQDEQGNYLPNGASAKAGLTKSILDAGWATFTEMIHFKAASAGRTVLLVNPFMTSQRCSGCGTIVKKDLSERWHSCACGTELDRDTNAAINILNLGKKHFLGGTRPTSATA

SEQ ID NO: 51746 - protein, 231 aa, unknown
  TnpB Polypeptide
MEQITITAKVQIVATDTDKVLLNETMSVYCDACNYVSDYVFRTHDLKQFSLNKILYSTLREKFSLKSQMAQSVFKTVIARYKTILENQNEWIKPSFKKPQYDLVWNRDYSLTQNCFSVNTLNGRVKLPYFAEGMSKYFNHSIYKFGTAKLVNKHGKYYLHIPVTYEVEESNISDICNVVGIDRGINLLLQLMTANISPDLLVVKLLNRNGLIIPGFVKNFKCDIRHPQDED

SEQ ID NO: 51747 - protein, 346 aa, unknown
  TnpB Polypeptide
VSDTFRAFQPVTVPDSRLDSPLASHEAALDVGANNLVACSTTTGNQYIYDGRELFGRFRETTDEIARLQSKLREGRYSSKRIRRLYRQRTKRRDHAQNALVRDLVERLYDEGLATVYVGDLTDVLDTHWSVRVNEKTHNFWAFKKFIHRLACVCEEYGISLEAEPEAWTSQTCPECGDHETTVRHRDTLTDVSVWIRGARRPHGVRDVPSRKQRYGSQADGTARAIRVGRPRMVRETIPRMKVPKKCARTRKLPPWVGSRTPIGGILALQRGEDVKLGMRGGEGVTTRQSTVHYSADIAGAPTSVLGALCFVDYADVGGSLGLRAELVWLPGGLFLVHHSPSTARR

SEQ ID NO: 51748 - protein, 696 aa, unknown
  TnpB Polypeptide
MDGELLESESVLGRLAAEVRDISAYATYVVRNDEVLGDELARVTASAPADAGRRAGVTMPDFLETGRTGRSRKERLVQHNVVASYRSYQERVEAANGESSKYVSQGWKRTVNGSTPSYGEDYVNLGAVDRAYARIENNPFSDGEIVLRMVIQGAWYRLIFNFDNKRFTEGKVTLPVIKVQDGQPVFIFTVVTDNPVVQFSGDYTIGVDVGITDYATVVVRSVETGRIVYETTLSQRVHSLWNSVRASERQVRALKAKAATLLHDRQASMSALDEARLHREAASRKKRELAILAAQEIAYLSYVWDNAVVAVEDLSWIANTMQNGRWNRGALIKWLTHYVSQNGGWVVAVNPAHTSQQCHLCGQRVTHPTRKLSVCPEHGVLDRDINAAANVAARAVSRVVKARMTRAKNRKLRSQAPLRTPIARNSLKNTGRNRMKSKPTPKRKNNRRVSKGVNLPLCPARAQASHLEASVLADQDTRVTLGTNMAALKQDTSMTYDRRLYNPVGYAKYMSVMLGDTSDGPGVRAAIYYSGCELRCEGCWSPQTWNPRVGHDMTATKRREIVAYLERPEVAGLSLLGGDPFHPLNAADATALCALVRNRFGWGGERTIWAWTGYTFDELLEREHARMLLPMLDVVVDGPFVLGERDLNLPFMGSRNQRVVDVQATLAGRRDGSLGVGEVVVLDEWMRAPAPPTVDA

SEQ ID NO: 51749 - protein, 434 aa, unknown
  TnpB Polypeptide
MFEAVKVALDPSPAQEKRLLSHAGGARFAYNAGLAHVKAALDAGEQPNLSFYSLRKWWNSVKDELAVGGGGVIWWADNSKEAYSYGLESLSKGLSNWWKSRKGDRKGRRVGFPKFKAKDKATPRFSYTAGGFGLIDGDPKALRLPKIGRVHCMENVAERVNGAKVLRMTISQRAGRWYASLTVERDDPEARRKPKGGAVGVDLGVKHLATLSDGTVVENPHYLQKSEKKLRRAQRELSRKTRGSNRRNKAKDKVARLHAHVANQRQDAMHKLTTWLANKYSDISIEDLHVAGMVKNHHLAKSISDAAFGEFRRQLEYKTARSGTALHVVDRWFASSQTCSGCGSVKAKLSLAERTYRCDSCGLVLDRDLNAAVNIKVAGSAPETVNAHGGTVRRPRNLSGCATLDPVKCEPSGGANRVNLGAGGREAALQATVE

SEQ ID NO: 51750 - protein, 442 aa, unknown
  TnpB Polypeptide
MPDFLVSGKSGRSRKEMLVQHRVVTEFRSWQERYRAANGESSKYVSQGWKRTVDASEPSYGEDYVNLGAVDGAYARIENNPFADGEIVLKMVIQGQWYRLIFTFDNKRFTEGKVTLPVIKVEDGQPVFIFTVVTDNPVVQFSGDYTIGVDVGINNYATVVVRDTKTGRIVYETTLSQRVHSLWNSVRASEQQVRDLKAKAVTLLCDRQARMAALDEAQFHREAASRKKRELAILAAQEIVDLSHMWGNAVVAVEDLGWVANTMQNGRWNRGALVQWLTHYVSQNGGWVVAVNPSNTSQQCYKCGAKVTHPTHKDSVCTEHGTMDRDVNAASNIAARAVPRVTKARVTRAKNRKLRPQGALRTPVARNSLKYPGRDRTKNKPTEKRKSHRRTVREVNPPLRPARAQAYRLDARVLADQGARGYLGTNVAALKQGCITCKCALL

SEQ ID NO: 51751 - protein, 355 aa, unknown
  TnpB Polypeptide
LYNNALATRKDAWQTHQRSVSYCEQASHLKAAKQNNPLLKAVHSQVLQDVLRRLDKTFTNFFRRLKKGEKAGYPRFKGKYRYDSFTYPQSGFALDYHKKKLCLSKIGRITIKLHRPIPAEGVIKTCTIKREVDHWYACFAVALPDPDPGSQREIQSAIGVDVGLKSLLTFNNGDTIDNPRWLRHSEKKLAKAQRRQARAQKGSRNRHKQNTKVAQLHRKIRNQRKDFHHKLSRKLVDTYDLIVYEHLKITNMVKNHHLAKSISDVGWGQLMHFTEYKAEEAGTLVEYVSAYHTTQLCSRCGKLVPKTLATRIHNCPYCGLDVARDHNSAITILHRSINYAESQSSSGQGLPVEPV

SEQ ID NO: 51752 - protein, 471 aa, Lactobacillus sp.
  misc_feature (248)..(456): Xaa can be any naturally occurring amino acid
VLKGIKLRLYPNRTQQNQLEQMFGNDRFVWNQMLAMMNERYQNNKALPFLGKFKLKYLLKPLKKEYPFLKTSDSSSLQVVNEFLTQSWKNFFQDKTGQVGKPRFHSRKYLKKSYTGKSIIKTAGKRYLKIPKLGYVKTSKTGVLQNTKIKRYTVLLEPTGKYYLSLQVEISEPEKYSLTGKQVGIDVGVADLAILSNELKYPSFDSSYFEKKAKVWQRKYARRRHLAKLLVLQDRNKKVLCPRSLESXXXXXXXXXXXXXXXXXXXXXXXXXXXXXXXXXXXXXXXXXXXXXXXXXXXXXXXXXXXXXXXXXXXXXXXXXXXXXXXXXXXXXXXXXXXXXXXXXXXXXXXXXXXXXXXXXXXXXXXXXXXXXXXXXXXXXXXXXXXXXXXXXXXXXXXXXXXXXXXXXXXXXXXXXXXXXXXXXXXXXXXXXXXXXXXXXXXXXXXXXXXXXXXXXNWSGTGHGNKLSSVS

SEQ ID NO: 51753 - protein, 398 aa, unknown
  TnpB Polypeptide
VLKAYRYQLDLNATQRQFFARAFGSARYIYNWSLEKRIKAYREEKKRLTAYDLCKLLTPLKNEEGKEWLYETPSVCLQQAIRNMDSAFVRFFREKNGFPKFRNKHGRQRIQFINNVEVDFEASKVKLPKIGWVRIHNSRPFEGKMGTVTVSRNAAGKHFVSVLVHTPDPIPEKRPVNEATAVGIDVGLHEYYVLSDGTRVANPRHYQNSEKRLAVLQRRLSKKQKGSNRRKRANLAVAKCHYRIACQRNDFLHKLTSRLVKNHDSIVIEDLNVEGMLKNHCLAKHISSASWSEFFRQLEYKCEWNGKNLLRIGRFEPSSRLCTCGFVNRELTLKDRTWKCPSCGEVHDRDLLAARNIKMFGLEKTNLIGQVSGAVSAAEDVEAPAMAGPVKRQVNTTC

SEQ ID NO: 51754 - protein, 398 aa, unknown; identical to SEQ ID NO: 51753
  TnpB Polypeptide

SEQ ID NO: 51755 - protein, 382 aa, Acidianus sp.
MARRVKAIRATVSMKIAVSDSLLALVNNYVKALRFTLFWLKENVPNPNEKGVLGKVHEELYTRLRGEYNLPSKVAQDCYRDALSIYKGWYNNPRRGRFPRVYKPTVWLTPKASYNVDFERMTVRIASVGELQILGYPRNLKEYLSWKMKEARLVIKGGKAFLKVVFDNEEEGKVEPRGSIAVDINMAEVVVGKDDKHYVRIPTRLEEVHHWKSLAESLQRKYPRRWRENRRILNRIHSFHLKAKMVMEDFARKVGKWVVEVARMMGSNVIKLESLKNLIKNVDKLPKEFRDKLYLMQYRRLQYWIVWQAKKHGMIVEFVNPSYSSVSCPKCEQKMVEVSHRWFRCSCGYENDRDVIAVVNLNGRGSLSLSTAPQMRDVRANR

SEQ ID NO: 51756 - protein, 412 aa, Acidianus sp.
MERTVKLRVRVDYATYSALKEVEKEYREVLDDAINYGLVNKATSFTRIKAGIYREEREKHKDLPSHYIYTACEDASERLDSFEKLKKKGRSYTDKPSVRKVTVHLDDHLWKFSLDKISIAVKRGRVFISPTFPKIFWRYYNKGWLIASEARFKLLKRNVVEFYVIFKKDEPKPYEPKAFIPVDLNENSVSLLINSKPVLLETNTKRITLGYEYRRKSITTGKSTKDREVRRKLKRLREGDKKVDIRRKLAKLIVEEAFESRSAIVLEDLPRRTPEHMVKDVKDSQLRLRIYRSAFSSMKNFIIEKAREFGVPVVLVNPSYTSTVCPVHGCKIAYQPDGGNAPRVGVCEKGEEKWHRDVVALYNLTKRAGDVSPVPLGSKESHDPYVIKMSVWLRAKSLHSIMNKHKMIEMKV

SEQ ID NO: 51757 - protein, 383 aa, Acidianus sp.
MARRVKAIRATVSMKIALSEPLLALMINYVKALRFTLFWLKENVPDPNEKGVLSKVHEELYEKLKEEYNLPSKVAEDCYRDALSIYKAWYNNPRRGRFPRVYKPTVWLTPKASYSVDFETMTVRIAGVGELQILGYPRNLKGHMSWKMKESRLVVRDGKAFLKVVFEEEEEGKVESKESIAVDINMAEIVVGKDDRNYVRIPTRLEEVHHWKSLAENLQRKYPRRWRENKRILYRVRSFHIKAKRVMEDFARKVGKWVVEVARMMGANVVKLESLKNLIKNVDRLPGEFRDKLYLMQYRRIQYWIVWQARKRGMVVEFVNPSYSSISCPKCGQRMVEVGYRYFRCLKCGYENDRDVIAVVNLNGRGSLSLSTAPQMRDVRANR

SEQ ID NO: 51758 - protein, 405 aa, unknown
  TnpB Polypeptide
MRHYAIKVRIYPSNEQKIILAQHFGCARWWWNYALSYCIDTYKATGKGKSRADLNSMLPKLKKASETKWLKECYSQVFQATTLNLVTAYKNFFDGRARFPRFKSKKNKQSIQFPQNVKIDNGNLKFPGKVGVIKTKFDKRQIEGDIKTVTISMTPSGKYFASILTDKRGDYPKPSHEGKVAGIDLGVKDFAIVNDGDKTSKFANPKHLSKHEKNLSFKQKKLARKQKGSNTRNKARKIVARVHERISNTRQDYLHKLSKKLVDDNQVIVVENLNIKGMVRNHNLAKAISDAGWGMFVNFLSYKLEKEGKILVEIDRFFPSSKTCSNCLYQISEMPLDIRMWECPSCGAKHDRDENAAKNIRAEGIRILRSSGTGDSANGGDVRPKLGRKPVQRQSPAKLETSISA

SEQ ID NO: 51759 - protein, 446 aa, unknown
  TnpB Polypeptide
MTMKQRNQQRPRRNGKPPTYTFAVTHIRLEEANPGKLAALDALAPVFLSLCQQYVTLFCTDEHPDKFHPPIFPTLLSERWQRVAIQQAAGIAQSWRTNREQAYQDYIDELAAYHEQQANGTLDAEAKEPTWREWDVPTLRQTCIQANANVVVLEPSQDSTFDYWLKISTLDFRRLLLVPVKLADYHREALKGKTINTSVTLNQRDTGWWLTLSYDKVIPIQTKPDAPVVGIDVGIANFVTTSTGEHYGTMHGKLRERQKRDREKRRRKAKLRACLKKKGVEILPSTSSRSGQRLTRHVRQEINRAVNQCFAAHPDAHFAYEQLSVATMKFKARAMNSYMRASNLAHIPRQIAWNAAKRGIQATSVKSAYSSQACSVCHYVDRKNRPNQHTFCCQVCGYQVHADLNAATNIARRVGDAELCVCTDKHEVKALLMQRHEAWRKANGWP

SEQ ID NO: 51760 - protein, 441 aa, Clostridiaceae sp.
MKVVSSYGVEIKKQNIPIRHTLYIYRQAVGYLIRVYEESWEELSRIVNLQKRFNAAEHLVHSTKKNRVRYDFDQKFPKMPSYLRRSAIQHALGSVSSYETRLELWKQKKLAGKPKLVYENHAMPVFYRDVMYKEAEDQTDRAFLKLYDGHDWKWFSVNLLHTDMEYLRENWSGVKASAPTLEKRHHKYFLRFSYTEEVSLSKKEVNEQIICSVDLGINMDAVCTIMRADGTVLGRKFINFPSEKDQMYRVVGRIRRFQREHGSGQVQSRWNYARRLNMELSRKVASAITTYAQNNHVDVIVFEYLEMKGKAAGKKKQKLHLWRKRDIQKLCEHQAHRTGMRVSRVCAWNTSRLAYDGTGEVIRDSENHSLCTFATGKRYHCDLSAAYNIGARYFIRERLKPLSATVRSSLEAKVPSVKRRTSCVYADLLLLSAELGSMQAA

SEQ ID NO: 51761 - protein, 425 aa, Nonomuraea sp.
MLTGRKYRLDLTPGQDDLAERIGGACRSVWNTGLEQRRIYRRRGGWIGYHDQARQLVEAKGEFEWLAEVPGHCLQQTLIDLDQACAEHGTWKVRWKSKVNNPPSFRFPEGGKIAIERLNRRWARAKLPKLGWVRFRITRPLGGTVKNATVSRDGKHWYISFLVEDGITPPVRHAHPGSGVGIDRGVVKVVTRSDGRFHHQVFARDREVEHAKKLQRDFARTTKGSARRKRAAGRVADLARKVRRRREDFAAKTAHSLAIGFELVVFEALATKNMTAGVEPRPDPERSGAFLLNGAASKSGLNRSILDKGWHRIEVAIRSKARYTGTRVITVSPAYTSQTCNVCTVVDRKSRKSQAVFWCTSCGHTEDADVNAAKNILTAGRAEPAQPRPGVRAGARKPRTRVGRKAPPSNSHRADGARTGRNPLI

SEQ ID NO: 51762 - protein, 404 aa, Oscillatoriales sp.
VLNLTYEFKLKPTSEQVFIFTDWLEQCRRVYNHALTERKDWFKSRSCQINACSLRSEYTIPAETKRPTYASQCKSLTANRKTNSNLQRVQSQVLQQTLLRLEKAFVSMWEQKHGFPRFKKPGTMRSFVFPQLRKNVVQGSTIKLPMVGWVKFRQSREIPDGATLRQVRIVRRASGWFAMLTLQWDVVIPDVMPHGEGIGVDVGISHFAAASNGILFPNPRPFKKLERKLKLLQRSVSRKVKGSSNRKKTQVKVSKLHERIANVRKNYHWLVAHNLCDLARMIFLEDLNLKRLARGFLGKHCLDAGWGQFFQILEQCCRKRGVFFLYVDSKKTSQICPNCLTETGKKELSERVHSCQYCGYTTDRDVAAAQVVLIRGLAAVGHTVKMLSEGKAVALPLTKESPGF

SEQ ID NO: 51763 - protein, 514 aa, Okeania sp.
VRPRDDASSLAERAPRDHKLARAISDASWGEIVRQLEYKAQWYGRELIKIDRYFPSSKRCSSCGHVVEKLPLNIREWDCPECSSHHDRDINASINILAAGLAVSVCGATVRPEGSKSRKAGAMKQKAPNSDVKESRAVTQVQRLEDVNYGHGYLSYTKMDKLMQKTEQYQALPAKVSQQVLRGLEKNWKSFFEANKAYKVDASKFLGKPKIPKYKNPQKGRNLLVYTQQAISKVPLKQGKIRLSKTNIEFPTSVSEKVAEVRIVPRCDCYVIEVIYEQSEKTLNPNEWIVSVDLGVNVLMAVTSNQPGFIPLLINGRPLKSLNQFYNKRKAILQSQLKGNRQTSKRIKRLTRCRNQKVENYLHLASRYLVNLLRSKNITTLVIGKNEGWKQKTNMGKVNNQKFVAIPFNRLIAMLTYKCQLVGIKVVITEESYTSQSNFFNLDELPVYGESQEKPTFTGKRITRGLYRTQTGIFCQSDILSSYNILRKAFPNAFCYGIERCVVHPRRINLSKPK

SEQ ID NO: 51764 - protein, 306 aa, Okeania sp.
VVEKAYKFRFYPTPEQENLLRKTLGCVRLIYNKALAVRTQAWYENKERVGYKQTSAMLTSWKKQEDLDFLTEVSSVPLQQGLRHLQTAFPAECCANTNFFSGRTKYPNFKKKRNGGSAEFTRSAFKWKDGQVYLAKCTEPLPIRWSRELPQNCVPTTITVKLDPSGRWSVSLRINDPRDLKLKPILKQLGIDLGITSLLTTSDGKTFANPKNLNKLHKKLRLAQKSLSRKTKASNNYQKARLKVARIHAKIKDSRLDYTHKLTTQLIRDNQTVVVEDLAVKNMVKKRCDPATTPARLRNAHQETIS

SEQ ID NO: 51765 - protein, 145 aa, unknown
  TnpB Polypeptide
VYFLQEKEPGTLCFTEKQRKKLAREQRKLSHCEKGSRNYQKQKKKVALCHEKIKNQRKDFQHKLSRELAERYDAVCVEDLNLQGMSGGLHLGKGVQDNGYGQFLSMLGYKLEERGKHLIKVDRYFASSKICSVCGHKKKRTGIVG

SEQ ID NO: 51766 - protein, 561 aa, unknown
  TnpB Polypeptide
VIAAYLGVIERHEKELRTGKGGTQLDPGRLNELTLTALRGRNHRTSVVHDFKARFPRISVNEFGECRDTAIAMWGSYLERAGAKPLKSKNYRPRKIPRCIFPHCFTLVYSDTSTTECTLYLRDSLDSRRNGQAHHNKLSIPLSVSSYHANRMEQGQVKTVRIVKDLRRKWWAIFSVDLEPEQQDSRGKPPAVLAIDLGVNKAACTVLLTQHGFRQVRYWKQNDKLRHLTAYEDTIAALQKASMQPVSNGGRRRAITDKLYQLGHKRANVSSEYDRELIKRISEYILDMNSRYDLYVAIGRLRGIRNRARKGNFQGSAYRKMIHGWSFARVSTSLEHKLTTLGFNARRFRSVPEAWTSRVCHKCGHIGYRPKQSLFVCGTCGYHANADLNAAVNIGRRLITLIPSLRDETKGLGMWLPPPKRTPPNAQRGERPKGKSLLSQRLPASPKGESVADDCTQTCVTMFECDEDPAMAKTVEKPSAAGSMGSPGTDQQRQETTCREGNNVPAISDKAHAQAMGQVPPSAGDSSREKGGTQKLSMVSSLTQHGSRVLDLTDMNMSELY

SEQ ID NO: 51767 - protein, 418 aa, unknown
  TnpB Polypeptide
MVRARAVAGVARMIPPVMQACKGRLYGAGLKAVARIGGQCRAVWNEFLAKTVARYEAEKKFVFYSEMSARLPEMLKTDPRLAGLPHRAAQMTVQKLDRALKDCAKGKAGRKGFPKFKSRHKRADAFSFVGREVRVEPGRIRLPKIGWLRVRGMTLPPDADLKQVAVTQEPNGWHVSIQFEAAPKVYATPTLPAVGIDAGLMNLATLSDGTRIPHPRLARGAAKRLRRLEREKSRRRKGSVNRRRTVAKIGRAQRKLRDSRKDAMHKTTRKLVDTYGGFAVEDLSLKGLMRTRLAGSLADAGLGEFIRTLHYKADWAGRPWHVHGRFVRSTGVCPDCDHVGDKLPLSVRSWDCVSCGAVHDRDVAAARVILSTVGRASPEPAERRKRGAAVRGGGRTPVRSSHGGPPSNVANASKRKLL

SEQ ID NO: 51768 - protein, 314 aa, unknown
  TnpB Polypeptide
NNCGSKARKKAIQNAETAYKRFFKGQAKFPKFKKKNKCDVKLYFPKNNKGDWKVDRHRIMVPTLNKVRLKEYGYIPVGSKIISGTVSKKANRYYVSVIIDVENIPQKNTNQGIGIDLGIKDFAICSNKIIYKNINKTQRVRKLEKKLLREQKRLSRKYESLKIRNKKEKGEATRQNIQKQIAKVQILYQRLNNIRTDYINKVVSNVVRNKPSYITIEDLNVKGMMRNKHLSKAVAQQKFNEFRNKLANKCNALGIELRIVDRFYPSSKLCHKCASIKKDLKLKDRIFNCDCGYVEDRDYNASLNLRDAKIYKTA

SEQ ID NO: 51769 - protein, 369 aa, Streptococcus sp.
MTVRQKSYKFRIYPTREQTVMFSKTFGCCRAIWNMMLADKIKHYEETGQTLKNTPAQYKKEFEWLKEVDSLALANVQLNLQKAYKSFFQSGFGFPKFKKKRHRQSYKTNNQNGTITVLDGKVKLPKIGWVKLNQHREMSGVIKSATISMTETGKYFISILCETEIYPLPKTGEHVGIDLGLSDFAILSTGEKIGNEKFLQNLSKKLAKEQKILSRRALVAKKSGKKLSESMNYQKQRIKVANIHEKIANKRRDFLNKLSTEIVKNHDIICIEDLSSKNLMKNHKLARAIGDVSWSEFVRMLEYKAEWYEKQVSKISRWYASSQICSDCGFASGKKPLSIREWTCENCGSHHDRDINASINILNEGLRLA

SEQ ID NO: 51770 - protein, 483 aa, Peptococcaceae sp.
MITIQAKLTFPSEGDEQIVLDLMRRWSSCMRYAYNRLLEGYSRNELKRELQGVFNLNSRYVDDAIMKAKSVLESCKERGENPGNVIFGGRGLFEKLKKRHINGKAYKKLQRKWQEKRKGNLYSRGDKSKKGNLNTRIETKGKGTWLRINIGERQYIYARLNAGWKKGESRDLILQTIGINEDPYSVELKVKNGRVYAYFTIEENLPEIVVTKGNGVIGIDVNAYPNHIAWAEADENGQLIRYGKIPMPELESGNSDKREYFRWQYAYKIVGIAKEKRKAIVIERLDIKDKGKRGDFSGRKSRRIRHSFSYKSFLEKIKVLAKRNGIEVIEINPAYTSVIGMLKYAPQYMISKDVAAAYVIARKGLGLKERIPNNYIKVLESLDIESLEELKDYVRKTVQNKHLRKKHLREIDRTIEILQSLGSKSGRASEPLDGTSSGACSASYNLWRVLKAAVVTPLSPERVLRDVSVLKGVLHSGQVGRPG

SEQ ID NO: 51771 - protein, 461 aa, Mycolicibacterium sp.
MPKFEIPEGWTVQAFRFTLEPTEDQARSLARHFGARRKAYNWTVATLKADIEAWRATGVETQRPSLRVLRKRWNTVKNEVCVNADTGAVWWPECSKEAYADGISGAVEAYWNWQQSRAGTRAGKRVGFPRFKKKGRDHDRLTFTTGAMRVESDRRHLTLPVVGCVRTRENTRRIERLIAKGRARILAISVRRNGTRLDASVRVVVQRPQRPRVALPDSRVGVDLGVRRTATVADADGTVIEHVPNLRPLDAALKDLRHVSRARSRCTKGSRQYRQRTTEISRLYCRINDVRMHHLHVLTTRLAKTHGRIVVEDLDVAGMLRQKGISGASARRRALSDAALGIPRRHLAYKTAWYGSQLVVADRWFPSSKTCHSCGHVQNIGWDEHWQCMACLTSHQRDECAAINLARYEDRPSVVGPVGAAVKRRADRKTEPGSAGGDEARKGTGQRPATNPETGCESDDH

SEQ ID NO: 51772 - protein, 424 aa, unknown
  TnpB Polypeptide
MKSAKDLPYNFGVKMQAYPSSDQKRIIDKNINFARFYWNQLVGANKEIAKLRHDSTLLAWPWADARIARLRELANPNGRMLRQVYTFANDKDLDSNALMQAKANYNAAWNLCRKVKSAQPPTFHKKQAFGSYQTSNKYEKPKTIDKATVFNGNIRFLDESHIQLPKIGRIRVAFSKKRYLQLKKMCEDGGELRLTKATISRDSCGSYYVSFQIASDVLIEGSFGKTGSQIGIDLNVDNFLTDSDGNVVDNPRYYRQTKKQLAKAQRKLSKRCARAKKENRPLRTAKNYQKQRKLVAKIQRRVLCRRNAFLDVLSTTLIKNHDLVAAEELRSKNMMKNHALAMSISDVGWRTFLSMLEYKADMHGKEFKTVNPRNTTQTCSCCGHVMSGKDKLSLKDREWTCSSCGVFHVRDHNAAKNILAKALA

SEQ ID NO: 51773 - protein, 238 aa, Escherichia sp.
MMMLILKAYKFRLEPTHEQSQRLRQLCGCARFVWNLGLAETKRILGSGEKLPSAFELNRMITVWKKMPEYIFLQDAYTDNLQQKLKDLHTAWKRCFDKKLAAKAPVWKRKNEGRDSIRFVNFEKYCCLENRRVKLPSGLGWVKFRQSQRVNGKIKNATISQLAGQWYISFQVEIETAEPNHTSTTIVGLDAGVAVRCLLFRQRTLASVARAVVILRKKIACHKVNLCVRYVDIQRTPM

SEQ ID NO: 51774 - protein, 370 aa, unknown
  TnpB Polypeptide
MERSYKFRIYPNQQQRILLTKTFGCCRFVYNYYLNKRIKLYKESEQYFGYYDCCKDLTTIKEDMEWLREVDSRALKGILKNLELAYKNFFRGGFGFPKFKSKKDNHKSYTTSYTETSNGGNIKFLPKYIQLPKLGLVKFRDKQIPQGRILNATISQDPSGKYFCSLCCTDVFVDKLPSTGSVIGIDLGLKDFLITSNGDKIANPKYLSKSLEKLAKLQRELSRKPSKSNRREKARIKVAKQYEKITNQRRDFLRKLSTQLIRDNDIICMEDLQVSNMVKNHKLARAINDVSWAEFRRQLEYKANWYGRQISVIDKFFPSSQTCSCCGYKNSETKNLNIREWICTECGTNHDRDINAAKNILIEGLRLLNC

SEQ ID NO: 51775 - protein, 384 aa, unknown
  TnpB Polypeptide
VNRHCLKIRLYPTRTQARELEAALETCRLVYNSLVLDRKYQYDVDGQSVGYFQQKAYLPVWKKNHPELKEVYSQVLQDVAHRVHLAFDAFFDRVKKGETPGFPRFKGTGQYDSLTYTQGKNFKVGDSTLELPKFGKVKAKIHRRPWGILKTCTLHRVNGKWFACICQEIEPELLPPSDEAVGIDVGLKTFAALSNGEGDNFFIENPRFFRRDEKALAKAHRKLAKQIKSASGQKRGSKARKKARKVVSRIHERIRNRRHDFCHQNARRLVNRFGVIAAEKLNVKGMVTPINPKNHCLAKSIADVAWSQFRSVLTSKAENAGRKVALVDPAFTTQDCSGCGFRAKKKLSERWHLCPMCGLSLDRDTNAAVNISALGQKSLAVATA

SEQ ID NO: 51776 - protein, 718 aa, unknown
  TnpB Polypeptide
VRCTRCNSWCSRSPWLVPSCRSLWGRLSSARSRHWRRHRFHVARLVGEIESRPGTRASRRVSIDARTLCAGQRGTKRHVAQSRPGTAVPASARPRATATRSSSHPAKTGTSSAPPASVRVSDPLIRSTAVTTSRPDIHPRHANRSTARRTAGSSSGSPGAGRPRSKSWRSSRVPSACTTPRSTHPPRRTWRRVSAVGDSTGSVTCTARSGKWCSYQPTAWVITARSSATSPGAPIQVPVSCQVRMASRSPLRTRARLTGSVVPGSLCSSDASRRGHIESAARKTNGVTFVGSSSTRIATCGGYGDPRPERRIGQWVSLSVTGLYYRRWVSRCRSLKYLLNPTIRQRVALVGLLDLQCELYNAALEERRGAWHWERRSVSYVDQCRTLTTLREVRPEVLTSGVTLCRGTLRRLDWAFAAFYRRCRAGQRPGYPRFRSRTRWDSLQWEDHNGWRLDPAAKRLHLMRIGGIKMRLHRPIRGTPKAITVRREGRRWWVTIRCVDVPAEPLPATGRQVGIDLGVTVLVATSDGTLITNDRHAQRAANRLARAQRELATKQRGSQHRRRAVERVAAAHRRVRNRRANTLHQLSRRLVNEHDLIVHEQLAVANLVRRPKPRPDGAGGYAPNGAAAKTGLNRCIHDAGWGQFLAMIAYKAESAGRTVIAVDPRNTSRTCADCGHVSAGNRRGAVFECQACGHQAHADTNAAINILRAGRAQQPKAA

SEQ ID NO: 51777 - protein, 421 aa, Planktothrix sp.
MLTLTYEYKLIPDEQQIELIEHTLNLCRSVWNYALRERKDWLASRKSPVNACSLLTEYIIPADTPYPNYHNQAKALTEAKKTNEILKSVNAQVLQQVLRTLDRAFADMQSQGLGFPRFKNRYRMRSYVYPQMLKDCFKGNLIKLPQLGWVKLRKSREIPEGFEIKQARIVRKASGYFLMLSMQLDVNIPDVPFHGHPLGIDLGLDKFLATSDGEFVKRPRFLNQLHRKLKLLQRRLKNKQKGSNNRHKLNQKIARLHQQISETRKDWHFKLAHHLCDQAQSIFIEEIDFRSWGRGMLSKHCLDAGFGQFVTILKWVGWKRDVFVAEVDKNYTSQICPNCGLHTGKKTLDVREHHCPECGYKTHRDVAAAQVIRNRGIENTVGHIGSENACGDGLTGVVIPSQESVKQEILNVSLRIPRYTV

SEQ ID NO: 51778 - protein, 394 aa, unknown
  TnpB Polypeptide
MFIKTLKIRVYPTKEQRDLFDNYFGYSRWCYNNFLELWNIMYTNGDKPNYRKVRNELKRIYKDLSSLDEYSWIKSYSTQIIDTSGEDVQRAWNNFFNPRMKSNKPKFKSKKRMNNSFRLYKKNDATFQLLPNNRIHLVKVAIKKQGGLRYRDKHLVSKINDGSIQEVTISKKANRYFASIVVRYGINFNQQNTNGNICGIDLGIKNFAILNNGITVDNPNYHKLYTLERRLAVYQRKLSKKHYTSNNYKRLRTKIQKCYLDMYNIKHDFLQKFTTYIVRKYQYIGIEGLNVTGLLHNRKLSHKIYHSLFGTFREFLRYKSEWYGNTLIEADTFYPSTQLCSQCGYRKVDDEKLNLSDRTYVCHNCGYIDDRDINAAKNLARLVNPSINVSPWIR

SEQ ID NO: 51779 - protein, 356 aa, Halomonas sp.
MKPNLHTKTLNVRIRDKHAKVLREWAWAVNQVWNYCNELSFRSISERQTWLSGYDLQDYTKGAGKELGLNSATVQMVGHEYALRRKQFKKNRLSWRKSGGVRRSLGWIPVRKDCISFKHGCVYHNKQYFKVWDSYGLSQYPFRAGSFNEDSRGRWYFNVVAEVETAIPAGQDKIGIDLGLKDTATCSDGTKLEAGRFYRDQQEKLAVAQRARKKKRVKTIHAKIANRRKDALHKFSRELVNRSGEIYVGNVKSSSLAKTNMAKSVLDAGWYMLKTMLDYKCAHAGIVFKEVNESYTTQTCSNCGALPDSRPRGIAGLGIREWTCCACGVTHGDRDINGAKNILAVGHGRPVVGIRH

SEQ ID NO: 51780 - protein, 189 aa, unknown
  TnpB Polypeptide
LIVADALKHRQAIVLENIEGIRRLYGRGNRQGPRQRYRMNSWSFGEAQRQIEYKARWAGLPVIRLSRRETRGTSVVCHRCGERLQEDRQLRRKLWCASCRGMMDRDVVAAVNVSRRGRLRFDRSRAREGLQGGVAEAVKENPTTTVILRVDAPKPSPTSADRRLDRTVNSQLSCSVPPCLTRRMLGRSG

SEQ ID NO: 51781 - protein, 395 aa, unknown
  TnpB Polypeptide
VLQHKAYRFRVYPTPAQETHLLAWESALRWLWNIANEQRLAGMRRTDKRYPTAFDQITELTALRAELPWLAAVPRNVCAQLLVELDKAWQRSFKRVAQAPRWKRKDRDFLGMTEPHPNVWRLDSTTLHFPKLGSMRLVAHRPINGRPKTCTLKRDGDQWFASIMCAVEVAEPALRVEPVVALDRGITRLLADSDGKLTPNPRFYDRAMQRLAHAQRVVSRRKKGSKDREKAKNRVMRLHRRVRRQREHVLHELSAAYAKSHGTVVVEKLNVKGMIQGRLSRSIADAGWSRFAEMLRYKLAWSGGTLIEVPAHYSSQTCSVCGCVDAASRYLECFCCTGCGYVDHADLNAAKILKSRANRSALPVEGSAPEAARRSRKAKVVLRVPRRTPLQSSAL

SEQ ID NO: 51782 - protein, 314 aa, Lactobacillus sp.
  misc_feature (311)..(314): Xaa can be any naturally occurring amino acid
MVKLNTQIMSLFSKKGDEIMAFKTKLAEQEIQLGTRQYRIYPEGEEIAWIWQLFGANRFVWNQFVATFEARYKANSQLKFPKIGILKSWLPLMRKEHEWLKRINSTSLQFTVERFSDAMWAFLTKKQIKQGKPRFKSRKYYSQTATIKNVKYQTKAGAQAQIKVLSPHHLRIGRKNGIILRTSSLHNLRNVRIQKAVISYRQDLDRYYISFSVVKNKRQLAQYSAKSTKTGKMVGIDVGLGREWLVTSDGRRFNVPDTFKLEKEMIKRQSHCDRNRTAIEKRVARFNHEHENKIDKYDYANWQKLRKTKSXXXX

SEQ ID NO: 51783 - protein, 422 aa, unknown
  TnpB Polypeptide
MQRTVKLKLQEDKDLIDTIKEYSIIKQEICSIGYKNKTYNKNELHKLTYKLLRLQYTKMPSGILQTARDVASETLKRTKLKKKINGKIYSSVRLDKRNLRVDMEHNKISISSINGRKKLTFNHNPMSMKYIKWFAVAGTLCYKKNQLYLNVVLEIKTQPQIIVDRKYVELVKVRNGLTHLNLTNQDNIPEELNVGRYENKDIVGIDRGIINIAVLSNNQFFHSKHLKNIKGKYQHLKGVLQNKGTKSAIRKLQRISRKETRFVSDINHCLSKTIANSDFKVFCFETLNIKKKKRTPEERKKDNVFRSQEKAFNKKLNGWSFGQLEKFVTYKIENKGKIIVKAPTNFPSSQICSSCGYKEKENRQGSRFKCLKCGYELHSDLNASRNLANFGKSEISRLLVNQPIVAVEKSISYKPTNSLVGN

SEQ ID NO: 51784 - protein, 367 aa, unknown
  TnpB Polypeptide
LNRTFKVRIYPSREQQDIIEDTFNCTRYLYNYMFNLKEKLYKFFGINLSFVRMSKILTELKKHKTWLKLVDSTSLVQCLRDLDNAYTRFFKRQVNYPKFKSKKRSKSSYRTNSSAISLNIENHTIKIPKVGSIRFRDKNDFSNILKIYNVTISKTSSGNYYASISAEVYIPHFEKTNQNIGIDLGIKDFAIFSTGAKVDNPKYFIHAQKKLAKMQRKLSKKVFGSNNYQKYKIKVAKFYEKIKNRRLDFLHKLSTNLVKSYDIVCIENLNIKGLIKNHTLAKSFQDVSLSEFIRQLEYKTIWYGKIISKVDRFYPSSQICSKCGYKNKEVKNLSIREWVCIECGTHHDRDVNSAINILSEGLRLLEV

SEQ ID NO: 51785 - protein, 411 aa, Acidobacteria sp.
MSSPTKHGVKGRVYLTPEEAPAAARQFGCARFVYNHLLEFSRSRYFTNKSKTSPAERSLELTRLKSETPWLQEVNAQALQQTGRALDRAYQNWFDSITGKRPDKVNPPKFKKKSQRQSARFTRGAFSFDKNSGTLRLSKIGDIRIPWYRRVKGEPSSVVLSRTPSGRYHVSFQVEQPLRVVGSAQNFALSVDINTKTFNFFNGRTWSHVALPRPLLPALARLRTAQKHLSRCTKGSKNREQARLRVAKMHQRVADTRTDFLQKLSTQLIHENQVIVVETLCTKNMLKNGRLAGVISDAGFGDFIGMLEYKCTWYGRTLVKVDRFFPSSKLCCICHVQNVELQWQDRWQCPNCQTDHQRDENAVVNLYVEGLRILAEGRSVIACGDTVRLERQPKHMSAKQEPSLETCGHVA

SEQ ID NO: 51786 - protein, 426 aa, unknown
  TnpB Polypeptide
MRYAYNQFYKYYKLHHGELNYTDEVRQTAKNMYPELNARQSSDAVMVGQSIYTRFKDQKIIFGTKKTFYKRKNKSITHEQYVAERDDQIYSRGDKDRSGNPNIRVVNDTIRVTCGTREYEYYKLFIPLKYRKRFEELLISHQSYNVRLIRKDSTHFKVIIDYETTDIPIKIDFSNGVIGVDINPDRIALCEISNTGNYIRSFTDIDNRLLYASKNKKQYVMGCMIKKIIKYAQTTNRGIVFEDLKFEQKYNRHETKWNKIKSNFSWKQMLELLERKCIEYGIQYKKINPAFTSIIGKNKYQRLYNIPVHESAAYVIGRRGLGLKERLSIYGYNQSEVRRIILGTLAGKYKRKRLTNWALWGAVERHKAVLPGLLVDIDDLEELSDDILVHERDSHELNLTEKTGHGKSLKVECRDKKVFRLKTELK

SEQ ID NO: 51787 - protein, 421 aa, unknown
  TnpB Polypeptide
MNEKMTAIMAARLATKNRRKTMRCQVFRVKVDRSKLSPPVLKHLNKLFNEAKWFYNYIISQKDIASVSTTIKTVPVKTPEAIEYRDFEYLSSQMKQGIKERIFNNIKALSAIKKKNASTKKKKIRIGRLKFRSFVDSIPLNQHKITYTISEDRKYIKLQRLKHRLKVVGLEQIPLDSEIASAVLVRKCGDFYFHIVTYNSNYKPVPPDLYIGIDFGCETQLTLRNGIKIEFEVPVDIKIKRLDRKIMKNNRKKSKNKWKDQRKRRKAYNYLKNKKTDIRNKVVSVLTSNYKCVIVQDESIKAWQAGGHGKKINHSAIGGVISDLKQKSHTPVVVDKFFPSTQLCPQCGKKNKLEQSERVYNCSCGYSADRDVKSALMIEREGRRMIQAPTDRRDEPKDREATARVYACLKSIRGIRVSLSG

SEQ ID NO: 51788 - protein, 475 aa, unknown
  TnpB Polypeptide
MLIDTVFLRVSDWPQRTNTYTADPVSDRYRECLFDWLAAHAPLWNQITYCRRQQYFDDDGDVWDANYTDLYEKYAPLLGKATCQQLARKNSEAWRSHFELLSQYEDETNQAVTERPSPPGYWRNRDEGYELHGLVRNDLYTFDRNEDKSILKFGVGDVLEDRYDFDHSERVTLEICGNPQWRGDESRLELSYEEHADQLRVQHPVRIHPANLRHQRADAFTHTLDSENTTQSAAIDVGANNTLAVVTEDGDTAVYHARPEFERFQKQSERIATLQSELPDEQHTSKQIQRVYDTRSRQRNHSRDAAVKHVAEWLLARNVDTVYVGDLTNILSTHWCANVNEKTHTFWSHRQLVERINLTVGDVGITVTETGEYQSSSECPECGSDSVTRDGDSFRCEACDLEAHADVVGAWNMLQSEVGPMARPAALSAERGRDAPTGGAYWQWDEHDWIPARSREQSCSLDQPSVSKPASSQPG

SEQ ID NO: 51789 - protein, 330 aa, unknown
  TnpB Polypeptide
MMKAFKFRLYPTINQSNQLNQHIGICRFVYNWTLDQKVKIYEQIGKSIFRFDLNKLIPNLKKQNPWLREVNSQSLQGMVNLVESAFNRFFREKNNFPKFKSKKIPIQSFLIPKHYNVDFENDTIKLTKTGEIKAVLHKTFGGELKTATISKSFTGKYYISILVENGKEFPVKQTFSESTAIGVEIGITNFTVISTGEKVDNPKYLKNSLKRLKTLQKRVSRKQNSSQNREKAKQKLALLHKKIINKRNDFQHKLSFKLVSENQAIAFETPYVKDMIKNHHLAQAIRDSVWSSFVTKLEYKSEWSRKPILLIGKFAPSSKICPVCDTITLI

SEQ ID NO: 51790 - protein, 330 aa, unknown; identical to SEQ ID NO: 51789
  TnpB Polypeptide

SEQ ID NO: 51791 - protein, 226 aa, Methylococcus sp.
VPTDGKKIKRPIVGGYLSVLIETQDALEAKTHSGAVGVDLGLKTFATLSTGEFIKGPKPHRALGKRLRRLNQSRARKTQGSANFSKAKSKLSKPHKRLADIRQDAVHKLSHRLATTFIVMGIEDLNVKGMGRNGHLARSVGDAGMRMFRTQMEYTSAMTGAFLYTHPRFAPRTKVCSGCGQIHEMPLGKDTLSCDCGLVIDRDLNAALILKTAASSAVAALWREWL

SEQ ID NO: 51792 - protein, 464 aa, Lactobacillus sp.
  misc_feature (122)..(185): Xaa can be any naturally occurring amino acid
LVKLGRTIKLRLYPDTNQAEQFLAMSKEYQRLANIVSQWIFDHDFQLSWLKINHHLYKIFRQKSELNSQMIQSIFRTVSARYKTVREQMRQQSYRYKNEEDKWVQVPRDLTWLVKPIRFRRXXXXXXXXXXXXXXXXXXXXXXXXXXXXXXXXXXXXXXXXXXXXXXXXXXXXXXXXXXXXXXXXRQSNYSFVDGMRQISITTLGKRTKLGFTNKGFEKYFTEAWKLGTAKLVHTGDKWFLHIGITKKVSDFNPKDNPQIVGIDRGLRFLATVFDSKGKTLFFNGQKILRRRKKFLEIRRQLQSKGTRSAKKKLKQLAQRENRWMTDVNHRLAKTLVSLYGSHTLFVLEDLTNVTFNTDDLPKPLRNSHRSWSFFQLESFLTYKAQAIQSTVVKVSPAFTSQRCPKCGLIEKTNRHHETHEYWCQQCQYRCNDDRLGAMNIGILGQDWLNGVKHPKIRKLTTAG

SEQ ID NO: 51793 - protein, 151 aa, unknown
  TnpB Polypeptide
MGVDVGENNAAALSTGRIFKAGKMKDDRDKYLSSRARFQRNGSRSARQALRKASGREKRHVEQINDEISKSIIEDAAERNIRLIVLEDLTNIRERIKAGLKVRARLHRWPFRELQQKIVDKACRAGIEVIFADPRYTSQTCPHCNAIGRSA

SEQ ID NO: 51794 - protein, 365 aa, unknown
  TnpB Polypeptide
VNKSFEVRIYPTKKQQTLIEKTFGCVRYIYNYMLNLKKRAYNIFELKLNYIKISNILTKLKQRKSWLCEVDAVALQQCLRDLDTAYQRFYDRISGYPNFKSKRGKNSYRTNGRNIYIDQDKKMIRIPKVGWIKFRDKSNFNGLTKINNITVSKSTSGKYFASISAEVDIPAFAKTKKSCGVDLGLKDFCILSDGTKFANPKFLVNNEKRLIILQKSLSRKVYGSKNYEKARIKLAKFHEYIVNCRKDYLHKISIFLVKNYDIICAETLKVKEMLMKKDNSKNISDVSWYEFVRQLEYKCLWYGKILSKIDTYYPSSQLCSNCDYRNYALRGNTSIREWTCPECGVYHDRDINAAINILNEGLKLL

SEQ ID NO: 51795 - protein, 417 aa, unknown
  TnpB Polypeptide
MYLVIKQQVKHLTKEEYNILRELCRTAKNLTNQAIYNIRQHYFQEKQYLRYEANCYEMKNYENYKLMNANMAQQTLKNVDQMFKSFFALIKLAKQGKYDFRHIKMPNYLPKNGYANLIIALFKIKDDNILTIPYSYAFRKKYETKIQIKIPKVLEDKKIKQIRIIPKLNARFFEIQYTYEIQEEDIKLNTNNALAIDLGINNLCTCATSTGKSFILDGKKLKSINQFFNKQNARLQSIKDKQNIKKQTKQQFLISRKRKNRVDDYINKTCRYIINYCLSNDIGTLVIGYNQSFQCKPNMNKKNNQNFTQLPFGKIREKLEYLCKRYNINYILQEESYTSKASFFDNDDLPTYNMDNPQTYEFSGKRVKRGLYQTKDGYRFNADCNGALNILRKSSVVDLSVLYSRGVLDTPKRIRIF

SEQ ID NO: 51796 - protein, 402 aa, unknown
  TnpB Polypeptide
MELNKMYLTKKIRLLPTAEQEKLFWKSAGAARWSYNFFLGYNEKKYNEWLEDNNKERFINESDARKYINNVLKSTTHTWLKEVGSNVIKMSVMDANTALNRFFNKISGYPKYKSRKKSKPSFYVNYETLKRTQNGFRGEKIGVIKTREPLPRIPKDQKYVNPRITYDGKFWYLSVGYKVEQKQVKLTDEKIGIDLGLKDLAIVSNTDNSYSKKYRNINKGHKIKLLEKRLKRAQRKLSRKILNNIESYDENRKPKYIRPLEDCKNIQKQIHIVQNLYRKLTNIRNNYIHQVTTEIVKTKPSKIVLEDLNVSGMMKNKHLSKAIADSKWYEFKRQILYKAELYGIEVVLADQFYPSSKTCSYCGSYKKNLKLNNRTYICDECGSIIDRDINAAINLANYQNLE

SEQ ID NO: 51797 - protein, 364 aa, unknown
  TnpB Polypeptide
MMKTIETTLLEDFPQRRCLDDTFSRMSEAQNYVVDTCYDAKECNTFTVHHLTYANLRKNFGLPAQLAVSANKYACASVKTSIRRKGGKPKFSGKSIHYDKRSCTINLEKGIVSILTLDGRIKVKLSICKYFRGYEDWKAKESNLVKCRDGKLRLMITIEKPDRLSNKTGRAIGVDRGINNLIATSDGWIMDSQHIWEVKNHYVRLRSRLASKGTRSAQRHLTKMRGRERRFVRDVNHCVSQKLISSAGENGIIVLEKLNGIRDAKHRHEQNWKFSNWSFNQLEEFLVYKGKESGVAVEFVPAKNTSKTCSVCGSLRKGQRQGSVFTCKACGVVLHADLNASKNILHLYNLRMGCCQSAYCSPNG

SEQ ID NO: 51798 - protein, 359 aa, Bacillus sp.
MKIFYSIGIKQIKKEFCYYRRWKERRMYMATTKEGVHIKGTKKSVRKKMKTIGYVPTLKDRKGMPKFHSKKQGKLSYTTNQTNGNIKITQENGSYFLCIPKFQEGISIHLHRELPIDGIIKKATIKREGTKYVVSLSIDYFCPNEKQVEFVTADEVIGLDYSQSELYVDSQGRTAQYSRYNKIIEKRERRINKSLARKKNHAKTDEAGNIVYSKNYDKQVKEYQKVTTKAKKQRKDFLHKKSNQITNDYHAIVVEDLNLSNLAQCLRLGKKLHDNGFGMFRTMLQYKSKKKGKYYIVADQYFASSKLCSECNHKKDQLKLSERIYTCDNCGTKIDRDYNAGRNLKYYGIRILHEQSIIA

SEQ ID NO: 51799 - protein, 381 aa, unknown
  TnpB Polypeptide
MPVILTLRLKVRSESYSWLNAAAHEVNTVWNWSNATSIDAADRNRRAHARFLSGFDLCNLSAGASQYFDHIGADTIQRVCCEYAAKRRAAQRRKLRWRISRGARRSLGWVPFKAVSLKRSGVCVRFYGKHIRVFESARLEQAKWRDGCFAQDAVGDWWLCLPVQVTAQESVAPSEAVGIDLGLKDVAVTSDGERLKAGRWTESYASRLAQAQRRAHRRTARRIHRKLARCRGDALHKFSRSVVERYQRIVVGDVSSPKLVRTRMAKAVLDAGWGRLRTQLLYKGQQAGRSVEVVSERFTTRVCSQCGAHSGPQGLRQLVVREWTCAECGSAHDRDVNAAKNILASRCGRPCAGTSHLGQVARRAGHPRPRETGTSKLSAAA

SEQ ID NO: 51800 - protein, 209 aa, unknown
  TnpB Polypeptide
VACTTAAGDQYCYSGQEPFRQFRETTERIADAKAKLPDGQQTSTRIQRLYRKRSRRRDHAVNALLRDLVQRLYDDGVETIYHGDLTGVLGGVLVGRGEPQSAYVLGTPAVSRSARERLRKCAGSTWQQRPKRGPPKTCPECGEREQTRRHRETLTCPCGFEGHADLVASRTLLEQATNTAVRPTARPVRFQWDDHQWYSVEEDAVAPNE

SEQ ID NO: 51801 - protein, 383 aa, Planococcaceae sp.
MLIHKAYKFRIYPNKNQEVLIAKTIGCSRFVFNHFLAKWQDAYQETGKGLTYTTCSSQLTQLKKELEWLKEVDSIALQSSLKNLADAYSRFFKKQNKAPRFKSKKNRVQSYVTKHTNGNIAVVGNKIKLPKLGLVKFAKSREVEGRILNATVRRNPSGKYFVSILVETEIKELPKTNSSIGVDLGLKDFAILSNGEVFSNPKWFRKLEEKLAKEQRILSRRRQLAIKRKCKLSEAKNYQKQRRKVARIHEKIVNARTDYLQKISTEIIKNHDVIGIEDLQVSNMLKNRKLSKAINEVSWYQFRTMLEYKAKWYGKQVIVVSKTFASSQLCSNCGYQNKDVKNLNLREWTCPSCKTHHDRDINAGQNLKKEAERLLTVGTTGIA

SEQ ID NO: 51802 - protein, 161 aa, Salmonella sp.
LSRKKKGSANLRKARIHLAGVHERVANARADFQHKLSRTIVDENQAVIVETLKSANMMKNHHLARAIGDAGWSGFISKLEYKAAEKGVHVVKLDQWFASSKTCHCCGHKMPEMPLNKRIWQCPECGVEHDTRYQCSHRYPAEGHTGITGGGSRRLCSWRPA

SEQ ID NO: 51803 - protein, 509 aa, Oceanospirillales sp.
MSETYLTYPAKLSLSQEQKCFLDDYAVLFGEVCRQYYAALKSGRCKSRKDYHVFTGQRLPYRVMRGVEQHLKGQIKSQETNRKNCIAQDENKLDTLKGDIAKLAKKVVGQKRSGQDHSKTSQSLFQKRRRFKRLSARIERMRSDKDSHICFGGRKLFKARHDASTKDGLVDWTTEWLDKRHSEIKLVGSHDEVLGNSNCQMKTAGDDFAVSIAVPELLREKYGTRVTVDRLAIRSDRQGYVRNAVLINQYSKKEGGTPISYLLKRKKGQWYIHVTVRLPEKERVSDSELGAIGVDINADHLAISETDGAGNLLNYWTEKLPLRNKTTDQRLAVIGDAVKEVVSIAEAARKPVVIEKLDFKQKKRQLHKENPVYARMLSSLAYEKIKSLIEVNCAKRGLECITINPAYSSQIGAVKYKEKYGLSTHHAAALVIARRGLGFWDRPLRNYYQTKDRVVVSHPAPVRKTGSAMPYYREFFSWKRRLLREIGTGMRFGEAVALTAGTQRRSLAS

SEQ ID NO: 51804 - protein, 436 aa, unknown
  TnpB Polypeptide
LKIFSTYSVKIKHYNKIFSETVSVYRDAVDFLMDICLSEWADIITIKGNQAQMMYVESLCHKTNKNLVPKYDFDSKFYKMPSYIRRASISEAIGKVSSYKSNLGNWENNPIGKKPALNACGYVYPSLYRVGMYNQTGSYSAQIKIFHNNTWDWLTVDLRKSDMDYIYRRCSSRKICAPTLQKRGKEWFLDFPFEEKTTLVNTNDLVIGVDLGLNSACTCCAMDSKGTVYGRHLLNLPSEKDRLNHSISRIKKAQQYGNYKTPRLWAKTKGINDDIAVKTANFIIGIAIMYNADTIVFEHLDLAGKKRGSKKQKLHLWKAQYVQSMVENKAHRLKMHVSHICARGTSKLAYDGSGTVLRGKDADMPTYSLCKFQNGKVYNCDLNASYNIASRYYIREILKSCPETDRLDILAKVPRCAKRSTCTLADLISLNAVLAA

SEQ ID NO: 51805 - protein, 423 aa, unknown
  TnpB Polypeptide
MIITHQYRIKPNSDQVAMMDNWLELLRRHWNYALGQRLDWLRRTRCQIDRCSMISEPIGEIPTLVSYLSQQAALKETKKLFPDYKDIYAEVQQINLQRLDQAWWRWLTLDKNGKRAGRPRFKKKGELRSFCFSRVNHPKAACFLSGSTIRIPRIGEIPGIVHRPIPNGFTLKTATLVKKADGWYICVSLSDASVPAPMPIDTIKTAVGIDVGLEKFLATSDGEIVPIQQTYRKSQNHLGRQQRKLAHQQKGSANYKKQANRVARIHQRIQRKRKDFHYKTAHQLVRQYDLIAVEDLKIKGLARTHWGKSILDAAWGSFITILEAVAVIRGVHVVKVNPNNTSQDCSGCGVKVKKDLSVRWHSCPHCHTELDRDINAAINILKRAIENFKTVGLIVSACGGLEVAQPLKQEAKKKLTGFQLTLF

SEQ ID NO: 51806 - protein, 426 aa, Streptomyces sp.
VIRVQLRYSFRLYPNTGQRTALARAFGCARVVYNDALRARETARGEGMPFPKTGDLSKQLITEAKNTPERAWLGEVSAVILQQSLRDLDAAYKNFFDGLKGKRPRMGAPRYKSRNDTRQAVRFTANARWSITPGGKLRLPKIGDLRVKWSRTLPSTPSTVTVVKDSAGRYFASFVVETDACEVLPQTTPEVGIDLGLGHFAVLSDGRKIDSPRFLRRAEKRLKKAQRDLSRKEKGSSNRNKARVKVARAHARVSDARREFHHQLSTRIIRENQAVAVEDLAVKGLARTRLAKSVHDTGWSAFVSMLEYKAARYGRTFVKIGRFEPTSQVCSACGVKDGPKPLHVRVWTCSACGTVLDRDANAAVNVARAAGLAVTACGAQVRRAPVPAQRGEAGTHPKPSPVRWEQAGIPGLQAREDVKRWSSPVS

SEQ ID NO: 51807 - protein, 394 aa, Gluconacetobacter sp.
VAFRGFTYRLEPDLAQEESFAQFAGVCRLVWNLALEQRRNHWRNYQARTGNNLNYVAQARELTALRADVDFVRAVSQVCQQNALKALDDAYRRALKGLGGFPQMKKKGEHDSFTFAGRDVQVERLNRRFGRVKLPKIGWIRFRMTRDLSGRITEATVSMTPLGWHISIGCKDCDVQAFATDRTVGVDRGVSVPLMLSDGTPYALPETLALLDRRARKAQRVASRRKRGSRRYAKAQRRVAAIRAKQARVRKHWAHGVTTDIARKFGTVVIERLRTKDMTKSASGTIAEPGRNVAQKRGLNRAILNVGWHQIEAMLFYKANRVVKVDPRFTSQTCSCCGAVDSRSRKNQAAFVCSACGFRANADHNAAINILHRGNTPVVEPSVRTALKRELQPV

SEQ ID NO: 51808 - protein, 377 aa, unknown
  TnpB Polypeptide
MIKAFKTEIKPTEEQKDKINRTIGTCRFIYNFYIAHNKELYKSGKPFMTGKAFSVWLNNEYLPVHLDKAWIKSVSSKSVKKSMEDACTAYTRFFKGLSGFPKFKKKGKSDSKMYFVKNSQSDCLCERHRLKISTLGWVWLKEKGYLPVTSSGIMVRSGMVSVRAGRYYVSVLVDVPDLPKEPLTGEPLGIDFGIKEFAVVSDGTVWPNINKTDRARKLERKLKREQRRLSRTAKGSRNRKRQILKLQRLHQQLDNVRTDHINKFVAGSVKTKPSHIAIEDLNISGMMKNRHLSKAIASQKLYESRIKLMSKCREKGIEVRIAGRFYPSSKLCHACGNVKKDLKLSERTYKCPVCGYEADRDFNASLNLRDITEYRTA

SEQ ID NO: 51809 - protein, 372 aa, unknown
  TnpB Polypeptide
MKQVRAYRYRIRPSGEQQKILEQTFGCVRFVYNKLLEEKLEHHKLTGNMLRNTPEHLKHAFVWLKEVDSLALCNAQLHLETAFKNFFRDPQKRGFPRFKSRKQNRQTHTTNCVNGNIRLEGNMLRLPKAGWVRLVLHRQIPAKHTIKSVTISKSPSGKYHVSILCEYEHCVAPLEPNPEKVLGLDFSMKSLGVSSEGERADYPRFYRQSLEKLAREMRKLSKCQKGSQNREKQRKRVAILHEHIANQRKDFLHKLSAQIANAQDAVCVEDLDMKAMSSALHFGKSVHDNGWGSFLRMLEYKLADRGKSLVRVDRMFPSSKKCSSCGHVRQKLTLSERTYICPECGHVMDRDINAARNIRTEGLRIISRKLAS

SEQ ID NO: 51810 - protein, 446 aa, Halapricum sp.
MKRTNQFDVHPRSKTEREVFKHWLDASASLWNETNYARRQAFIEDDESVWNADTGKLDGKYKGVLSSSVAQQIIRKNSEAWRSFFSSNEKYHAGTLAERPSPPGYWGNEENRRVLRTYVRNDQYTIEYGECSRLEVPIGSELKDDLGLNRNQRLRLEVAGDPKWRGEQGRLELVYDELADTFRAFQPVTVPDSRLDSPLASEEAALDVGANNLVACTVTTGSQYLYEGRDLFEQFRETTERIAYYQSLLENQRESSKRIDRLYRKRTNRRDHAQDSLVRDLVERLHDEGVSTLYVGDIKDVLSTHWSPRVNEKTHNFWAFRRFINRLEDVCEEYGIAVEEESEAWTSQTCPECGEREETVRHEDSLTCPCGFEGHADLVASKSFLRQQHNTVGAMARPVYLKWNNHSWREHHSLPSGAVETTANEDYTNQSTTSSENIALEEAQND

SEQ ID NO: 51811 - protein, 1493 aa, unknown
  TnpB Polypeptide
VAVALGGGVQAGGEGLAEQVVAVGVDRGRDFAVGLDGQLDPVGHLQPGRLAQVLHGPDQVAGQPLAAQLGRDLQVEGDRGGADADHPPAGRRLLDHAGLLRSQLDPAQPLHLQLDPLAGPEPRRQLGGQLGRDLAQGRGHRLGVAPEPGSQRPEVGGQPVGDQPGVALGEADLLDVQLGGDQVEQPGHPGPGRVGHADQRPGQGLADLELGLGAGLAAEADQPPDLGHGRAQLGVGGGPVGCRPVGQVDRVGRLRVDRHRQPLPQLLGRERRVRGQQQRHRAQAGPEGPEGGVGVGAGAAPEAPPRQPHVPVGQVVDEGGQPPGGAGGVVVVKAPGDLLDGVGQLGQHPPVQRGGDRPGRRPGRVEPFQPRVQAEEAVGVPQGEEEGPGDVLDRLGEQPPRHPRRPAGQHEPAQRVGPVAVQELERVERVAEALGHLAALAVHDEPQADHVAVRGLVEQQRAHGQQGVEPAAGLVDALGDEVGREGPLEGGPALRGVRVAPLGEWHRPGVEPGVEHVGDPARLLPAVRAGERDLVHERAVRVEAGQVAARPGRQVGQALDHRHVPLRTAPQRQRGAPVAGPRQRPVDVVGQPVAEAAVADVLGAPADAGVLGQQPVLDRRGPGVPGGQRVVDQRRAAAPAVRVGVAMGLGPPQQPPPAQVLDQVGVGLLDEAAGQPAGLRPERAVQADRVQHRGAVALTDGQVLGPVGRRGLDQARPVAGGDVLVGHHRPAPGRLLVGDRDQVEGALVAGAEQLLHGHRPQHPGVLADRPGDGVAGHHQPARPAVLAGRLHQHVLDLGADHHRDVGDQRPRLGRPDQQGRALLGQAAGGRGQGHVRGEVLDVHVAHGHLGVRQGRLAAGAVGADLVVLDQQAAAVQLGQGPPDALHIGGVHRPVGLAGVDPEADPLGELLEGVDVALHRLAAAGVEGLHPVALDRLLVLEPQLLLDLQLDRQAVAVPAALAVHPVAAHGLEAGEQVLEDPRLHVVDAGPAVGGRRPLVEDERLGSDPLVERPLEHLAVAPQLEGPGVEGGEVEVRVDLGELAHLASSPGDCRLSLAGESGSATGPLNCRPIIVYCRHVLTPHIRPPSGCAPPHLSTRDGRAVKRAYKLRAYPTRPQEGRAVRLLADHCDLYNAALQERRDAWRMGKVSVSYGDQSAQLKEIRAADPDGQGRHSFTAQQQTLRRLNVTFAVYFRRIRDARGKAQRVGYPRFKPYQRFDQVLFVAGDGARWEPADSGRWAHASFQAVGRVKVHRHRPVVGRVKTLQLKREGRRWYVIVVSQTETVPLASTGRSVGVDMGVARFLTTSDGEVVANPRLLDAAQQRIVDLQRRKQRARPGSGNRRRLRSALAKEWRRLGNQRRDFHHKTARKLVDNCDTIALEDLRVAPMTASASGTVEHPGRNVAAKAGLNRSILDAGWTQFTSIVAAKAESAGRRVVLVPPGRTSSDCHTCGARCLRPRQELVVCPVHGELDADLNGARNIAARAGLGSGQASAA

SEQ ID NO: 51812 - protein, 405 aa, Actinoplanes sp.
VKKQVKRAFKFRFHPTDAQAAELARTFGCVRKVYNLALATRSQAWTLRQERVNYNATSAMLTVWKRTEDLAFLNEVSSVPLQQCLRHLQTAYTNFFAKRAKYPRFKSKKQSRKSAEYTTSGFRYRDGRLTLAKMAEPLDIVWSRPLPEGVAPSTVTVSLDTAGRWHVSLLCDDVIEAAPAPNAAVGVDAGLDSLLILSTGEKVTNPRHERADRARLARAQRRLARKAKGDDAKNRAKARAAVARIHAEITDRRRDHLHKLTTRLVRENQTIVIEDLTVRNMVKNHSLARAISDAAWRQFRTMLEYKAEWHGRTVVAVDRWFPSSKLCSICGAPAEKMPLNVRSWTCRCGTVHDRDINAARNVLAEGLSVIACGGGVRPQRENSRTRQSSTKQETQRTTAGIPRRP

SEQ ID NO: 51813 - protein, 240 aa, unknown
  TnpB Polypeptide
LVYPQSGWKLSNIRDVGQGKNTKKKTRLYLSKIGFFTVIIHREFPLERVCQVCIKLNPSGRIYVVFLVEEGEVEAPNEQKRAGEPKKAVAVDVGITRLATLSDGRFLENPKSLERSLGKIRVLQRSLSRKKKFSKNWLKAKRRLAKKHEYVKDFRRDVFFKLGALLAKEYDLLVLEDLNIEGLIQKGETKKRRLRLYDSTFSELRRILEWGFRKLGKTVLAVPAYNSSRECFFAVESIRV

SEQ ID NO: 51814 - protein, 468 aa, unknown
  TnpB Polypeptide
VSDGPVIQQAFRFALDPTVEQERFLGACAGASRFWFNQGLALVKQRLDERAAGVVADVPWSYESLCVAFRGDIIKDQLAPWRAEVVTGSYQAGLEGLGRALQNYSSARKAGRHVGFPRFRAKGRAHEAVIFQRPRIPDSRHVTLDRRLGSLRTKESMRKLTRLLEHDPQARVMRSTVQRVNGGWVISFTVQRSAKQRRARQPAASVGVDLGLARLATLSTGHVAPNSRPLQAELRQLRRLQRQLDRQRRANNPGNYQPDGRAKKRCSSWVRSQRMVRTEQRIAALHERVANLRREQAHQLTTSLTREFGVIGVETLAVKNLLRNRRLARHISDVGWGMILAQLRYKTSWSDGSILVAADRFYPSSKTCSGCGAVKTKLRLTERVFTCENPACGHVQDRDLNAALNLAHMAQEHAQAEGVSTYVARTGRFTPTARRGQVSLVQPNEHSPVKREASTDAPQHGNALALAA

SEQ ID NO: 51815 - protein, 424 aa, unknown
  TnpB Polypeptide
LEPHRNWKRKIKHLIWLKLNHPESKGNKNLTYAYICGIIIGIGVGEILACLATYANRIPKTTHTEDTLMLRGHKIALRPTARQRRWFSMQCGYARVAYNDALHDWNHGAELGDLRKRFNAIKYDKYHWCKDMDQRAAMYGIMSLEDAILRYRKGQNEHPKRKRHNARQSYSMEGAKVTITDNAIKLPKIGWVFMHERLRFVGKIKRVTISRTAHCWFVSVLVETDDIIEAVDPASPVIGIDVGINTLATLDDGTKFDNPRPLRRYERKLAREQRKLSRKEYQSNNWHKQKLRVEKVHYRISCIREDAHHQATSSIIQKASKIGIETLKITNMLKNRNLAKALSDSALGGFLAMLKSKADALGIAIVEAPQFFASSKTCSNCGHKKEDLTLADRMYHCESCGYTVDRDINAAINLRTIAVGETEM

SEQ ID NO: 51816 - protein, 386 aa, Enterococcus sp.
MKLMERLKAYKFRIYPTEEQEIFFAKSFGCVRKVYNLMLDDRKKAYQEVKNDPSKKMNFPTPAKYKEEFPFLKEVDSLALANAQLNLDKAYKNLFSDKSVGFPRFKSKKNPVQSYTTNNQNGTVSLIDHKFVKVPKLKSLIKIKLHRRPKGMIKSATISRHSSGKYYISLLCKEEICELPQTNSAIGIDLGITDFAIFSTGQKIDNNKFTSKMAKKLKREQRKLSRRALLAKQRGFNLFEAKNYQKQKRLVARLHEKVMNQRNDFLNQLSTEMIKNHDIICIEDLNTKGMLRNHKLAKNISDVSWSSFVKKLQYKADWYGRKMIKVDQWFPSSQICSKCGQKDGKKSLEIREWTCPLCHAHHDRNINASINILTEGLRIKSLTEIT

SEQ ID NO: 51817 - protein, 251 aa, unknown
  TnpB Polypeptide
MLLSKKTSIKVSREYANLIGHMCYAASKLWNVCNYERQHYKETGIEQYPDWYYQKKAHKEDLWYKQLPSQTAQEVCRLLDKAWKSFYALKRSGGIETPRPPRFKQESIPITYMQMGIVHERDTDRVRLSLPKTLKKYMEETYQIHENFLYLENKIFRGMDQIKQLRIYPPEKGNCKIIVVYEVPDQEELPQNGHELSIDLGLHNLMTCYDSGNGKTFILGRKYLALERYFHKEIARVQAQWYGQQSGKGVK

SEQ ID NO: 51818 - protein, 426 aa, Thiomonas sp.
MQRLQAFKYELMPTGEQQRDMRRFAGSCRFVFNKALALQKENYEAGGKFIGYVAMAKQLTAWRNSAETSWLKDAPVHPLQHALKDLEKAYKNFFEKRADFPRFKRKGQSDSFRYPDPKQIKFDQANGRIFLPKLGWLRYRNSRAALGELRNVTVSQSGGKWFVSIQTRREVETQTPQGGAVGIDMGIARFATLSDGSFYAPLNSFKRHETALRKARQAMSRKQKFSKNWKKAKARVQRIHSRIGNARRDYLHKTSTTISKNHAMVCIEDLQVRNMSKSAAGTTEKPGRNVRAKSGLNKAILDQGWFEFRRQLDYKLAWNGGWLVAVPPQYTSQTCPACGHVSAENRQTQARFACVACGYGDNADLVGAMNILSRGVQKLRDEGQDTGDASPKQNIAARIACEVSGAAMPPAAGTRRSDSGSAQGRV

SEQ ID NO: 51819 - protein, 394 aa, Thiomonas sp.
MQGMKQRWTFRLYPTPEQEQHLARTFGCVRYVWNWALRLRTDGFRAGQRIGYPETDRRMTALKQQPETVWLNEVSSVCLQQSLRDLQVAFSNFFDKRAAYPAFKRKEARQSANYASQGFTFDSATRTLKLAKIGEVRVRWTRAKIPAPSSVRVIRAASGKYFVSLVVEAAPVELPKTGQDIGIDFGVARLATLSNGERISNPKHGAKWQKRLAFYQKQLARKTKGSKRRARAKRRVAKVYERIANSRLDTLHKLSTDLVQRFDAIYVEDLNLRGMVKNHHLARAVSDASIGTAIRLLEEKAERAGKTVVKIDRWYPSSKTCSHCGHVQGKMPLSVREWTCPECGTHHDRDVNAARNILAVGHTVTAHGGTVRRPRAKAPGRTSPRSANGADSHV

SEQ ID NO: 51820 - protein, 718 aa, Thiomonas sp.
MQRRKVTFKLYPNAAQSARLEAWTRLHCELYNAALEERIDAWRKAGKSISYFDQQNALPQIKADRPEFVELGSHALQQTLRRLDLAFAAFFRRVKAGQTPGFPRFKSAKRFSGFAYPDPAGWKLMGHGGRGATLRIGSGQGAMSLRARGQHRFGSESKPNDLTLTRRNGQWFVSVTLRVPEEGCARQRTGDARRGVDFGVTDWATFDDGQIIANPRWLREELPKLADLQRQRARKRKGSVRHKRLGANIARLHDRIANMRRDFLHQETSRMVQQCAVLATEELAPKNMSRSARGTEQEPGRRVRQKAGLNREILSAAFGMAHQMLAYKAEEAGTRLHLSDTRPLRPSQRCAACWEIVPKTLADRVHVCPHCGHVMPRDQNSALVVLIDANTPGTGVAARPKPLPPATGQVKVCDPRNPRYNALRLAVGEFIGADDITLLGVDFSSAPNRRKPIVIAQGRLAQDPSHTVILQDFTRLDTLASFFQWLQTPGPWIGAFDLPFGLPRELIDTLRWPGHREDKAPLPWERLISHLRHLSRTQLREVFRSFCAARPAGAKFAHRACDLPAGSSPSMKWVNPPVAWMLHAGAPLLLDAGVTLPGLRGGDPLRVALEAYPGHAARVVLGRRSYKSDDPAKQTAEREAARDLLLASMESGRHPLGIRLQCTDEQRKRMRLDARGDALDAALCLMQAAWACIRRHEGYGLPHAIDPIEGWIVSVPQP

SEQ ID NO: 51821 - protein, 402 aa, Bacillus sp.
VGLLPETYYKGFKFRLYPTNEQATKINKTIGCCRYSYNLALRKQMEKDLLWYVTEEMVQNGQLPSNEWKGPRYSADASMKDNTQYKNTTPWLKEVDSTAIQNTIQDLGEAYKGYYKKEKGKPKFKSKKNDLQSYTSKCNYNKGVGTIRIEGNVITLPKIGRVRFAKSREVTGKIVSATVRRTPSGKYFVSVLSKVTKEPTQLSFFKVGVDVGLKEFATLSNGTVIHNPKHFYRLEETLKKEQRTLSRRVIGSNNWYKQKKKVARVHEKMANAREDFLQKITTMLVNENQVISIEDIRVKNLLKNGRLAKAISDVSWSEFRRMLTYKCEWYDKTLVVVGSNYASSQLCHCCGYKNKATKNLAVREWACPNCKATHDRDLNAARNILAEGLRILSEMELVEQIV

SEQ ID NO: 51822 - protein, 447 aa, Bacillus sp.
MTRKKPIKVLRKQKKVENIQRFTQKQNIGRGTLTAKEFRLLQRMSHSSKALRNVGLYTMKQSYLNNGKIATVKEIDAAMQADVNYWGVQSNSVRAIRRTLYSDVKSFFEALKKWKESPERFTGRPKFPKYSRSTEKHIIEIYQVPKVDKDGYWMIPMNAEFRKRFGSIKIRMPKNLLSKKISYIQIVPKQKGRFFEAHYTYEMQVSQMKKQPTTTTNALGCDLGVDQLVSCATNTGDTFLIDGKKLKSINQYFNKTISQLQQKNAENGTSKRVVTKSIANLWNKRERQINGYISQTVGLLFKKVKELNIDTIVIGYNAGWKQESNMGKKNNQKFVQIPFHKLISAIENKCLKEGVRFVEQEESYTSKASFLDRDTIPVWTKKDKSNYTFSGKRITRGLYRSKTGQCIHADINGALNTLRKSEVMELDENLIVKTPVILKVQKRKAVA

SEQ ID NO: 51823 - protein, 196 aa, Bacillus sp.
NRWYNKLKSYYYAALRNGRSSKEGQRYSKRLSKLDSKRHNQIKDFFHKVSFNIVKVAKEHRIDTIIIGKNMDWKQKVALGSKNNQNFVQIPHAMLVSMIRYKANTEGIAVIETEESYTSRASFLDEDPIPTYKSGEKSDDIFSGKRISRGMYRSKKGILINADVNGSVNILRKVVPKAFANGIAVVCTQPLAVNVH

SEQ ID NO: 51824 - protein, 391 aa, Bacillus sp.
MKTPFRASKETVDRLFQCNRISGEVWNRCLELAKETHLKTGKWITKSALQKGTKGIFPLHSQSVQAVCHKYLFARDAARKARKAGHKNKYPYKRKKHFNTKWANNGFKVFENGKIQLSMGDFEGKRQAPLILWIKELPEGEIKEIELIFDRQLQLSIAYEDGQEVKENTFLNRSAIDVGEVHTIAAVAENGENIIITGRKIRSIHRLRNKKLAELQRKMSKCTKGSKQWKKYNRAKRYVLSKSNRQLQDALHKTTKQFADWCMENEVKEVAFGCVDGVQRNTSRRKKKRVRRRTTNQKLSNWSFGKVYAYLTYKLEAKGISIDKYDERFTTQQCPCCPKRRKVSSRIYTCTCGYSNHRDIHGASNFFAKTFYGEIRALDFSLKNTKYLRIA

SEQ ID NO: 51825 - protein, 456 aa, Bacillus sp.
MVLKGVKSCKKGKETHYKTHQIWIKKGHRMYPYFKEMAQNVKNMTNTTNFYIRQVYTGLTQEKELQPLQKEVTCYVFEAPSKAHPYVEYNFLDCLFKVTAQHDYRSLPTQTSQSIMKTVFQNWKSFFSSLKEYKKNPAKYKGRPRISKYSLASEKEVLFTNQDCVIKEKKFLKFPKTKERLNIGKLGAGEGKLKQVRVIPKYGQYVVELVVDVPLKKEECQEINRLMAIDLGIDNLATMVTNTGSRPVFVKGRHVKSINQYYNKMKAHYFGILRRGKQPNEGPFISNRLEKLHQIRYRKLKDLFHKVSFSIMKHAQEENIDTVIIGKNKDWKQCSTMGKRNNQSFVSIPHSLLISMIQYKAKEQGIKVILTEESYTSKASFLDGDEIPTYGECETKKTFSGKRIKRGLYRSKAGTIINADVNGAANILKKAFLRLKEAAIFHKETIHVWHPQSKTV

SEQ ID NO: 51826 - protein, 398 aa, unknown
  TnpB Polypeptide
MRTVSSYGVEIRKQNIPARQTMEIYRQAVGYLTEIYAQVWEELRKIPETKKRFNTAEHMVHMTKKNTARFDFDLRFPKMPSYLRRSAIQHALGSVSSYETRLGQWKETGVLSGRPKLTCRNHAMPVFYRDVMYREGAEGKDEAYLKLYDGHDWKWFRVYLKRTDMEYLPRNWKGKKTSAPALEKRHRRYFLRFSCTEEVTLTKTPVKEQIICSVDLGINTDAVCTIMRSDGTVLGRRFIDHPSEKDRMYRTLGRIRRSQREHGSAQTQGRWAYTKRLNTEMGRKTIVPYGLYRAEGYISANLARKVTGFSEDDLELLWEAILNMFEVDHSAARGNMAVRELIVFKHSKELGDCPAYKLFDAVEVKRNEGVEYPRKYQDYTVTVHEEQIPDSVEVRRMN

SEQ ID NO: 51827 - protein, 393 aa, Defluviitaleaceae sp.
MLLAKKIRLKPTAEQEIQFRKSAGTARFAGNYFVRRNEEHYKEHKKFLLDGDIRKELTQLKKQPEYAWLQEISANVVKQAVKDKCGALQRFLADMTSNGFPSINKKGKTAPSFYVNYESLKRVRHGFIGEKLGYVLTTEPLPKLANGEKYKNPRITFDGKFWFLSVAIEVPTIQQDLTDNIVGIDVGIKELAVTSDGVVYENINHSKEVKRLKKALKREQRSAARMLEKNTESKGKNAHLSDGQGKPKYKKPLHECKNFQKSKKKQGRIHRRLKNIRTNHLHQTTAEIVKTKPFRIVMENLNIKGMLKNKHLAKAISEQKLYEFRRQIQYKCQLHGIEFILADRFYPSSKICSKCGAKKANLKLNDRVFRCDCGHTQNRDLNAALNLAKYVAQ

SEQ ID NO: 51828 - protein, 578 aa, unknown
  TnpB Polypeptide
MAFGSKNSTPSFVLTLPLDISLNEQDYLYKEFKKCGVIYNQLVSVTTKMWHQLRKTRKYRDLMTAIAKAAPDSKEQKVLLKQRQEMIKSSGFSEGAFHKMVEPYAKHFAIHSHVAQKVASAVWTAWEGFFFSKGKAVHYKKLEDVASISGKNNATGIVLRPANLTTSNIESAKRKAQKAVEKRYDDMYGRSDPKDDKKVVLPDEVKPQMEAEIAAAIAKIKPTIGEGSLRIVYGKHEFPVVLRNPKTQTGKYQQEALKCGVKYCRITRKWVKTKWKYYAQFILEGYPPTKCDGNGVMKHPVNQGRIGLDIGTQTLAVSGNDICDLMVLAPSARAQAKSLVNEIARTQRAMDRSRRVTNPKYYNPDGTIKRLKRQHGQKQKRKWKYSKRYYRLRAKLRDMNRRLADIRKMEHNILANELLQHGNEFVVEDMNYKALQKRSKETKVNPKTGRAHTKKRFGKSLSRCAPAMFISILNKKANRYGGSVIKVNTFETKASQFDHTDESYTKKKLSERMAHLSSGEVVQRDLYSAFLLAHINTETLKYDTEALKAAFPAFLKMHENTKKRLQEAESYLPASVGF

SEQ ID NO: 51829 - protein, 256 aa, unknown
  TnpB Polypeptide
MDLDRLQAERTPLSPRWSANVAHSGKGGQALPAEYPGETGEQRCPHCQRTNGRRHELCSVRFTNTDTFAVCCILDEQGKQLAVHTCRGGDAYRHRCKLLETRIQKSRPNTVGDNSPQPNRKYYMHLKNLSEHYAHQVSREILNFCKENQAGIIVLPDYDQNFTRMAMVKSGNFSPLRLSSKIRTNLQYKAWAEGILVLETRTDGLKDKCAICGGKLRRKGNEFLCENGHQGNRFLNDARNLGRKCQDSFFCGSRTK

SEQ ID NO: 51830 - protein, 403 aa, unknown
  TnpB Polypeptide
MLVLEFKAKGKPTQYSAIDEAIRTVQFIRNKAIRFWMDNLGVGQKDLYRLSKVLRDEFPFAKALNSSACQASIERAYSAIARFYDNCKKGIPGKKGYPRFQKNCRSVEYKTSGWKLSENRKQITFTDGKKIGKLKLKGTWDLNFYQPEQIKRVRLIRRADGYYVQFLIKAEIKIDTQPTGKAIGLDVGLKEFYTDSNGNTEPNPRFYQKGEKRLKFRQRRVSRQKKGSANRKKAVNRLGREHLKINRQREEHAKRLARCVILSNDLVAYEDLRVRNLVKNHCLAKSINDAGWYQFRKWLEYFGGKFGKVTIAVNPAHTSQQCSNCGAIVKKSLSTRTHVCQCGFTLDRDWNAAINILKLALSTLGHSGTWVLDLNASRDSTSTLVGAILLGQVGSMNEESTSF

SEQ ID NO: 51831 - protein, 375 aa, unknown
  TnpB Polypeptide
MKAYKYRIYPNKQQIELMNKHFGCVRFVYNWGLEQKVKSYQVDSRNVTCFDLVNKLKADLKVQNVWLTEVNSQSLQMALRNLDNAFTKFFKKTAKFPRFKNKHDRQSFQCPQFCTVDFNKHTVNLPKLKGIKAALHRKFTGKIKTVTISKTATNKFFASILVDDGVLFPKTCISTKENSVGVDLGIKDFAVLSTGEKIKNPRHLKKSENKLAKLQKQLSKKKKGSSNRSKARHNVALLYEKITNQRKDFLHKLSKRLIDENQAICLEDLAVQNMLKNKKLAKHISDVSWSIFRSFCTYKAEWYGKDVRIIGRFEPSSKMCNKCGTINRNLTLGDRVWTCICGTTHDRDILAANNILNFAFIRNSDSKSTVGTAGC

SEQ ID NO: 51832 - protein, 475 aa, Lactobacillus sp.
MKVPDSGTVRLARQKLLNEQFHIQGRHVTEAVKEVCMNLNSMWTNLGLKLKKIVQANESLAKEERQYLNYVFTASYYWQLILQGRENEAESSKESKYPVLRAALTKDQLRHCFGYIRRLTRKHKPYPHSSAARCMLYDEIMWKVIQKDGADHLDIMTAVSGKRKQLKLTGPFCYANKKKRGDVQLILDRDKKRLEVHRAIKAAVHDLHKSKKKKVGMDKGLATLLSCSSGHEYGFNFSQLVNAEVERINRRNTNRNEYIQAAKELRHELSALQAKLAIKHSAKTERRLRNRIGSLERRISRLEERHLGSKLYHRQHARKQCNMERIMNMSIRKMLLTEKPDVLVKEDLSFTKEKLPKAANRYEAKVRRKLSSWSKGTLDDRIEYLCDCLGIRTVDVNPAYTSQFCPNCGARFSERKGTHHELTVCPNCGEMNANTAAAVNILRRADDKNITLYTPYKKVEKILEDRYANKQSVMA

SEQ ID NO: 51833 - protein, 387 aa, unknown
  TnpB Polypeptide
  misc_feature (198)..(198): Xaa can be any naturally occurring amino acid
  misc_feature (381)..(381): Xaa can be any naturally occurring amino acid
  misc_feature (387)..(387): Xaa can be any naturally occurring amino acid
MIKCLKTTFICSKSTLDKLFECNRISAQIWNDCLSYAKDFSIANSGKWINKSQLQALVKNKYPLHSQSIQSVVHKYLFSRDSAKKARDKGLKNKYPYKKKKHFNTKWVDKAFQIKNNNIIQLSNGVGQEKLYIKLNKDISNIEIKEIELIYDRQLMVSLSYDDGIEVLDNNHTNSCGVDLGEIHSISAYCENGNALIXTGRKSRSIHRLRNKKLAELQTKMSKCTKYSRQWKKYNKAKKYILSKSDNQLKDCLHKTSKQFIDWCFDNNIKDIVIGKIEGVQRNTKKKLRKKTNQKLSNWNFGKLQEYIKYKSNAKGMKIHKQEESYTTQQCPCCGRRKKPSGRNYICKCGYTCHRDIHGGRNILSKYKYKKITYIGDIKEXKYLRVX

SEQ ID NO: 51834 - protein, 400 aa, Glycomyces sp.
VGKQVVQVKLVPTPEQARALEQTLRAVNEAANWASGVAYRHGVPREYALRQHTYTHLKDRGLGSQIAQLVIKKTCHAYTTIAGLIAAGRLQGRRAAKARAKPIAFRPDAAQAFDDRCLSWQHDTRTISIWTIRGRMRGIAFTGHVDHLKTLERHRQGESDLMFRDGHWYLLATVDIPDGEPNTAPADFLGVDMGIVNIATTSDGDNHCGTGLRRYRKRMAKVRAELQAKATKSAKKKLKARARREARAVKDVNHRIAKQLVGKAERTGRGIALEDLKGIRDRVRLPAAQRGELNAWSFHQLQAFITYKARRAGVPVVVIDAHNTSRRCPRCGHTTKANRPTRDYFACRGCGLAGPADRVAAVNIRDRARMTWAVVNQPIVADTPQSSGGHERQALGLNPG

SEQ ID NO: 51835 - protein, 376 aa, unknown
  TnpB Polypeptide
MVAKDPPRCACAAFRTPGAGLAPLLRTTTKRQESLSTDFKRKGRCRDSFYIANDKICFEGKCAVLPKIGEVLLAEVLRLPGKIMGACVSREADHWYLAVQVKLPEQLARLQRQGDGVVGVDLGVSAAAVLSNGEKIAAPRPLRASLRRLRIRSRRHARKLKAAKAGVGITGAIPKGVRLPVSHNRKKDAHALARLHAHITHVRTDFIHKLTTRLCRENQAVAIEDLNVSGMLANHRLARAIADVGFYEIRRQLQYKAQRYRTLLVLADRWYPSSKLCSTCGAHYTGLKLGERNWICACGVRHDRDVNAAINLQRLATDALVARTALPGASRAVTYGTAAGMVPAAGGEVTPVRYEHGQQDGSGQEENGAHLCAPFR

SEQ ID NO: 51836 - protein, 418 aa, unknown
  TnpB Polypeptide
LQYSHSSFADSQTLCYIINRSKGNKKNMRTSYQYRLKPTKEQAKKIDKTLDMLRHQYNYQLAERFHWYEQNRSPIDRCSIFVCHLPELKDKPNRFSQQASLTQLKKDRPWYTNIYSQVLQEVPKKVEIAFDRWLKGDVNGKKSGRPRFKGAGQYKTFTFPQFKQHHFVNNKITLSKIGDIKVIVHRQIPDGFDIKTVSVTKKADGYYITLSLDDKTVPTVKPDFNANNIVGIDVGLIDFIVTSDDERIAAPKFLRKAERKLKSAQRRVSRRKKGSNRRKKAIKKLGIQHKKVADTRKDFHFKTTNNLLKKYDVIAVEKLNIKGLTRTRLAKSINDAGWGQFIEILSSKAENAGLKVVSVNPNGTSQECSNCGHKVKKPLSQRMHNCPNCKVSLCRDLNASINIKNRGTHGLKAQSMSS

SEQ ID NO: 51837 - protein, 404 aa, Streptomyces sp.
MITAQVKRAYRYRFYPTDEQAAELSRTFGCVRKVYNMALAARTEAWARQERVNYNATSAMLTAWKKTEELAFLNEVSSVPLQQCLRHLQTAFTDFFGKRAEYPRFKSKKKSRKSAEYTTSGFRFRDAKLTLAKMTSALDIVWHRPLPEGAEPSTVTVSQDGAGRWFVSLLCEDPAVEPLPANGKAVGVDVGLDHLLTLSTGEKIANPRHERRDRARLALTQRRLAKKARGDGANRRKARQKVARIHARIADRRRDGLHKLTTRLVRENQTIVIEDLTVRNMVRNRSLARAISDAAWSEFRNLLEYKAAWYGREVIAVDRFFPSSRLCSTCGTLQGKMPLNVRTWTCDSCGTTHDRDVNAAKNLLAAGLAVSACGAGVRPQRRTPGGQSAMKQEASRREPRSPRL

SEQ ID NO: 51838 - protein, 379 aa, unknown
  TnpB Polypeptide
MANKAIKYRIYPTTKQSIMFSKTFGCCRKVYNLMLSDKIDGYKATGKFPTVTPAQYKDEYPYLREVDSLALANKQMDLQAAFRNAFSKTRKNKNGFPKYKSAKHSRKAYTTNNQKGTVAIIENKYIKLPKIGKVKAVIHRIPSDEWIIKSATVSQESDGKYYISVLFEFDHAVNLYVVDKTNAVGLDYASDGLYVDSNGDVGINHKYYRESHRKLAKEQRKLSRMQGSKKHERKSNNYMKQLCKINKIHRHIANQRLDNLHKISTEIANQYDVVCVESLNMRSMANKGFGNGKATLDNGYGMFLSMLEYKLSDRNKYLVKVDKWFPSSQICHCCGALHPEMKDLANRKMVCDCGLTINRDKNAAINILNEGLHLLSEVA

SEQ ID NO: 51839 - protein, 176 aa, unknown
  TnpB Polypeptide
MAKGVSFLLKAFKYRIYPNKEQRELLAKTFGSCRFVYNHYLDRKINTYQTEQKSMNYVECANDLKELKTELQWLKEVDAIALQQSIKDLDRAYQNFFQGCGFPRFKSKHDHFHSYRTQMVNNNIKVEKLLKRAQRQLSSKEKCSNNYKKAQLRVAKIHEKIANQRNDFLHKLSTEM

SEQ ID NO: 51840 - protein, 412 aa, Streptomyces sp.
MKLVVQVKLLPTPIQGAALEATLLACNEAATWASQIAFEKGVKQNFALRKLTYHQAKARWGLGAQAAQHAIKKTCDAYATLRANLKAGNLGSPASRRYRTAAGKPVAFRHDSAQPFDDRMLSWQITEQTVSIWTTGGRMKHLAFTASPEHLATLALYRKGESDLLCRDGMWFLNATCEVPEAELNTDPVDFLGIDLGIVNIATTSDGEIMAGRELNRIRVRERGLRTKLQKKNTPSARRRARKRRRKEARRAKDINHKIAKHVVAEAERTGRGIALEDLTGIRERVRLRKPQRATHSSWSFAQLGQFIAYKARRAGVPVVYVDPANTSRTCSECGHIDKANRVSQAFFACRFCGFVDQADRNGSRNIRARAWQLWRRGVESTAPALPPRQRGGAGRKRSITASDARCASPAL

SEQ ID NO: 51841 - protein, 430 aa, unknown
  TnpB Polypeptide
MAWEITRTVRVRLAVPDDRMSDLHATNKLFQYCANRTAEWAWRYPENDCVTSKSEAEDAIYDDLREETDYLHANLVQKAIKRATDDIDNCVDRLAEGEDTSKPEYNTFSVVYDKRAATYYRDKVSLATVNGRVECEYDLPDDPEGTPHGKYLLNDDYEFATSTVHYDSETDEFYLHAAMEREINASSPEKAEHSRVLGVDCNVDDHIAVTSTGTFVGNANYLNHQRREFEKRRASLQQTGTRSAHLTYQRIGDRFGRWSEDYLHQCSKALVEEAQQHGCTHIAFEDLEQIRDRISDGKKFQQWAFRELQQQTKNKAELAGIVVETVEPSYTSQQCSKCGTTLDENRNGQHFECLDCSYTVNADYNAAKNIARKLALKLQRGQKSPAGGAFCQYALKSGVMTVNATDVASDQYVSAERESTDKPTASAVGS

SEQ ID NO: 51842 - protein, 162 aa, Helicobacter sp.
VARLHLACKNTREDYLHKISDKITNQYDLIGVETLNVKGIMRTYHSKSLANASWGKFLTMLEYKAQRKGKTLLSIDRFFPSSQLCSYCGVNTGKKHEGITKFTCPHCKTTHHRDYNASVNIRNYALGMLDERHKIKIDKSRVGIIRLKILSASGLITLSLAF

SEQ ID NO: 51843 - protein, 310 aa, unknown
  TnpB Polypeptide
VRRPPSDERPVSPLREHHRSVGVETSRRVLRHLEATSRERALRAPSQRNSTHCEPRSKGDSTRYRGYEKRCRPTQKGETTSQPHFDAWSVVYDKRSATFHRDHVSLSTVNGRVECEYVIPDDPTGTPIGEFLLNEDYEFRMSTLQYDRSTDSFYLHARMRRTTDEHEQSTGVSSDAKHRTVLGVDLNVDGSLAVTSTGEFIGNADEMNHRRREFEKTRGSMQQTGTRSAHLSIQSMDDREHRWIQDELHRASNQILDEARDHGCTHVAFENLTDIRDRIAGAKRFHVGRSAVCTSTSSTKPRCSILESSR

SEQ ID NO: 51844 - protein, 435 aa, Hyella sp.
MVQPNIRSEKWSIVAAPYQRELLQKTVCEFRYLVRCLVGVVYTHWSNIGRLDAKAQIPALEKLIHATAKNPSPKYQYFNRRFCKFPSYYRRGAIQFAIGQVSSFVTRYREWQSGTRNRKGASPPKLNAECRTYPPLYKGQCIKLADNLCSAAIKVFTGSDWIWITIGLTGQRQRHLDLANKRKSPYLIVNKKGCHLSVPFQCKRAKLPETSSVLSIDLGINTTATVSVINYDGTVSHREFIHHGRDIDRRDKRLKRIATLARKTGKLSFGFCRSLYRKATNINREIGQKVSSRLVKIARQYGVKYIVFEYLKGWRPRGGKKRSTLKQRFHNWLHRRIVKLTEMKWLELGGRVVFVNPRGTSSYAYDGSGKLKRNQNNYELAVFTSGKQYNCDLSASYNIGARFIHQLMSRNGSQDKQGGSSCLSPRSRGTLSILW

SEQ ID NO: 51845 - protein, 512 aa, Streptomyces sp.
VADEVGELLAQPPGRDALEAVDQLGHGDLWREVHEQVDVVVLAVELDQLGLEVLAHGPHDLLAPREVLVGEDLVPVLRHENQVDVHAEDTVTTSTNVLIDTHKPTVYRDPCAAQVLVPGVPERRPAHGAGEGVRVRAGGLQRRASRSGDSPQRRAAAPEDRRPVQDADHRGQADARAGVARQVSAVVLQQSLRDLDTAYRNFFDGLKGKRPRIGAPRYKSRKDTRQAVRFTANARWSITAGGKLRLPKIGDLKVTWSRPLPSTPSTVTVVKDSAGRYFASFVVETGPEEILPQTTPGVGIDLGLGHFAVLSDGRKVDSPRFLRRAEKRLKKAQRALSRKEKGSKNRDKARIRVAWAHARDADARREFHHQLSTMLIRENQAVAVEDLAVKGLARTRLAKSVHDAGWSAFVSMLEYKAARYGRAFHRIGRFEPTSQVCSQCGVKDGPKPLNVRVWTCQACGAVLDRDINAAVNVAKAAGLAVSACGAQVRPGLLPAPRSEAGTHPTPQPSTAR

SEQ ID NO: 51846 - protein, 373 aa, Chloroflexi sp.
MKILRAFKTELDLNKVQQTICACHAGAARFAYNWGLARKIEAYQAGQKVPTAIDLHRELNVLKQGELAWMYAVSKCAPQEALRNLDQAYAHFFRRVKEKQAGKNVKVGFPRFKSKKNGLGSFRLTGAIHIFENAIQLPRLGRLRLKERGYLPTRGVHVLSATVSERARRWFVSVQVEMEIPDPQPAGKSAAGVDLGIVRLATVSDGGGIDNPRALKQGLTRIKRLQRQLSRRQTGSANGKKAALRLAKAHSRVVNIRKNALHQATSWLAKTKSAVVLEDLNVNGMLKNHHLAQAIADVGLYEFRRQMSYKGGWYGCEVLIADRFYPSSKRCSGCGQVKPALLLNEREYHCGYCGLVIDRDLNAAINLEQLLYA

SEQ ID NO: 51847 - protein, 367 aa, unknown
  TnpB Polypeptide
MANWGKGGGRPQHKTRGAVRSVLLTSECFTLRTCDGEDCLFIGTKSKNLGILKWVRHCEYKEPRQISITHEPDGKWFVGFSFESGRILPKTAIPENKQEVLGVDRGVVNPVTDSTGRFYDFTPSEKVKLERREKKRAKLQARLARQKKGSKRRAKTRRSIAITHARDRRLRASVAHRIANHVVNHAIETGCKAIALEDLRLDSMTRKCKAKQGDDGRNLHNGQAAKRGLSRSLLGRALGQIKTFVEYRCRRVGLLFIGVDPAGTSTQCPHCHHREKRNRLTQADFECVRCRHTEHADVIGSVNIRDRAFKKITEISPGTSLKNARAFKRPEKRSTRASSISPRNTSKTRRSRWVDYIEDPPSAASPA

SEQ ID NO: 51848 - protein, 341 aa, unknown
  TnpB Polypeptide
MELWKKTDQKGGRPKLVCDNHAMPVFYRDVMYREDTEEKDGACLKLYDGHDWKWFRVSLSHTDMEYLRKNWAGKKAAAPVLEKRHRKYFLRFSYTEEVPLTKTPVKEQIICSVDLGLNTDAVCTIMRADGTVLGRKFIDFPSEKDRMYRVLGRISRFQRKHGSAQVKSRWAYAKRFNTELGRKIAGAVTGYAEENHVDVIVFEYLEIKGKISGRKKQKLHLWRKRDIQKRCEHQAHRRGMRISRICAWNTSRLACDGSGTVVRDPGNHSLCTFQNGKRYNCDLSASYNIGARYFIRELLKPIPVTERSLLEAKVPSVKRRISCVYADLRELFLEMELLRAA

SEQ ID NO: 51849 - protein, 413 aa, unknown
  TnpB Polypeptide
MKVKVNPTPEQKDVLRQWIGTCRWTYNQCVYYGNAHPEARDIKTLRSLFVNNDTFKSKDGFEWALKVPYDVRGEAARDYVKAVESNRAKQKLNPEHRFEVKFRSRKKCHQETINLLGKHVYWKPDTSDCLSRFSSTFFPGGLRSSENLPPHLFKEEGTRSGQACLYDLRLTREKTGDWFLCVPLPLNHVYPNNLPLSAYRVPAPTDVNERKVVALDPGVRTFMTGYSPDGYLLGIGTGDSRKLQVTAEKVDLLQSRWSAKGGFVRAKRRRQMKKKAAKLRRRVRNLVNEVHRKTAKLLVAEFDTILIPTFEVSKMVECDDRNISSKTVRQMLNWRHYAFRQLLHAKAREMPGVRVIEVTEEYTSKTCGRCGITNHTLGTAKVFHCPHCGLHVDRDANGARNIFLKNMGYALGG

SEQ ID NO: 51850 - protein, 443 aa, unknown
  TnpB Polypeptide
VYVIALAIHLHQLRFKVGTDLGEDMPEMLNRFAIEDAAPVFGHKDQMDVYCEDAVPTVSNVLVFVHRPDYPATMERRQAFKFELMPNGEQRRQMSRFAGSARYVYNKALALKKERYEKKEKLTRFQLDKLLVQWKQETPWLADAPAHALQQAILDLDRAYTNFFQKRTLFPKFHKKGQRDSFRESDPKCIKLEQANSRIQLPKIGWVRYRNSREVLGQIRSVTVSLSAGKWFVSVNTLREVEQPQHPSTSAVGLDWGVARFYTLSDGEYQEQCAPLKQFLPKLARLQRRLARKEKFSNNWKKAKIRITKLHNKIANIRKEFVHKSSNDISKNHAVVIVEDLQVKNMSAASKGTKDKPGKRVAQKSGLNRSILDASPFELRRHWSTRRNGAAACWFPCHRKTRAAPAPYQWVVAVMCLGRIARRKPSSYASSVASQPMRIWLEP

SEQ ID NO: 51851 - protein, 434 aa, unknown
  TnpB Polypeptide
LATVDRTRSLHYLRFPRVVFAAPFKMRQQDFQATQHNTLWHARRTRCCIQSKGYSSPRQKSVLRKMFKYRLFTTRLQSELLDVQLGEACRLYNAALQERRDAWKQQISINYYAQANQLKEIRAAGDLGLANFSCCQDILRRVHKTYEAFFRRVKHGEKAGHPRFKSRRRFDSITFPSYGDGIKLNDNMLRIQGVGQVEVRLHRPISGKIKTVTIKRECGKWYACFSAECEPKPLPANTKEIGIDVGLESFATLSDGKSVPNPRWYQKAEAKLRRAQRKVARRKKGSHRRRKAVRLLQKIHQRIKNQRNEFQHKFTFWLVQNFGTIAVEDLNVKGLASGMLAKSVHNVAWASFFSKLAYKAENAGRTLKAVNPHGTSQTCTCGAAVWKELSDREHVCTACGLIAPRDVVSAQVILQRARMSPSNRNVAECIACVV

SEQ ID NO: 51852 - protein, 381 aa, Azospirillum sp.
MPVLSYKHRLYPNRAQVAGFEAMLGAFCDLYNAALQQRIEAYRRLGKTLRYVDQASELKAVRAVDERLAGYSFSAEQQVLRRLDKAFRAFFRRLKTKGKAGFPRFRAKSVFDSAEFRVGDGLTIRRSGRLGIVGIPGELKVKWHRNLPAGAKIGTAVLSRSAGKWFLCFQITMSDEEVQPRDGASVGIDVGLSSLIATSNGETVAAPQWTKLAAKKQRRLQRALARAKRGSKRRLKAKCRLARHSAATANQRRDFLHKLARSLVGRYAFIAIEDLSVDRLARSMFAKAVHNAAWGQFRSFLEYKAANAGVRVEAVDPRGTSQTCPECGAVVAKTLADRTHRCVCGCVMDRDVAAAKVILHRAIHGKGPGHGLRTPSQRVAA

SEQ ID NO: 51853 - protein, 367 aa, unknown
  TnpB Polypeptide
VEKTYKYRIYPNKKQKEIIAKTFGCCRFVYNTYLAKRITVYKQNKETFSFYMCCKDLPILKSEYEWLKEVDSTALQSSLRDLDVAYQKFFKEHSGYPKFKSKKTHRYSYKSKYSHGNIQYCDKYIKLPKLGMVKTKNKLIPQGRILNATVSQEPSGKYYVSLCCTDVDIKPLEKTGNSVGIDLGIKEFCITSDGEMIANPKYLKKSLDKLAKLQRELSRKSKGGSNRNKVRIKVARLQEHIVNQRKDFLQKLSTEIIRNNDVICLEDLQVSNMIKNHKLARSIADVSWSEFVRELEYKANWYGKHVVKVDKFFASSQICNVCGYVNKETKNLGVREWDCPCCNTHHDRDVNAAINILNEGLRLLEVA

SEQ ID NO: 51854 - protein, 402 aa, unknown
  TnpB Polypeptide
MAKVLDSLCDYRRDCWNQGLDVWNDLYDQRVEMVPADLREKSRLAIKDKSIVFSKEEQELLNLFPSPSHHVVQNILVADKADWQYRLSSRVLQLAVKDLAHAWSAFFNSKKGSKKKKRKVGKPSFRSKKNPKQGFKTDRASIKDGKLVLDKPHAYKDAWYSIPFKGYDLSDGKIKHCSITKIGDSYYASIIIDYPEQPLLKTGGKTAIDANVNHFDYTDGSFVVCPKELDCLYAQIKHYQRLLARKRHENGRNATRSKQYFKVKTKLQKCYRRVTAIQNDLLHKFTTMIYQTYDTIVIEDLNVQTMQMQKKAKNLHRSLFGRFRIYMEYKADKFEKTLIIADRFYPSTQRCSNCGHVKTGDEKITLSGNQEHGTKHHEYVCYECGYEDDRDRNAVLNLLALA

SEQ ID NO: 51855 - protein, 373 aa, unknown
  TnpB Polypeptide
LLKAFKFRLYPNKEQSILINKHLGSNRFVYNYFLGKRIEQYKDAKTTLTYNQCAVLLPQLKKEFEWLKEIDSISLQQTLKNLDMAYQNFFREVKKGNNQGFPKFKSKKDNRKSYRTNVTNNNIRVENNKIKLPKLGSVKFAKSREILGIIKNVTISQVPSGKYFISILCEVPEIIKLPKFNINIGIDLGIKDFAITSEAEIIDNPKYYREYEDKLAKLQKQLSKKQKGSKNRNKARIKVARLHEKIANTRIDFLQKLSFRLINENQIICLEDLNVEGMVKNHKLAKSISDASWSSFTTMLEYKANWYGREIVGIDRYFPSSQLCNVCGYKNIEVKDPSIREWKCPECNVHHHRDINAAINIKNEGLRLLGLIA

SEQ ID NO: 51856 - protein, 406 aa, unknown
  TnpB Polypeptide
LKIIKYTYKFRLNPTDEQKTLLNKHFGSVRYVYNYFLNQRKTEYLENKKSLTYNQQSGFLTQLKKELDWLKEINSQTLQSSLKCLDTAYQGFFKKRTQFPRFKSRKNKNSFTIPQFVSVDGDRLQIPKFRENGGIEMIMERKIKGTIKHCNISKTPTGKYFVSILTEMEYEPMIKTNMSVGIDLGLKDFLVLSNGTKIKNHRFLKHYERTLKLNQKYLSRKTKGSVRYEKQRIKVARIHEKITNSRMDLIHKTTNDLINQFDVIYLEDLNVKGMMKNHKLSKAISDVSWGKFIDTLEYKSVWNDKQIVHIDRFFPSSKTCSKCGWINNNLTLKDREWTCKCGEKHDRDLNASINILNEGKRINISVGTTDYGRGDQIRPDSSGVICETLKEMGLYDNVPKTTTSLV

SEQ ID NO: 51857 - protein, 400 aa, unknown
  TnpB Polypeptide
MKMTENKKCVGYKIRLYPTKEQEAMFFKHINCCRYIWNYMLELQNKTYEVEKRHIGVFDMMGLLYHLKNENKWLREVSSTSLRIICRDLDKAFDAFFEKICRHPKFKSKHKSKLSFPTRAERLCISETTINVEKIGRVRYKTDRNLHMDNTLKFYNPRIIYTNNKWILSVGVEYESQVLQNPTGRVGIDLGIKNLATISYFYNDCNGNDCGYYKNINHDKYMKRLERKSIHYQRVMSRKMRVNNCYKVECDDGKYRRYDSNNYKKVKQLHQRVEARIANIRLNYIHHITRDIVNLKPEVITMEDLKVSNMLKNPKLAPHISKACWRKFRDIMTHKADMHGIQVQIAPWWFPSSKNCSCCGHKKRKLGLDERVYRCKKCGLEIDRDLNAAINLQWFNYDRT

SEQ ID NO: 51858 - protein, 228 aa, unknown
  TnpB Polypeptide
LRQLKLLRARQSSAERAWSAISRFYDNCKKKVPGKKGFPQFQKDNRSVEYKTSGWKLATDRKSITFTDKQGIGRLKLKGTRDLHFYQITQIKRVRLVKRADGCYVQFCVQVDRSEKGEITGNAIGLDVGLKEFYTDSNGIAVENSRFLRKGERRLKKSHRRLSKRVKGSNNRKRARVTLGKRHLKISRQRKDFAVKLARCVIQSNDCVVYEDLRIKNMVKNHCESEIN

SEQ ID NO: 51859 - protein, 366 aa, unknown
  TnpB Polypeptide
MVEPAEDQDVQTMTAVCKVLVTDDSTALLLGLLGHSATKLWNTAVWHAKEAWKTTGKKPTYADLDTAIKQEHPLWYRRLHSQSAQAVLEDLWQSYRSWFALRKKGGGKANPPSFRRKTSLSSVTFKQYAVKWNQRTSTVRLSIPRDIYGKQFLYLKVRMPEGTCLAEDNIQLARLVYHNGTWSVHFVYNITLPELKGVGETMAIDLEMKHLAATACTDGDTFLWSGGELAALERHFDKQKSKTTRSRSRKTCVSNKKRSRQRSHLLTVSSDLLSAMQTLAVSPRSSWGILRTSETAKTGEIAGTSSSTNGRSIRSSRRSRTRLGSKASALLRNQRTSRARHAVCAAQSANPIVFIVASISATNAVP

SEQ ID NO: 51860 - protein, 398 aa, Microcoleus sp.
VLHKAIQVRLYPTQNQQIQVAPTFGCARSWWNYDLNKSIEVYKKTGKGVGCSALNTLLPGLKNSEKSAWLGGGYNEVLQAKALKLTTAYKNFFHKRAGFSNLKIQEGKHSVQYPHYVEIVKANVKFIRNIGIAKPQIHKLIEGKIQTVIFSKNYSSESASILTEIESENRTIKEDRIYGRDLELKHLAIVREGEKKSKYDNAKEFAKHKKNLKRQQQKLTYPQKRSNSRYKYRKVVAKVYERVKNSRQDFLHKLSDELVRDSLAVIVENLHVLGMVSNQNLGKAISDAGLGTFTNFLAYKLERKGGNLVEIDRWFPSSRLCSNCFHPMTEMPLDVRGWACPQCAIDHDQDQEGNARINMRAEGIRILKAESAAVSALGCEVRRKLGRKSKLRHSPMST

SEQ ID NO: 51861 - protein, 440 aa, Streptomyces sp.
VAVRDRLKHLTPQDETVLRAVGAHQGALASRDLKTRCADGLEHGAQTWAARKRDLTKESSSRITGAITKATHDQWALARRCQAAHIQKLEAGIRTLRHRLSLPLGAPGTKRAAGGYRSKNEWFRKSRRLAALEARHTAAVADWQAGRVRVVRGGKRLLNTRHHLTETRLTEDRWRQRWEAERWFIAADGESGKRFGNETIRVTDTGEVSIKLPAPLAHLANTRHGRYTLTARIAFAHRGVEWADRITANRAVAYRIHLDTERGRWYLTASWQRPVVKTIPLETARARGMVGVDTNADHFAAYRLDRHGNPVGGPHRFFYDLSGSAGHRDAQIRHALTRLINWAVRVGVAAIGIEDLDFTAEKTREKHGRRKRFRQLISGIPTGKLKARLVSMAAEQGLAIVAVDPAYTSLWGAQHWQKPLETRPWTPCPASDGTAPTRPE

SEQ ID NO: 51862 - protein, 423 aa, unknown
  TnpB Polypeptide
MRRKKKETKNPIPIITRAHKIKIYPNKHNQEVFQKYYDYQRSVWNRAIDERNAQYKIYKEMKATGLYTQKELNKNYFPSTSNLRKMEKFDWEDNFYCRVREIQFDNLCHAWDNFFNPSMPNHKKPKYKKKKDVETHKKLSLRNVRIEGKWLFLPKSRYSKPEYRFTKIKMEEPLRFNGRIADDFTVSVENDKWYVTITVETHLEEKTAISKQSTGIDVNVGSIDYLKNDGLNKEYGKFYLLPNSLLRQYDKIKFYSKVIAKKRNKNPYYVNSKSYYKTITKLNNAYTKAYNIQEANLNNIVKYFFDNYNRIVIEDLNVNSMKMNKRLCKSLHKNAFGRFKQKMINKAEEYNVEFILANRFFPSTQTCSECGHVKTGDEKLFLWGDKYGNDHNTYVCYNCGTIQDRTENAILNLNHYGKENNAN

SEQ ID NO: 51863 - protein, 405 aa, unknown
  TnpB Polypeptide
MDSTEKEIIYPTDERFDLIKELCHLSKNLYNASLYDVRQYYFETKSYRTWQSQRPIFTKNHNPDYYALQSHLAGEVLMQVGRQFISFYNNKSNKKKRIPKYKDKNGYNVVTFPKLAISKQIDFDEDKQIYTYTLCKKSYNLKIQSTKPNVKMVQFVYDEANNLIKCFKIYEVEQPELKRDNSRYFSIDPGLNNIVSIYNNIGIRPLLYNGRPIKSINQYYNKTTAKLRSELPTNVKTSKRLKQLSLKRNNKIEYEMHKISTHIINEAVKNNISKIFIGNNKGWKKGIKIGRRNNQNFVNIPHTKLFNQLSYKGLLNGIEVIFTEESYTSKASFFDKDELPIYGESDSYKFSGRRIKRGLYKDSKGNIWNADLNGAANIMRKCSDKAYKGIRKTKELMKRPILVTL

SEQ ID NO: 51864 - protein, 436 aa, unknown
  TnpB Polypeptide
MKLTGDFQALEASIAIYRQALTYLIPIIDSGWEELSKCEFPNQKQRLVETWVHSTQNNQAQFDFDLEFPKLPTYLRRSAISKALGIVSSYRSNLANWEANQEGPVPKLQLVHYEYPAYYKRNLFKNFDPTHQTIELKVFKNGDWVFEQYGLKQSDCAYYKRYLAGKKQNVPLLQKKGRRFYATFSYEENTVLVPEESISKICAVDLGLETDATCSIMDKDGTVYARKFISFSKEHDRLHTQLGRIKRNQKRGSRHNKTLWRKVSGISQDIADKTAIDIFEFGKEHGVDVFVLEYLDFKGKKAVKRAHFWRYKRIYKVLAQKAHQYGLRISRVNARYTSRLAFDGSGWAKRGSEIAPNTSYSTLQFTTGKFYNADLNASYNIGARYFIRHLLKTVTVTQRLALEAKVPQVAKRSTCTLSDLINLRSALAVLTAERQT

SEQ ID NO: 51865 - protein, 412 aa, unknown
  TnpB Polypeptide
LEILAAAKDMPVLPKRKTFILDFSVSDKQMFRVGKNSNAYEIKIHSKKEVKAYNLETGWISFEMFLPTYIRESFTGKTAKPQFYWDHNKEEFVCAIPCEIKKLPNEYENVMGVDLGKIKVYSATVVRKDDSISDEYVPTEELQNLVNKLKRMNQHIKSVYEKKKRSSKYGNFTERQARRKLDYKRSRSKRTKLQFAIARLVAVEVINIAIKEQCKEIHLENLSWVKSSGGKWNFAQMQARIEEVAELFSIKIVKVSTKNSSKTNPVTLEVGKISNRDVLFKDGQKVDRDQLAGLNLALREPKKQKPRKIKTLNIRDSIVIQRQSRRFNNYLMKKSVMSEIKSKRKIHKEFLMAKQEASKPDLIKKENKKIVMFSHDKAKSDFAIMSVYKSSNLKLEYYFTNNLQFKHIYSDL

SEQ ID NO: 51866 - protein, 396 aa, Lachnospiraceae sp.
MKNPTFYTVLTKKFVLRCNHREWLQRTQTLYNEVLQFYYELYLNQQAQLNAGSQQVMRSLEQLTIVGRDKKEVPFPLPWEKIPLYFRRAAINAAIAAGKSYLARDRQWKQTEKFTASVTFYKGMYKRLNEKSVELKVWDGEAWRWLHCRLSGNTFSPTEECLSPSVVLKGQQTELHVPVREAVPDGRKAKERIADGENIAAVQFTNRDRLAVMCVLDSEGEQKAARFIKGGAEYVHLCRKVQEALERSQKATGNQAGGQSNQKYWMKLKHLNEYYSHKFSREIVDYCAEWQVSVLVLPVYSEEYSRYVMKSSGNWSALHLSNQIREKLKYKAWKAGIVVLETDAAGVSSQCAVCGKKIRKKDAEFACPEGHEGNRYLNGALNLGRKCLKSFGKQVG

SEQ ID NO: 51867 - protein, 261 aa, Fischerella sp.
VLHKAIQVRLYPSKEQQALLAQTFGCARWWWNFALNQSIEAYKETGKGLGRSALNALLPKLKKAEDTKWLADCYSQVLQATTLNLITAYKNFFEKRAGFPRFKSKHGKQSIQYPQNVKIVNGNVKLPGNIGIVKAKIHRPIEGKIKTVTVSKTPSGKYFASILTEMDGDAPTTTEGKIYGVDLGLNHFAVVTDGEKVSKYDNPKHIAKHERNLKRKQKKLARKQKGSNSRNKYRKVVAKVYERVSNSRQDFLHKLSHKLVS

SEQ ID NO: 51868 - protein, 330 aa, unknown
  TnpB Polypeptide
MLQACGKQALAIVRGTFQKQKQRLFVYNKLLVAGEIAKANKLKKKIDSVNISCPELDKIVPVQLDEHTCQIHLENPNSFDGWLKVQSSKRVDGKLKELSFLIPFKRTKHFNKKFRDGKLLKGVRISLNEISFCFEFQTQYKTKGETLGIDLGISDLYNCSDGQKSGKLNGKDLAQIQKELSRKRKGSRAFSRKQKERENYIRWSIKQLDLSNVSLLRREDLKDVFKYKKTCRFMQAWAYAQIISYLENYCEEQNVSVLPIKPSYTSQRCFLCGWVQKSNRKGKVFKCKSCGYTADADYNASCNISLSLQALPASLRQTKANIKGFYWKKV

SEQ ID NO: 51869 - protein, 458 aa, unknown
  TnpB Polypeptide
LITLKIKYEIESKERDRIFEYIKNYNSVFNCLLNHFQDLNKVLSTKDSFSFIKTLNNIFIDTYFKNGILYDAKQVFKKFGNKKLVFGGKKLFLNRIKNLVSKEEFKVKKLRPLQIVGAANSKGNKKFQILSENEILFKPTRKEHFTLNLKNVGKNYQKKLKSLILEQEKHSIPITYKLALKYVYISFEETKIEKVNVRPKLKDRIFAIDLNPNYVGWTIVDWESEKSYKLIKSGLISLKPLNDYENSLSVSSDSPKKKYIVNKRKFEVIRVGYELAKLANHFRCEIFSLEDLNIKSSDKSKGRNFNRLCNNQWNRNLLVHILEKNCKLYQIYFQKVMANYSSFLGNLVYREEKLPDPCLASIEIGRRAYEFYHQYILKDKEKEKNIIFDKLENVKDRVIKSSEELGYSDTFESLSDLYYNLKKRKCNYRFSLEKALKAYQKSFSSLKHSKSMCNFVAF

SEQ ID NO: 51870 - protein, 377 aa, unknown
  TnpB Polypeptide
MMQTLMVKVETTPKQAWALHETMHQFNHACNDIAKIAFKLHCANKIELQKTVYYRIREQYNLSAQMAVRAISKTVEAYKRDKSIQPEFDLDGAMPYDQRIMSWKGLDRVSLLTLGGRLIMPIRICDYHADRMNRPRGQVDLIYRNKTFYLAVVVDAPEASAIDAAAVLGIDLGVKNIAVDSTGETFSGDGIEKVRIKLDTIKADLQKCGTPSAKRHLKKIGKRESRFRRDVNHCISKKMVAKAKDTSSIIALEDLQGIRERTTVKKAQRRTHLSWSFDQLRQFIDYKAAIAGVPVVYINPAYTSQECPICHHISRSNRPARDDFHCVCCGFSGPADCISATNITSRVEANLPIVARLFAQLQASNFGGSHARQFIGG

SEQ ID NO: 51871 - protein, 465 aa, Oscillatoriales sp.
MKYTYQYKALPTTEQKLELNLWLRICQYWYNRQLGDRFDWWEMNRSPVDACPLVTALPELRDKPNYYSQKKYLPGLKKEPVIVQWSGEELDLSRVPANTLQEVCKRVDKSFERFIAGDSAGKRSGRPRFKAQSRFRSFVIEGAGLELHSCSVGGKYLYVKVPKIGLIKVRSPRHLPDGAILKQLQFIKKNDGWFVNLRLEDESVPVCESDIIPTWENSLGMDAVLHEDDYLATSEGVKLPSLKVLRKSQNKLTRISQKRNARKRGSKARRKLAKREGKQHQKIARCRKDFQYKTAHKLVRTGKKVFFYEDLNLKGLSKRNAPKQDKTGAFIPNGQASKSGLNLSWSDAAFGQFFQLLGHIAGKAGAVVIAKNPAYTSQLLSYRDEVIFTDCSIREYWDEDLKLWVDRDVNAAINVLRVGLDMFPTIKRRKGGIMIVGSITDDTSKEVLHILRMSEKPTPYPLGLV

SEQ ID NO: 51872 - protein, 280 aa, unknown
  TnpB Polypeptide
MDEEAIAISKDLKIPYQCGQLWVGKQGRLEVVRDDLRDKWYAHIPVEVQNEPPSGTCSKRASLDLGICNLATLYIEGERPFIYSGRAVLSDWAYCTKKIVEKQSQLPKRKYISKQIRIAFRKRQRRLRHTVHSMLRSIFETLESQCIGELIIGDLNGIRQNANHGKSGNQKLHNFWSFNLIEKRIYELGEEYGISIRKVSERDTSKTCCLCGKLHNGRIERGLMVCHETHQSINADVNGAVNILKVAVNRSLVRSTNEETSGSRLMAQPLLLRWNYNEWR

SEQ ID NO: 51873 - protein, 369 aa, unknown
  TnpB Polypeptide
LKVHKGYKFKLEPTEEQKIKINKTLGCCRFIYNSMLDRRIKAYKRRGESMSYIDTQNLLPKMKRYLPWLTEVDSQALKYSCRQLDDSYKGFFKSGKGFPNFKRKRGEEAYTTTNPKGIKVDDKYIQLPTLGKVRYRKSRDIEGKICKATVRRSASGKFYVSILCEVEVVPLPVTDTAIGLDVGIKSFAVDSNGNEHPNHKYLKEAEAKLKREQKKLSRKKRGSANWEKQRIKVARCHEKVTNKRKDTIHKLSSTLVKENQIICVEDLNIKGMIRNHNLAKSISDAAWGEFFRQLEYKAQWVGRVIVKVPTYYPSSQTCSCCGYQNEEVKNLNVRHWVCHQCGTLHDRDKNAADNILKKGMDMLAMPAAS

SEQ ID NO: 51874 - protein, 271 aa, unknown
  TnpB Polypeptide
MYFVKNNPKDCRCERHRLNIPTLGWVRIKEKGYIPTTKDGWKIKSGTVSIKAGKYYVSVLVEIPDAKIANNSNDGMGIDLGLKDLAIVSNGKTYKNINKSARVKKLEKKLCREQRCLSRKYENLKKGESTQKNIQKQKLKVQRLHHKIDNIRTDYINKSIAEIVKTKPSYITIEDLNVSGMMKNRHLSKAVTSQKFYKFRTSLKAKCDENGIELRVVDRWYPSSKICHCCGAIKKDLKLSDRIYRCDCGYVEDRDFNAALNLKDALTYEVA

SEQ ID NO: 51875 - protein, 362 aa, Bacillus sp.
MLKAYKYRIYPNKEQRTFFSKTFGCVRFVYNKMLADRINSYHESQTSIDKSIKYPTPAQYKKEFPFLKEVDSLALANAQMNLNKAYAHFFRDKSIGFPKFKNKKENRCSYTTNNQKGTVCIENGYMKLPKLRTTVRIKLHRPFFGLIKSVTICKTTTNKYFASVLVQEKEQLFPELKTRVGIVMGLKGFATLSSGKKYETPKWVRKTENRLAFLQKSLLRKKKGSKNQNKIRLQIARLHEKIANQCNDFLHKISNEITNENQVIVMEDLKMKDMQNKHKLAKSISEASWANFREYQTYKAMWKGRDLIITPKNYANDQLCSCCGYKNKDLKKINLYEWDCPMCNSHHDRDVNASINLLKLTL

SEQ ID NO: 51876 - protein, 433 aa, Desulfurococcales sp.
MSRVTRTVMVRSVKLPRRVFSIFVELEGMYRNMVEQLVLYAVRNNIKSFARLKALKYREMRSLYPQLPSHYVYTACQDTGTRAKSFLRLKRLGLTEREYPEVRRVSIWLDDHLWKSNGYTSIKIATHRGWAAVGLEPHKQYWRYVNRGWKLASEAKVKLDKGNRQLIIYLTFVKEVEEFKPRGYLSVDVNENNATVLVDGIAYLFETNMEKLVLGYYYRRKRVQERYDKLYGKRSRVKRKVMRKLREQKKKQDIKWKIANIIVRTAYEKQYAIVLEKLGKHVASNMIKRIKDKQLRHRIFQASFRGIQRAVEGKAREYGVPVVYVDPRNTSKLCPAHNAPITYSNGSRIGRCSIGGELWHRDVVACWNLLLKALRGDGSYAPNSVGYLLIDVSRIPFGTKAIHDPITLLVGLWARWKSLEVTLNNPKPQGITL

SEQ ID NO: 51877 - protein, 401 aa, unknown
  TnpB Polypeptide
MLVFEAKLEGMKEQYERLDEAIRTARFVRNSCLRYWMENMGIGKYELSAYCAVLGKEFPFAGKLNSQARQASAERAWSAIARFYDNCKKGKPGKKGFPRFKKHQTHGSVEYKTTGWKLSEDRRTITFSDGFEAGSFKLRGTRDLHFYQLKQIKRVRVVRRADGYYVQFCIDQERIEKREPTNKTIGLDVGLTHFYTDSNGQAVENPRYLRKSEKALKRLQRQLSHTEKGSKNRAKARNRLSRKHLKVSRQRKDFAVKLARCVVQSNDLVAYEDLQVRNMIRNTKLAKSISDAAWSNFRSWLEYFGKVFGAVTVAVPPHYTSANCSNCGKVVNKSLSQRTHKCPHCGHVQDRDWNAAINILELALRTVGHTGTLNASGENDLCVGEETPQRKPTHGKRKPKE

SEQ ID NO: 51878 - protein, 403 aa, Actinobacteria sp.
MRTAYKCRIYPDPEQVSVLNRTFGCIRVVWNRTLAWRQARYRTEQASTSYAQASAYLTAMKATDDLGWLNEVSSVPLQQALRHQQAAFSGFFAGRASYARYKSRTGRQCAEYTRSGFRYRDGQLFLAKMSTPLAFNWSWPDLDPASLDPSTVTVSRDPCGRWYVSFAVDVPAPAPLPPAGAVAGLDLGIKDFAVTSVGRKIANPRHLARRERSLARYQRRLARCQQGSANRAKARAKVARAHRKVRASRADFLHRTSARLVRDHDVIVIEDLNVSGMVRNRSLAKAISDCGWGEFRRQLEYKAARAGRQLIVIDRFYPSSKTCSACGHLLAELSLSARAWVCPSCGTRHDRDVNAAKNILAAGLAVTACGADVRHPGTSRVRSAVKQEPRPVRAGIPVLQGGE

SEQ ID NO: 51879 - protein, 425 aa, Actinobacteria sp.
MRMKDKNTVSASADVVVLSHETNCTEDVQLRYNYRAYLTPAERSAAGRALGCVRVVWNDALAHRRAARDAGEKYPTDAEMSARLTASKATPERAWLNEVSSVVLQQSLADLSKAYRAFFDSLSGKRKGPKVEAPRFKSRKDPRQSLRFTANSRFRILGNGRLRLPKIGDVKVRWTRDLPAAPASVTLTRDEAGRYFVSFVVEVTQEPLPETGRECGIDLGLSHFAVMDDGTKVSAPKFFRRAQKKLRKAQRDLSRKQKGSRNREKARVRVARAHAHVADARRDFHHKLSTHVIRENQAVTVEDLPVRDLARTRLAKSVHDAGWSAFVNMLEYKAKLYGREFRKTGRFEPTSQVCSACGAKDGPKPLSVREWQCKECGTVHDRDVNAARNIAALGRREAQNARGGQVRPPLAVAPAREAGSRRSAA

SEQ ID NO: 51880 - protein, 444 aa, Actinomadura sp.
MPGPDSDFAAGACHKRFKVSTMKLVVQMKLLPTPEQAAALHATLRTCNALANRISGQAYEKKMFSRAGLQKLVYAELKAAGLSAQPALHVIRKTADAYTTLRSQIAAGLLGGENSKRRRKAESKPVAFRLDAAQPFDDRCLSWQMDAGTVSIWTVHGRMQRIAFTGRPSQLKVLAEHRKGESDLVHRDGMWFLYATCEVDAAPLNTDPVDWIGVDRGIVNLATTCDGANYQGRDLSRYRRAQARRRAELQRKKAAGSRSAARRLTRRKAREGRHAANINHKIAKQIVADAQRTGRGIALEELSGIRGRVRLRRHQRVTLSTWPFHQLGTYIAYKAERAGVPVLQVDPAYTSQRCPRCGHVARGNRPDRDHFCCRRCGLAGPADHIAAVNVRQRARTAWAFVSMPDPTPVQGKGDATAARQPAALGSATRCGRPSRKPGRPRPRS

SEQ ID NO: 51881 - protein, 367 aa, Lachnospiraceae sp.
MLKAYRYRIYPNKEQEIQLAKTFGCCRFVYNQTLAYRKDAYEKEKKSVSKTDCNNYCNRELKKAYEWLKEVDKFALTNAIYNMDSAYQKFFKEHAGYPKFKSKHSNHKSYTTNFTNGNITVDFDRGRIKLPKLKRVKIKLHRKFSGRIKTATISKVPSGKYYVSVLVETEHSPLVKTNGQIGLDLGIKDLCITSDGKKYENPKTIKKYEKKLTRLQRQLANKTKGSRNYQKKRKQIALCHEKIANTRKDYLHKISSEIINENQVIVSENLQIKNMVKNHNLAKTISDVSWYELTRQLEYKSKWNGRNYIKIDTFYASSQLCFSCGYKNTNVKDLKVRDWMCPFCNTKHDRDINAAKNILAEGLRQVV

SEQ ID NO: 51882 - protein, 391 aa, Lachnospiraceae sp.
MIKSIKIRLYPNNKQITQLFQYAGCARFAYNWAIAKEQENYKQKNKFLSDNELRKEFTQLKKLPEYRWLNEVSNNVTKQAIKDACNAYKKFFKGQCKYPKFKSKKHSTPSFYQDTGKIQFTDTHVKVEGFSMSKRRNKQKLNWIRLCEKERIPINCKYLNPRFTYDGLYWYVSIGIEVDDNNNLPSNDGVGIDLGIKNLAVCSDGNTYKNINKTQKVRKIEKKKRRLQRSISRRYEKNKKGGSYCKTSNIIKREKELLKVIKRLTNIRQNYLHQTTSEIIKRKPSFICMEDLNVSGMMKNKHLSKAVQQQCFYEFRKQIEYKSNWNNISVIIADRFFPSSKLCSCCGNIKKDLKLSDRIYKCECGNIIDRDFQASLNLKQYGENVLKQSVV

SEQ ID NO: 51883 - protein, 398 aa, unknown
  TnpB Polypeptide
MKARYQFRFYPTDQQIRDLSRLFGCVRVVWNDALAACKGSEKLPSYNQLSSLLTQSKQTEERVWLTEVSAVPLQQSVRNLNVAYQNFFNSVNGKRKGKKINPPRFKSRKSKQSATFTNVGFSIKGEKVYLAKIGYLDVMWSRPLPSEPSSVTVIKDAAGRYFLSFVVEINPEKLPDNGKSVGIDLGITDFATLDNGEKIKSPKPLKKRFKKLRKAQRNLSRKQKGSKRREKARLKVAKLHAKIKDIRTDFLHKLSTRLIRENQTIVLEDLNTSGMLKNRKLSRAISDLGWRSFRDMLKAKSERYGRDFRVISRWEPTTQKCSCCGQIGGKKELSVREWTCLFCGETHDRDVNAAKNIKVAGGLSETRNGHRGRRKSSLLVASDEVSTRLLPIQLNLFG

SEQ ID NO: 51884 - protein, 377 aa, unknown
  TnpB Polypeptide
MEIKRAYKFRFYPTPEQEMILAKTFGCVRFAYNYMLRLRTDAWMQRQERIGYHETSAALTALKKQPEYAWLNEVSSVPVQQSLRHLQSAFANFFAKRASYPQFKRKNGPQSAEYTTSAFKWDGRSLKLAKMSEPLAVRWSRQIPKAAKVTTVTVSKDSAGRYFVSLLCDDVVAKKPASNGKVGVDLGLTHFAILSTGEKVAAPNTFRRYEKKLAKLQRRLAKKTKGSNRREKAKLKVARVHAKIADARRDFLHKLSTRLINENQVIAIESLSVSNMQKNRCLSKAVSDAGWSEFVRQLEYKARWYGRELIGIDRWYPSSRRCFDCGYTMPKMPLSVREWVCPECGSIHDRDINAARNVLAAGLAVSAHGEAVSPVCM

SEQ ID NO: 51885 - protein, 513 aa, unknown
  TnpB Polypeptide
MSRTYNTAVTLPAALDERLVGYAALHSRIERTLHADLERQAASGVKPRAEDFKTAYCSRFQITARQFNAIAMSIKGRRASITEINRERVKSLSLGIRRAQEKRRLALKSGKTLRAAQLHDKVERLRAQQTRLKADLTAHRVRMCFGTRKFFNAQLSLGAGSIATHEDWRRAWQSARSSQFYCLGSKDESAGNQTCTARQAEDGSFTLRVRLPDALIKAGEDRYVIIPGVRFSYGQEDIEAGLERGSALSYRFMRDAEKPGRWRVALTLDVAREAPSSIDMLGRIGVDVNVGFLLAVETDRFGNKVRSQRLSTPERGLSAHQREAARGEAIKALISWAHETSKPIVLEDLDLARKKSGRSADTNRKISALAYKALRDQIEARAADAGVLIHVVNPAYSSVQGRTLAVQHGLTTHGGAAFVLARRSQGYRQRLPKVGSRRRLPTPDGLIWWSAPARMHSGGRTDWTVIAADISQVLAAQYRSRALPAKPSGPARVSESILPGGIPGLEGVARPHP

SEQ ID NO: 51886 - protein, 478 aa, unknown
  TnpB Polypeptide
MIVTKTAIQKLRNYTRYFDYTLNIYRDALEYVNKVVYAEWENIEQLSFSKQRINFVERLIHSTSKNTAIYQEFDKKFYKFPSYFRRMVIMKAIGNVSSYITRYRQWEDKNKERIAQGKKPKSKPPVFQAKENSFPVFYKGEMSKWVSNGKVALKLYNGSDWIWFILPFTPVNLTRFPETEGWVRQNPMLVKKNKRWSLHIPFERNIKFQDKNFIKPVLGVDLGLNCTATVSVVCSDGTVLHREFINYGREKDRLNKLIGAIAVKSSKTYNIPKGENFCKRIWQMVRNLKEEIAQQCSRRLVKIAKAYNCQAIVFEHLGKFKIPKDFYGAKKLRKKLQYWLQGRIQKYTKYKSYAEGIRFSRVLASGTSDNAFDGSGTVRRVGNKQIALFRNWKWYNCDLSASYNIGARYWIREILQSLDGNIQVAMCGKMPDIVARHQQTLASLISLVRLLPREALPELVLYSSQGRSVKETATKALA

SEQ ID NO: 51887 - protein, 388 aa, Clostridium sp.
MIKTLKVMLIPNNKQRSKLFQSAGVARFAYNWALGREQENYKDCGTFLSDYNLRKEFTKLKTQEEYKWLNDYSNNITKQAIKDACLAYKRFFKGQSGFPKFKSRRKSKTSFYMDTDKIQFTNKKVKLEKITLSRKKNKQKLNWIRLAEKNRIPIDSKYINPRVTFDGVNWWISVGIKYADNTEVPVNDGLGIDLGIKDLAICSDIDKPYKNINKTEEIRKLKKKKRRLQRKISRKYLINKKGESYCKTSNIMKAEKKLLELNHRLTNIRHNYLHQTTTEIINRKPKFIVLEDLNVKGMMKNKHLSEAIAEQCFYEFYKQIEYKSSWNNIKFIIADQFYASSKTCSCCGSIKKDLKLSDRIYRCDNCNTVVDRDKNASINLYNYGKSIA

SEQ ID NO: 51888 - protein, 396 aa, Clostridium sp.
MRKLLRAYKVEIKPTHKQIEKINQSIGVCRWLYNHYLFTNSQLYSQYKEGFIDKKESFISANDFDKYINNKVKCLEKYSWINNCGSKARKKAIQNAETAYKRFFNGQCKFPRFKKKKNDDIKLYFPKNNKGDWKVDRHRIMIPTLKNVRLKEYGYIPVGAKVISGTVSKKYNRYYVSVIIDTDWTIPSGEYTEGIGIDLGVKDLAICSNKQKFKNINKTQKIRKLEKKLKNEQKRLSRKYESLKLRNKNKKGDATRQNIQKQIVKVQSIHQRLTNIRTDYINKTIYEIVKQKPRYITIEDLNVNGMMKNRHLSKAVVQQKLYEFRNKLNYKCNLFGIELRIVDRFYPSSKLCNNCGSIKSDLKLKDRIYKCHCGYVEDRDYNASLNLKDAKIYKIA

SEQ ID NO: 51889 - protein, 462 aa, unknown
  TnpB Polypeptide
MRVENIKIGERYTYKELCDTLGVKCSEATNKKVEFLEKLESYCKYERPDNRHFVVTEIFETPLPTLDDGYFYKTMIIPVKCSDEDYSYLMQCSRWAGDCWNKIVKADNDFYKENGRLMKKSELQTFVKNITPLHAVGNQHVYIKYETSRTAMFKSRKAGHQNSHRVNLPYKKKKYYVVGWNVFSYVIDYKKHQIRLSKKLDENGRIQKPICCTFKTMPKHVVEVELVYRNGLCLAIKYKEPKTNTDIQSGNVSAIDLGEIHSITSIDNNGNGVIITGRKLRSIKRLQNKEQAKLRSKRDKLTKGSRQYRKYSRAIYKLKIKSDRQILDCVHKISKLYLDYCIQNGISKVYYGDLDTCTRNTKERANKLVGQKLNDWCYGLLTLQLENKLSRYSIEFVKVSEAYSSQTCPKCGNKHKPTGRNYECKCGYKQHRDLVGAMNILNFNEKDIHVEKYNSLKYLRID

SEQ ID NO: 51890 - protein, 366 aa, unknown
  TnpB Polypeptide
VEKAYKYRIYPNKKQKEIISKTFGCCRFLYNKYLAKRIEMYEKNKETFSYVQCANDMKQLKTELEWLKEVDSTALQSSLRDLDMAYQKFFKEHSGYPKFKSKKTHRFSYKSKCVNGNIQYCDKYIKLPKLGMIKTKNKLIPQGRILNATVSQEPSGKYYVSLCCTDIDTQSLGKTGNAVGIDLGIKEFCVTSDDELVPNPHYLKKSLDKLAKLQRQLSRKSKGGSNRNKARIKVARLQEHIANQRKDFLQKLSTELIKSNDIICIEDLTVKNMVKNHKLAQAISDVSWSEFVRQLEYKANWYGKQVVKVDRFYASSQTCNICGYVNKETKNLSVREWDCPCCKTHHDRDINAAINILNEGLRLLSA

SEQ ID NO: 51891 - protein, 264 aa, unknown
  TnpB Polypeptide
VEERPPGTKSSLFSGLAGCPDARRSCVQSLLPTGKGRREPRIPPVQGEGAIWSFTYPPFGFHLNDAGTHLSASKIGDIPIVLHRPIEGNIKTLTIHRTATGKWYACFSVEYDPTPVPQKGTVVGVDVGLESFATLSNGEKIENPRFFRTDEKALAKAQRKLSITEKETPERKKARKVVARIHERIANRRLDFAHQTSRMMVDRFGTIVFENLKITNMQKKHCRCGLESVHHDHREQSGRGWFSCDPGESQKYITAVFPMWYDRR

SEQ ID NO: 51892 - protein, 268 aa, unknown
  TnpB Polypeptide
MCCYINNRNFRISDDCISFPVMINGKSKRISVKTKMSERQKSIFSSSKLGTMRIVVKGHDLVAQIVYDAKEDAASSNDNVMGVDLGIKCPAVSYCPDGSVKFYGNGRKNKYIRRHYNNLRKRFQKAKKPKAVVKINNKEQRIMKDIDHKLSREIVNTAKTHDVSVIKLERLQNIRSTTRTSRKNNHSLHTWSFYRLAQFIEYKAKLAGIEVEYVDPAYTSQICPICGSVHHAKDRNYICRCGYHTHRDLFGAINICNSTEYIGNRYTA

SEQ ID NO: 51893 - protein, 218 aa, unknown
  TnpB Polypeptide
MERDGSFYVSILYEYKTDIVKSEVNPSSILGLDYKSDGLYMDSEGNCCDMPHFYRDSQKKLSKAQRKLKHKKLRSNNYYRQQRRISRISRKIANQRKDFLHKVSTGIANRYDLVCIEDLNLRNLSNKGFGNGKATLDNGYGMFATMLGYKLADRGKQLVQVDKWYPSSKICSRCGKIKLMPLSQRSYDCTCGLKLDRDVNAAVNIKNRGYEMYLEKCA

SEQ ID NO: 51894 - protein, 360 aa, unknown
  TnpB Polypeptide
MDQREAQRVLFGYEQHAHRLEEDRRTVVPQRRVLRPPATGPAPSATGRSPGFFKQENAYPVFKKKTHGGSAEFTRSAFNWNGRELRLAKMKEPLPIVWSRTLPKGAEPSTVTVSLDPAQRWHVSILVKERITTLRGKSNAIALDLGVDSFAVTDQGSVIENPRHLKKSLESLARAQRSLSRKRKGSNNHRKAQLKVARINARIADQRRDFLHKLSTNIIRDNQTVIIEDLAVRNMTRRCKPKTNPEHPGQYLPNGQSAKSGLNRSILDAGWAEFRRMLEYKSEWYGRQLIVIDQYYPSTQLCSMCGAKTGPKTLDVREWTCPACGCHHDRDGNAAKNILAAGLAVSVCKDGRIKDGLSQE

SEQ ID NO: 51895 - protein, 375 aa, Firmicutes sp.
LLKAFKYRLYPNKEQEILINKTIGCCRFVFNYYLNKRIENYKAEQKSLNYNDNANDLKNLKKEFEWLKEVDSISLQQTLKDLDQAYKNFFRRVKQGGDKTGFPKFKSKKNNKQSFRSQCVNNNIQVVGGKIKLPKLGLIKFANSRSFQGQIKSCTISKTPTNKYYISILVDTEIEQLPKLNTAIGIDLGLKDFAITSDGEVFENPKFLRRLEYKLAFQQKALSRKQVGSNNWYKQKLKVAKIHEQIANARKDYLHKLSTKLINENQVICLEDLQVKNMMKNHKLAKAISEVSWSEFRTMLEYKANWYGRTISIIGKTFASSQLCSKCGYKNVEVKNLALREWNCPQCGTHHNRDLNASINILNEGLRLLGVGTTL

SEQ ID NO: 51896 - protein, 408 aa, unknown
  TnpB Polypeptide
MKATIKVKLYPNHKKAQHLRQSLGNARFIWNKLLEKEIELYRKEKKFIWYFDMCREITKLREEYPFLKESSIYVLQQMARKLHFALKNFVKHKDMFDFPKFKKKSRYDGILIYPKDFKITSKAIYLPKMGWVRFRDKIVKKPQWNEIVNTAKQIWVKEEADGFFAYIQYEKNPEPKPSNGKVVGIDVGIRNTVTLSNGEVYKVDKEKIMRLIEISEYLQSIIDKKREINKKRGIKFSRRLEYLKRKRLKILKKIRNIYQDFYYKISNHILNSHEYVVIEDLNLAELMQIENEKAEKNIHKHLQHIAIGRFFSILEYKAQLYGRKVVKVEPKDTSKTCSNCGYVYHELKLSDKTFRCPKCGFRIDRDLNASVNILKRGLGTLSPSAGQVEYRREMARFIPCLYAEPPSL

SEQ ID NO: 51897 - protein, 382 aa, unknown
  TnpB Polypeptide
METVRTAVCKLVPTPEQAVEIDATLKAFASACDFAADAARRIGSTNKVKVQADAYRAIRETFGLSANLAIRAIARACAALKVPAKMHSKFEPTSIDYDARIFAFHEWNWTFGLTLLSGRVKIATALGDRQRSMLKGRKPTAAVLVKRRDGVYYLHVQLTDDAPEPIETKGTIGVDMGVVNLAVTDDGETFSGEHVEACRRKYQRIRKTCQRTGTKSAKRKLRQVRAKESRFKANENHVISKRIVAKAKGTASAIGVEDLSGIGQRTTARKADRSRMKGWAFFQLRSFLTYKALAEGIPVIPVDPRNTSRTCSECRYCEKRNRKTRDEFECKHCGFKLPADWNAARNIRDRAEVIRLHAGIVDAGGRIPAEITCKPPALAVGL

SEQ ID NO: 51898 - protein, 300 aa, unknown
  TnpB Polypeptide
LPPHIRKLSPPGYWKDRETGERRIHILIRNDRYHVEPISKNEGYIVLEDFDLRVRYVGRIRWEGKQGRLEIIYEAGRWQAYIPIEVGVDPPKSNPKGYVKPLYDDEEKKKKRRIVNPKSIRQRDPIGDKEAFMDMGLNNLFAVVTTDESVMLIKGGSIKSEYYWWKREIATYQSIRDVLRRLGISTWIYYHEKYLDAMYKRDERLRHLYITAIRFLADDLYRRGVRKLYIGYPIMLSQNNGNEYNTNIWWYRKIVLWIVDIFMEYGIEVEIVPEDYTSRECSICGIRHKNGRIYRGLYMQ

SEQ ID NO: 51899 - protein, 194 aa, Okeania sp.
IPNGFYRKKGGMATVSYPKQALKLKDNQIRIPLGNTCNRWFGIDCFYIPMPSNLNFASLKELRILPRNKCFSWEFVYEKEIVVKPLLNQENVLGIDHGVNNWLTCVSNVGTSLIIDGKHPPLSPPGRGTKGVGLYNKKISTIKENKPTGFWSNKLAAITEKRNRQMRDGINKAARIVINHCARKFYWYNCFWLE

SEQ ID NO: 51900 - protein, 338 aa, Mycobacterium sp.
MRAVSPWPTVLSMLTERKLTIACSHGPAPADGAQRTHSRGTAPGQNSRSGKREGKTMGFPRFKKKGRDQDRVTFTTGAMRVEPDRRHLTLPVVGTVRTHENTRRIERLIATGRARVLAISVRRNGTRLDASVRVLVQRPQQPNVAQPGSRVGVDVGVRRLATVANEAGAVLEEVPNPRPLDAALKELRYASRARSRCTKGSRRYRERTTEISRLHRRVNDVRTHHLHVLTTRLAQTHGHIVVEGLDAAGMLRQKGLPGARARRRGLSDSALGTPRRHLSYKTGWYGSALVVADRWFPSLSVEPTVRPGLARLVAVKRGREAAAWLPNNPETGCKSRDH

SEQ ID NO: 51901 - protein, 388 aa, Proteobacteria sp.
MKLTLQLKLLPTPTQHAALRETMRLCNEAATYAAAKGFAAGVYGQVSLHHLAYYEIRERFGLSSQLAVRAIAKAVECFQRDKTVCPVFRPDGAVCYDQRVLSFHGLNSASLWAIGGRIEVPFVCGPYQQERQGRIHGQADLVLRDGVFYLLCTIDMPAETPLDPQDVLGVDLGVINLATTSDGTTHSGAGVEACRTRYAKRRQQLQRAAQRAQMDGKRPKQIRVALRRIARKEAGFRRDVNHGISKTLVAVAKGTDRCIALEDLKDIRRRTRFRKPQRARMTGWAFAQLRSFVEYKAQRAGVPVVLVDPRHTSQDCNRCGHVERANRQSQARFSCQQCGYTTNTDFNAANNIRDRARVKVPLVADPLRQLRLPLADASYKPPASAGGT

SEQ ID NO: 51902 - protein, 207 aa, Firmicutes sp.
MASFIVDGKKLKSINQWYNKENARLQSIKDKQGFKSITNLQYANLVNRNNRVNYYMNKTARIIVNYCLEYRIGNIVVGYNPDWKRNINIGKSNNQKFTQIPHGNLRLKLQSLCERYGINYIEQEESYTSKSDFFANDALPVYNADNPKEYAFSGKRISRGQYRTSSGAIINADANGALNILRKSNLIDLMVLQARGCLDQPERIRVV

SEQ ID NO: 51903 - protein, 402 aa, Escherichia sp.
MKRLQAFKFQLRPGGQQERQMRRFAGACRFVFNRALALQNENHEAGNKYIPYTKMASWLVEWKNATETQWLKDSPSQPLQQSLKDLERAYKNFFQKRTSFPRFKKRGQNDAFRYPQGVKLDQENSRIFLPKLGWMRYRNSRQVTGVVKNVTVSQSCGKWYISIQTESEVSTPVHPSASMVGLDAGVAKLATLSDGTVFEPVNSFQKNQKKLARLQRQLSRKVKFSNNWQKQKRKIQRLHSRIANIRRDYLHKVTTTVSKNHAMIVIEDLKVSNMSKSAAGTVSQPGRNVRAKSGLNRSILDQGWYEMRRQLEYKQLWRGGQVLAVPPAYTSQRCACCGHTAKENRLSQSKFECQVCGYTANADVNGARNILAAGHAVLACGGMVQSGRPLKQEPTEMIQATA

SEQ ID NO: 51904 - protein, 313 aa, unknown
  TnpB Polypeptide
LTNTAITQALAIFKSYRRPSRKKGNIKRPDVKSSNVVLLNDTHLFWFDWGSLKIATHKGHLTIPLEVYEYSEKFKGWNVKWSRLVRRNGDYWLHVTFRRDVERKEPQGVLRVDVNEKSIDLAIVKRDKVKFVKIDVSEAKFIRDRYFKKRRSIQGRVNGEARSSLLKKYSGREKRRVHAILHKASKVIAKIIDEEGVLPIMKRLKGIRKRVNRRLHSMPFRISQSFIEYKALESVTERSTLKLKTPLAHVRYVAKLITRKDMSLSAGSAASGRTGIRWPLGICPRKPCAHRMIGRRMALKFLQKVSQKAPNFS

SEQ ID NO: 51905 - protein, 408 aa, unknown
  TnpB Polypeptide
MKQVLTIVCKLQPTKEQISQIEDTLVGFANACNHINNTIDPKLTNSVRIQTLIYHAVRELFGLSANLSIRAIARVSANRKTAKQKKSLVKDFKPTSIDYDARIFDFREKDWTASITLIGSRQHIKMDAGNYQRGKLKDKKPTSATLCKHKDGNYYIHIQVKDDIPEPSESESVIGVDLGRRDIAVTSDGDSWSGEDIQQVRDKFSRVRASLQKKATKGTRSTRRRARQVLKRLSGREKHYQSWLNHTISRTIVNKAKSENAVIAIEDLTGIRERTNQQPRNKTERRRSNSWAFYQLRQFLEYKSIQAGISLVKVNPAYTSQMCHNCHHIHPIKGSSYRSGKNFKCGHCGWTGDADLNGAMNIAIIGAFVIKPRGSGLFCSLSEHVSGLLQNSSLLCAVGESPVTSVRG

SEQ ID NO: 51906 - protein, 395 aa, Streptomyces sp.
VELRYTFRLEPGPGARASLARVFGCARVVWNDALVARKAAFAAGQPFPRTAELSKLLITQAKRTTQRAWLAEVSSVPLQQVLRDQDRAWRAFFDSLKGSRNGAKVGVPAVKSRKDSSQSVRFTANAGWKITPAGKLSLPKVGHIPVRWSRQLPCVPSSVTVIKDGAGRYFASFVVRNDARADAARFPLVAGDQGIDLGLAHFAVLADGSRARSPRFLRRAEKKVRKRHRAFSRKQKGSKNREKARVRLARAHAGVADARKDFHHQLSTKLIRENQSVTVETLNVRGLSRGALSKAVHDAGWGQFLRMLDYKAKRYGREFTRVARAFPSSQLCSACGHRDGPKPLNVRTWTCSECGTLHDRDWNAGQNLRQEGRRIRTKALQTAPPTPGPGALTSE

SEQ ID NO: 51907 - protein, 402 aa, Streptomyces sp.
VIRAYKFLLRPTAGQTVALRDMLSDHCSLYNGALQERRDAYRHVSKTCLRYGDQSAQLREIRAFDPERQGRWSFSSQQATLRRLDKAFQAFFRRVKNGETPGYPRFKGVGHFDTVVFPKDGDGCRWDSTPYDRQTRVRLQGVGHVRVHQHRTVRGRVKTISVKREGRRWYVVLSCDDVPAEPLPPTGAVAGIDMGTTHFLTTSDGEHIGNPKFLDRMADELAEAQQYLATFPRRTRQRSKRHRAAARKVAKLHTKIQRQRADSHHKTALALVREYDTIAHERLNTAGMTRTPKPKPDPDNNGVFLPNGAAAKAGLNRSILDAGWAQFLSILANKAESAGRHVIEVDARNTSRTCLACGHVAKENRVTQAKFACTACGFTANADHVGATNVLNRAGLVLCDVA

SEQ ID NO: 51908 - protein, 348 aa, unknown
  TnpB Polypeptide
LRSIGSVHNTLYRELKEWFGLPSRVAVDCYRDALANAKAWRNNPRKGRRPRIRKLSMLLHPGSGYRVKEGYVEIIGRIKLEIISWDRRYDGYENGEARLVYRDNKMMLWISKKIPKPQPYQPRDVIAIDVNERKIVYGDDEINKERDTEIDEAHRWKKLAEDLQKRYSFTRYPAWRRRRGILNRIRSYHRKARNILEDWARKTSLRIVELSKKLGHAVAREDLTGLINSLRKIKNKDHRKKLIIMGYKRLGKWIDWNAKKQGVPLAIVKPNGTSSKCPKCDSKGLVEIGYRRLRCPRCGFEGDRDVIGKLNIRKRALKKLRINPPGGVLAPLTAPQMTDVAPNRWGNR

SEQ ID NO: 51909 - protein, 386 aa, Halomonas sp.
MTTVHRAYRYRFYPTPEQTEQLARTFGCVRYIYNHFLRERTDAWFERQERMGYNTTAKALTTLKKQSETAFLAEVSNVCLQQSLRHLERAFSNFFKGQACYPTFKKKQRKQSATYMANGFRWRDGQLWLAKHQDPLNIRWSRSFSGQPTSITVSCDTAGRYHVSFLVEEDIVALPVTPTMVGIDLGLTHRVITSHGDKIPNPRFLRRTKRKLTLAQRNLSRKQKGSNNRAKARLQVAKIHATLADQRQDATHKLSTQLIHENQVIAAESLQVKNLLKNRSLAKAISDVSWGELVRQLDYKAQRCGRDFVQIDKWYPSSKRCFHCGHITDKMPLNVRTWDCSACGTQGIDRDINAARNILQAGKAILVGADKLRQHEKKTTVGLTER

SEQ ID NO: 51910 - protein, 441 aa, unknown
  TnpB Polypeptide
MKVKRTGRFKVKISHPDYEMIKVHTVEAKEIYNYANYIIRQLYFKNSGKHEYSAKFIEEYPELNEDFEIYLKENNQFTSTFYRIICKFSRIKEYSLNSKMVQGVVNILKRDWKSYWKLLKLKIDGKYDKDVNIPRYKKKYSAVEYNPQVISKNKLKNGYIGTSKMNEGFKIPKFYKEYSCKSARALWKNDFLYMETIYEKEVPETKSNKKAASIDLGGKVLMAVAYNFNRRGISISANMLRSLNHYYNKMIGIMTSLLPKGIKISRAIQNLWRKRDEQVRNLLGYYANRLVEELVSLNVTKLVIGKNMEQKNGINLHSKLENRNFCMIPFNKLIEILRYKCQENGIECIEQEESYTSKASYLDNDYIPVYGKENQGYEFSGWRNGRIYKIKGKNQRIHADLNGAFNIMRKAGHELIEDISFLKKNWIFPVGKFKVKNLNYI

SEQ ID NO: 51911 - protein, 869 aa, unknown
  TnpB Polypeptide
MRRQPKAHRNIVYLCTDHVVWCPKYRRPVLRGAVREHREQIIREVARERRAEVLEVKVMPDHVHLLVDGDPQYGIHRPIKRIKGRSSHVLRATVPPVRSRLPPPVDEQLLRRHGGRCAAGDGRSPSSSSAMSNSEAAPKAHTRRRTRTPSFICELPLRATGRTLRAVLVRVDVGRQVYSACLQAALARLRTLRASPAWARPRALPRDTDKQRARRARAFARARKRYGLTEHALQRVALTHFRRSGWMCSHLGTHEVQKIGTRAYLAVTRILLDHSRSARFKGPGQFHSLEGKSNATGIRWRGDHVHWRGLALPAIIKRGDPVAEHALTTRVKYVRIVLRRVRGVPRVYAQLVCQGHPYRKPKNRIGCGHVGVDLGPSTIAVAAPQTALLTRFCDPVVRRRRQIRVLQRRLDRQRRAATPDTSLPDGRVRRGVTRGHASRRERAVRDRLADLFRRERAHRKTLHGQLANEILRMGNTIRIEKTPIRSLQRAFGRSMSVRAPGLCVQILRRKAESAGGQVIDIPARVATLSQTCHGCEAARKKPLHQRVHACASGVELQRDLHSAFLAAHTDAGGALHAGRARRAWPGAEPLLRAAWSEAVQPARGRPVPSPFGGPVACRSQSGSLAPGGTANAEARGGTTPGEAAVVPLRTPPGFSRGEVQFVNTMSGSRARPTERLTAYRDLLLWARQAGVLVGPRGAAPLARRRAGSRRGERVLEEAVRFREALFRIFAAVASRRSPPRDDLALLNLVLSRALAHQRVERTEGGFAWGWAEAADALVRMLWPVARSAADLLVSPDVARVKKCAGPTCDWLFVDMSRNRSRRWCDMRECGNRAKARRYSARHRGGRAGAAGEDATGPRAPREPAGGGRN

SEQ ID NO: 51912 - protein, 515 aa, unknown
  TnpB Polypeptide
MECVRRAVAVEVENPPPELYAVEEPYRRIVEEVAAYVAERGRLEGERYKELYRRFRELYPLPAQLIQQAINQGVETGKSFLEAKRNGRVHKPRPEVGRVSMRFAKDSWNYKKAAGSVAPVRLGLSLPGGRREVWIKPHRRFWLYWWKVLRREAELASTLVLKRRRDRWYAIFVFDVAPREEPPAEVVAFDVNENSVAVARVSLLSTVDAVAWWNRRYVDPAVYSIKTDFGRLARRYEAVRNAKLGELKRKYPYAGRDEEERRQNITDTREFRRFAGRLREWRRKEGRVRQVAREVTRSPALIITEELGKNPQEEMISKKKRELRHRIKQTPFKKLIRAVEDKAREAGSVVVYVSPYRNSKVCPIHFTLLRNDGDWHTLHCPRGHAVDRDAAAVLNMLWKTTPEGVVKGVWWDVKEARKRLKKGIMPKDVAKKRNPLVPWPIVRAVWASLRALKASSQWPAVLARAAPMTPAQGADEGGTRAPPRRAPAPGEEVSIGSSKAHSAFACERCVVTDIG

SEQ ID NO: 51913 - protein, 439 aa, unknown
  TnpB Polypeptide
MKRTNTFAVRPLSAEDEQLLRELLDASASLWNELNYERRQQFFDGESVWDTADYRKQYVDVLSSSTAQQVIRKNTAAWKSFFSAQDEWHNGERDERPSPPGYWGNEDDSRELRTFIRNDQYTLETGERSRVEIPVGQALKDEYGLGYHDRLRLEVCGAPKWDGEQGRLEIQYDGIDDTFRAFQPVTVPDSRQDSPLASEEAALDVGANNLVACTTTTGQQYLYEGRDLFDRFRETTGEIARLQSKLREGRYSSHRIRRLYRKRTRRRDHAQDALVRDLMERLYADGVATVYVGDLTDVLSTHWCAEVNAKTHQFWAFRAFIERLSYTAEEYGITIEVKSEADTTRTCPACGEQDNTDRDGDLFRCPCGHEAHADLCASQTFLEQQAGEIEVGSMARPVRLKWDDHNWSELPDSPERASPNEKRTNQSTSDGKLASEVSA

SEQ ID NO: 51914 - protein, 383 aa, Bacillus sp.
MLVNKAYKFRIYPNKEQEVLIAKTIGCSRFAFNYFLAQWNDAYKETGKGLTYNSCSSQLTQLKKELVWLKEVDSIAIQSSLKNLADSYSRFFKKQNNAPRFKSKKNKVQSYTTKHTNGNIAIVGNKMKLPKLGLVKFAKSREVEGRILSATVRRNPSGKYFVSILVETEVQPLEKTGSYVGIDVGLKDFAILSTGQVFGNLKWFRTLEKKLAREQRILSRRQELALKRKCKLDEAKNYQKQKRKVARLHEKIVNARTDYLQKISTEIIKNHDVIGIEDLQVSNMLKNHKLAKAISEVSWSQFRTMLEYKAKWYGKQVVVVLKTFASSQLCSCCGYKNKDVKNLNLREWDCPSCGTHHDRDVNASLNIKNEALRLLTVGTAGIA

SEQ ID NO: 51915 - protein, 367 aa, Agathobacter sp.
VLKAYKYRIYPNSEQRIQIAKTFGCCRFVYNQTLAYRKEIYEKEKKSVSKTDCNNYCNRELKKDYEWLKEIDKFALTNAIYNMDAAYQKFFKEHAGYPKFKSKHDNHKSYTTNFTNGNIAVDFETGKIKLPKLKAVKARLHREYSGQIKSATVSQVSSGKYYVSILVETEHKELAHTNHNIGIDLGIKDLCITSDGKVYENLKIIKKYEKQLVKLQRQLSHKGKRSKNYYKTKKKIALCHEKIRNIRKDYLHKVSHEIISENQVIVSENLQIKNMVKNHHLAKAISDVSWYELTRQLEYKAKWNGRKYIKIDTFYPSSQLCSVCGYQNPDTKDLLVRTWICPKCGAEHDRDINAAKNILTEGLRQIA

SEQ ID NO: 51916 - protein, 510 aa, Rhizobium sp.
MWPFGCARFSPAIDGDEVLAVSWRYWLADVSLQTISIPYRCSDNDRRFLEELRRVQSAAIRTAYSNAQHPDGTKRSEKDVREIVKSRFTKHGLLDSWAMHCATRVGVLKRKLRPEGHMVFGGRAGLERRRKGLISNDEWKRMRLHPFVSYGDSQKVRGNQNIHLLNDTTIVVKIGRKEDGGRSGRTLTRTACLDLARMRGAAATIMHQLAEVCAQPEKAQRINVSYSITDTHVSVTFDPIDLPNHPQRRRPVAAKKGRALGIDLNPNWIGLAVAKVIGDPSRTEDTELLEDALVKLDMAVDASPELVRETLAAVCDRAISMARKHRCGTIVLEKGLGKLRSSGKSRSLNRLLNYWARTVFVQMLTRRARLAGIDVLEVWAGYSSTIGNLAFDAPDACASATEIARRGIARLAGIKDVLPALEEGCVSRLWKNGKVPAELGSWQDVHRTIKAAKIGYRRPHPDVPIGARGSDVHGTSMFCGHAVVRLGRRHRPGLLFRPTPVKPDAVVRTF

SEQ ID NO: 51917 - protein, 398 aa, unknown
  TnpB Polypeptide
MSRYRLLPTPAQEAVLRDHCGHARYVWNLAVEQHSHWHPGRTGAPGYLEQCRQLTAARAEFPWLAAGSQTVQQQALRDFARAMAAFVDPGNPAGRPSWRKAGRDEGFRITGRRGRQWDVRRVSRKAGQVWIPKAGWVRFRWSRAVPPGAKSYRVTRDRAGRWHVAFAVIPAPVPAPGNGQAAGIDRGVAVSAALSTGEMLHCPALTARERTRLRRLQRRLARARRGSNRRGRVRHAIARLRTQETDRRKDWAEKVSTDIARRFDVIRVEDLQITNMTRSAKGTPENPGRNVRQKAGLNRGVLRSGWGLLVRRLEDKAPGRVEKIKPHYTSQRCSACGQVDRDSRESQAVFRCTACGFACHADVNAAINIAAGHAVTARGGDGAARPVSREPHLLLPSA

SEQ ID NO: 51918 - protein, 417 aa, unknown
  TnpB Polypeptide
VNLVTTRTITASLTNDREGVVRDLDSLARSGSKIWNVARWTAGRIWDETGEIPDEGSLKSYMKNQACWKDLNAQSSQAIVEELAGAFQSWFEQDDPDANPPGYRKHGDQRPRSTLTFKEDGFKLDTTHQQVRLSKGTNLKDGWADFILCEYETGPATDLTDVEEVQQVRAVWRGDHWEVHFVCKIAIDPDEQSGDKTAGVDLGICNTAAVSVGDNTLLYPGNALKEDAHYFRQHEYDTEGKNGPSTHAEWARQTKSRRQDHFLHAVSKDIVQQCAARTVGTIAVGHPTNIRDDEDWGRHGNKRLHDWAFETLIQHIEYKAEERGIAVERVDEYARRTSKTCCACGMEADSNRVERGLYVCENCELVANSDLNAAENMRATVTPNPHQDRSNGCLAQPSVRLFDKSTGQVAPQDQVRP

SEQ ID NO: 51919 - protein, 517 aa, unknown
  TnpB Polypeptide
MIQTIIFRLYPSEIQEKKLHEIFTIYNRAKRKGYRLLLKRAKKDGKTIVFEGEKQTQQELMNFCHNNPYVNTIIIENKTKLKAQDTWLYKTKDYLEHKIKVVKEKIDKIKNKNDRRIKGLYSRLSSLQNKIIYLENSLRNEILNLRIKPIVFGSKKLFRKRILHKINKQEFKVRRDASFGCVGKKQGVNLNLKILPSRKLKIRTFSKEKEKKWIEIPFSVNEKQKKHFQKILKAEKYTAIVKRKLIKNELRYYVHFSYDIKDLKMKYSFENGAVGLDFNYNFVTLTNTDNNGELKSYNQINFRNLHSYRKDKRNDYISFKLDKIINYCINKKKGLVIENLSFNQQFSYNKNLNKKISNFKTSALELLKRKCIKKGVDFREVHPAYTSLIGKYKYSRLHNLSNHVLASFVIARRGLGFKEEIPSIYKWVLSQVGDIIKPRLKKGSPYYEWSKIHDFFKHNGITSFKTPEIVKKIMLVKDVLNSIKGVQLNNLRAGLSKNEKINDYHKFWNFIDNFQFL

SEQ ID NO: 51920 - protein, 405 aa, unknown
  TnpB Polypeptide
MIKAIKVQLKPNNVQSTRLFQCAGTARWAYNWALGKQMENQKLGLNFLSDQDLRKELTQLKKTEEYAWLNEVSAQIPKQAVKDLCKAYKKFVFTKNKRYSKKTLMKAARTGKQLGTYDLEEHPKFKSKRFSKPSFYHDDWKIKFTETHAQIEKLGLVRLIEHGRIPVDSKYTNPRISHDGLKWWISVGIEVLSPQSLVPISEPIGIDLGVKTLAVVSDGQKFKGKNKGSAIKKSTKKLKRLQRKASRQYEKIKNKEIERKGRNLLKLEQQILKVQQRITNVRTDYLHQVTAELVKTKPEYVVMEDLNIRGMMKNRHLSKSIQNQKLREFRRMMEYKSASANIPVIIADRWFPSSKICSECGHEKEDLKLSDRTYHCNNCGTEIDRDLNAAINLREYGRKELSKVS

SEQ ID NO: 51921 - protein, 382 aa, unknown
  TnpB Polypeptide
MAIRTFQYRLYPTKTQEQALQVLLDVSRNVYNMALEERKLAWEHEKKRIDKREGYLLAKQYKKTFIQAKIVHSHVLQVAIEDLDRAFKAFFRRVKNGETPGYPRFKSYRRWDSIGFKQYGNGFSIDGRRLKVSGVGRMRMRWHRKYLGDIKTCRIIRKAEKWVVNLVCETADPLPLPPTGRVVGIDMGINALITTSEGEQVHNPRWYGEAQAELRRKQRTFQRAQMGSHQRKKKLLDVQRGHHHVKNQRKDFFDKLVYKLIHTYDVIVIENLKIANMVKNRHLCKSILDAGWGYFKRRLLDKAADAGREVILVDPAYTSKCCSNCGAIFEGLTLAQRWVVCECGLSLDRDHNAALNILKRAGRVREPERCEQSQAWFRSPHL

SEQ ID NO: 51922 - protein, 318 aa, unknown
  TnpB Polypeptide
VQQDLRDLDKAFQNFFTIQGRGFHRFKKKGRNDSFYLEGSIKISGNRIKLPRIGWVKTYEKHLPPILVKSSSNVTISCQAGRWFISYKVDVEPQPVEHPHGCIGVDMGVKTLATLSDGKTFPAVKAYRKAKRKIARLQRSVSRKVKGSNNRSKAILKLQKAHHRVACIRNDATHKLTTYLAKNHSEVVIEDLNVSGMMKNHRLAQAIADGGFYEFRRQLLYKCQWYGSKLTVVDRFFPSSKTCSHCGHIHKGLKLRDRTFVCSNCEFSSDRDWNAAINLQKAGSSPVSACGASNQRSASAGQMRRNRKRTPDEGHVQQ

SEQ ID NO: 51923 - protein, 233 aa, unknown
  TnpB Polypeptide
LNPNEALCCDLGIDNFATFVSTKPGVRPFLVKGKILKSINQRYNKQVAELKSKKHYEHIRIKGVKRYWQLQDLMHKASRLAVNFCLAHDLGRIVIGTNRNWKQRVNLGKRNNQNFVMLPHNKFIEMVRYKAEEYGIQVTVREESYTSKASAMDFDEIPDFDPKERKPAISFSGKRFKRGLYQSLKRHLINADINGAANIGRKELGDEWLKKLLELDGASLWTRPQLYETCMNV

SEQ ID NO: 51924 - protein, 278 aa, Cyanobacteria sp.
MIVREAKLKHGTTEQYSAIDEAIRTAQFVRNKAVRYWRDNRGTTKADLYAICKDLAKEFGFAKKLNSAARQASAERAWTAISSFYDRCKKGAKKKGFPKFKKHCRSVEYKVKGWKLSDDCRSITFTDGFEIGTLSIFCNNETQEDLHTLKINRVRIVRKADGYYAQFCFDADRKDQGEYSGNVVGLDLGLKFFTKDQNDNAVTYPQFLRKAERRLKKAQRRLSKKFVKGAKPQSNNYHKARKRLGRIHLKVQRQRKDWAIKQARNVVMSSDVVVYENL

SEQ ID NO: 51925 - protein, 383 aa, unknown
  TnpB Polypeptide
MFRAYKFRLWTNSNQERELSIMLETHRRLYNAALAQREWFYDEWQISRSYEDQSGWFKDERKTNAYFDRLNFSSAQGTLRRLDKAFQNFFRRVKAGEEPGYPRFKGVDRFNSILFPSHGDGIRLKGNRLRVQHVGTIRVCLHREVEGKIKTLSLKREADKWFLVLACEVPEPQKVGNILPVVGIDVGLTHFATTSEGEKIDNPRFLNAELPELRRAQRSLWRKKKGGSNRRKARCKVRKLHARVANLRHEHRHKVSNDLISRYGRIAVESLNVQGMVRNPRLARAINDAGWSAFVATLTHKAERAGGEVKQVSPNGTSQECSACGEDVPKALHVRVHRCGCGLVIDRDHNAALNILNRAWPGTGQLSVTLPLGGVLKEAVCFS

SEQ ID NO: 51926 - protein, 475 aa, Mycobacteriaceae sp.
MARHTTFRFCLDPTVEQREVLARHAGASRFAFNQCLRIVKTALTQRRTATNTEVPWTGFDLINAFNTWKKTEAAGRVFTVDGHGVADTMVTGLAWRGEVCQQVFEEAAVDLGTGLQAWSDSRCGKRKGKRVGFPGFKKKTSATPSFRLRNKHPKGRAAAIRVGDNNRPRSVTLPGMGAIGVHDDTRRLRRMLSKDRAKILFATISYRGGRWWIALNVEAADMHPDLQHPVHADDGGGWVGVDRGLSAFLVAATADGTELARISNAPKALAAGMRRQRRLAKSLSRKKKGSRNRADAAARLGRHHHHVANVRRHFLHQVSGELVKTHDRLVIENLNVAGMLANHRLARAISDAGWSEFARMLKYKQAWRGGALVEADRWYPSTRLCPHCGAVNREMTLADRVFACSCGHRGDRDTNAAVNLARWGQAHHDSHISPDPQAGGRATKARRRDGADQHPRVGETSPKDAGTDVHTAPAA

SEQ ID NO: 51927 - protein, 402 aa, Escherichia sp.
VKRLQAFKFQLRPGGQQECEMRRFAGACRFVFNRALARQNENHEAGNKYIPYGKMASWLVEWKNATETQWLKDAPSQPLQQSLKDLERAYKNFFRKRAAFPRFKKRGQNDVFRYPQGVKLDQENSRIFLPKLGWMRYRNSRQVTGVVKNVTVSQSCGKWYISIQTESEVSTPAHPSASMVGLDAGVAKLATLSDGTVFEPVNSFQKNQKKLARLQRQLSRKVKFSNNWQKQKRKIQRLHSCIANIRRDYLHKVTTAVSKNHAMIVIEDLKVSNMSKSAAGTVSQPGRNVRAKSGLNRSILDQGWYEMHRQLEYKQLWRGGQVLAVPPAYTSQRCAYCGHTAKENRLSQSKFRCQVCGYTANADVNGARNILAAGHAVLACGEMVQSGRPLKQEPTEMIQATA

SEQ ID NO: 51928 - protein, 383 aa, unknown
  TnpB Polypeptide
VLALKTVRQKHEVSPELLRLLDEFRRMVNVCIAVGIEENVSSLKTLSLRSYHRLSRDMPSYYRLCAISKATGILHNHRKAKKKNPRTRFPCARKLMLTTCYGFKIQNGLLRLPVRPRHYVYVKLNSHTLRVLSGLNVRSVTLTRESLSISYSKETVEIEPEGYVGIDRNLDNVTSASSDGTVKTFDLSKATRIKADYRVVKSQFRRNDVRMRTQVFSKYGGKQRNRVHPLLHHASKRIVDEAKTRRYGIVMERLTGMRRLYRRGNGQSRNYRSRMNGWSYGELQRQIEYKAGWEGLRVIYVSARNTSRHCSICGYKTLEGTERQLWCPVCGTFLDRDENAARNLAARGLRFSPNGPPGEAMVEEREPENATLILKVDGGKLSR

SEQ ID NO: 51929 - protein, 156 aa, unknown
  TnpB Polypeptide
MSRRTVGGANWHKAKIKVGRIHEKMTNARKDYLDKTSTEIVKKHDIIGMEDLSVSNMLKNHNLAKAISEVLWSQFKTTIEYKAKWYGKQVMTVAKNFPSSQLCSCCGFQNKDVKNLALREWDCPKCHAHHDRDINAGKNLRNEAIRLLTVGTTGIA

SEQ ID NO: 51930 - protein, 390 aa, Clostridioides sp.
MKKLKRAYKIEINPTTEQKSKIHQTIGVSRFIYNFYIAHNKEVYDSKGEFISGMDFSKWLNNEYIPNNQDMKWIKDISSKATKQAIMNGDKAFKDFFKKTKGFPKFKKKKNQDVKAYFPKNNKTDWTIERHRVKIPTLGWVRLKEFGYIPINSIVKSGTVSQKSDRYYVSILVEEDDIQVSKCTNEGIGIDLGIKDFAICSNGSKFKNINKTSTVKKVEKKLKREQRKLSRKYESLKVRNKNIKEGVATRQNIQKQIVKVQKIHQRLANIRTDYINKTVSQVIEQKPSYITIEDLNVSGMMKNKHLSKAISSQKFFEFRTKLTAKCKQNNIELRVVDRWYPSSKTCSQCREVNKGLKLKDRVYKCECGLSIDRDLNASINLKNAKKYKIA

SEQ ID NO: 51931 - protein, 449 aa, Myceligenerans sp.
MARHVAFRWSLDPTVEQQVALARHVGAARFAFNTCLELHLAARRRRHHADGLGSVPWSGFSLINTFNRWKRSEAAGRRFVVDSRGGTQVEVTGLAWRGQVCSLVFEEAAVDLGRALKAWTASRAGKRIGRRVGHPRFKKKNATSGSFRIRNQRSRTGRSSIRVGDSSPRSVSLPKLGTIRVREDTRRLRRMIAKQRARILYATVSRGVRGRWWISVTVEAADFHPETRHRPRTDDDDSGWVGVDRGLKDAVVAATSDGVVTLRVKPAKTLANGLPRIRLLSRAVSRKKKGSSNQKKARTRLAREHQRIRNRRQYALHQVSNRLVNNHDRLVLEDLNIAGMIKNRRLSRAISDAAWGELARQVGYKQAWRGGQVAIANRWFPSSKTCSACHTVKQSLTLAEREFVCDACGHAIDRDLNAAVNLAAWAHNTGGGVRAAGDRQTAGPVTNAH

SEQ ID NO: 51932 - protein, 420 aa, unknown
  TnpB Polypeptide
MSEEKNSKIKDTLRATKERRSQMDCRVVSVKVQENRLSRAKYEKIVRCFLEGKWLHNAVVASETLSVEDTSKVQIKVNGSFETREIKNLSSQMKQSVVDSVKTDLSNLSKAKGKGLKVGKLKFKKECNEINLKQFGNTYNIKSHNKINIQKIGVLVVSGLEQINLNEVEFANAKLIQKPSGFYIHLTVYSKKQSLPTTEKEVIGLDMGIKDQLTFSNGVKVNFYLEESEQFKGLMRKLSRQHKGSNQYKQTLARIKRIYEYYNNKKNDVVNKLNSVLSKNYIICFQDELLSQWKQKKSKRRFSFGRKVQHGILGRVKDKLKKNQFNVMLESSVPTTQTCPECGCLTKHGLDKRKYRCEQCGYENPDRDIHSANMMVLLSGYGTYRSLNTDAVSTEKMVGFLNNLSNLGVVVTTNSMEVHQ

SEQ ID NO: 51933 - protein, 368 aa, unknown
  TnpB Polypeptide
MRWNHMEKTYKFRFYPNSTQTQLLSNTFGCVRYVYNYFLGLRQRLYGFEKKSMTYYDCCKELTTLKQEKEWLKDVDKFSLQNSLRDLNNAYKNFFNGKGYPNFKSKRENRKSYRTNYCNNNIAFSDKWIKIPKLGRLKIKGGVKPQGRILNATIVQEPSGKYYVSLCCTDVETESLEVTNNAIGLDLGIKDFCVTSDGEVVENPKYLKKSLDKLAKLQKRLSRKPKDSSNHNKARVKVARLHEKISNQRKDFLQKLSISLIRENDIICIENLKVENMLQNHNLARNIADVSWSEFARMLEYKAKWYGRTVVKVDTFFASSQTCSICGYKNEEVKNLRIREWTCPHCGTHHDRDINAAINILNEGLKSL

SEQ ID NO: 51934 - protein, 412 aa, unknown
  TnpB Polypeptide
MKGGENMNLTEKEIIYPSDERFNLIKELCYLSKNLYNASLYDVRQHFFKTKEYRAWQSQATIFTRDNNPDYHALPSRLAQEVLRQTGSQFIGFFNNKSNKKKKIPRYKEKNGYNIITFPNGTISKQVDFDEDKQTYTYTLCKRSYNLKVKSTKPNVKMVKFVYDEVNDVIKCFKIYEIKEPKLKKDNSRYFSIDPGLNNIVSVYNNIGIRPLLYNGRPIKSINQYYNKTNARLMSELPKGFKTSKKLSRLALKRANKIDYEMNKISTHIINEAVKNNISKIFIGNNIGWKSGINIGRVNNQNFVNIPHTKLFHQLAYKGALKGIEVIFTEESYTSKASFFDKDELPTLGQANSPTFSGRRIKRGLYRDGQCNLWNADLNGAANIMRKVVADKAYKGIRKTKELMKRPVLVTL

SEQ ID NO: 51935 - protein, 383 aa, unknown
  TnpB Polypeptide
MYKSFKVILHPNNKQRIKMFQCFGVSRFAHNWALNRQQGNYKNGGKFLSAFDLQKEFGQLKKLSEFSWLNEYSSAISSMAIIDACTSYKNFFRGNSDFPKFKNKKSKQSFYIPGAEIKFNSTHVKLVRIADSKKKNKLKLNWVKLAEVGRVPTDCKYSNPRVTFDGINFWLSVSIEVNDSVEVPTNEGIGIDLGIKDLAICSDGHVYRNINKTREVKRLEKKKRRLQRKLSKKYTINKHEKTKNILKLEKELLKLNHRLTSIRHNYTHQVTTEIVKRKPSFISLEDLNVSGLMKNRHLAKAIQEQSFYSFKEILSYKAKWNNIKIIEVPRFYPSSKTCSCCGSVKSDLKLSDRVFICPECGNKIDRDLNASINLKNYGLSTLK

SEQ ID NO: 51936 - protein, 394 aa, unknown
  TnpB Polypeptide
MSRYRLYPSAQQEAVLSRHCAHARYVWNLAVEQHAHWQPGRRSAPGYIEQCRQLTAARAENQWLREGSQMVQQQALRDFAQAIAHYFSGTHRRPRWRKAGRDEGFRVVAVKSGDVRRLNRNWGQVRVPKAGWIRFRQSRAVPAGVKSFRVTQDRGGRWHVAFAAIPDPVPAPSNGQVVGIDRGVVVSVALSTGEMLTVSGLSAREQRRLRRLQRQLARSRRGSGRRGKTKTAVARLRAREADRRKDWAEKASTDIARRFDMICVEELNIGAMTGSARGTASQPGRNVAAKARLNRGILASGWGLLVRRLEDKAPGRVEKVTPAFTSQRCSACGHVDAKSRESQAVFACTACGYACNADVNAARNIAAGHAVTARGGDGAARPANREPQLLLQSA

SEQ ID NO: 51937 - protein, 421 aa, Meiothermus sp.
MMVYQAYRFALDPSPRAERALASHVGARRFAFNWGLALVKERLEARRRGEEVEVPWTLPALRREWNRQKEAVAPWWQENSKEAYSSGLEGLAKALENWSDSRKGRRKGRRMGFPRFRKKGRGRESVGFTTGAIRVDDKSHVVLPKIGRVRTHEPTTALLERIETKKARILRATVSREGGRWFVGFTCEVEREPKAPRLPGAAVGLDVGLRHLAVLSTGEQVPNPRPLKKALRKLARLNRELARRKPESKNREETRWRLARAHARVANIRRDALHKLTTRLACRYGTVVVEELNLAGMLRNRRLARAVADASLAEIRRQLAYKTVWYGSHLLKAERFYPSSKRCSRCGAVKEKLPLWVRTFRCDACGLVLDRDHNAALNLAALVAAVAGSGPETLNARGRGVRPAARRAVPEEAGSRRREST

SEQ ID NO: 51938 - protein, 400 aa, Meiothermus sp.
MAVHRKVYRFRMEPTQAQSDALLRMAGARRFVWNWGLARRKEAYAATGKGLTYNQQAAELTTLKQQPETVWLKEADSQLLQQALKDLDRAYAAFFGKRARFPRFKSKKRDEPRFRIPQRVRVESSKVYIPKIGWVKIRQSQPVDCPIKGATFKRDAEGHWYVTLTAEFEMPEVPLPPANPERVVGIDLGLKDFAVLSDGTRIAPPKFYRKGLSKLRRAQRELSRKQKGGKNRDKARHRLSKVHARVRNQRQDWLHKLTTGLVQKYDGLCIEDLNLKGMARTKLSTSVLDAALGEFRRQLEYKTVWHRKHLAVIDRYFPSSKLCRECGTIHTALTLSDRVWTCGCGAVHDRDLNAARNIRAEGIHRIPVAVGHTETQNAWGAAVRPTHGGQAATNQESHAL

SEQ ID NO: 51939 - protein, 421 aa, Tychonema sp.
MQLVEKHIIKSTESRFAEIDQLAFKSKNLYNAANYVIRQNFIYGWGYANYNEMNRLMKSHEAYKALPAKVSQQILMVLDKNWKSFFEAVKAYKTDSSKFTGRPKLPKYKDKLKGRNLLVYTIQAISSKQLRNGIIKLSGTELSIKTQVNPDQICQVRLVPKCDSYVIEVIYDEPESTVSDDKFVAGIDLGLNNLVALTSNQPGFVPLLINGRPLKSINQFYNKRKAQLQSQLKGCRKTSPRIQRLTRCRHQKIDNYLHHASRTIVDVLVAQQIGMLVIGKNAQWKTEINLGKQTNQNFVSIPHARLIEMLEYKAFLVGIKVIVQEESFTSKANFLGLDPIPVYGKTETEPVFTGKRIKRGLYKTSTNQLINSDVNGAYNILRKAIPILRKAIPNAFSDGIVSCVVQPRRVNPLKVKQKGEG

SEQ ID NO: 51940 - protein, 498 aa, unknown
  TnpB Polypeptide
VAKAFTKTTSSFVTEIPIMVSVADEGVLLSRLEAGRQMYNACLGEARRRLDLIRQSKDFNQARALKRSNPERKVLFKRARERYEFSDYAIQAYGTRIRHSWIGEHIDAHTGQKLATRAFNAAEKVLFGQARRVRFKSKNQIDSLESKSNAAGIRWRHDGVEWNSLRLNAIIEDYDPVILHGLKARIKYVRLVRRKYNGSNLFYAQLVCEGKAFQKPKNKVGKGDIGLDIGPSTIAIVGDQFARLEQFASELKFQDKQNRKLQRQLDRSRRANNPDNYNPNGTINKGKKRWNNSKTYSKTRNGLANKERKLVGHRKSLHGAMVNSILAQGDAFKLEKLSYKAFQKLYGRSVSKRAPGMFVSHLKRKAASAGAKVVEFPTYNTKLSQTCQCGRVKKKKLSQRVHHCECGVQAQRDLYSAFLAQHIDPETNVLQVNQVLDAWCSVESRLWSQCRAGVPPVETTGVAAWRAATSNQPAIRGLLPSYERTLPGDRVGRRISPN

SEQ ID NO: 51941 - protein, 515 aa, Bacillus sp.
MAKRKQKKPTFILECKLITEPFVQDILNKRFRMGERLYNTTLSYALKQLQFMKESKRYRKTLRLYQEAKNLLERTQPKEPIKFYQQEKETYRQELTAIRLSFGLNEYGLHDYIKKHQHNYKKHIDSLTAQKIATQVWQAMEKVLFHGSKAHFKKYGTLTSLEGKKNSSGIRFRDHKVLWNGLDIPVKVRHNDLFAQESLASHRVKYCRIVRKRIRRKQAFYVQLIMDGIPPAKRINATGAFRHPESPNERGGIDIGTSTVAIASKKEVWIQPLAPKVPLLEAEKRRWLRKLDRSRRSANPQNYHPDGTFQKGIKLTWNRSKNYYKTLYQLKEIARLKAVYVKEQHSKLANRILSCGNEWYVETMNFKALAKRAKETKINSKTGKFQRKKRYGKSIGNYAPAKLLRILKQKLNHLDKELYEVHTRTFKASQYNHVTDTFKKKKLHQRWAPINGHLVQRDLYSAFLLMNSEAHLEHTNRQLCFDTFDTFLILHDRHMEELKQSHQNLPGSMGIQQMS

SEQ ID NO: 51942 - protein, 408 aa, Klebsiella sp.
MLIQKAYKFRLNPTDVQAQRLRQLCGCARFVWNYGPAETQRILETGQKLPSAFELNKMLTGWKKLPDPAFLSDAYTDNLQQKLKDLHGARKRCFDKKLAAKAPVFKRKSHGNDSVRFVNFDKYCQLEYRRVKLPSGLGWVTFRQSRDIVGKIKNATVSQHAGSWYISFQVEMEVDQPAHPSTSAVGLDAGVSKLATLSDGTVFEPVNSFKQNQSRLARLQRQLARKVKFSANWKKQKARISRLHSHIANIRLDYLHKVTTTVSKNHAMIVIEDLKVSSMSKSAAGAADMPGRNVAAKSGLNKAILDQGWYELRRQLEYKQSWLGGQVLAVNPAYTSQKCACCGHRSKENRKSQANFVCLECGYKENADINGARNILAAGHAVLACEVNGASMPSAAGTKRLSNQLATQ

SEQ ID NO: 51943 - protein, 274 aa, unknown
  TnpB Polypeptide
MKLQKMLLGFTTLALSLNVFAADLTRVEIEQKLKNADKTHVADLRRKDFRTLDLSKLDFRSGCFSQDSRGRWYFNIVIQLESVARQAEGGQIGIDLGLKTTATCSNGDSFARQNCYRNLELKLGKAQRAKNKKRVKAIHAKIKNTRKDAIHKFTNKIVRENSLIIVGNVSSRKLAKSGLAKSILDAGWFMLKTQLEYKSIATQGVFIEVNESYTAQTCSCCGLISANSPKGRAGLGIREWTCAECGTTHDRDVNVAKNILALGHERLAVGIPAV

SEQ ID NO: 51944 - protein, 394 aa, unknown
  TnpB Polypeptide
VEIKMKEHKAYKFRIYPTKEQKILIAKTIGCSRFVFNHFLARWDETYKATGKGLSYGSCSKEIPILKQEFDWLKEVDSTSVQTSVKHLTDAYDRFFKKQNERPRFKSKRNPVQSYKTNIQGKSQLPEVSIIGNKLKLPKLKWVRFAYSKQIAGRILNATIRRNASGKYFVSLLVEQEIHELPKTGSSVGVDVGLKNFAILSDGTVYKNDRYFRSLEKKLAREQRKLSRRQRIALARKVKLSEARNYQKQKRKVARIHEKISNKRTDFLHKVSTEIVKNHDVIGIETLQVKNMQKNRKLSKSISEVSWSEFFRMLEYKADWYGKTVVKVGKTFASSQLCSSCGHQHKDVKHLALREWTCPSCGVHHDRDMNAGLNLKQEAERILASSTVGTTGLA

SEQ ID NO: 51945 - protein, 377 aa, unknown
  TnpB Polypeptide
MILAKKVRIYPTKEQEQKLWQSVGTARFIYNYTLAKQEENYKNGGKFINDGVIRKELTQLKKSELTWLNEVSNNITKQSVKDACKAYKRFFKSLANKPKFKSKKKSKPSFYNDPIKLKVKKKKVLIEKVGWIKINEQIPINVKYNNPRITYDNKYWYLSVGIEVNEKKEELTNISLGIDLGLKELAICSDGKIFKNINKTKKVKKLEKRLKQKQRQISRKYEINKIKKEGGERCQFIKTKNIKKLENTTKLIYRKLANIRNNYIHQVTTSIVKTKPYRIVIEDLNVSGMMKNKHLSDSVKKQCFHKFRQYITYKSELNGIELVVADRFYPSSKTCNKCGFIKKDLKLKDRVYRCPHCGAVIDRDLNASLNLSMYKLA

SEQ ID NO: 51946 - protein, 381 aa, unknown
  TnpB Polypeptide
MSIVKKGIRVRLYPTEGQAVLIDKTIGCCRFVHNQTLADCNKSYEQTQHFPSKNERIKNLVPLKETNEFLKEVSAVALQQSIRDFDSALSNFFKNMNHFGFPKFKSKHSSKQSYRTPYNNGIADVLDSKHIKLPKLGIVKTKRFDMPEVYKIFSITVEKTPTNKYYASICIETEVQSLPKTGKQVGFDLGLIDLLIGSDGTRHERLKYAYAFKDTLSKEQRKLSKMRTKLEREHLNLAECKNYQKQKHKVAKLHEHIANSAKDFNHKLSRKLVEEYDFLAFEDLNISGLLKNHRLAYSVADVRWSQLLGFIKYKCQWYGKAFRQVGRFYASSKVCSCCGAIHKDIVNSLSVREWVCPDCGTLHDRDVNAARNILNQALSVA

SEQ ID NO: 51947 - protein, 370 aa, unknown
  TnpB Polypeptide
MKTYKYEFSHQSNLIQIGNLIDDLHSVHVHLIHLQRRYYRIYDKYASFARICSHITKLKARTKPHWNQLPSQMIQQVARRIDFGYQRFFDNIEARRLGKTTRKVGRPKIKPNHKYKSITFTQAGYEIEGNRLSINCIDKSFTFWKHREWTGTIKTLTIKRDNVGDYYLHLVCEDCEPSEKLPLTGNEAGADFGCKTFLTLSDGMKITSPQFYKESLNALRSANKALSRKEYLSNGWFRAKRHLARLHKKIAERRRDWFFKLALRLVRRYDKIAIETLNLEGMKKRWGRKVSDIAFGEFSLILEWTCAKYGKVFAKAGQWEPTTKPCSDCGYDNKELTLDDREWTCPSCSTSHDRDINAAKNILQAGVPVS

SEQ ID NO: 51948 - protein, 459 aa, Verrucosispora sp.
VKSIQAYRFALDLTPRQERAVLVHAGAARVAHNWALARVKAVMDQRAAERTYGVTEAELTPTVGWSLPALRRAWNSAKGEVAPWWRECSKEAFNTGLDALARALKNWSDSRSGKRAGRPVGFPRFKSRRRATPSVRFTTGAIRVEPDRKHVVLPRLGRLKLHESSRKLARRLDNGTARIVSATVRRDGSRWHVAFTVEVERAERVPVRPTSVVGVDVGIKHLAVLTNDELVPNPRHLADAQQRMRSLGRSLSRKIGPDRRTGRRASKRSERAAARLGRAHARVANLRRDGMHKLTTRLAREHGTVVVEDLNVAGMLRNRRLARHIADAGFAEIRRQLAYKTEWNGGRLVVADRWYPSSKTCSGCGTVKAKLALSERTYTCTTCGLTLDRDLNAARNLAALAREVDTAGSGPVAGRGADRKTRVRGLVAVKRQPGTASAGQTGTVLPQGRTTNRVLTKAH

SEQ ID NO: 51949 - protein, 361 aa, Clostridioides sp.
MYPNKKQQELINKTFGCCRFVYNKYLAKRIDVYKNNKETFTYKQCSSDLTNLKKELKWLKEPDKFSLQNALKDLDNAYKKFFKEKAGFPKFKSKKINRFSYKTNFTNGNIMYCGQHIKLPKLGMVKIRDKQVPQGRILNATISKEPSGRYYVSLCCTDVDIEAFENTNNHIGLDLGIKEFCISSCGEFIENPKYLKKSLNKLAKLQRELSRKTIGSLNRNKARLKVARLQEHIANQRNDFLQKLSTKLIKENDIICIEDLQVKNMIRNRKLSRSISDVSWSEFIRQLEYKANWYGRQIVKVGKFFASSQICNKCGYKNEEVKDLNIREWICPSCNETHDRDINASINILKEGLRLITIQNK

SEQ ID NO: 51950 - protein, 319 aa, unknown
  TnpB Polypeptide
MVKEIRDRSRSAARPGRVKFHEDGRRLADLVAAGAARVLSVTVRFERGRWFASFAVETEVSRPAPRLPDAVVGVDLGVKTLAVLSTGDVIPNPRHLSGALRKLRRLSRTMARRQGPDRRAGREPSNRWRRAAAALGKAHGQVADQRRDGLHKLTTGLASEFGTIVVEDLHDRWFASSKTCPGCGAVKAKLLLSERTYVCINCGLVLDRDVNAARNLAEYGNRQIAGSGPEIGNGRGADRRTGYARQVAVKRQPGTAKAGQTGTVPAQARPRGRPTGTPALPRDQVHGARGEPGRLREHGPLTAIAPSQIDRSIWLDVFW

SEQ ID NO: 51951 - protein, 394 aa, unknown
  TnpB Polypeptide
MISYKYPIFPNKATLQKLAEALDACRWLHNKLLERMNDAIEMGINLRTYDTQNMIPSLKLENPKLNLVYSKVLQMVNYTLWSSIKGLSASKKNGRNVGHIRFKGYGWYKTMNYNQSGFRLDQDHGLLHLSKIGDIRIKMHRKINGCIKAILIKRDGRQWFAIVQADQVPEPLPETGKSIGLDVGLKSFVVDTDGNSIENPRVAEKSADKLANAQRKLARTESGSNNRQKIKEQIKKIHARVNHQRDDFLHKLSRIYVNNYDNICVEDLDVKGLKEKGRNQGMHRGIHDASWSKFLFMLSYKAESAGRKLIKVDPRDTTQRCSACGSIVRKELSDRVHECPYCGFSCDRDYNASRNILIAGMEQPVVPIESKPLHHVSVMQVLAMKWEAAPFRAR

SEQ ID NO: 51952 - protein, 432 aa, unknown
  TnpB Polypeptide
LRGHLDVHAAQKVATRAFRAAERWSFGQSGKPRFKRYGELESLEGKSNEAGIRFRQDAVLWGGAFGKLSLPLAVDEANEVQAHGLRVAREGGVKYSRLLLRAIRGRERAFVQLVLEGESLQKAKHPVRQGRVGLDLGPSQVAVVTESHAEIMPFCPGLDRKEAARRRYLRKLDRQRRANNPANYRPDGTVKPRSQRKPWQSSGRQDATREALAEILRAMAAQRKALQGELVHRVLALGNEVITEKVNKQAWAKLWGRSVGHKAPGMFEARLGIVAGTVGGSLEQVPTRSTYLSSRCLCGKRTKKLLSERKHTCVCEFIPEGMHADRDEFSAFLAFHCQGGTLGEGSARESWLSWGADCLLRLSSGNTETANGAALPTLRVREPRLSSSTDHESGQRREAVPVLRTEADGERRDRKIPKPRKPNLKKEVPHVA

SEQ ID NO: 51953 - protein, 397 aa, unknown
  TnpB Polypeptide
VAFLAFKYRLYPTPAQEKRLLNVLECARHVYNMALAERKYTYQLEQRSVGKYEQLRWVKRYKNTFPQAREVHSHILQVAVSDCDKAFAAFFHRLKAGEKPGYPRFKGRHRFSSFGFKEYGNGFRLDGRRLKLSGIGRVSVRWHRPLEGTIRTVRILRRAGQWYACFVGEVPSSAPLPKTGRTVGLDMGVSALLTTSRGEKVENPTYYRAAQKKLRRLQRQLARAPKGSKNRRRALLAVQRQQEHVANQRKDYLNKLVHTLIQRYDGIALEDLRIPNMVKNHHLSKSILDSGWGYFKKQLSVKAASAGRQIVLVDPAYTSKCCSNCGMVFQDFDLSTRWVTCACGLSLDRDHNAAINILRRAGLDESARLKTAPLPAPGSQASPGNGKRISASEAMRL

SEQ ID NO: 51954 - protein, 370 aa, Thermoprotei sp.
MDIRTPKIDYVTISGRVYVYNEDYQRLVYLAYRFRKAVVKATRMLTKGLSKEYVTKVITEDLNQGYAKSVVDIAKLLIKSAEYHGSNPLKIKVKKLFIVSKGEAFIKGNQNIRLVSSDKLLISYHLNGRHGRHDDWIECEARFGEEYIPLVNEVIDRAMNNELSYNAKILFRNGKIYLHLSVPLELYIKYFKKGEAKGGNIACFDLNSDRINMVIIDRQGIIKETKTEWYSEVNRPKYPKNKAWPLRLQALGRLLKYAYYHNVSTVLYEDLDRIKRRRVKKTKNRSGNRKASNFPKKKLLQYAITMALKYNFKVYLVNPSYTSRLAEKLKNAFCLDKHTVSAYLLGLRYLNPETYKKLLDRDTQKLLLNQ

SEQ ID NO: 51955 - protein, 409 aa, unknown
  TnpB Polypeptide
MIVGKKVRLHPTPEQEILFWKSAGTSRWAYNYFLSRQEEVYQEYLANGQKGRRGISEGTVRKEINRVLKPTTHTWLKDIGSNVMKQAVKTADKAWKKYLKGLAWKPKFKSKKTTKPSFYVNYESLSRKNGGFHGEKIGFVRTAEPLPKLAKKKHYLNPWVSFDGKYWYLGFSYEVEEHKEALTGDHIGIDLGVKSLAVLYSVDTGKSRVVKNINKSREVLRLEKKLKRAERKRTRQLSSNILRYESIQREGKRPGHKPVWKRPISECKNQERQRHKIKLLYRKLKNIRSNHLHQATTAIVKTKPSRVVLETLNIQWMLKNKHLAKAVSKAKLYEFRRQIEYKCQRYGIEVVFADKFFPSSKRCSSCGRIHHELTLSDRVFSCSCGLHIDRDLNAAINLAHYTPSKVAHD

SEQ ID NO: 51956 - protein, 413 aa, unknown
  TnpB Polypeptide
MLKRTVQCNLNEATDFKKSKLNDFFEEYARVVNCFVNLYWNGRILPVKANATEYKQVTSWLLGKAMKCAVNQAVKIVKSTKKKDAQKAYGQYKRIFAKAKKSNRNHFGILDKKYSDWIKDRKLRHRIDKPIFNGKTIELNSDLIHIQEGRNSFDLWVRIGSVFGNHFSLLLPTKKHQHYHKIVKQGYEQCSSATLYKKGENYFVNIFFEKEELSKSSSRTNCLGIDLGINKLMSLSDGRFIGVDFKRLLKKLENRKQKSHNYNQTLKEIKDYIGWCVNQIGLENYDLIVIEELKNITKNGKKLSKSKWLRKKLAHWNIDLAHRRLMEKCEANRVWIQTVPAYHTSQRCSHCGKIHKESRKGERYECVSCGHTLDADTNASINILDSFLNGECGGSKSYLAVPHSIEKEKTNEI

SEQ ID NO: 51957 - protein, 298 aa, unknown
  TnpB Polypeptide
VQNFRLILPTGRKRKEFWQSVGSQAVQDICQRIEKAYQLFFKHHKKGVRPPNFKKVRRYKSFTLKQAGYKFLGGNRIKIGSRIYQYWNSREIEGTVKTLTIKRTPLGELFIVVVVDGVIEPQIKIETSRIAGFDFGLKTFLTVSDGSKIESPQFLKQSLTVIKKACRQHSKKVKGSANRERARKHLVRKHEDVSNRRSDWFWKLAHDLTDRFDVLCFETLNLKGMQCLWGRKISDLAFGEFIKILEWVAQKKEKQVVFIDRWYPSSKTCNHCGHVLKELDLSVREWRCPGESISEWTG

SEQ ID NO: 51958 - protein, 402 aa, Microcoleus sp.
VYHSIKARIYPTEKQTEKLSQFFGCARWWWNYALNQTTTTYAETGKGLSREGLNALLPQLKKELPWLGECHSQILQSVTLNLSKSFINFFEKRAKFPNFKSKNGKQSIQYPQGTKFVDNLIYLPKLGWVKIKLCRSIEGQVKTVTISKNTSDQYFAAILTEQEREYPIPSSQGNTLGIDLGITDFCITSTGSKYPNPRHLKKHFGNLKRKQRKLSRKEKGSNSRKRARKLVARIHQRITNSRQDFLHKLSHKLVNENQVIVVEDLAVKNMVKNHCLAKAISDCGWSSFVEMLNYKCERSGKIFVKVDRFFPSSKTCSNCYYRVSTLPLDVRNWTCLSCGTKHDRDINAAANLKAEGLRLLALGTSATAEGGEVRPTRGRKTSVRHSPASSEAPTIPFAVGGG

SEQ ID NO: 51959 - protein, 401 aa, Shigella sp.
VKRLQAFKFQLRPGGQQECEMRRFAGACRFVFNRALARQNENHEAGNKYIPYGKMASWLVEWKNATETQWLKDAPSQPLQQSLKDLERAYKNFFQNRAAFPRFKKRGQNDVFRYPQGVKLDQENSRIFLPKLGWMRYRNSRQVTGVVKNVTVSQSCGKWYISIQTESEVSTPVHPSASMVGLDAGVAKLATLSDGTVFEPVNSFQKNQKKLARLQRQLSRKVKFSNNWQKQKRKIQRLHSCIANIRRDYLHKVTTAVSKNHAMIVIEDLKVNMSKSAAGTVSQPGRNVRAKSGLNRSILDQGWYEMHRQLEYKQLWRGGQVLAVPPAYTSQRCAYCGHTAKENRLSQSKFRCQVCGYTANADVNGARNILAAGHAVLACGEMVQSGRPLKQEPTEMIQATA

SEQ ID NO: 51960 - protein, 274 aa, unknown
  TnpB Polypeptide
LHSQSSQRVLEELAEAFNSWYGKRTSDDRANPPGYRKKNYYDNQGRRVHEEHPRSTVTWKQNGIKHDTKNNRVRLSKGANHKEHPKAWEYMLVEYETRPGVEVENLQQVRAVYDTAKERWELHLVCKDEIETPTAPGNETAGVDLGICNFAAVAYSTKEADLYPGNRLKQDGYYFPKEIAKCDDSGGKRATRLHHKWSERRTHFFHSLAKHIVERCVEKEVGRINIGKSLMSARMRMASQKTGAHTAILTCTAGRSTGSRTSLNTRRRLRGSKS

SEQ ID NO: 51961 - protein, 364 aa, unknown
  TnpB Polypeptide
MSEVQVKAENKWLKECISYGIQQKRMDFYETLKQFFNKKRKTKSGAPKFKKRGISRDSLRIPGQALGFNKACNFEASTIKIPKMKPIKIVYDREFKGELRSATISKTKSGEYYVSILVQEEIKAMPKTGKDIGIDLGINHLAILSDGTKFTNPKYFCKTQAKLKKMQQHLSRKTKGSKRRELARLKVARLYEKITRQRNWYYHQVSNHIVTNYDSIFIEDLAVKNMIKNRKLSKSIGDVSWSTLVGMVEYKSDWYGKEVCKVNRFFASSKTCSSCDHKLETLDLGTREWTCPSCCTTHDRDINAAKNVYKEGMKNFHGLLSEELPDYNRGEDVRPDYFLRRKKSADLVEATSKTMEFNRLHEHV

SEQ ID NO: 51962 - protein, 401 aa, Bacillus sp.
MCLIGLRKRQQKLEQKIEMYETHIKNGTLPPIIFGGRKNFYERMKDKISNQEWKDLRTRQLYSRGDKSKKGNLNMRITVDDCGQGWLEIANPLGRTNGKTKSPRIKVPIMIPYRFYHQITNVVMGKQIGVNPKGKPIIEHQKYSVEIIRKQNEFYVNITFDETEIGRVLDFKETPQSDVIAGIDVNPDRIAVSLCTKQGNFKGSKIFYLHNLNTFSTNKRATIIGQIVQQIKTWLLENNVGGIVLEDLKFQQSHDTDKYSNRNFHQFTYKKMLNSLIRMALRNGFSVKTVNPAYTSVIGKLKYSKNFGISVHEAAAFTIARRGLELQEQLPQEIILLLKNQITTKLRILVASMEESKKNTKKVYKKWLQTIQTWKEYHNWKLWSILHKTVYMNNQQFVFKI

SEQ ID NO: 51963 - protein, 402 aa, unknown
  TnpB Polypeptide
LKTYKFRLYPSAEQEEKLNEKLELCRQLYNSFLLERRYAYRGRKKSLTYNHQQNEIPELKNAFEEYNYIHSQVLQDVARRVDRAYQNFFRRVKEKKKGVKQKAGFPRLKGKGRYRSLTYPQSGFTLMDNGHLRLSKIGKKRMFMHRDIEVEIKTLNISHDGSGKWYASFSVEQENVAPQPDKTGNSIGIDAGLLHLVTMSDGTFIDPPHFLKKGEKNIKKAQRNLSGKEKGSNNRRKAKILLKREHQKVKNQRNDFAHKLSNVIVKNNDLIIFENLNIIGMMKNHHLANSIADASWGTIVQYTTYKAGSAGKDVVLVDPGNTSRICSNCGYKKKELKLSTRVFRCDHCGHEMDRDLNAAINIHDLGIKKVGRGTPEFTPAETGVQPSLRMVQPVRETGSPVR

SEQ ID NO: 51964 - protein, 564 aa, unknown
  TnpB Polypeptide
MRHQITDYERILRDYHKASFRHVVVFEAEISEDDKRHLFCQADLLRQCGNELLGIMKRRLEQLLRTKRYRGLQKYYGSLSEKLKDLEKVKVLSAIQKKHRQELLAELKSAGDSMKEMQEAYQVTWDFCRKTMEHLRLSYGQPSIFALSRAEDVWSAVSKVLYSDGDSLHFRKRGQLPELRAKQSNRGILIFLKNDKLRFRCNGTELPIRRNEKDLWLMDELDAIETYMREPDTWDAYAVDQMQKGHGIISTYRPCYASIVCRIIRGKLRVYIHLTVEGSSLAKRTKDGCVKHPCSDGVVGCDIGTQTIAYTSGHDVGLENLAERGQSIRHTERQQRLILRAMDRSRRATNPGNYNPDGTIRKGKKIWIKSNRYRKLQKRHQELCRIAAENRKLAIHEQVHKMRSLGNIFVTEAKNAKKLQRRAKPEDPLDKNGKPKRKKRFGKSIQNRCPGYFQMKVKQIFESTGGIYIEVPADYRASQYDHTADDYIKKKLSQRMFCLQDGTKVQRDWYSSFLLYCIDLVTGTIDREKCKMEFESLLRKEQVMIEEIIRSGRQVMNSGIRIAQ

SEQ ID NO: 51965 - protein, 570 aa, unknown
  TnpB Polypeptide
MAKGRKKRAELTEYEKAVADYRKTSARHVLVLEADLTEDEKRRIFYDADLVRQCGNTLVGIMKRNYEQLARTKRYRRLKELYGTLSETVKKMESLESPTRDQKTLLKQKHFELKSCAASMSEMQEFYHVTWEFCRKQMESIKESYGVPSVFALTRAEDIWRSVEKILYSDGKQLHFRKRGDLPEIRAKQASRAIVIKSSDSGLVFKYRDLNIHCKIKPGDTWALAEQDAILAYLKNPDLCDAYAVSSMDKGMIDTFRPCYASLVCKEIRGKLRVYVHLTIEGNPIQKTKNGHARHQYGKGNVGTDIGTQTVAYTSTNKVGLENLAERGNTIEHSERMERRILRAMDRSRRATNPENYNPDGTIKKGKKVWIKSNRYRKLQKRHQELCRINAQNRKLACQELANQLRSLGNVLITEPKNAKKLQKRANPEDSLDKNGKLKRKKRFGKSIRNRCPGYFQECLKKKFESTGGVYIEVPVDYRASQYDHTADDYIKKTLSQRMYRLADGTLVQRDWYSSFLLYCINEEHTGIDKRKCLEFFKYLYQLEQEMVDSIARSGKKIMNSGIRTKGMAA

SEQ ID NO: 51966 - protein, 506 aa, unknown
  TnpB Polypeptide
LNGELLDSSTVLAQLASEIRGISGYATFVARNDMKLGSELAQIGAVQPTTAGRRAGVTMPKFFVEDEDGKPIAGKSGRSRKEALIQHRVVTSYRSWQERVKAANGESDKYVSQGWKRTVSASPPSYGEDYVNLGAVNKQYAAIGNNPFATGEIVLKMVIQGMWYRLFFRFDTMRFPEGEVTLPIIKIENNQPVFIFSVVTDNPIAQFSGDYVVGVDVGVRNYATVVVRNSKTGQIVYQSTLSPRVHSLWNSVKASERQVRALWKKSDLLIYQRQARMSTLDEARLHREAASRKKRELAILAAQEIAYLSHFWDNAVVAVEDLSWISNTMQNGRWNRGELINWVTHYISQNGGWVISVNSANTSQVCHLCGSTVTHPVHKVSLCPEHGILDRDVNAAANIAARAVPRVEKARKTRAKNRKVRPQAPRKTPVARASLKYPGRDRTKNKPTLKRKKRPISKGVNLPSRPARVNMDTVLADCGAYGAAGTSQAALKQGNIAYDCRLYNLN

SEQ ID NO: 51967 - protein, 259 aa, Oscillatoriales sp.
VKARFRYRFYPTDQQQQSLARLFGCVRVVWNDALALCKQSDKKPSSADLQKIVITGAKNTEERAWLGDVSCVPLQQSVADLDIAFKNFFNSCKGKRKGRKVGYPKFKKRTSSQSARFRVGGFSIKGDGVYLAKIGIVNPIWSRALPSEPSSVTVIKDCANRYLLSFVIEIQPISSEAKNPSIGIDLGIKTFAVMSNGEKAESPSYKKLDRKVRKLQRKLARQPKDSKRRNVTRIRIAKLHNKIADTRKDFLHKLSCQPK

SEQ ID NO: 51968 - protein, 428 aa, Halomonas sp.
MNVIRLAIKFHQLCFEVSAYPPKKSFEGVEVFGIKDPASEFCYKDQVGMNHENAMPTSSNFLFSVHRPIMLQSMKQTKTLKVRVKDKHVAQLNRMARNVNFVWNYLNELSSRAIRERALFLSAYDMHPYTKGAGTDLGLHSQTLQEVAREYTTRRKQFKRSRLAWRKSGGVRRSLGWIPVNTGAAKWKSGQVFHNGTYFKVWDSYGLSQYKFRSGSFNEDARGRWYFNVVVEVDIPPNQAQGEVGIDLGLKDTATCSDGQKLEAGRFYRDLEAKLAAAQRAGNKGRVKAIHAKIKNRRKDANHKFSRNLISQYGTIVVGNVSASKLAKTKMAKSVLDAGWYQLKTMLEYKCDHAGTVFKEVNEAYTTQTCSNCGALPKERPKGIAGLGIRDWICSECGASHDRDVNAARNILSLGAGRCPQAVGIPRL

SEQ ID NO: 51969 - protein, 399 aa, unknown
  TnpB Polypeptide
VTTTTTSTSTSWGRRRPSRAHSRQRRRLAVVLRNSRGGRPGGQSARLLGNQADGRDLRTYVRNDAYTIRWGERSRLEVPIGSQLKAEYGFGRAERLRVAVRGEPHWHGDQGRLHLTYDDIDETYRAHQPVTVSDEAQATPTGTDVAALDIGANVLVACTTAAGDQYCYSGQEPFRQFRETTERIADAKAKLPDGQQTSTRIQRLYRKRSRRRDHAVNALLRDLVQRLYDDGVETIYHGDLTGVLGEYWSVEANLKARTFWAHRQCLDQLANVCEECGIDVAATSEAWTSQTCPECGEREQTRRHRETLTCPCGFEGTPTSSRRGRCSNRRQTLRSGRRHGPCGSSGTTTSGTPSRRTRWLPTNSAQTRKVPPWCRRDASEWTLRGSGVDVDPLVARFSS

SEQ ID NO: 51970 - protein, 401 aa, Actinophytocola sp.
VQARYRYRIEPTEAQREMLARTFGSCRVVFNDALRTRGDCYRAGERVGATEVQRRVVTVAKGTEARAWLSEVASVALVQSVRDAQRAYTNWWDCQKGRRRGRKMGRPRMKSRKDNRQSFRLTRNGFSLRPQGRLYIAKVGDVRVRWSRGLPSEPSSVTVIREPDGHYYASFVVEVEPTPLPAVSQEAGVDLGVSRLATVATSSGGRADIPNPRHLAGKLRKLRRLEREKARRAKGGANRAKTRRRVAIQHGKVTRARRDFQHKQALALIRENQAIYVETLNIAGMVRNRRLARAISDAGMSRFVRLLEEKAERYGRSVDKIDRWFPSSKTCSACGAVQDTMPLKVRTWVCGCGAVHDRDHNAAKNILAAGRAERPNACGVDVRPLSGAAVGDEAGSTPNAA

SEQ ID NO: 51971 - protein, 403 aa, unknown
  TnpB Polypeptide
MLKAFKYRIYPTQEQQVLLAKSFGCCRFFYNYALNRTSQTYKETGKGLSRDQIINLLPDLKKEYEWLTKAPSQALQQVALNLSSAFLNFFEARARYPRFKKKQNRQSLRLPQGCKMEGDYLKLPKFGKVYCRVSRQPQGQFKSVTVSQTPSGQYYASCLFDDGKEIPEKSADGKAIGIDLGLNEFAITSDGSKHGSPKSYRKYERKLASKQKDLSRKQRGSNHRRKARVKVARVHEKITRCREDFCHKLSRNLVDENQVIVVENLAVNNLVRNSKLAKSISDAGWGQFLTMLKYKAEWEGKTYIEVDRFFPSSKTCHHCLYQVDSLPLEIRNWECPSCGTQHDRDINAARNIRDEGLRSLRVRNFEVSSKCKTHSRQAAGRVAAASGQRVRPAKGTAFGGIAG

SEQ ID NO: 51972 - protein, 473 aa, unknown
  TnpB Polypeptide
LLSKSSKPYESEEEFIELITEEHAKYLSDHNIEYSYIEDSFVEDASSTEDTLDLFHTDQKFFKSVWYYTKGVNNPDTEYVEYELKYLGSYVKTDIINKMCSNIKSLSTNKKNGKKVGHLRFVSEYNSLTYKKQGFGFDLNIGNATCRLQGCKKWFKVFGVEQFKEIRNADPNYEIATATLVRVSDGDFHLHMTVYVDKQKLVNYRRSKIEKKKYVRPGEEIIGIDFGCETSFTLSNGEKFTMLVEESERHKKLQQQLQRCKKGSNNYYKVKLRLRKSYTKMNNLKDELARGFVQYLRLHHDTIVMQDENLSGWLKGNHGNKVWHSVMGRVKELLMNEKCIKVVVLDRFIPTTKFCPHCGQMHKSLKLWDREYVCPNCGQSMDRDVHAAQNMVWIYKECLKHQIIPMDGREITRADFDRLVSMVFGSSAADRVEGMPDDCNGLETQCRCLQTVETLSVEKHEAQPVRVRKTSFA

SEQ ID NO: 51973 - protein, 347 aa, unknown
  TnpB Polypeptide
LDYGSEHKTFNKDKLNKATYRQVREAIPNLPSALVQTARDEASEMLLRTSFARITKKRLSVRYDNRCFKFYPDSDYVSLTTVHGRLNFPFKHYAYLDTWKGEYTNAQLIIRKNKAFLNVQVKLPCVPLNVTGKVLGVDRGILNVAVCSDNTFFDSKHLRAVKGRYRYLRRRLQHVGTRSAHRKLQQLSGRERRFVLDANHCISKAIVNKPFDVFASEKLKVNRKTKKGKRFNRLLGSWSPSDLQRLIAYKAETKGKLVVEVNPKHTSQRCSRCGFVHRWNRHGLRFRCGNCSFELNADLNASRNIEVLGKSECLRLCVNEPIVASGEASPTGAVDDSYKPPNLLGGS

SEQ ID NO: 51974 - protein, 408 aa, Tengunoibacter sp.
MLLCTKIRVDVSEQDAAALEFMQGKCRALYNWWIGRLKDGEKWPGWKIAKASLQESKQHDPELCQVYGKLLHEVYFRLDAAMQAFFRRVKQGEKPGFPRVRPRHNFFTLCYPAMYLKIEGDTFILPTGGRGKNKQYPNIKAHLTEDPPTHFKEVAISRDAAGRYYASFVAEREEETNNNNRVVAFDLGIKTLATGANEQGRIYHIGGFKGSQYYNKQLDKIRSKRDKCKKKSRRYIYLSKVYQRVSQKKRNKQRDSLHKASHLIAHKLVERTVVIGDLSQRQMVAKQHQERKKYLNRSVYNDWGLYTFTQMLVYKCQLYGKELVLENERNTSKMCSGCGNLQAMPLWKRTYCCVECGLVMDRDENSAVNILARFITRRGSHTPSVECGVLHADQNSVEVVEASCPTQV

SEQ ID NO: 51975 - protein, 393 aa, Tengunoibacter sp.
MEQKRAFKYRFYPTDEQKSLLARTFGCVRVVYNWALRQKTDAFYNEQKRLYYKDLSQMLTALKQQEEYVWLNEVSSVPLQQTVRFLDKAFINFFEGRAKYPTFKKKRNQQSATYTSNAFTWRDGVLTLAKMSAPLTIVWSRPLPKHAVPSSVTVSKDSTDRYFISILVEEDSAALPTTPKTVGADLGLKSYVILSTGETIGNPKFFSTDEKKLAKAQRRHAKKKKGSKNRNKARLKVAKIHARIADRRRDFQHKLSTRLIRENQTICVESLAVKNMVKNPNLRKAISDVGWSEFVNQLEYKAAWYGRTLVKIDKWYPSSKRCFDCGHILDSLALDVRHWTCPKCKVHHDRDINASKNIHVAGLAIFNACGEAVRPGAVKTKPGTSPRSRKPRS

SEQ ID NO: 51976 - protein, 431 aa, Tengunoibacter sp.
MKTAHKIRMNPTPEQVEYLKRACGTRRFVYNWGREQWEKQYQAYKREQETTPEEHRVLTPPNAFALKKQFNAIREELYPWTYAVTKCAVEGAFDDLGKAYNNFFAGRADYPKYKKKGKAHESFYLSNDKFTVGSHWISIPGLGGFILDQRKQRKDRGKRKRTLGTVNLSEKLRFVEAETASFPLNKRNQRKQVLCERVKILGATVSCEAGHWYVSVQLEMNKVVPPTPEPVVGVDVGLKQAAVVSDGRVLENQKPLALHLKKLGKLQRQLSRKQKTKDPETGKTTFSKNYQKQRMKVARKHQQIANIRRDVQHKFTTELARTCGAIGIEDLNIVGMMANRKLSRAVADAAMGQLLQLLKTKVATSGGNLFVASRWFPSTKRCSGCGQVKKRMPLKHRTYQCLNCGLVIDRDLNASVNLAQFAQTQLRHSSA

SEQ ID NO: 51977 - protein, 260 aa, Blautia sp.
  misc_feature (239)..(239): Xaa can be any naturally occurring amino acid
MPKFYQDNVKIRFSNTHVKFEGFSSSRKANKQKMNWVRLAEHGRIPTDAKYMNPRISFDGLNWWISVCVEFPDCREILNDDGVGIDLGIKDLAICSDGTKYKNINKSQKVKKLEKQKRRLQRSISRSYEKNKKGESYCKTNNVIKKEKLLLKRDHRLTNIRKNYLNQTISEIINRKPRFICIEDLNVSGMMKNRHLSKAVQEQGFFGFRKQLEYKCSDKGIQLIVADRFYPSSKLCSCXVVSLVLTRKIKKEKVTVKQIM

SEQ ID NO: 51978 - protein, 220 aa, Blautia sp.
  misc_feature (165)..(165): Xaa can be any naturally occurring amino acid
MVKAIKVMLIPNNVQKTKLFQYAGASRFAYNWALAREIENYEKGGKFISDAELRKEFTKLRRSDEYAWLLSISNNVTKQAIKDACTAYKNFFKGLQKFPRFKSKKRSMPKFYQDNVKIRFSNTHVKFEGFSSSRKANKQKMNWVRLAEHGRIPTDAKYMNPRISXLLIRIFSKVCRNSQDSSQKRDQCRSSIKTTLRYDSVIPTLNLKAFPPAGRQISKK

SEQ ID NO: 51979 - protein, 414 aa, unknown
  TnpB Polypeptide
MKTYSIRLFPTQEQILQLNQLSNIRMDVWNTLIDIQQKYYEINKKIYSKFELINLLPKLKNVTKPEWKLLNAKAIQTIATEVSQSYQSFFTLIKKDNTAKPPKQKELGRYHTLVFNQSGWVFKDNKIQINKILFNYKSNLTNVSELNIKQICVKFNNNNNKWLCDIVINDTISYNDNVIINTKVLAFDLGLKNLGTGVDNKGNVFILKNKAKKINQYFGKQINEIKSKLSKKEKGSKNYNKLNKVKKKLYSKKNTQIKETLHIQSKQLVNMNYKTIVVGELTIKSLMSIEGINKNKKSIRKSFNESNINMFLEFLKYKLQNKQCDLIKINERNTTQLNSLTGKIFKNKVELKDRIVKLSDKVEIDRDLNSAINILKRYYDNHLASMTEPLDYTNVIMNFNVCNNHSSIGNFIVF

SEQ ID NO: 51980 - protein, 219 aa, Arthrospira sp.
MKLRYRYRIYPTDQQKRLMSQLFGCCRVIFNDALAYCQEQYRAGNKKPNINELSQRLTELKKTEEKIWLGEVSSIPLQQSLRDLEQAYSNFFKSCKGQRKGKKVKPPKFKKRKSKQSARFMDNGFKHLNSDYIYIAKIGDIKVVWSRELPTKPSSATLIKDSADRYFVSFVVEFNPQPLPENQNSVGIDLGITDFATLSNGEKVKSPKPLKKQLKRLRR

SEQ ID NO: 51981 - protein, 483 aa, unknown
  TnpB Polypeptide
MKKVKIFSPRACRLNGVKLTPEFKIEHDTISSIQKDLSIWIYEKICKKEIAEINDKYIKFKNKAWDDWAGLSFQGKQCKSWRETELSLRQLKCHPEVQEIFLKHTPHIEKKELNLSRLDDVLWKVVENYKGFQNRNSKKTKRPIFLKTNKALNFKNGGIWIEDNKIKLSTLQKRKFIYLTFKEDVYDNQDSIDYKTGSGKGGNISFNGLYKQDDNFLVIQLVEEQESSFFKKVIGIDINKNDLQWITFSEPIFNKTQRAITKGEEIKGLEIQAKTLNQDLLKNKSKYNSKQRRKLHQRKKRAERRLKLSIKEKIVKPAFLYYIKKYDSKVSFSIDDIGFGNQNSFGQEYIRDAFVSLCKKNNIAFAICPPSFSSQMCPKCGSLHKQDRKLINSYTCKSCGHFHKNCDELGAENIAKFGSVLMKEVCISSTSKSFQIPIPHKSKFWSLYVPDDDERKKPIKRKLDSIYNKVLKTQFNFPDSSSR

SEQ ID NO: 51982 - protein, 279 aa, Dielma sp.
MLICGRRQGKYGNNLFKYHIDEGILVYRGIRQEIRMPVVFHQHREHIERAVRMKHNTPGKAIAYELYDHGEYFIIKAIAEYPGEPVLPSGRGSIGMDINRDHIALAETDRKGNLVKAWRIPLKERGTRNQREYERYVAVKRIVEECAGKKKNLIMEDLEFERKKEESLYRDRNYNRMLGTFAYKRLEEKIERKCMEKGVYLRKVDPRHTTQIGKLKYAKRLGLSIHHSAAYVIARRGEGYRERIPNEYHEYREWKEVIRDLGKATLEECQRTPYLCLFR

SEQ ID NO: 51983 - protein, 366 aa, unknown
  TnpB Polypeptide
LKDKRIRSLVIRLYPNREQERIMMEHLSICCDLYNRLLEYCKGCYENGEKHPSRFDLQNMLPEMKKKDPKLKIPYSQVLADVPHRLSKAYDGFFRRVKTDPEHAGHPRFRSWRRYDSMTYTQNGFRVNPGHLELSRIGRVPFKGFRKMDGILKTCTIKRNGAGPNYRWTAILTYESVPPAEDGERFRTRGTSGQSVGVDMGLKNMVVTSDGKEYPNQKGYIEAERRISGLLRKMAKYEKGSSQRERYRQRLFHAFERLKNVKKGYLYGVVNDLVEQYDTIIMEDLDIKGLAGKSRSKGMRKSFRDANWSRFIFILGYKAEEAGVRLVKVDPAYTSQLCSQCGASVPKVLSDRRHRCPLCGLDVDRD

SEQ ID NO: 51984 - protein, 521 aa, unknown
  TnpB Polypeptide
MITLQAKVSFQSQEDEQEVLDLMRRWSSCMRFAYNRLLQGYDRKTLKRDLQKVFNLNSRYVDDAIMKGKSIIDSAVELGINQEKIVFGGRELFEKLHKHHINGREYERLKRKWFEKRKGNLYSRGDRSKKGNLNTRIEIDENNSPFLRINVGERKYVYAKLSPGFKKYKNRTELLYEWTQSHIPYSIELKLKNGNIYAYISTEEEFPETEITRDCGVIGIDVNAYPDSLSYAEVDNSGNLVSYGTIPMQELSSGSKNKREYHRFQYAHKIVEIAKEKNKAIVIERLWMKDRGKRGDFSGRKLRRITHNFSYSSFLSKIKILSKRNGIEVIEVNPAYTSLIGMLKYAPQYMLTKDVASAYVIGRRGLGMKERVPKNYIKFVNSLTLDDLESLKEYIKKSVKNTYLKNKHLKEINRAAKLLQSLRSEEERVSEPLDGTSSDTLNFFRVLKVAVVTPLSPEKVLRDFSTLKELLISGQVGRLSKALVPASWGRGYDTSKFRQSGMGVSEVADYKYPDLKLYKIV

SEQ ID NO: 51985 - protein, 219 aa, unknown
  TnpB Polypeptide
VSITCEVPEFHPLPKTHQAIGIDLGITDFAILSDGRKVDNQRFTAKMEQKLKREQRKLSRRYEQAKKDNQVLRDCVNYQKQRRKVARLREKVAFQREDFLHKLTTAFIRQYDVICIEDLNTKGMLKNHKRAKAISDVSWSSFVQKRMYKAKWYGRTIVKTNRFFPSSQLCHVCGHHDGKKALEIREWTCSSCHTTLDRDINASRNILAEGLRLFEATQP

SEQ ID NO: 51986 - protein, 372 aa, Epsilonproteobacteria sp.
MRKSFKYKLYRSKKNRYLDRLIIFSGVIYNHCIALHKRYFKLTGKYLNPNRLKTHLTKLKKIKKYEFYRFVPSQAIQDIVERIDRGYKLFFKYQKDKSVGLRYSPPSFKKTRKYKSFTLKQAGYKLLDGNRIKIGDKMFKFSKSRDIIGAIKTVTIKRDALGDFYITFSCDNVEPQTIKPMTGKSAGFDFGLKTFLTCSDGIVEINSPLVFTSGLKEIRRANKAVSRKKIWSNSRRKAVVNLARIHKLITYKRRDFHFKLANKLVCDYDYLFFEDLNISAMKKLWGRKVSDLGFSDFLNIVGHKCSEYGKKMSTVDRFFPSTKTCNMCKNVNKSMGFKDLSNREWICPSCGVLLHRDRNAARNILEEGIRRL

SEQ ID NO: 51987 - protein, 466 aa, Thermofilum sp.
VGWEGRESGERFIEAYRVWEVKASRELRMRLRSLYFSLASAVERASEELERKHGDAFRREPERFSEELIGEASRLAGLPKGLFWYAAEWCRMLAEARGKSKRRSRFTPPPIPLLIRVVSGGDRLHGKSDATAVLDASKGMLRIPSAGVAVRLKPSLVRAVLEDVQRFGGVKLTLQLTARGRLRLVAHRKVKPAWWDGEGKLAVVAVDMNSSHGLYVMAFAFDGEAKLVAQRVFKPPNTTLLRLLAAIMTSYSEVKSWSEAVQRFRERRDVNELRRAGKGSTVEETLRLAERLRAKVNLTPERSERVAGQASRKEKKVNEGWVRGVLREVRGLVRKLRDQGYLVVIVADVPRAESLKGSQLQRTLLRVVRRLENLALYEGARWFQPENNISGKRCPLCGSWGVEVMRRCYRCPKCGLTWGRDWAAAFNSVKLFLKACNAERQLEALSKWLSQHPKAPTHGLRDRPGP

SEQ ID NO: 51988 - protein, 409 aa, Pelotomaculum sp.
MPTKTIKQNLEYRFPEWLKLTEGLFNEVTAFYFSIIKEHDLILGLTNKKALTELERLTHKTKDNPSPPFPLRWDIPAMFRRACINTAIGAARSFFSKLKRWKDAKAKAEAKGKKFKYRPPVPPREWQRNTLFYAGQYKGYTGKAIMLKLFDGNTWRWVKYRLTGRRVQDGWKIGCPHAVIKKNRIELHFPVEKEKPAVKAVAEQVKDPSLKICAVDLNISDKLAVCGIFKSDGTQVAARFIRGGDSLNGRRKRLLGVIATKLSLTGSINKDEQDNKALWNKVHNIDDNEAHRVSRRILDFALEHGASIIVFEYLNDFKPEKGKYSERANSKRSYWLRGRIFHYTKYKAWEYGIITSRVNPKDTSRLCAGCGAEIDRLAPLFTCKCGKKGSSDLNIVRNIGKRFFLRYMA

SEQ ID NO: 51989 - protein, 340 aa, Lactobacillus sp.
MSNHFQFLEDKRIDSLTKANAIQNYHKAWNAFRKVHTAGVPKFHRKSYVWRYQTNCQYLKQKAAYLTNGTVHFEDSKHVIVPKLGRLRVKGSHQRVLARSAETRIGTVTIVKDASGRFFLSMQLASDTPFVNWPQNTGKQIGIDLNTENFLTTSNGDTVANPRYYRIIKGRLAKAQRILSRRARRAKQEHRPLRTSKNYQKQRLLVAKLHAQVFERRRDFLHNVSTTLIKNHDFVAAEELRSKNMLKNHALAMSIADVGWRTFLGMLAYKAELYHRQFLTVNPKNTTQACHECGFVMGTAGTEKLTLADREWTCPKCHAHHVRDHNAAQNILTKGIIKLA

SEQ ID NO: 51990 - protein, 427 aa, Lactobacillus sp.
MLLYQIKEVNIVKSMAKMEYHYGLKVRIYPSDKQKQIIKLNSDASRFIYNEMVAINKELWQLKQVKLPIDTVQSRIKQLELRQNAKQMSNHFQFLGDKRIDSLTKANAIQNYRKAWNAFRKIHTAGVPNFHRKSYVWRYQTNCQYLKQKEAYLTNGTVRFEDSKHVLVPKLGRLRVKGSHQRILARSAETRIGTVTITKDAIGSFFLSMQLASDAPFVTMSKQTNRQVGIDLNTENFLTSSDGQVIANPRYYRTVKGRLAKAQRILSRRARRAKKEHRSLRESRNYQKQRLLAAKIHTQIFSRRRAFLHQLSTTLIKNHDLVVAEELRSKNMLKNHALAMSIADVGWRTFLEMLTYKAELYGRQFITVNPKNTTQTCHDCGFVMGTGSTKKLTLADREWTCPKCHVHHIRDHNAAQNILTKGIAKLA

SEQ ID NO: 51991 - protein, 692 aa, Saccharopolyspora sp.
VVLWWSLVRGLQGGELVVDGVGVQLRYRYRLYPTDGQRQALSQAFGNARVVYNDAVRARHDAYAAGEKYPTGAVLQKRLITEAKHTAERGWLAEASNIVLQQAIRDCDAAYKNFFDSLSGKRAGRRVRTPRFKSKRDARQVIRLHTGGFAVRANGRLRLARIGDVEVRWSRDLPSAPSSVTIVRTADGRYFASSVVEVGDETLPPVLDKHGDEVELALDLGLPAFAVDQHGNAITNPKFLRRAERKLKRLQRALSREEKGSKNRDKARTKLARQHAKVADTRLDWLHQETSRIARESQTVVLEDLPVSGLARTRLAKSVYDASWGGFRRLVVEKCARWGRILVVIDRWLPTSQTCSVCGRLDGKKSLSVRTWSCPCGAVHDRDTNAAKNILAAGRAERLNACGGDVRPHTGAVSEEAGEPARQYHPERGIAAWEPHSRWGARQDVEHLGHPAVTNGEGHDPGAHFRGLGPAGQDQAEVTVDQCRAHAAEQVVPVLLRQADDEPGDLVDADHRVPRGACPAVAVAVDGRLAGGGRGPQPPRHAPKRRRGIRPGRAVARASGCAVVARPLSSRAVRVKRAGARWLRCSQVHRRSRRTACRTRRGGRTPAAVPASVRGARAARRTAGPRDRPRRPAGPAPARRPRRRPVPATTVLRSFPGAPPPSACGPGRCARRPWSARHRGRRSAPCAPRPTA

SEQ ID NO: 51992 - protein, 511 aa, unknown
  TnpB Polypeptide
MAKKTTPSFILELPLKVSPQDERELDVRLNAARQLYNACLGEALRRLALAYQSRLWTRARKATDKKDRAKAFRWARQAVEFDEYALHRFVVQTKNACWIGDHLDVHVCQKIATRAFQAVDSYAFGKRGKPRFKSVGRLRSVEGKNNEAGIRWREGVVVWGGLKLPALLDPKDRHGWQRQSLERRVKYVRLVRKPLRGRQRWYAQLVLEGPSPHKAKNVIGQGVVGLDIGPSSIAAVGETEAFLAAFCAEVEEIWESKRRIQRLLDRSRRKTNPDLFERNGTVKPGRHRWNKSQRYVRLRAELAEQERKLAAARKRSQGELANRILVLGKDIKTEKLSYRAFQRLWGKAVGSRAPGMFMVMLRRKAESAGGRVQEFSTRTTRLSQACHCGTTTKKALSERWHRCACGVGPVQRDLYSAFLARHVNNEQLDTSRAATAWASAESLLGCAVSRAHQHAKGRHRLASFGFGQRQSVSHIKGGLDNQAVFAKAGDVVGAAPAAAESSGEANRLSLH

SEQ ID NO: 51993 - protein, 411 aa, Chloroflexi sp.
MQLVERHLIRKDDPRFAVIDRAAFASKNLYNQANYQIRQSFIHEGKYLPYAAIFHRLKHHDAYRALPCKVSNAILIQLHKNWLSFFEAMKAYQDDPTSFTGRPKLPGYKDKEKGRFLLIYDKQALGKRAFKKTGKLVPSGLSLAIATKIAWDAIAQVRIVPRADGYMVEVIYEKEEQSASVDHSLVAALDLGVNVLAALTSNKQGFAPRLVSGKPIKSLNQYYNKQRAQHQQRLAHENRFTSRHLDRVTTKRNRRVDTYLHTASRRIIDLLVSEGIGTLMIGKNPLWKQEANMGRKNNQQFVQLPHARFIDQLAYKAQLVGIQVIIQEESYTSKASFLDDDPIPTYQANRSEKPVFSGKRIARSWYRASDGKVIHADINGSYNILRKSTSDLSQLGRGVVGAAVLPRRLAV

SEQ ID NO: 51994 - protein, 495 aa, Roseobacter sp.
LHCLKSAFWLFYRREKLRATKMHRAYKYRIYPTDEQSAMLNAWFAAVRLVYNAALEQRNIYGRSISKDGPDYWGRPTSFDWRGQNKELHYKSKGDIVGIENDPELKWIVEQKVPKDCLDAAVQDLHKAFKKFFDYIEKTKSNIPAPKVGYPKPRTANKNNSVTFKAFRRQKVNGISLSTPSTVFGQDSVKLPKIGRVRYNRHKKFYGDPKTVEVIREGDEYYVILVTKHPIKSVKHAGEAIGVDLGVKLPVCLSNGEASWPDGGLEELETKVRKVQKILSRATKGSRRRQKARAHLAAIKRKQARRRTAKTHQITTELTRSFKYIALEDLKVKNMTRSAKGTEEEPDKKVKQKAGLNRAILNISFYKIREQLLYKAEKSGTVVKFVDPKGTSQTCNKCGHKSKTNRKKQAKFKCTNPTCGHEDNADVNAAKNILRRADPSAAVLGRRKSPSKSAALKLASKNPTGLATIKASGSCFQPVSVLKMAMKTEGYSHVR

SEQ ID NO: 51995 - protein, 215 aa, Ruminococcus sp.
VANRAYKFRIYPNGEQKILFAKTFGCVRMVYNHWLDRKIRQYEENKTNVTYTICAKEMAAMKKTEEYGFLKEVDSIALQQSLRHLDMAFQNFFKQLKTGFPRFKSKKRNKNSYSTVCINGNITISNGYLKLPKIGQVRLKQHRIIPEEYRLKSVTVSQTPSGKYYASILFEYEDQVQEREMQKFLGMDFSMHELYRDSNGKEPAYPKYYRNAEKK

SEQ ID NO: 51996 - protein, 230 aa, unknown
  TnpB Polypeptide
LNIAYRFRIYPTEEQKILLGKTFGCCRFLYNQMLNDKIREYKKTKKLLKNTPAMYKKEYSFLKEVDSLALANVQLHLEKAYKNFFRDPKVGFPRFKSKHHSKNSYTTNVVNGNILVEGNRIRLPKLKWISMKKHREPAENCRLKSVTVSMESSGKYFASLLYEGYSCENQAADKDYSNAKILGIDYAMQGMAVFSEEIELEKAGFFRRNENILPRLCNERYCGTCSPGCP

SEQ ID NO: 51997 - protein, 353 aa, unknown
  TnpB Polypeptide
MIDGEYKKILKQYHKLSDRHILVAETDMPYSDVLKIVVLSDKIRKAGNELVGLMRKNYDQLFRTKRYRKLLSLYGNTGDKAKRKILANQLNKMQKSYNVTWDHCRKSMIPIGKKYGVDAVFALTKAEDIWRGMDRSKRASNPQNYNDDGTVKKGCKTWKYSNHYKKLRARHAELCRINAVNRKLAINEDVNHLRSLGDVFVTEPKNTSKLMKRAMETTKNDKGRFNRKKRFGKSIKNRCPGGFQSNVEKKFKATGGTYIEVPNNYRASQYDHTADDYIKKKLSDRFFKLRDGTEVQRDWYSSFLLYCYDPMTHDIDKNKCNAKFEEQYNREKALITWINANKLKILNSGIKIA

SEQ ID NO: 51998 - protein, 409 aa, Hapalosiphon sp.
VLHKAVQVRLYPSKEQEALLAQAFGCSRWWWNYALKKSIETYKQTGKGLGQSALNTLLPKLKKAEDAKWLADCYSQVLQATTLNLTTAYKNFFDKHAKFPKFKSKHGKQSIQYPQNVKIVDGNVKLPGNIGIVRAKIHRPIEGKIKTVTVSKTPSGKYFASILTEIEVNNPSVAEGKIYGVDLGLKHFAVVTDGEKVSKYDNPKHIAKHEKNLKRKQQKLAHKEKGSNSRNKYRKVVAKVYERVSNSRQDFLHKLSYKLVSDSQAVIVEDLHVKGMVRNHNLAKAIMNCGWGTFTNFLSYKLERKGAKLVEIDRWFPTSKLCSNCFYQMGEMPLDVREWTCLHCGTHHDRDGNAAINIRTEGIRMLKAEGSAVSAVGGEVRPKMGRKSNLRHSPVSTEAHAVPDRVSVG

SEQ ID NO: 51999 - protein, 404 aa, Hapalosiphon sp.
MLTLIYRREVEAMLVLEAKLKGKQSQYNSIDEAIRTVLFVRNKALRHWMDNKDVGKNDIQKLCAVLAKEFDFANKLNSMARQASADRAWLAIKRFYDNCKAKKPNKKGFPRFKKRGHSVEYKTTGYKLSADRKYIIFSDGFNIGKLKLIGTRDLSFYSVKQIKRVRIVKRADGYYCQFCVDFERKEKHQHNGNQIGIDVGLEFFYTDSEGRTIENPRLLRKSEKSLKRKQRRVSKSKKGSSNRRKAVNKLAKKHLKVSRQRKDFAVKTARTLVQSNDLVVYEDLQVKNMVKNHHLAKSISDASWSLFTDWMDYYAKVFDTWAIAVAPHYTSQDCSVCGTRVKKSLSTRTHKCNECGTVMHRDHNAAIIILNKGLKSTVGHTESNACGQNDLYLGGETPLDKLAG

SEQ ID NO: 52000 - protein, 387 aa, Brevibacterium sp.
MSKTVKKTYRYRFYPTDDQEDLLRRTFGCVRYVYNRALEARVESWKSNRRTLTYSESSALLTDWKKDPELDFLNQVSSVPLQQSLRHLQVGFTRFRAKKSAHPRFKSKRRSAQRAEFTNSAFTWNGQQLKLAKSRSPLKIVWSRPLPQGAEPSTVTVGLDRAGRWHVSILFETSVAPTPVAKATAVAIDLGIHSLATLSTGEKVTNPQFYKRDRRRIAKAHSTLNRKVKGSANHERARKRLARAHAKVADRRRDHLHKLSTRLIRENQTIVLEDLAVENLKRNGGKAKTGINRSISDAAWGQLRSLLEYKAGWQDRNLIIVDRFFPSSQLCSSCGARSGPTTLTVRQWSCDCGAFNDRDVNAARNILAAGLAATVCGGDRSRIRTPL

SEQ ID NO: 52001 - protein, 282 aa, unknown
  TnpB Polypeptide
VKTGRIAYETTLSQRVHSLWNSVRASQHQVRALRRKAATLLHDRQERMAALDEAQLHREAASRKKSELAILAAQEIADLSHLWGNAVVAVEDLSWIRNTMQNGRWNRGELVRWITHYVSQNGGWVVDVSSFNTSQQCYKCGARVTHPTHEVSVCAEHGTMGRDVNAAANIAARAVPRVAKARVTRAKNRKLRPQAPLRTPPARDSLKYPGRDRAKNKPTPKRKNHRRTVKEVILPLRPARAQAPCLDTRVLADGGTLRASGTSLAALKQGNRAYKSRLCCLI

SEQ ID NO: 52002 - protein, 306 aa, unknown
  TnpB Polypeptide
MLKTYRYRLYPTEKQQETLSEILWVACWLYNRALEYRRKRWNESRKSVTYNEQAAMWRDWRNEEPDENPLRLLNMSAGQQVLRRLDSAYRQFLKGKRGKPRFQKPSRFNSVNYKPGDGATVKANRLYVQNVGLIKVRWHRALPEGKIKNIIVFRKPSGWYVLFQVELPEKPVEKSANPPVGVDMGISHALAISDGTFFDSPKYLHASLRKLRVLQRSLSRKKKGGKNWRKTARQIARLHEHIANQRRDWWHKTTRKLVDTYGTIVLEDLSLNFMLQNGHLSRAAHDIGLGCSKICSHTRRSGPDVK

SEQ ID NO: 52003 - protein, 306 aa, unknown; identical to SEQ ID NO: 52002
  TnpB Polypeptide

SEQ ID NO: 52004 - protein, 365 aa, unknown
  TnpB Polypeptide
MQRTIKIKIENEDLRETAEQYFKAYCFCIDKGMELHTSNKKKIHNATYFQLRKIHPNLPSALLQTIRDVACENLKAVKLESKPIPKNKFIRYDKRTFSYKNGIVSISTINGRQKFQINLPKFADKYSEWNCKAGTVVLRNGQTWMNMIFNKDIEMKEPKTFLGIDRGIKNIAVCSDNEFYNSKRLKSIKGKYKHMKSELQSKGTRSAMRKLKKLSGRERRFVRDVNHCLSKEIANKPYDCFVLEDLKKIPRNKGKRFNGKLGNWSYNELGRFVEYKTEEHGKMTIKIDPRHTSQMCSNCNHTERSNRKGRQFKCRKCGFELDADLNASRNIANLGISQFGRLNVIQPNVATEMLVTSPHSLEVGR

SEQ ID NO: 52005 - protein, 180 aa, Moorea sp.
SSIVRFYDNCKKKVPGKKGFPKFQKRARSVEYKKSGWKLSPDKKSITFTDKKGIGKLKIKGTWDLWRFDKKQINRVRIVKRADGYYVQFCVAVNVKEELPHTGEMVGLDVGLKEFYTDSNGHSEPNPRFYRKGEKRLKFYQRRVSRKKKSKAVGHASRTSNRRKAVNRLGRQHLKISRQR

SEQ ID NO: 52006 - protein, 238 aa, Clostridiales sp.
VSDDRLTDVVGIDRGIRFLAAAYDSSGKTTFFSGVQVKAKRAHYKALRKELQRVGTPSSRRRLKAIGQRENRWMNDVDHCISKALAESYPKGTLFVLEDLTGIRKATERVKASNRYVSVSWPYYDLEQKLIYKAAMRGQKVINVDPAYTSQTCPKCGRRDKVSRDKRLHLFRCTGCGYTSNDDRIAAMNLYSMGNEYLVQSGKSMSLAGGVRSMTPDVTPASADHCRAVTSPFFKASA

SEQ ID NO: 52007 - protein, 365 aa, Bacillus sp.
VKIINITITAKIKILPTIEQVSLLQKTVRAYRNGCNFVSEIVFHTKQLKQAALHRATYTELRSGFALRSQMAQSVMKTVIAKYKTNKNIGYGWSLVRFRKPEYDLLWNRDYSIMKDCFSVNTLQGRIKVPFIQKGMEKYFDGSWVFGTAKLICKHKKWLLLIPMTKYFEQASYKNIRQVVGIDFGQNFLATTYDSRGKTTFFSGRQAKHKRAQYKRLLKQLQMKKTPSARQRLREIRERENRWITDVNHCVSKALVSKYGKNTLFVIEELNCAQKEVCYGWYFEQLRQMLEYKARMKQSKVIAVEPKYTSQTCPKCGHTERANRNKKQHMFICKTCQYTSNDDRIAAMNLQQNGIEYIVAVTALA

SEQ ID NO: 52008 - protein, 214 aa, Alicyclobacillus sp.
LAPSGKVFVSVLVDTEVQPLELRTNTLGIDLGLIDFAVLSTGERIPNLRHLRKHEEKLKRWQQILSRRQPGGKNREKARLKVARLHEKVRNARMDFLHKLSTRLIRENQVICLEELRVQNMQQNHKLAGSIADAGWSEFRRQLTYKAKWYGRQVMIVSPVFPSSQLCSCCGHRNTGTKDLSVRQWTCPVCGETHDRDVNAARNILREGLRFLSA

SEQ ID NO: 52009 - protein, 246 aa, unknown
  TnpB Polypeptide
VPEPDTADTLVGVNINERNVALTALDRETMRTKGTLVLDYGRVKQERQRYHTITTRCQEHGKTSIHRKLGDKEERFTEWVLHRLSRAVVEFPERFSNPVIVFEGMSGIRDEIKYGTYMHRRLHKLPFHRLETFVSYKPTWREIPADTVDAYYNSQTCSCCGERGYRQRRRFRCPNDGCDVVQDHADRNASVNIAWRERAKLDGNTTNYRTHETQPQVRVVRLSGSERVSRPPSSRSLAKQGVPAHG

SEQ ID NO: 52010 - protein, 372 aa, Lachnospiraceae sp.
MIYRAYKYRIYPNCKQQSQIRQICGCCRFVFNYFLSMRKNTYAEELLTVSYSQCSYELTSLKQYYSWLLDADSTALQSALKDLDEAYQHFFQGHNRYPRFKSKRKTVQSYTSKNNNNSIRMTERHIRLPKLGLVRTKASRPLGGAIINATVSYTSTGKYYVSVLCECPEPEVLTGGIPVGIDLGLRDFTVISDRLTHIENPEPLSKLQKRLAREQRSLSRKTKGSNRYRKQKRRIAACHEKVANYRRNFHHQLSTMLVRTYSLIAAEDLDVRQLLQDNLHTDSRRIADSGWDSFLRMLEYKSAWYGRKLIRVDRYFPSSQICHVCGHQNHEVKTKRLTYWNCSNCGSHHQRDENASINILNEGLRILQSSTM

SEQ ID NO: 52011 - protein, 351 aa, Bacillus sp.
MNFLRKVVKTMARKKAVKVLRKQKKRETMQRFTQKQNIGRACLTAKEFRLLQRMSHSSKALRNVGLYTIKQSYLNNNKIATVKEVDTAMQADLNYWGMQSNSVQAIRRALFTEVKSFFKALEQWKKKPEAFTGRPKFPNYSRSTDKRIIEIYQVPKVDENGYWIIPMSVAFRKKFGSIKIRMPKNLRNKKISYIEIVPKQKGRFFEVHYTYEMHVSQMKKQSTTTSNALSCDLGVDRLVSCATNTGDTFLIDGKKLKSINQYFNKMICNLQQKNIDNGISKRIVTNQMAALWHKRERQINGYISQTIGLLFKKVKALGVDTVVVGYNVGWKQKSDMGKKNNQKLFKSHFIN

SEQ ID NO: 52012 - protein, 405 aa, unknown
  TnpB Polypeptide
MFVHRAFKTELDLNNTQKTACARHAGAARFAYNWGLARKIEAYQIEEKVPTAIDLHRQLNVLKKSELAWMYEVSKCAPQEALRNLDQAYANFFRRVKEKKAGKKIQAGFPKFKSKKNGSGSFRLTGAIHIFENAIQLPRLRRLRLKERGYLPVEGVHILSATVRERAGRWFVSVQVEMDKPKPLVTAKQVAGVDLGVLALATVSDGTRIENPRALKGKLRKIKRLQRIVSRRKRGSANRQKAVRQLAKAHLRVANVRNNALHQATSLLAKTKSAVVLEDLNVSGMMKNHHLAQAIADVGFHEFKRQLVYKGEWSGCKIILAPRFYPSTKRCSHCGHIQVEMDLSVRVYTCDFCGLTIDRDLNAAINLEQLTTGSSPESYACGESVRPGFRAVLVEAGTEHRSAPV

SEQ ID NO: 52013 - protein, 383 aa, Okeania sp.
LKTITIICYGILNSPKLSNAFFHGLPVPMKSIKTKLKLNNKQKTILAKHAGVARHAYNWGLATCIKEYEETKKRLSAITLHKRLVAEVKSINPWYYEVSKCAPQQALRDLDRAFKNFLTIPERGFPKFKKKGRKDSFYLEGSIKIFQGNYIKLPRIGVVKTYEILPPVPIKNVTISKKADSWYISFKYNFESYPTEKIGETIGVDIGINTLATCSDGSKFANVKAYRQTKKRLVRHQRAVSKKVIGSKNRRKAVKKLAKLHKKVADIRAYALHKLTSWLAKNHSTIVIEDLNVSGMLKNHKLASAIADCGFYEFKRQLTYKCEWYGSELVIADRYYPSSQICSNCGHQQKMPLHLRTYECSECGFETDRDFNAAVNLKNYVYK

SEQ ID NO: 52014 - protein, 523 aa, Okeania sp.
VPECNIGEANITLLAGVFSMNKNSVFVLDKNKKQCNPVHPAAARKLLTEGKAAVFRQYPFTIILKDESTDEIKQLRIKIDPGAKTTGLAIVSDTNIVWCAELGHRGFQVRDNLSDRRIKRRSRRSRKTRYRKPRFLNRKRPQAWLPPSSMSRVFNIQSWVKKLCRLAPTTSISMELVRFDMQKMVNPEINGVEYQRGELFGYEVREYLLEKFNRTCVYCNSKDGPFNLDHFHPKSKGGSDQVSNLVLSCVKCNQAKDNQLPADFLSDRPKLLAMIDKQRKQPLADAAAVNATRWKLKEILKTTGLPVEIGSGGLTKFNRKHLGISKSHWTDAACVGKSTPETLNIRGYQPLLIKAMGYSFRQMVKSDKYGFPRGAPKLRQKSFFGFQTGDMVKAVVPKGKYAGTHTGRIAVRKKVSQMTIKSSRKLRSKSVRQMLNWAHYRFELFLKHKAAEYNKIVLDVSEAYTSKTVSWTGEILNNLGGKKVVTGNDGFRLDRDLNGARGILIKSVVEKFSTTLGDTPSVS

SEQ ID NO: 52015 - protein, 278 aa, Okeania sp.
VSGSHGGHKTVVQLMLAPWCMPIPQLRDNPDYYSQKRDLVNTKDKFPDYKLIHSQVLQDCIKPVKLAFDRWLKANKNGNKLGKPRFKGKGRYRSFTYPQIKLECIEENQINLPKRGKVKLIQHRPIPEGFIIKTVTISRKADGYYITLSLEDKSVPTSTSEEEPTLKNTLGIDMGLKEFLVTSVGESVPIPQYYRKSQQRLKTLQKGLSRKKKGSKRWLKAVKAVAKQHKKIADKRKDFHFKTANELLLKADVIAHVDAERRAGGKLKYKRASIDSFE

SEQ ID NO: 52016 - protein, 575 aa, Halobacteriales sp.
MTMQLTEQFHIPDEHHEACDRLTTLVRKHTRRLLSDEYWQDHHLDAISDHAGQSYTYIRDDDHDAFEGVEEYVYSRFKRCVYHRVTHVLDAHADEYHAFQFVTDTVAERKIRRIGWHRLRNRLFDEDSPYIEWRVLEAVVEQLNDYYDTHGRFPTTYTELVDCPEPNGTLPYAPDTGDYHIHDLSVEDTELVVTLNAPDSLSPDSHHDWPAHDLRFPIHNRFRKLLATGRLKAPTLHASEHGYTLDVPVAIPEPECETVDGRVLSVDLGVKKQVTCVPVEEDDGLTQIAPPEFLVHPSKNKLFRVKRDADGINDRLAELRRQGNAHTDRFDHLLAEYRQTRRKERRLREQIQHDVANELVWLAIESGCEAIVFESLGQLESSGTSGAVAWSISSWARGELLDLVTYKAELVGIDVERVNPWGTSRYCPRCGERGRTVKAPDDHTECRHGGHFHCPACGYECDRDVVGALNVGRKHLSESKMEVATPVAYMEAGNHASFPSPSGARSAGVQSATDQQDVASGRQTRLSRFRAAPLTAKRGETDTGGLHQNHGSNTGLRRPSGSVTLHVLASATDHG

SEQ ID NO: 52017 - protein, 247 aa, unknown
  TnpB Polypeptide
LIERKNNIRPRQEIEDNKIIGFDMSASKFLITKEIEFMNPRFYRMEEERLKRKHRKLSRKQKGSNNKLKGQYKLARFYSKINNRKKDWIHKITHLLSEHFDCIILEDLNIKGMQQFNSGISKSVTLDFSWHQFTAILRYKLEQKGKHLIFIDRFFPSSKTCSNCGHINSQLLLNERKWVCPDCSTELDRDINASINIRNKGLEILKENQIKIIKNNDTTVGPTGVAFRENLRLITQQFLRKKEATCL

SEQ ID NO: 52018 - protein, 588 aa, unknown
  TnpB Polypeptide
MKILISENLSLLNKQENCSVLHLVPFVTGLYQVKSTIVLLHQEFESMIIKILREFLVAILILRKRKKLLTVELVQKNKWMTLNDKRIFSNPNCLIMSWLQTSLLGLTGKEKVFKPFWTNRCLEISQKLWLPIETDSVDLLLNSSNTSLQKTELNSLSWIEIMENQKIKNSQMTSCPSYMSIHVDKMEKEGIRTRKIRMYPDQKQQMILKEWLGTSRYVYNKSLAAVTKNKEKINFFELRNKYVSHKKRNGTINTNVENWELKTPKDIRAGAVKDMVNNYNSNFQKLKNRTVKHFKLIYRKKNSNYSIEIPKNIISIEKNKKKKRNKEGNKEENNTFYLHIYKQFITDGIKMSNDKCLKNNNLQMKHDCRLQYLKGKWFLCIPIDIQIDDKKPKYNSSCSLDPGVRKFQTVYSEDITIKIGIKKDMLKKLYKKLDNFQSLRSKKLITKSHYTRRINKTYFQIDNLINDIHYKTIDLLTKNFRTIFLPEFESQELVKKMKFKRCKRDLLCLKHFLFKQRLLQKCELKTFCKTIICTEEYTSKTCSRCGVLNNKLTTEEIFECNDCGLIIDRDINGARNIMIKIVNETLEK

SEQ ID NO: 52019 - protein, 435 aa, Holophagaceae sp.
MARRVLKKRKQESVEPKLPTRRITFRIYPIPGQEAILVEWLGLHCELYNAAIQERRDAWKRCGIGVNYVAQANQLPEIKALRPELLVMGAHALQATLRRADLAFQHYFDRVKAKKDGSRRKVGYPRFKARARFKGWTYPDHDNWKLLQATPGKHGFLDIKHLGKLRIRGKARTWGKDSTLTITRKGDEWFASVTVACQPVRECGTEALAFDWGLENFITLSTGEKVASPRFLKAAEDRLKKAQRDLSRKFGPDKRHRSRKPSKGWLKAQEVLRKRHQDVQNQRENFHHQESATLIKRAALLVTETLGIQGMTASAKGSVEKPGKNVKQKAGLNRAILDSAPGGFLAKCAYKAEEARCMDVRIEPRKWKPSQTCPGCGRQMKKSLKERVHLCPECGLQAGRDHAAALVMLNVALTGKPWESGLRGADLLPPGRGAA

SEQ ID NO: 52020 - protein, 379 aa, unknown
  TnpB Polypeptide
MEQAFRYRFFPTPEQENLLRRTMGCVRLIYNRALASRTEAWYSRQEKVDYVQTSALLTDWKKQEELQFLNEVSCVPLQQGLRHLQRAFSNFFALRAKYPRFKKKRSGGSAEFTRSAFRWKDGQIWLAKCNEALPIRWSRPLPEGCSPSTITVKLDASGRWFVSLLVDNLGIKPLPPVDKSIGIDAGITSLIATSDGQKTANPQHFNRKYKRLRQAQKTLSRRQKGSQNREKARYEVAQIQASIKDARGDFLHKLTTQLVRENQTIAVEDLAVWNMLRNHKLARSISNAAWGELVRQLEYKCQWYGRTLVKIDRWFPSTKRCGNCGHIKDKLPLSVREWTCPKCGIVHDRDINAARNKNAGLSTTATLMQRVTFWRQGLP

SEQ ID NO: 52021 - protein, 374 aa, Actinomadura sp.
MLKVSQVIKRAYRYRFYPTTEQAGLLSRTFGCVRLVWNKALAERTRRYKDEGERTSYVDTAKWLTAWKQDEELSFLREVSNVPLQQCLRTQQVAFNNFFAKRARYPRFKSKRTARKSATFQNNAFTFRDGALKLAKTTDPLNIVWHRPLPQGVEPSTVTVSQDGAGRWFVSLLVEETVKPLPSTRAAVGIDAGLNHLVTLSTGEKVTNPRHERADRRRLAKAQKALSRTAKGSANRCKTRRRVAKIHARIADRRRDHLHKLSTRLVRENQALAIEDLTVRNMLKNRSMARAISDASWSQLRSMLEYKAGWYGRDLLLVDRWFPSSKLCSTPGCSHMNQKMPLNVRSWTCPQCGTLHDRDVNAANNVLAAGLAER

SEQ ID NO: 52022 - protein, 452 aa, unknown
  TnpB Polypeptide
MWDICNELCFKSKNVYNYGNYIVRQIFIITSKLNNNQPVNNEQQEFLKNINIKVDEYNEYKLINLKKKQAKGKNLNKKYKSLGYFNKDNRNCNYDFLDFVLKDSDCFKDLGSNSSQQTLRSLINNWNSFFKGIKEYKKNPDKYLGRPKLPKYKNTKTGKYPLFLCNNQFRIENGYLYFAWIPLKAFNNMFKINIPKDSKLIQLRVIPRNNIYNMELIYEKEISDINDLKESTRVCGIDLGINNFATLTNNVGTKPIIINGRIIKSINQYYNKKLAYYKSILKKSNNKDWSNNLDQLTTKRNNKIKYYMHYASKIVIEYCVNNNIDTIIIGNNPEWKQNSTMRKKVNQTFVQLPYENFINMIRYKAEDVGIKVILTNESYTSGTSFLDGEMPIKENYNKSRRIARGLFKSNSGKLINSDVNGSLQIIKKVIPNAFEGYGIEGLDLTPVIINVA

SEQ ID NO: 52023 - protein, 476 aa, unknown
  TnpB Polypeptide
VAQAYRFALDPTPAQLRALASHAGAARFAHNHMLALVKAVAAQRAAERSYGVPEAELSPVLGWSLPALRKVWNQRKALCAPWWGENSKEAYNTGLDGLARGLDAWSSSRRGRRAGRVVGFPRFKSARAPRSVRFTTGVIRVEADRRHVTLPRLGAVRTHESTRKLARRIEAGTARILSATVRQDSAGRWHCALQVIVEAKCRPAHARRSVHAVVGVDVGVKADSLLVVATPDGEEVERVAAPKSLNAAQGRLRARQRRAARQCGPYDAQARARRQPSKRWRRTQARIGRTHAHTAAVRRDVLHKATTALAQRHDVVVVETLNAAGMRSAGGARKRGLNRALADAALGEVRRMLGYKSRWYGSHLVEADRFYPSSKMCTACGRRKPNLTLADRTFECDGCGMRIDRNLGAAINLARLGVPPQLGEQSPAGSGSVAGRGATHETEPASAGDAAGCEASTPHHQPVDQTGTASPQGEAA

SEQ ID NO: 52024 - protein, 399 aa, Chloroflexales sp.
MQLVEQHIIKPTDSRFGAIDAAAFAAKNLYNAANYRVRQSFIHEGVYLNYHDMHRQMKDTEQYQGLPRKVSQQVLMLLDRSWKSFFAAIKAYSEKPDAFTGRPGLPTYLDKAKGRYALVYTVQALSRPARAQQVITPSGLAIAVKTKQTRIAQVRIVPRSGFYVVEVIYARDVVPAAVDPALVAGIDVGLNNLAAITSNKPGFVPVLVNGRPLKHSNQFYNKRKAHLQAKLGRKGSTRLMERITNRRNRQITHYLHTHSRRIIDMLVREGIGVLIIGKNDGWKQQIAIGRRNNQNFVQVPHARFIQMLQYKAELVGIEVRTINESHTSKCSFLDAEPIGHRDRYVGKRVTRGMFRAADGRRLNADVNGAYNIIRKAIPNAFGNGIGGVVVHPVGIAPTN

SEQ ID NO: 52025 - protein, 640 aa, unknown
  TnpB Polypeptide
LAASCWWAGSWPRWGSAPWTDGSRSSLRAPCPARCWCSESGRWCASSSRPRTTTSRASRSATGWPTTSASRWRPWWPQPNGKPSPRRPAGGSRRWNRWLPSSQPWRPATLRARPSRPSATACCSAGWRRPGSSATPKAASCPPARPTWTCCSTMPSVGCRWTARCGWRSGAHESPVAATVPVGAPGAGCGYGPVAVTPGVYRCPHDQARELRDSGVMATVIQAYQFALDPTPRTQGSLASHAGAALFAYNWGLELVTTRLDQRKAGQDVRVPWTLPDLRWEWNRAKHDVAPWWAENSKEAYNSGLDALARALKNWSDSRSGRRKGRPVGFPRRKKKRRARVACRFTTGQIKVLPDRKHIQLPRIGVIKTHESTRKLARRLEQGTARILAATISRQADRWYVSFTVEVQRAIPGSNGKPSIVGVDVGVRHLAVLSTGQTIVNPRALEGSLRRLRRLNRELARRQSGSKRRSQSRRWLARVHARAANVRRDSLHKLTTSLATQHGTVVIEQLNVAGLTRNRRLARAIADTGMAELRRLLGYKAIWYGCRLVVADPFYPSSKTCSACGWVKAKLTLAERTFCCEACGLKVDRDLNAARNLARLTQSVAQSGWETRNARGVDVSPGLAGQTTTKREAGIGFLPG

SEQ ID NO: 52026 - protein, 335 aa, Methanomicrobia sp.
VAREEGRATIKGKLELGALERAKLLYTMRLFREAVEKAHHMKKKGAAEEEIRKALYWTIPNAHYCDSAYKRALLYASQEHLKLRKPLLFSVGKGAKRENGNRNIQIDGERIRIKIPRADGKHEWIEGKIKTSKKYLPILKELRNYSYSAGISLRDGKYYVYLSVPMELYARVGEKEKVREDAEHIASFDINSDRINCVLLRKNGELIEVRNHRFPEVNGPGFPKEKARDTRLKALAELIDYAAAHGVKTFVFEQLSRKNKKDTGSKTGNRKLSRFALRELLSHAEVMVRKRGGEFKQVSAAYCSKIAKIIHHDLGMDVHTASALVLGLRYLRALN

SEQ ID NO: 52027 - protein, 502 aa, unknown
  TnpB Polypeptide
MREGFPSGTSTPGRRWRGRPDSLPMKSAGAVRGRSTSAGFAGHEREGSLRMGGGESGAPSSLSPRTAIIYAGGGLTRFYRMLRRYRYRLYPTEDQKTLIAQHLGCCRFVYNWALARKNQAYHDEGISLSRYGLMKQLPALKAELPWLKEVNAQSLQQSIHHLFRAFKNFFEGRAEAPTFKAKHAPEQAFTVPQSYTVDFKQGTVKLPKIGAIKAKYHRTFAGAMKSATVIRRSTGRYFLSVVVEDGQKPPKPADPVPDQTVGIDLGLAHYAVLSTGEKVENPRHLRNAQQRLAVLQRRLARKQKGSKNRNKARLKVARCHQTIADQRQDFQHQLSSRLVRENQALAVESLNVDGMVKNHALARSISDAGWGTFLAMLAYKCQEAGKPLLKIGVFEPSSKTCSVCGYRKADLTLKDREWTCPDCGTTHDRDLNAATNIKQFALAGAERAEEPVDPLPLGRGMIAGKPPAQAGGSSLQHRARRGRPALRLSADHRRKRAGYAVS

SEQ ID NO: 52028 - protein, 369 aa, unknown
  TnpB Polypeptide
MLKAYKYRLYPNKQQIEQIHKTFGCCRFVYNQTLAYRKDLYENKKEFMNKIACNNYVNQILKKEYEWLKEVDKFALTNSVYNMDSAYQKFFKEHSGYPKFKSKRDNKKSYTTNCTNNNIEVSFEKNKIKLPKLKWVKAKVHREFVGKIKSATISQVPSGKYFVSILVETEHTLIESTGCMVGIDLGIKDLLITSNGEKFDNIRTTKKYEDKLAKEQRKLSHKVKGSKNWNKQRMKVARIHEKIHNTRIDNLHKISHKLISENQVIVSEDLAVSNMVKNHNLAKAITDCGWYELTRQLTYKAEWNRRTYTKIGRYVPSSQTCSVCGYVNKDTKDLSVREWTCPQCGAIHDRDINAAKNILNEGLRMLQVA

SEQ ID NO: 52029 - protein, 386 aa, unknown
  TnpB Polypeptide
MKQTLMVKLAPSAEQYQSLLETMEGFNEACNDIAKVAFTIGTANKFRLQRATYQDIRGRYGLSAQLTIRAISKVADTYKRDRSIKPVFKSHSAMVYDQRILSWKGPGKASVLTIDGRQAVPVKLGTYQEVRLAREVKQTDLILRDGIFYLAAVSDAPEAIPDDPTGTLGVDLGVINLAVDSDGEFYSGKTVDKVREKTDTIKATLQSIGTKSAKRHLKKLTGREARFRRSVNHIISKRLVSKAKDTHRQIALEDLKGIGDSTVRHSQRRRHKSWAFYQLRSFIEYKAKIAGVLIKFVDPRNTSRTCPQCGFISKSNRKSQSLFSCQQCGFASNADIVGATNISHKATVNWPIVSPVLIGGLGRDKLTGFSREWLTRDSLLDIIIVR

SEQ ID NO: 52030 - protein, 377 aa, Proteobacteria sp.
MIKTMKYRLRPTKKQAHVLAAQLEECRTLYNHFLATRQRAWAEGQASLSYHQQAVTLPTLKQRCPELSNVHAQVLQNVAVRVDPAFQAFFRRCQGQETPGFPRFRGSGRYDSLPFPQYGNGCQMAGGVLKLSKVGAVRVVEHRPLEGTPKTCTIRRSSLRKWSVTIACAFDPQPVPDTDEAVGIDVGLLRFATLSTGERTACPQFLRADEKDLQRTQRQLSAAPRGTAERRQRRAIVRRAHERIANRRANFAHQESRRLVNRFGILAVEDLAVHRMVHNHCLAKSIQDAAWSQFATFLAYKAAWAGRRCVAVNPAYTSQDCSRCGHRQKKTLAERVHSCACCGLTLDRDHNAAFNILRLGLQSLGRVPRSSRLQAGE

SEQ ID NO: 52031 - protein, 215 aa, unknown
  TnpB Polypeptide
VNRYGGIAVKGGVLKSVNQFFNREYAQLKSVSDRQTEDRKLTNREKKLFLKRNRKIRDIMHKLSKSIVDRAKSRNIDTIVIGHNNGWKQNTDMGKKNNQTFVQLPFNTLTGQIRYKAEEIGIIVIMQNESHTSRCSFVDKESIEHHDEYMGKRVKRGVLRSANGNLMHADLNAAYNIIRKAVPEAFADGIEGIGLYPRSLSIHEFTRMMTSKGGC

SEQ ID NO: 52032 - protein, 360 aa, Coprobacillus sp.
MQLTETVKLYPNKYQTELIKAMMSEYISTVNKLVFDAANGKSITKMTTADVKVNLPSALCNQCIRDAKSIIRKYNKALRNSNTKVRLPVLKKMCCYINNQNFRISDDCIGFPVIINGKSKRISVKTKMSERQKSIFSSSKLGTMRIVVKGHDLVAQIVYDAKEDAASSNNNVMGVDLGIKCPAVSYCPDGSVKFYGNGRKNKYIRRHYNNLRKRFQKAKKPKAVVKINNKEQRIMKDIDHKLSREIVNTAKAHDVSVIKLERLQNICSTTRTSRKNNHSLHTWPFYRLAQFIEYKAKLAGIEVEYVDPAYTSQICPICGSVHHANDRNYTCRCGFHTHRDLLGAINICNSTEYIGNRYTA

SEQ ID NO: 52033 - protein, 383 aa, Actinomadura sp.
MKLVVQVKLLPDAATESALRETLKLCNQAACHASRRAFATGIRGKTALQRLVYGELKAMGLSAQPAIHCVRKVAGAYATLAENLKADNYGPQGSRRRAAVEGAAVRFRKDAAQPFDDRSLSWQLDARTVSIWTVRGRCKNVAFACSAEQAKLLAAHRRGESDLVWRGGCLYLYATCDVPHAPQYVPDGFTGVDLGIVNIATTSDGTVHSGKRVNQVRHRNRRLRKRLQAKGTKSAKRLLRHLSGREARFAADTNHRISKQIVTEAQRTMRGIALEDLGGIRARVRLRKPQRVTLHTWSFAQLGAFIAYKAKRAGVPVVFVDPRHTSQRCSMCGHIDKGNRPDQATFRCTSCGFAEHADVNAARNIAARGAAGWAVSHAAGAAA

SEQ ID NO: 52034 - protein, 205 aa, Mastigocladopsis sp.
MVPIIKPDIKPDSIIGIDMGLKEFLTTSEGEPVAIPQHYRKSQKRLRIIQKRVSRRNKGSNRRREAVKQLGKQHKKVADKRKDFHFKTAKQLLSKYDVVVHEDLNVRGLAKSRLAKSVHDAGWSSFLSILSNKAENAGLLVIAVNASGTSVDCSSCGAKVPKKLHERWHSCQCGCSLDRDHNAAINIKNRAVGHSVLKAQRLRAQ

SEQ ID NO: 52035 - protein, 413 aa, Mastigocladopsis sp.
MFSLTYEFRLLPTKQQIEIFQDWLEINRKVYNYALAERKDWYKSRSCQINACSLHSEYIIPVNAPRPTYASQSKSLTAAKELYPDLKRVQSQVLQQTLKRLENAFTSMWERDFGFPRFKKVGQLRSFVFPQLGKEPLKPGLIKLPVIGWVKFRQSRDIPTDAAVKQARIVKRSSGWYVMLTLQWDVSVPQPLPHGDALGVDVGLMSFIAASNGFCVKRPKFFVDLQRKLKLLQQRVSRKKLGSNNRRKTQAKVARLHERIANTRKDFHWKIAHQLCDQAKTIFVEDLNLVGLSRGMLGKHCLDAGWGQFFQVLEQCCFKRGVYFQKVDSRKTSQICPNCGTETGKKDLSERVHVCENCGYTTDRDVAAAQVVLNRGCAAVGQTVKMLDEGKFTRTPVSQESHGFKSKRANAVF

SEQ ID NO: 52036 - protein, 388 aa, Mastigocladopsis sp.
MLTLTYEFKLKPTKEQVEDIENILTVCRKVWNYALRERKDWVNSRKCKVNACSVECEYIIKADEPFPNYHVQAKRLTEAKKTNPELKSVNAQVLQQVLRTLDRAWDDMKSRNFGFPRLKKHFRMRSFVFPQLKGEILKANQVKLPQLGWIKFHQSRPIPDGFAVCRARVVRKASGYFVMLSLQLDVNVPDMPFHGHPISIDVGLESFLATSDGTLIARPKFFLHLHRKLKLLQRRLKHKKLGSNNRKKLNAKIARLHQKISDTRKDFHFKTAHKLCDQGDSIFVEDIDFRTWAKGMFCKHTLDAGFGQFFNILSYVASKRGKYFGKVDKNYTSQTCPNCDALIGKKTLYVRIHHCPECGYTTNRDVAASQVIRNRGVNAVGQTVLENA

SEQ ID NO: 52037 - protein, 372 aa, Bacillus sp.
MILAQKVRLKPTKEQEQKLWKSVGTARFIYNWTLNRQQENYKSGEKFIPNGVLRKELTQLKKTNELSWLGDVSNNVAKQAVKDACDSFKRFFKGYSEFPRFKSRRNSKPSFYNDNVKMKVKKNEVLLEKIGWVKTSEQLLMNCKYSNPRVSFDGKYWYLSFGAKQDFQKEKLTNVSLGIDVGVKELAVCSNEKTYQNINKTKEVKRLEKRLRRLQRQVSRKYEMNTERVRFIKTSNVIKIEKEIRKLHRRLANIRNNHLHQSTTEIVKTKPFRIVMETLHIKGMMKNKHLSKAIGKQGLYEFKRQIQYKCEKYGIEFIEADRWYPSSKMCSNCGNIKKDLKLSDRVYKCSCGHKQDRDLNASHNLANYKLAN

SEQ ID NO: 52038 - protein, 218 aa, unknown
  TnpB Polypeptide
MDRIKQLRIYPPKNGKCDLIVIYEIEKPEQLSQNGHYLSIDLGLHNLMTCYDSGNGRTFILGRKYLSLERYFHKEIVRAQSVWYAQQSERGIKYPRSSKHIRRLYRKKQNAVKDYLHKVTRWIAEYCKKEDIRCVVVRDIRNIRKEKDMGHKTNQKFRNLPYNKLYIMLEYKLKLYGISLIKQEESYTSQLQERISVAERGGFISVSKCTDASGKCIP

SEQ ID NO: 52039 - protein, 329 aa, Moorea sp.
MLTLTYEYKLIPSQQQIAVIEDILKVCRKVWNYALRERKDWYKSRKCAVNYCSLQQEYIIPADEPYPNYKLQAAKLTKAKKTNPELKRTNAQVLQQVLKNLDRAFNNMREQRYGFPRFKNKYRMRSFVFPQFKTNPMKNEWLKLPQIGLVKMRLSRPIPDGFKIKQVRIVKRASGYFAMLSLQSEVSIPDIPAWGHPLGIDIGLDKFLATSDNELIERPRFLTKLHGKLKLLQRRLKLKKKGSANRHKLNCKIARLHQKISDTRKDFHCLDAVAHGGNHGSCSWGRPPRPHCLPKTALHRFKLAHHLCDQAGMIFVVGEACPQGHRLRF

SEQ ID NO: 52040 - protein, 327 aa, Actinomadura sp.
VRCRRWCCSSRCGTWRPPTATSSTAWPENVGAPRFKSRKDTRQSIRFTANARWSVTDGGKLALPKVGEVKVRWSRRLPSVPSTVTVVKDAAGRFFCSFVVETGDVQDPPEVTGEVGIDLGLEHFAVTSDGRKITSPRFLRRAAKKLRKAQQALSRKQKGSANRDKARLNLARAHAEVGDARREFHHRLSTELVRENQAVYVEDLCVKGLARTRLAASVHDAGWSAFVGMLEYKAARYGRTFARVGRAFPSSQLLGLRTARRPQTPARPRMDLRAMRSGARPGHQCRTQHLGRRTPHRLRVMLCWSPLDGNPLVSGGGGDLKRLMEGR

SEQ ID NO: 52041 - protein, 402 aa, Escherichia sp.
VKRLQAFKFQLRPGGQQEREMRRFAGACRFVFNRALARQNENHEAGNKYIPYGKMASWLVEWKNATETQWLKDAPSQPLQQSLKDLERAYKNFFQNRAAFPRFKKRGQNDVFRYQQGVKLDQENSRIFLPKLGWMRYRNSRQVTGVVKNVTVSQSCGKWYISIQTESEVSTPVHPSASMVGLDAGVAKLATLSDGTVFEPVNSFQKNQKKLARLQRQLSRKVKFSNNWQKQKRKIQRLHSCIANIRRDYLHKVRTTVSKNHAMIVIEDLKVSNMSKSAAGTVSQPGRNVRAKSGLNRSILDQGWYEMRRQLEYKQLWRGGQVLAVPPAYTSQRCACCGHTAKENRLSQSKFRCQVCGYTANADVNGARNILAAGHAVLACGEMVQSGRPLKQEPTEMIQATA

SEQ ID NO: 52042 - protein, 195 aa, Oscillatoriales sp.
AERLPVRQPESSVGIDVGIKYAATLSNQQVFDAPKPLKQAKTKLATLQRQASKQVRGSQNQRKTYKKISRLHARIARVRLDFLHKLTTYLAQTFQLIKIESLNVQGMMANHKLAGAISDIGFYEFKRQLDYKCKMYGANLVLVDQWFPSTKTCSNCGTKKDMPLSVRTFDCPACGISLDRDWNASLNILNWEPSA

SEQ ID NO: 52043 - protein, 416 aa, Thermoprotei sp.
MMIRGALDIIMKNDVRSRKKAHGLCYRILREKYPHLHSKFVQEAYKRALATYRSYRKLLSKWKRLPKEKRKGISPPSPPKVEDNRIIELHVDTYRLEREHGFLTLTISKGDGVYPKFLVIEYDYARRELKGAKLGNSRLLVDNNGAYLLLTIRKNVEVGEHRNKLIVDVNEDSVDCLLVNYDRNEAVLFSIRHDIRKIRTNYRRIRKSVQEKVENLRLRDKLLAKYGRRERKRVEDRLKKITTLLAEIAREHDADLVREDLKDLRLNGKKRSKQLNYRLSTFPYRKFKTYIDYKFYERKLNIVEVNAKKTSITCPICGYVDKGNRVGKETFRCKRCGFSLNAQYVACLNLFSRSDDGKVAIRGRRLFLITRKAAQVVAVDVAPDEPPNPMRWLRGKPVQVPISFENNLNIMHGQPP

SEQ ID NO: 52044 - protein, 255 aa, Staphylococcus sp.
VNLPNIKLNNIVDFIENDLTEEDYANIMIPVKTINTLQEDIEYLFKMNLSDVIELNKYVEQKNKKEQKQKTNHNKKVKEHINVVGIDLGRKNTLTASDDNMNKPLVIHNKRIWNTINKYEQAIEKTDELNKELHITIQKNMSKIVNELLNYYPGASIFIVGKIEGVHSINYLMYDIFIKMFKQKTRIKNIKIISVDEKYTSIKCPKCGYKNAKNRTSSNHFKCKECRFVYLNDDIVACVNMIDKYNQNVKNVRYN

SEQ ID NO: 52045 - protein, 415 aa, unknown
  TnpB Polypeptide
MVSAPVVRSLSFPAQELPQALLGLLAEFRLVVNQSIRIALREDIRSRARLARAAYGVLSAEHTIYKQYIPSAFEVALGVLKAYRRRVRKGRKTNTPYVRRLFLKAENQSYWLDRETGRLRIPIRGTEGVQLMLPLSEWHRSFLSDPSWGLGSLTVTPDRIVVTVRKEAPTPYEPVAAIALDTNEDSLDGVEAAGTEARLLTIPFGGVREVQATHFRRRRRLAKKKAHDRRVKRRLLGREGRRERDRVRQRLHRVSKALVQAAKDTKAAVILEDLTLHGAGSRSRRTNRRLSSWPRGELHRQIEYKAALAGVPIIKVNPAWTSKTCPVCGARRRERVGQDFVCEMCDWEMDRQHNAALNILKTALASDEALARAVRFRPGALRHDAMIPLYDLSALRTGAREEPSGAESPLSVVTR

SEQ ID NO: 52046 - protein, 186 aa, Microcystis sp.
KFKKHSRSVEYKVSGWKLSKDKRHITFTDKKGIGTLKLIGSRDINYYQPDQIKRVRILNRADGYYVQFCIKLDPRDTVKPLTPSQKATGIDVGLKFFLVDSEGNQIDCPNYYRKAEKQLNRLNRKKSKKYRKGKKQSRNYHKARKRSARKHLRVSRQREEFVKSVALRLTLHLHRPASCRGEAFGQ

SEQ ID NO: 52047 - protein, 402 aa, Escherichia sp.
VKRLQAFKFQLRPGGQQEREMRRFAGACRFVFNRALALQNENHEAGNKYIPYGKMASWLVEWKNATETQWLKDAPSQPLQQSLKDLERAYKNFFRKRAAFPRFKKRGQNDAFRYPQGVKLDQENSRIFLPKLGWMRYRNSRQVTGVVKNVTASQSCGKWYISIQTENEVSTPVHPSALMVGLDAGVAKLATLSDGTVFGPVNSFQKNQKTLARLQRQLSRKVKFSNNWQKQKRKIQRLHSCIANICRDYLHKVTTTVSKNHAMIVIEDLKVSNMSKSAAGMVSQPGRNVRAKSGLNRSILDQGWYEMRRQLEYKQLWRGGQVLAVPPAYTSQRCACCGHTAKENRLSQSKFRCQACGYTANADVNGARNILAAGHAVLACGEMVQSGRPLKQEPTEMIQATA

SEQ ID NO: 52048 - protein, 367 aa, Vibrio sp.
MQLAQRIELKPNNIQRTYFAKASGVARFTWNWALFEWQKQYKEFIDGKRDKKPNGKALKKELNAIKKLDFPWMYEVTKYAAQQPFINLDKAYKAFFKGTARYPRPKKKGKSTDSFYVGGDQVVLKGQTVKVPNLGYVRMKEPLKYGGKINSMTISRQADKWFVSFSIDVEFSPVPTENQGRVGVDLGINALATMSKGEVLKWDTPKPLQSSLKRLKRMSRGLSRKQRGSNGFKRLKQRIARLHMRISNLRKDVLHKLTSYLTSHFSEIVIEDLNVRGMMANKRLARHIADVGMFEIRRQLTYKSEWRGNLLHIADRFFPSSKLCSRCGEKNTDLKLSDRTYKCGCGAKIDRDFNASINLENYPCTVS

SEQ ID NO: 52049 - protein, 416 aa, Acidimicrobiaceae sp.
  misc_feature (115)..(115): Xaa can be any naturally occurring amino acid
VVDVQSSAAPGEEVRSGCCGGSSPHGHPMVGRVARPSMQSRCQEVLANVGAVLVRCRWCAELSQSVEGSPVVRHPPGPRPEHHQGLQKVRHRPGPQGGKGDHPVPPPDSGRSQSXARVTNDHGRWTLALRVELPKPELRSPVESRPVVGFDRGVVIPLAGSDGTEFNHPDWLTPGEKRHLRYLERQSARERHARWDRSDGRGKGRIGANERKTYDAIASVQAKAARRRKDWHHQTSRKIADGYSVAVFEALRIKNMTKSAAGSVKAPGTNVAAKSGLNRVILNEGWGTLLDLTRYKMADNGGAVVTVPAPFTSLTCHTCGSTTPGQRKNQALLVCGDTDCGWTGNADFNAACNILMRAVSGGLVPTLSAGIVDDARSRYELEERTDAMPPVGTEAPLKLDGPGKRENRLGQRTVAA

SEQ ID NO: 52050 - protein, 306 aa, unknown
  TnpB Polypeptide
MVRKAKSDSLSKKAYKFRIYPSEEQKIFFAKTFGCTRFIYNQMLADKISYYEKTKGMLHNTPAQYKEKYLWLKEVDSLALTNAQKNLETAYDNFFKNTKIGFPKFKAKRKTKKAYTTNNVNNNIKIVNTYLKIPKIKSLIKIKIHRNIPDNYKLKSVTISQSASGKYFASILFEYENQVIEKKSKTFVGLDFSMHELYVDSEGIYANYPKYYRQEQLKLAREQRKFSKMEKGSKNREKQRIKLAIVHEKVANQRKDFLHKLSKKLIEKFDCVCIEDLNMKALSQVLNFGKSVMDNGWGMFVNFLRL

SEQ ID NO: 52051 - protein, 400 aa, unknown
  TnpB Polypeptide
MNEFRSMINDCIKIGLETNASSLKKLSLLTYSVMKQKYPSVPSYYRLTAISKAAGILASRKKSERRGIITKDPRLRKPLLISCYHFRIRDQYLFFRISRKDKIAKILLTNHTLQIIEKARIEVRSFTLTPTSLSLSLRKEVTTFIPGCFFGIDRNASNVTCGDTERVAQFGVKKVEEIAKTTREVVRSFKRNDVRIRRALTVKYGKRRSERVNQILNKVSKNIVDMAKSSMGAIVFEKIDGLRNLYRKGNYQGKNFRARMNSVPWYEIKRQIEYKAAWEGIPVIQLSKDETRGTSKLCPICGERLLEDRFNRVHRRELWCIRCGRWFDRDVVAVMNISHRGWLRFVQSNKGEASEVMVQEPCKDGVILKVDASKLGRHERNKLLALLLIHPAMTRQNPNH

SEQ ID NO: 52052 - protein, 257 aa, unknown
  TnpB Polypeptide
MVNGNICLQDRFLKLPKMQPVKIKLHRMIPEGWKLKSVTVSREPSGKYFASLLFDCENQTAEKRQAEKFLGMDFAMHGMCVFSTGERAGYPMFYRNAEKKLAREQRKLSRCEKGSRNYQKQKKKVALYHEKIKNQRKDFQHKLSHSLAEDYDAVCVEDLNLKGIAGGLHFGKGIQDNGYGQFLSMLGYKLEERGKYLIKVDRYFASSKICSVCGHKKKELALSERIYLCECGNRMDRDVNAAVNILKEGKRIYKKCA

SEQ ID NO: 52053 - protein, 309 aa, Thermotogae sp.
MKLVKRVKCKLQVNTEQAAVLLETLQRFALACNDILSVSQENRTTNKVRLQHLCYREIKGKYGLQANLVIRAIARVSEALKEKPKQFKPTSMNLDQRTFSFNEKRWEVSISTAAGRLNLPLAIGDFQRNLLAGHKPTSAILYFNKRKKEFYISIALSREVPVPSKDGNVVGVDRGIYNLAVTSNGLEFSGRQAIHVRRRYAKLREALQTKGTKGAKRLLKRLSGKEHRWMADLNHAIPASIVRDAAVLTGTTDTGTFSIVAPVVLSGHADIIAADNIRQVYLGALAEGFSSVDTKAATSSKPTTSVVSN

SEQ ID NO: 52054 - protein, 356 aa, unknown
  TnpB Polypeptide
MARLSKTLKLRVKDKHVACLNEMARSVNFVWNYINELSARSIKERGVWLSRYDLHPFTVGAHKELGLHSHTLQCISGEYVTRRKQFQKAKLNWRKSGGTRRSLGWIPINTNAAKWKNGQVFHNGKYFKVWDSYGLSKYKFRSASFNEDARGRWYFNVVVTANVEASNGTQFTGVDLGCKEAATDSNGDGVQGREYRRLEAKLGIAQRARNKGRVKAIHAKIRHRRQDALHKYSRKLVNENAAIFVGNVSSSGLAKTKMAKSVLDAGWGSLKTMLEYKCDHAGIVFEEINEAYSTQSCSCCGTIPASSPKGRSGLRIREWTCSECGAEHDRDINAAKNILAAGHRRLAVGITVSSGR

SEQ ID NO: 52055 - protein, 368 aa, unknown
  TnpB Polypeptide
MKAHRAILIKLSKDKCDTAYIRRLMALTNLAYRGYEVWVPDLPKTIQYQLYDFKNMKSLVFGAEPKRWFVRAWVPLKTFRVYPDGSVKGDKRAPVVLDFKSSIIRIRQVCRNEHGYVVELPMPKWIIERVKEGGDIKFARVGLKDNEPYLALVTERVVEPHVPSDYMLAVDVNSWSHGIAWGLVKGNRISSFKQEGLNVGKIVGLYKQAIKRERRLGALKRLGLGDTVNAKRAGRLVRRLRSRAYRLIRAEAVFLARKLTKKALRYRAMVIIDDVDWENLKELLMRRYGKKISKLLLSGLKRFVKLLVTQLQWYGVPYEFKRLYSRKCPNCKHKLTQQKGRVMICTNCGFKAPRDMVPMYWVLTPSPP

SEQ ID NO: 52056 - protein, 504 aa, Sedimentibacter sp.
MAKSKTASFVVELGLVTHQNEQAVLDKRFKIAEKLYNKVLYHARTQLTELYKNRRYQDVLVERRLAIKAKDKKRETACNKELQVIQKTFGMTEYALHAYIGRMREAYKKHIDSSTAQKIASTVWISVSSLLYGKGKKVRFKKFGQLESLEGKSNASGMRFKGDRLEWNGLVLPVNIRANDLFVQESLSLHRVKYCRIVRKAFKGGNQYFLQLVLEGIPPVKRNNNTGMPRRKPAPNAEVGIDIGTSTVAVAGDDGVILKELFPEGKSYDRAIHLLQRKLDRSRRATNPANFNVDGTVKQGVKLTWVRSRNYMEIMFRLKDLYRHRAVALKEAHNKTANAILALGNQVYVEDMDFRALMKRAKETTVNKGGRFNRKKRYGKSIGYHAPAMLVGIVKQKAPQEGGALYEVDNFKFRASQYNHVNDTYIKKTRDERTTLVGGQFVQRDLYSAFLLKNSQPTRNETDRTKCSTTFATFMAHHDSCIQTLCQSTERQSRNFGLRDFQFA

SEQ ID NO: 52057 - protein, 390 aa, unknown
  TnpB Polypeptide
MRSFMAVEITTCIRTLRLKVKTEAYPWLNAAAVEVNQVWNYANATSYKAARPFAGSPKWLTGFDLDKLTSGATEYFERIGSDTIQRVNAEFATRRRQCQKAKLNWRVSRGAKRSLGWIPFKAVQLKRKSKAVRFSGKAFRVFEQDRLDGVKWKSGCFAQDAVGDWWLCLPVELPLEQSEAKGHSVGLDLGLKSTVATSDGETLEAGRFYRSIEQKIAEAQRRGHQRQAKRLHRTAARRRRDALHQFSRKIIDQYQWIFVGDVSSTQLTKTRMAKSVLDAGWGMLKAQLLYKGQQAGRCVRIINEKYTTRACSSCRALTGPTGLDMLSVRSWMCVSCGDSHDRDVNAARNILSAGRSPPSISGNESSLSAPPPSQTSSRCEARIRAPKAAA

SEQ ID NO: 52058 - protein, 409 aa, Bifidobacterium sp.
MVRRHACKRAYRFRFYPTPEQEQLLRRTVGCCRKVYNLALEARSVAWTAEHRSITYVQTSAMLTQWKKTAEYSYMNEVSCVPLQQALRHLQTAFSNFFKQTGDYPRFKAKSHGGSAEYTRSAFKWDAKRNELTLAKMREPLPIRWSRTLPRKTEPSTVTVSLDAAGRWHVSILVEETIRPLPARRNAIGIDLGVDSYAVTSDGETIANPRHYKKLAERLEREQRTLSRKTKGSNNRRKAALKVARTYARITDMRRDFLHKLSTRIIRENQTVVLEDLNVRNMAKRCAPKPDPDNPNHWPPNGQSAKNGLNRSIMGAGWSEFRRMLEYKAEWYGRQLITIDRYYPSTQICSHCGAKTGPKGMPGLKVRAWTCPDCGTSHDRDLNAAKNILAAGLAVSVCKDGRTGTKVSH

SEQ ID NO: 52059 - protein, 486 aa, Bifidobacterium sp.
MSQKVRIVKVRHAGASVYLGDDSCRNHCWTRNPERIMDWLCDGWRTRFNQHREHRTVRRYMEDMETHERMWVDVPLGGATVGEPFKDSEARTRCSWLACIPAAILASPMRVENSEWYAALKRKKINGGRVPGFKSCKRDSRYFVCWRNQNKTGNAVYHQVSRKRGVVVITGTVKKEFRKPGETECRWRLSIHVRVSQPVRDYTSVSVNWTERTLVFTNKPSPIQRNATGRQTGIDRGCVHTLALSDGTMLDMPQPSEQEKRAYLRLQRKLARQDTVNSRRGGKTAKFQSKRRKLTLKRMGSIRRRVNNRKDDWVAKTTTRLVEDYDLIALEALNPRQMTRKPKPKPDPNHKGRYLRNGSTAKAGLNRSILNNRWTDIQNKLEYKTRLAGTRLILVNPAYTSQTCNRCGHVAKENRESQAVFQCVNCGNKANADINAAKNILSRAIHTTGMDDAEGVEGHASRETNVSWESPVETPTPAPRMGRPLH

SEQ ID NO: 52060 - protein, 220 aa, Microcystis sp.
MLVVEAKLKNGTPEQYHQLDEAIKTSQFVRNSCVRYWLDNQGTTRNDLQKLCAVLANNKETPWVNKLNSQARQSAADRAWQSINRFYQNCRANISGKKGFPRFKKHSRSVEYKLTGYQLSNDRRKIRFTDGFKAGEFDLWCSQKTLVYYSEQQIKRVRVVNLSKSEKRLQKAQRRLSKQFRKGKKQSKNYHKQRIKVAKLHLKVSRRRKDKAIKDARNFR

SEQ ID NO: 52061 - protein, 387 aa, unknown
  TnpB Polypeptide
MLKSYKIEIKPTEEQINKINQTIGVCRFIYNFYIAHNQEIYKNEGSFVSGMTFSKWLNNNFIPNNQDYLWIKDVSSKAVKQSIMNGETAFKKFFKKETRFPKFKKKNKSNIGIYFPKNNKTDFILERHRIKIPTLGFVRLKEYGYLPINSIIKSGTITKKCDRYYISVLVEEYLKENNLPYSDGIGVDLGIKEFATISDKRVFKNINKTHKIKKLKKSLKRQQRKLSRKYESLKKQNKLKGGIATRQNIKKQVLKVQKLHNRLNNIRTDYLNKIINELVKTKPEYINIEDLNVSGMMKNRHLSKAISEQKFYEFRYKLINKCHQSNIEVRLSNRFYASSKTCSQCGNIKHSLNLSDRVYVCSKCGLIIDRDLNASINLRDNKIYKIA

SEQ ID NO: 52062 - protein, 361 aa, unknown
  TnpB Polypeptide
MILRKTVKAKVFALTKSKEDLLREEYDNFQAILRGFEVPLYSATKQQSQRLLKRLKGKPKRKEYPMVLRRDVFNIRKTENKLAKFWVKIPVHHVRGGVKVPIQLPQNQENLLSLNIREGKLIRKGNHWSLHITVMKEVQTCSESPSTILAVDLGERYIATSVVIAKGETTNPRFYGKEVRGIRRHYSWLRKRLGERKLLHVIRRIGHVERRKVNSILHKVSRDIVNEAKRHKAVIVLGDLKGIRKNARGRRMNRIVANMPYYHLTQMIIYKAQWEGIQVVKVSERKTSRTCHNCGSKGKRPFQGLFKCPNCGLEYNADLNGAINIAKRFSEQVLENGAVFDTAHNSVSDLMMKINGESPDL

SEQ ID NO: 52063 - protein, 360 aa, unknown
  TnpB Polypeptide
MLLTLKSKLITTPEQKTKLLKTMERFNSACNYISKIAFKTKTFGKIKLQKLVYYEVREKYGLSSQMVVRAIGKVSESYKTDKKTPHKFKPHGATIYDERIITIKTPDTISILTINGRIKLPIKFGDYLPLENKRVRGQADLIYKNGEFYLMIVVDIPEEPPNSSFSDVLGIDLGIVNLATTNDGVKYSGEKCTKVRKLYERVRAELQKKSTWSAKRKLKKISGKERRFKRDVNHCISKQIVLTAKGTNRAIALEDLKGIRNGGTVNKAVRKLIGKWAFYELAQFIQYKAKLYGVPVFFVNPRYTSQTCSNCGYVSKNNRKSQSLFICEKCGFSENADINASFNIAHRAKQQYLGLTCQPA

SEQ ID NO: 52064 - protein, 309 aa, Mycobacterium sp.
VVLLEHCRHAQFVWNLAVEQQQMWQPGRRAPGYREQSAQLTDIRAEYDWLAAGSQTVQQQALRDFRQAMQNFLAGTHGRPSWRKAGVHEGFRQVGLKPCHIEKLNRHCARVWVPKVGWVRFRFTRAVPDGVKSYRITRDRAGRWHIAFAHIPCPIPGPRDGSVVGVDRGVAVSAALSTGELLHAPSLTPGEQIRLRRLHQRLARARRGSHRRQRTKLAIGRLRAREADRRRDWVEKATTDLARRFDTIRVESLDVRAMTRSARGTFDQPGVRVAQKRGLNRAISRQGWGRLVARLDHKATGRVQRVPAA

SEQ ID NO: 52065 - protein, 365 aa, unknown
  TnpB Polypeptide
MMAATMATVHQAYRFALDPSPRQRGGLASHTGAARFAFNWGLALVKERLDRRTSGEDVQVPWSLFELRREWNRAKGAVAPWWAANSKEAYTSGLDGLARALKNWQQAKQGRRAGAKMGFPRRKRKGRSRDACRFTTGVIRLEPDRHHVTLPRLGRIRTHESTRKLARRIEQGTARILSATISRQAGRWYVSFTCQVQRAGWGPRRPAARVGVDVGIRHLAVCSDGRRIPNPAPLQQALRQLRRLNRQLARRHGPRAPDGTPRAPSTGWQQTKRQLGRAHAKVANLRRHSLHQLTSALARTYGTVVVEHLNVAGMLGNRRLARRLADAGFGELRRQLTYKCAWRAAGSSRPTPSIRRRRPAQAAGM

SEQ ID NO: 52066 - protein, 476 aa, unknown
  TnpB Polypeptide
MSEAPTTISRAYRMRVYPTVAQSAVLSRLFGAARYVWNWALATRTAAWREREERVNWIALSRNFTELRRAPETAWLAELPREPFNQVLRDQERAFTNFFAKRAKYPRFKRRGGHAGVRFTFDQRRTQVQQGAGRFATADLPGLGAVKLRQTEPLSGRLRSVSLSRDGAGRYFASITADGIAAPAAIEATLDAVGLDAGLRDLLVIAADAGALRRVPAPKPLAAKLAKLRRYQRRQSRQIAAQMQAQGLDPAKPCPKGVRLGVSGRRRRQQRRIARLHAGISDLRRDVLHQATAQIVREAQVIGLEDLSLKAMSRGMGRRGFRRSVADAALGEMRRQIEYKSAWQNRTVVAVDRFYPSSKTCSACGSINRELQLRDTRWSCACGAVHDRDENAAKNIRAEALRLIAASSPATPRSGGSHARGVASAVAAVQNNASPQHRPTKNRELAVAVLHEQADRPKRATRPRKTRMERVEAGSG

SEQ ID NO: 52067 - protein, 496 aa, unknown
  TnpB Polypeptide
LRRAVAVELEISKDISKLLYSVESAYLSIVREVVTYAVVSNITSVTQLQRLFYSKYRQEYPNLNSQLVIQAIRQAAQIAKTFLRRKRKGLVHKPYPEVRSVSIRFTEIAWSYEQFIKSIAPVRVWISPISTGKRGRGSKRFEVWLRPHKRFWQYWWKVLTGEAELASILLIKRKGGKWYAIFIFELKPKKEEPKSIVTFDINENTVAVSKIDLPTTVDKVASWNRQYMVPELYTIKTDFGRLASRYEKVRNAIIEKLKPGFALPSGKYVNVTNTREYRKQVRKLREKDRKVGRVRHVANELTKTPAIIVTEELGENPQESMIEDIMKDELRHRIKQTPFKALEKAVEDKALERGSKIFRVSSYRNSRVCPIHFTRLEETNDWHTLYCSVGHYVNRDYASVLNMAWKTTPRSWTKGVWWNMKREMNWREYEDKHNPVIPQNIVQYIHAVLKTFKASEQCPAVLARGKPMNPAGRADEGWARSPPKKEEASKALKSTY

SEQ ID NO: 52068 - protein, 614 aa, unknown
  TnpB Polypeptide
VNNHGVRRFLSELIKAEKRVLRLAIPDREWSNVALALTHEAKNLYNTCTFLIRQINSAYVFNGETKVYRLKDDLHEYQREALISFNRIIEQVNAKRRLKQTDKTRFVASLEPVMSAVPLYIALDVTVLDNVAKSHVDHEGQIVYRRLPAAAAQQVVRSVIDVWKASLAAQRDFARNPGKYTGRPQFPGFKAKDGYFPLEIPYAMISKGLPKPAKLHELIGVSLKQQERFYAHDLKAGAVSACEKRGWQNAKPQHIRIVADGSEKVKIETVVSMSQAYPEGSFLHRLGVEHKDAFHGLKTVDEREKFILSTLGKDRQCLRIAGIDFGRTNIATVGFSTGHRAVVHSGERPNEIVEHYHKLMDKRLAACATPRLKELQRLKQELEAKGEKVSKAQRIELRQEQKRGFSDPEYRALSSRLNRIKSDFEHKISTDIVTQCVKHKIDLIVIGKNKGWKSDIDSGKAENRRFHAIAHARLISLIRYKAEACGIGVVTTEESYTSQSSFIDGDELPVHSKVKKKTSTASAVDPGQTTTEADQPVPKHNFSGKRSAKNRTWFVRHNVVAQKRFAKVHADVNGAFNIIRKVFSNFRHHAGLTYKFTVRWISPRRGAVVPIGCL

SEQ ID NO: 52069 - protein, 345 aa, Nocardiopsis sp.
VFRNYDLRQHTYQQLRAAGVGSQAAQHVIKRVCDAYRTRRSNLNNGNYGKKGSARRERIESTPITFRPDSGHPYDQRNLSFAPDVRTISLWTFQGRLKDVPFTGSPDQIKALAGHKRGEADLLRRDGVWFLAVTVEVPDAPEIEPEGFLGVDPGIVNIATTSDGQVMAGRKINRYRRRQQRLRQKLQSKGTRSAKRLLKKRRRKEARHAKDTNHQISKRIVAAAERTSRGIALEDLTGIRRRVRQRRPQRVTLHSWSFHQLGQFIIYKARRAGVPVVFVDPAHTSQTCAECNHVDPRNRVDQATFICRSCCVVAHADRNASRNISSRGAVVWGAGRTSHVPPDTP

SEQ ID NO: 52070 - protein, 416 aa, unknown
  TnpB Polypeptide
MSVCYNRTMRTAYQYRLRPTPNQVAQMSEWLNLLRRQYNYRLGERFNWWEQNRCDVNACPLICHLPELKDNPDFYSQKRDLVNSKALFPEYKQVHSQVLQNCIERVKKTFDRFLKGDSNGKKSGRPRFKGVGRYHSLTFPKVKQDCIDGKFITLPSFGKIKLIVHRPIPQGFKIKTATIIQKADGWYVILSLEDSSVPVLSPDLPTMNNTIGIDMGLKAFLVDDAGEEVAIPQPYRKAEKRLKRVQRSLSRKKKGSNRRKKAIKRVAKLHLKVANQRKDFHYKTAKKLLNKGKHIGHEDLNIKGIARTRMAKSTYDAGWGTFLQILSIKAERAGLLAIAVNPNGTTQDCSKCGQKVPKTIRDRWHSCPHCGCELDRDHNAAINIKQRAVGHPVLKARGVLSNSRTAKREARSLCEA

SEQ ID NO: 52071 - protein, 344 aa, Sphingobacteriia sp.
VKWSKAAADQHDITVLRPEFPWYSEVSSRVTRNAIDDLDNAFKHFFRRVKLGQKPGFPTFKKKGTGDSFALREKPKFDVEGRELRIEKLKTRIKMRQRLRFTGTLNQVTISQRAGKFYASILVETDDDNPHAPEKEAVGVDFGIKSLAVTSDGAVFPENNTLKRNLKALKRTQRRVSRKQKGSHRRARAKLAVAKLHKRISAQRQAVLHELSDRLTRDDQVVCLEDLNVNGMVSNDKLARPISDAGFGMLRRMIEYKAELRGVDVSFIGRFEPSSKTCSECGQRHDMPLSKRTIECDCGNVMDRDLNAARNILARGLDTLGSDLKRTQELRKTIGLPMAAMMTA

SEQ ID NO: 52072 - protein, 526 aa, Okeania sp.
MLVMGKSDGSLTGIEAKIEYHPAFEELGALYESWKRSGVNWMQTEKLSESSVEKRLQKKFNIQWAWADSIATEATQCLNQLKIAKNNYITITKLELQLSAKITATKKLITKLEKTLKLATKKGFPHTQARNKFQNQLLGLKSKIHKIASLKRKLKQLKNTERLHICFGYQKLFNAEHNLAENGYKTQEEWSDYWSKKRSGRFFCVGKSQPGGGTMLKVFPLQENGLYQLQVQLPRPLQDKYGQKIQLEFSVSDRNSRYRSPDLDFAINNLKPITISIFRREHKQDNWYVHLSTYVPEIPVVHTRKNGCLGIDFNADSVSVTYVKWDGNIEYLKEIPYKWKNQTTGKRQASMRNIVCQFVLLAEFFECAIAIEYLDFSKKKAKMSGYCQIYNEMLILLSTGIFRETISSRCRRFGVELIKVNPAFTSVIGMINYMGKYGLNSGTAAALVIGRRSLKLSEKIPKCLLRPEDVNKHDRSHWRRVASFIKLHSIRRTQLFQWRKALEGILTHSLWAEHQLSAPVHIETGE

SEQ ID NO: 52073 - protein, 159 aa, Okeania sp.
MKSRFKYRIYPTSGQKQQLAKLFGCVRVVWNDSLACCQEKYKLGENKPTNSELQKLFITQAKKTEDRQWLSEVSNIPLQQSLNDLNQAYQNFFKSTKGQQKGRPIKPPKFKTRKSKQTARFRKGGFKVGQHKVYLAKIGKLKIVSPVKVTCSSIISNSN

SEQ ID NO: 52074 - protein, 475 aa, Mycolicibacterium sp.
MSRHTTFCYCLDPAVEQNEVLSRHAGASRFAFNQCLQIVKTALTDRTTDPGVEVPWTGFDLINAFNAWKKTADAGRVFTVDVDGVADIVVTGLSWRREVCQQVFEEAAVDLGRGLKAWSDSRLGKHKSKRVGFPRFKKKTTAIPSFRLRNKHPKGARAAIRVGDNNKVRSVTLPGIGAIAVHDDTRRLRRMLAKNRAKILFATITCHGGRWWIALNVEAADLHPDHQHPTRPGDGGGSVGVDRGLLLFLVAATADGTELARISHAPKALATGMSKQRRLAKSLSHKKKGSRNRKDAAARLGRHHHRVANVRRHFLHQVSSELVKTHDRLVIENLNVAGMLRNHRLARAVSDAGWSEFARMLRYKQAWRGGLLIEADRWFPSTRLCPQCGTINSEMTLADRVFTCFCGYSADRDTNAALNLARWGDTHHDAHRYPDPQAGGRATNARRRDGADQHPRVGETSPKDAGTDVHTAPAA

SEQ ID NO: 52075 - protein, 670 aa, Mycolicibacterium sp.
MEVTPTEMMAVTSGDDVVSVPRRRGASTAPNFKYEGPVAVIRLEIDASDERTRWRLHAQWDAVFRLRRALQRDAAARCRAYWAARHERDAGSKALRERLGLSRKGLEAAAKRHIEASGWMRDHLTKAVGLHVADEVWETVDRHLFADSSRRRHGAPRIGSWWDFTRIPGRARSHTKDQPTWETYRLVGTLDGHLATYGHCDLPAGVRTAHQAAEQPVGTSILTQPARLAVPERPASKSWWHHDRALAVVFTGLPTGDLVLPVRLSSGAGQWPRLTHFLADPNVWHKIDLVRVRDRKAPGGWRYYAHLLIHGHEYQSPSTIARREQIPAGRRAGVDVNVSNLSVASFPEGKPSHLDSEQLRCTDAQQRAADQAARKARGRQKALDRSRRNTNASHYGPSVRQHKRAQRRTVKGLPAKQIANPGGPRHARAEGVPLRAYRHDQLSRRYQRTRCDHAAESRRTRQAKQARAATMAAAIVAAHGNTVTVEDCCISTWARLWGKRIALFSPGMLVAALTDECRASGGKLTHAGTRSTAMSQHCLCGQRIAKTLAQRIHHCPHCGLRADRDIVSAALAACVELTDPDDPRTARVDYRLAHALRDGLASQQEWEGSVNRHQPPPSPDEGSARTGSHHTVMTSAEQAAPGPPPNRPDHKPGRRGTSRKQPAPKLIGAA

SEQ ID NO: 52076 - protein, 498 aa, Mycolicibacterium sp.
MYNAVLGEFIARSRAVKADPGWQTARELPRGTAAQNTHRGAAFRAVEQRHGLTADAAQSYASSLRKTWVREHLRAQEAQNLGARAFDAVRQWHVGGKGRPRFKSAKRGLRSLAAKDRIGALRPKTDEAGRLVGLQWGANFVIPIASAATSGRRGREQRAELSEIEALVAAGKVLSTRIVRAVIDGRDTYRMQLVCDGLSTQRHRVGEGKVSFDLGPSQIAVAVQHVDGSWSGWVQPLADGIRLDTIRLRRVQRRLDRQHRAGSSVCFGRDGTRTRGRCVWKRSAAALRTTTGVAELHRRVAEHRKTLHGALANRLVGYGAEVACEQLDYVSWQKNYSRSVRDRAPGLLVQMLGRKAESAGGRQLYQYNPRTTALSQTCLCGSRKKKPLWQRVHRCECGVTRDRDLFSAYLGLHVRTGADGVDRLDLQTANTGWLHRQDVDGSPKSSRSATAHKRRGRRHPPSRRSVARIKAGRTARAVMRQSRSARTSTTDQPTAIAA

SEQ ID NO: 52077 - protein, 389 aa, unknown
  TnpB Polypeptide
MLRVFRYRLYPTRAQEQALGETMRLLRALYNGALQERRDAYRLEGRTIGAYEQMRSLKEVRALCPEYAAIHTHLLQDVITRLDRAYQAFFRRCKAGETPGFPRFKGFGRYRTFTFKDAKNRNGARLVAGGKRLELTGIGKVKVKFHRPLEGRVKQVSVSLDGDGHGYVAFVCDEVVAKTLDKTGRSVGIDVGIATFAALSDGGMVDNPRLREAAQPAIRRAARTVARRRRGSKRRRKVAVVLQKQRARVQRKRQQFHHETAKAIVKAYDAIAVEELNVRGLAAGMLAKQVHDTGWAQFVTILSHKAESAGRELHRVEARGTSQQCSACGATVRKGLHVRVHRCPGCGYTEDRDINAARNILSKAGAQPSARGSVVGSFPDPRSPLLGRF

SEQ ID NO: 52078 - protein, 509 aa, Rhodococcus sp.
LDPALPGRCLRPVACHAGGDRAGSRHFAGAGLPRHRDHRTVGPVRPGHRPDRRTHYCCGVRPVRIRPGRGAAARGARARRGRRAPADHRRAGTATDERDGPALGRRSTTRTACRHRSRAGVDGEAAHLPRPGGAGAVAQCPAERDHPRAPARPGGHRLASADPVLDRRGLLWRCAATEIVPTADLESASVAVGVDWSPTTLGAAAITAENPDGLSSDYRGWTYDDRGLGIKLARLQAEGQLLHGKAARLTRLAATAPPEVRAQLEEKIAVLDEHRTAVGIKRGKINRELAFDFARQVTDYATDAQAQLIAVEDLTTLESRGHGRVNNNRAAQSARRKAVDALTHTAAGVGVTVVSVPARGSSAWCPGCNEPLSRPGGYHRAWCEQCKIGGNRDHVAGVNLAKRALLGRNKTTRRRGGLPAVRVTEHAPVRQSRDKHAPTPSRPRHRRVRRSLPTVTPRLGVTPNQHVPASQASVWDTVKPTPPHGDAGSRDTRPSPTPATQVADSMRST

SEQ ID NO: 52079 - protein, 402 aa, Escherichia sp.
VKRLQAFKFQLRPGGQQECEMRRFAGACRFVFNRALARQNENHEAGNKYIPYGKMASWLVEWKNATETQWLKDSPSQPLQQSLKDLERVYKNFFRKRAAFPRFKKRGQNDAFRYPQGVKLDQENSRIFLPKLGWMRYRNSRQVTGVVKNVTVSQSCGKWYISIQTESEVSTPVHPSASMVGLDAGVAKLATLSDGTVFEPVNSFQKNQKKLARLQRQLSRKVKFSNNWQKQKRKIQRLHSCIANIRRDYLHKVTTAVSKNHAMIVIEDLKVSNMSKSAAGTVSQPGRNVRAKSGLNRSILDQGWYEMHRQLEYKQLWRGGQVLAVPPAYTSQRCAYCGHTAKENRLSQSKFRCQVCGYTANADVNGARNILAAGHAVLACGEMVQSGRPLKQEPTEMIQATA

SEQ ID NO: 52080 - protein, 298 aa, unknown
  TnpB Polypeptide
MYKSAVTNYEQHNITGFNVKDLTKNRRRKNLVVEPSYFSKKENGFCIKALGKMESDIKLREVVSKNCILQYDCLKKELYLITPNDYDIKTELHKTKECGIDPGIRTFLTVYSENETYEIGTNLMGKIDKYLEKKDKLISLKDTKKITENKYNKISVKIYERMRNRINDMHHKISRKLLEEYEKIRIGKLSTKSIISNLTGNLDEKSKRRLNVLSHYRFREILKMKAVGYKTEIEEVDEYKTSKTCHKCNKYKEDLGANKTYKCEGCKIEIDRDVNAAINIKNGGLRTVLPPKNKVDIS

SEQ ID NO: 52081 - protein, 298 aa, unknown; identical to SEQ ID NO: 52080
  TnpB Polypeptide

SEQ ID NO: 52082 - protein, 268 aa, unknown
  TnpB Polypeptide
MWCSFNNQNLKIEKNGDFYTVSFPTLEKRIGVPVVARSYQQQWLDRIIGGMAKQGTAKLYKKKRKWFIALPITFDVEASQGEKVMGVDLGLRYLAVASIGTKSLFFKGNQCAYIRRRYAAKRRKLGKAKKLNAIRKSKDKEAQWMKDHNHKISRQIVNFAVSNGVGLIRMEDLTDIRNLAKSKKEAGRNLHSWAFYQLKEMIRYKAEMAGIRVEIVNPEYTSQNCRCGHREKANRSGIRFKCKQCGYTIHADLNGAINIAKAISGLVA

SEQ ID NO: 52083 - protein, 586 aa, Sarcina sp.
MKKRLLTITFALFVFSIPLLSVVNGQALSDVLKDLRSELKMVFEQRTQEQKQFQENYDREHKRMVDIITASNELSLLLYTQESDMTFDLAYALNKVTSAYKDFSKDRKPYDRFVQELNTEIDRYARLIEALRRLPPVMKEIEIEIVPDSLLYHNDSLDQRISDISSSLEKEVIRIAIKDSLSSPFVLDEEGEVHRDSCIRYASELLKMYADNRDVMVADSSHYQAAYWRMKEAYDYAQSRYRELEKYHTLKQSLYWQKNRLNRLKQRKAGLEYQIREKVYDMCYGSKEMFRRQHRLMENGYKTHEKWHNDFIRSRDRNIFYLGSSDESFGNQMCRLKYNSQTGFFTLELRKEYKYCTDKKACSKYIRLGGLDFKYMKDNLAEILESYDTAGNGSYPLSYRFHRTGNRWYLQAIFEQSFTDYRTVSKYGAVGLDYNDGFIELSETDSSGNLTGLKHFTLKNHGTGKKAEAEIRDVIAEITGYAEKRCKDIVIEDLDFKRKKACGTARSGKKSRKYNRMLHLFDYHRYKQTLQNTGFNHRVNIVIVNPKNTSKIGKQKYCGSRKLNIHQAAAYVIARRGQGYNDKLTA

SEQ ID NO: 52084 - protein, 407 aa, unknown
  TnpB Polypeptide
MLAHKIELKPNNKQKTYFQKACGISRLAWNWGLANWEKQYKDGLKPSGMALKKEFNAIKKEQFHFTYEVTKYASQQPFIQLQEAYNRFFKKLGGKPKFKKKNKSIDSFYIGGDQIKVIGKKVKIPNLGLVRLKEEIRFDGKISNATVSRIADKWFISFAIKPAMSYHETCENQASVGIDLGINHLAVLSNGSFIDSPKPLKKNLKKLKRLSRQLSKKQHSRKKGDTTPKSNNYIKHSLKVAKLHKRVADIRKDFLHKFTTYLTDNFQYISIETLNVKGMMSNGKLSRAISDIGMYEFKRQLLYKSELKGNYILENDKWFASSKTCPHCGNNKADLTLKDRIYECLDCKMVKTDRDFVASINLHNQLGKVLPEVTPVEITALNQEARLIDLTSIVEAGNKHHHLSNCA

SEQ ID NO: 52085 - protein, 391 aa, unknown
  TnpB Polypeptide
VKTEKKPKSKKKKDPFVRVEQHIIKPSNPAYEMLAEFCHLSKDLYNQGNYLLRQQFFAHEKQSSYEQLDKILKAKTDFPDYRNMPTAQSAQQNLRLLVKDWKSFGEELKDWKKHPEKYKGRPKPPHFLRKDGQHILTLTNQECKIRDGKIVFPKVFQGFTVEPQFVREDTNSPREIKSFQQVRFVPHGGFITIEIVYRIKEVPQRKPNGRYAGIDLGVNNFVTMAFSTGDAPLIVNGRIPKSINQFYNKRLSSLRAMAEHLNERKTTRRIQRLIDKRNAKLKDYLHKTSRLIVDTLVAQNVPTLIIGLNRDWKERTPFTAKENQHFVGLPFTRLIEMIEYKAYEHGIAIVVTEESYTSGTSFLDGEPQHANFTIKSVVFIADYSVQTTEHA

SEQ ID NO: 52086 - protein, 387 aa, unknown
  TnpB Polypeptide
MYTQKGSESLVMNKAIKYRIYPTTEQKILFAKTFGCCRKVYNLMLSDKISSYQVSKSFGKQTPAMYKDEFPYLKEVDSLAPANAQIHLQTAMKNHFDKKRKKRTGFPKFKSAKRSRRSYTTNNQSGTVALVQNGIRLPKTGIVKAVIHRYPEEGWIIKSATVSQDSTGNYYASVLFEFEKDIIPVPVSDNVIGLDYASDGLYKDNYGNTGSDHKFFRESQKKLRREQRCLSRMTGSKKDEPKSNNYMKQQLKVNKIYRHAANQRLDHLHKLSTGIANRYDIVCVEDLDMKAMSNKSFGNGKATMDNGYGLFLKMLKYKMNDRGKYFIKVDRWYPSSQICSHCGKRHPEMKNLRNRTMICDCGFEYDRDVNAAINIMNEGLRILKEAV

SEQ ID NO: 52087 - protein, 398 aa, unknown
  TnpB Polypeptide
MPAGDEGLLTLSIGVRVSPEPGAIELLKRYNTALNYAINKILRLDLKKIGEIHNALYRELKEWFDLPPRTAIDCYRDALTNANAWRNNPKKGRKPRVRKLSMWLYPGQSYWVRDGYVEIAGGIRLSIIGWDRRYDQYENGEARLVYRGDKMMLWISKKIPRPEPYQPRDAIAVDINERKIVYGDDGINKERDTKIGEAHRWKKLAEDLQKRYSSPRYPAWRRRKGILNRIRSYHRKARNILEDWARKTSLRIVGLAKKLGHAVAREDLTGLINSLRKIKNKDHRTKLIIMGYSRLGKWIDWQAEKQGVPLAIVNPNGTSSKCPKCDSKGLEEIGYRRLRCPRCGFEGDRDVIGKLNIRKRALKKLKIKANPGGVLAPLTAPQMTDVNPNRWGEPMSRR

SEQ ID NO: 52088 - protein, 465 aa, Moorea sp.
MMAKTKKQIGVQQILLHPDKDTEAVLTYLCEQSGKLYNMGVYFARQTFFKTGKILTGKFDLVYEKSVGKSKIAKSLPSTPAQQTLLSVAESFKSYKKLRECWFKGQLEDKPRPPKYLKGSKLFKVAYPNSGGQKPKVKDGQLHFSLGLTVKRWFGIKSFSLPFPTNLEGRKIKEWTILPKNGAFYLEVSYQIPDPVIQQQSTNEALSIDLGTSSNLAACIDTLGNSFLVDSRAIKSFNQYWNKQVATRKEGKPQGYWDKWLDRVTRKRNHRVRDGINKAARVIINHCLKHGIKTIVLGWNERFKQNSNMGRLNNQEFVQIPLGKLKDRLSQLCDLYSIHLEVTEEAYTSKASFLDGDSLPKFGQKPIGWKASGRRVKRGLYRSANKSIINADLNGSANILRKVARKLGLNLNRLGRRSLTTVARIRLWKLPQFNLSAESPRLMTEECQLNLLPLTIDKPGDAVLD

SEQ ID NO: 52089 - protein, 136 aa, unknown
  TnpB Polypeptide
VHARVANLRRDLLHPISTELARGYTSITIEDLNVAGMLTNRRLARAISDAAFGELRRQVIYKATWYDTELIVASLWFPSSKTCSGCGNVKADLTLSVRTYGCGRCGLVIDRDVNAAVNLARYTPRSPKTTPLTAAA

SEQ ID NO: 52090 - protein, 495 aa, Nostoc sp.
MPFLTYVKGLPTPREELNSLGLTKFEMFLTAYSSVFHKAACETANHLLSTRSFNKSKWNTHLQKTYGISRRHATGVIRFTEGAVNASKESRKLHIKTLEGKLKSLNSWITKSEKKLSESAKFYAKKNWHNSKTGCRFPLACSLKFRNTNWNNLRFQIHHKKRRAYKLSQQIEHLKTAPIQTVIPKNQIFVVGSKDESFGNQVCQWDGNTIKFRVPACLESRFGKQVITKLGNFERNINRLPKDGAKTWHFFRKHNKWNAAVQFTPVPVNRVSRHSAYGCIGIDLNPGSIGWAYIDKDGNLKSHGQIPLQIGLPSGKQDAQIVEACLQLAQLATTFACPIVCEKLDFSAKKEQLRELGKKYARMLSGWAYSRFYKLLDSISSNRGIYLMKVNPAYTSLIGMVKYARQYGLPSDCAAALAIARRGMRLTENIPGSITAYLSVKDGKHVWSLWNQLNNILKSCAEISFRHDYFSISNWELVVKRWSEKFGQSKRATHF

SEQ ID NO: 52091 - protein, 399 aa, unknown
  TnpB Polypeptide
MQRLQAYKFQLRPKAGQESLMRRFAGCCRFVWNKALALEKKTYENEGKRLGFSLLCKLLRDWKKEDDTSFLAEAHSQILQQALKDLDSAYKNFFAKRADFPRFKRKGVHDAFRYPQGFKLDEGNSRVFLPKIGWVRYRNSRRTEGIPKQVTVSFAAGKWYVSIQTEREIPTPVHPSASAIGIDMGVARFATFSDGSSITPLHSFRKHEEKLAALQRKLAKRTKFSANWQKLKIRIQRLHRKIVNVRNDFLHKATTAISKNHAVVVMEDLKVRNMSRSASGTLEAPGKNVRAKAGLNKSIQDQGWFEFRRQLAYKSAWFGGNLLVVPAQYTSQTCSRCGCVDRQNRQTQAKFKCTACGFEANADHNAALNILAAGHAVSACGAGRAQAPALKQEPTCGAA

SEQ ID NO: 52092 - protein, 374 aa, unknown
  TnpB Polypeptide
MPKIIADKETQEQFMYITINGRLIPKSNENYMKLCLLAYRFKQAVKHGINLVLSDVPQKQAYKELAKILPSSIYGETAYKYAKLLVEGAREQVNNEVIVNRISTKRKWIASRGGVTWRGNLNIKLISTDKVLVRYYDGEWLEFKVRFGEKYLPLVNELIELANQKRTSYGASISFKYGKPYIHVELPLWLYLKHLLAPKPNGYGLIAGFDINSDRLNAVIIDRECEIIALRTFWYSEAISHGFPRNKAKWIRLNALAKALKWCRRIGVDYVVFENLTKIKTRRFTSIPNANRKIAKFPKKQLLKNSIIKALKLRFTVILVNPRGTSSSIAHKQIMREKGLDKHATSAYIIAYRGLKTLKEQEPSITPSTTSTIN

SEQ ID NO: 52093 - protein, 396 aa, Limnoraphis sp.
LIVFEFKAQGKDSQYQSIDEAIRSYKFVRNSCLRYWMDNKMVSKYDLNKYCKVLAKQYPFAHKLNSQARQSAAECSWSAISRFYNNCKKKVSGKKGFPKFKKHARSVEYKTCGWKLSENRKAITFTDKNNIGKLKLKGTYDLHFYQPEDIKRVRLVRRADGYYVQFCISIDVRIETEPTGKAIGLDVGIKYFLADSFGNTIENPQFYRKAEKQLNRANRRKSKKYIRGVKPQSKNYHKALCRYARKHLKVSRQRKEYAKRIAYCVIHSNDVVAYEDLNVLGMIKNRHLAKSISDVAWSTFRHWLEYFAIKYGKLTIPVAPHNTSADCSNCGKKVTKSLSTRTHVCSCGYCEDRDVNAAKNILKKALSTVGQTGSLKLGEFAPLLMLDDSCVGKCDP

SEQ ID NO: 52094 - protein, 395 aa, unknown
  TnpB Polypeptide
MYAIKRELKLNNKERTRLAGCAGLKRFTYNFGLSLVKDSWQFEEIIASDSKRIDAAKKIFNNELKTRAEYQWISKYPSTVYQSAFQDLKDACRRWRKGQNDLPVFKTKKDKQSFTVYKTAGIYPEKGKPPLLFTNRQVLYPGNKITIPGLGEFRLKEQIPFICSAQTFTISREADKWFVSFVIDAQKVPPLFHEVVEPTGIDLGITTFATLSDGQTYEAPKPMKKAKTKLALIQWRNRNKQLGNLLQGIRASSNAHKYYRKLAKHHARIANQRRDFLQKTTTEISVKYAQIRIEELNVQGMVANHKLSAAISDLGFYEFRRELEYKSPMYGTKVELVDRWFPSSKMCNKCHHIQPMPLSERVFVCGECGYTVGRDLGAAINLKHAPDEVVRQALP

SEQ ID NO: 52095 - protein, 296 aa, unknown
  TnpB Polypeptide
VDSVALQQSLRDLDRGFVNFFQKRAAHPVFKSKHNRSHQSYRTVKQGDNIRIVGKYIKIPKLGYVKIRQSMEIGKINNVTIERTPTGKYFAVLNVEFDPQPRPNQGGCIGIDVGIKEFYTDSNGNVVSNPKYLEKSMRKLIREQRRLSRKQKDSKNRSKQRVRVALIHEKITNQRNDFLQKQSTMLIRENQTICIEDLNVKGMIRNHKLAQHIGSVAWSKFFEMLAYKSGWYGNDIIKVPTMYPSSQMCSRCGYKNPLVKNLAVRTWECPVCHTVHGRDMNAGINILNKGLQMQSA

SEQ ID NO: 52096 - protein, 464 aa, unknown
  TnpB Polypeptide
MPRQRPTEAPKVVHRTARIALRTTEAQRRRCFGLLRSGGDVWACVLELSAIRRQRGAAPLVTYQELCRELAADGPRIFGELSSFGARSILRRYSDSWMATAKRRRGGEMSARYPRRKKGLVPSRYYAGTFSLEGRRLRIPVARGAAPLVVRLTREVPYPAGSIRSVTLLADGARLCVDVTAEIEIESYEPGEAPDPDRIAGVDLGIIHPFAVVADEGSLLVSGRALRAESRLHLAESKARKRTVARRAPSKGQRGSRRWKKYRARSKVLGGRHHRRLAQARHEGAKAVVDFARANRIGTLVVGDPRGVLDKDAGARQNLATRNWRPGQLIDVLKDKPKRPASKSSWLTNGAPRRRARVVRRGCPSPRAGSSPACTVVWWPTATWWGPSTSLRGLLGVESTSTRKGWRSRTVEPAGICPAGPGVTRRRVALEKRGQLVGLGPAVARLGTSRDELEESLAEDASAA

SEQ ID NO: 52097 - protein, 540 aa, unknown
  TnpB Polypeptide
MGTKQPRESRHPKQKTRTFLLELPLVVEQGQASRLRAHLEAGRQLYNAILAEGQKRLRHMRADAAWQAAHAIPRTHKQERAAAFSTLRQQYGFTEAALHEAVKSLRVCWIAEHIEAVLAQTLATRAYRALNRVCLGQARRVRFKSRGRGLGSIENKRNDTGLRFVLQKPEEGHQGVLIWGRDQLPALIDWDDAVVKHGLDHRIKYARLVRRPASSARAQGADAIGTRYVVQLALEGVPYQKPKHTVDRDTVGMDVGPSSVAIVARQGPARLVVLAEELAPDEKAMRRLQRQMDRQRRAANPEHYDEQGRPKKRGKGAPTWKQSKGCLAIRRRIAAKERKLAAHRKSLHGRLVHEIVAVGNTIFTEKLSYRGWQKQYGKSVGLRAPGMFIDQLKRTVASTGGTLHEVPTRSTKLSQFCHGCGHTVKKPLSQRWHQCSCGIGPVQRDLYSAFLAAYLDPGDFTPSCARYAQYWEGAEARLRTEHERLKERANEGQVLPRSFGIPRAGACLSKSQSELTQEPIFLLRRGRWEAWKERSEPSAL

SEQ ID NO: 52098 - protein, 383 aa, unknown
  TnpB Polypeptide
MCYNSKNLYNYANYIIRQQFIKDGTYIPYREMNKNLKITQEYKNCMSQPANCTLRLLDKNWKSFFTAIKDWSKHKEKYLGIPKLPKYLKPDGRYIWMIPNNSCILNNDGTIHFRIKKLQCCEWKTNAKGRLIQIRFIPKGSCYVMEIVTEIEVSDVKDVYSKNIASIDLGVNNFVTMTNNIGLQPIIINGKGVKSINQFYNKRVAKLKSELQRCNNNHWSNQLKSMSFKRYNRIKNFMHHTSKYIVEYCKDNNIDTIVCGLNKEWKQNCNLSKKVNQNFIGIPYDMLIKQLEYKCQNYGIKFIITDESYTSGTSFLDNELPIKENYDKSRRIKRGLFKSNKGLINSDVNGSLQIMKKVFPDAFNSYGIEVCLTPIIINIVNTI

SEQ ID NO: 52099 - protein, 417 aa, Clostridium sp.
LKLAFKFNPKLNSLQSSIIEELSYHTTKLYNIANYDNLQKGVKSYLQMNTMYNINWHKDFLHSHNYQHCLRVLEKNWKSYFKAIIDYKKNPSKYLGNPRPPRYKNHNDRKNEVIFTKASIRLKDNILMLSLSKAMKVEYGVKSLNFEVSDKLQSLLNWNSLNQVKIKWDNSIKKWYLIIIYEKEESLIPKDFSNIMAIDLGLNNLATITFLENEDSHIINGKPLKSVNSFVNKRIAYLQSIGMSMTGSAKHKDTKAITKLRRYRENYINNYLHKASRQVIELALNYKVKTIVIGDIKGIKLNMNYAKAFVQVPIQRFKELIEYKARLLGIEVKYQKEAYSSGCSALDLESINKVSYNKNRRIYRGLFKSNTDIKINADVNGSLNILRLYVKDKCIPKLIKIAKDKGYVNSPVKQRIA

SEQ ID NO: 52100 - protein, 469 aa, Streptomyces sp.
  misc_feature (389)..(400): Xaa can be any naturally occurring amino acid
MKKFQAQPGFVVQAFRFALDPNAAQEQALRSHCGAARAAYNWAVGWVEASWWQRKAEESYGIPADRLTEWRPWSLPSLRKAFNQAKHADPRFCGWWEDNSKEAYSTGLAGAAAAFDNYAKSKQGKRRGKQVGMPRFKSKRKARLSCRFTTGTIRVEADGRHVTLPRLGTIRVHEPTAKLLNRVQAGTARILSATVRHERGRWLVSFQTETAREIRRVARPGAAVGIDLGIKTLAVMADSTGAIRQIPNPRHLDSALTALRGASRTVSRRQGPDRRTGQQASKRWEKANAVRNKVHHRVANLRADALHKLTTTVTGEYGTVVVEDLNVAGMLRNRRLARRIADAGFGEIRRQLTYKTRRNGCRIVAADRWFPSSKTCSGCGAVKAKLPLXXXXXXXXXXXXAAAAVTTGTGVAGDQDTAKVSKPRGADRRTRITRPRRKAGTGRAGGVTLPNQRQQEAGDRPQAEPLMLW

SEQ ID NO: 52101 - protein, 393 aa, Acidimicrobiaceae sp.
MAHRYRLTPESAQLERLARHCADARYVWNLALEQANYWRPGRGSTPGSAERLRQLAEARRSSWLGEGSSSVQQQALWDFDRALQNWWGGSHRRPRWRKAGLDEGFCVRDVTVVRLNRRWATINVAKLGPVRFRLSRPLPEAFGMAHITMDRAGRWHVSFTAPQPVLERTTTGRSIGLDAGVVATLTGSDRMRRHAPGLGADEAHRLRRLQRKLARQQKGSNRRARTKSSIGRLRAREADRRKNWIEQTTTELVGDYDLIAIEDLRVKNMVRSAKGTVEQPGTHVAQKRGLNRAISAQSWSQFRRRLEDKAATCDVTVVAVNPAFTSQRCSACGHTEEMNRESQAVFLCRACEHYDNADVNAATNILAAGLAVTARGGTPRQGPDETRTRPVAA

SEQ ID NO: 52102 - protein, 367 aa, unknown
  TnpB Polypeptide
MLMAHKVELRPTPDQIDYFEKACGHRRHCFNHMLAWFSQRDSDGNLIFKWSKAAAYQFFMKVLRVEFPWYSEVSSVITRNVIDDLDNAFKHFFRRVKNGEKPGYPKPKKKYVRESFAIRDAAKFDVKNKTLRIEKLKTRVDLRQPVRFNGQFKQVTISKRAGKYFASFLIDTNEYNPNDVDRQPSVGVDFGLKSLAVLSNGEVYENYKLLKNNLRKLQKLQRDLSRKVKGSNGYAKAKLKIQKLHFLIARQRAAIAHQLSHYLTKNFDRIVIEDLNVKGMMKNRKLSRAIADVGWSMIRQFIEYKAKLRNCVVMIADRFFPSSKTCSNCGEVKKNLTLEDRIYSCDSCGFEIDRDLNAAINLNNYAV

SEQ ID NO: 52103 - protein, 546 aa, unknown
  TnpB Polypeptide
MLSNRVLTIRVSGKERKEKVRKLLLDLAHFKNLWILLIRRYKELYGYYLTDQSILYGLIADREYSSKKEEKIQKFREIKENILQDEKLKEFLKALKEQKRRTDNNYLLQQVIRSVVKSFNDYRKAYREYQKNPAKFKGVPRPPKPKKLKFLMNFSVELNVNTFEQLDDSILIKLRINNKEFLKVKLPKGFNHPVKSIRLKIFGTDVYTDVVYKVEQIATSTTFTTSTTSKTSTTSIAGIDLGLNNLIALVSTNPELKSLIVSGKEIKAFNQWFNKKKAKLQSEIDTLKNKLSQVENEEKAQSLKQFITEKLIKLKELSAYRKRKIDNDFHKISRKVVDLLIATGHKKLYIGKGATESKDGIDIGKKNNQHFVSVPFRRLIELIKYKAEESGIEVEEIEEAFTSKTSPLADILEVRKVGQKYLEAKSKEDSSLIKQLLEELKELQQAVRRYRGLLKDKVLNKLFNADLVGAYNIARVGESSLRLIGNLKLLFIKLCNPVRLKLIEFLYEVSPESLRRGIGSSSSPGAGLSPSDYQLCGNLNTFCYNW

SEQ ID NO: 52104 - protein, 379 aa, unknown
  TnpB Polypeptide
MEKVKIKHKTLKIKIYPTNKQKKVLNEWSNTFRYIANVTIEKREKNKEKNNFFDLRNKIVTAKNVPEDMKWQLKVPKEIRANAVKEVVSNYKTSFSLLKKKKIKYFKMKYRKKKKGHRYLILSKSGVSKKDNTHLNIFPKTFGKKSLKMRKDKAFQNVTKILDGIKVKNNYIFLPVEIIEVQNHARAKYDICALDPGVKTFQTMFSNEEVIKFGDQSKILKMYELIDDYKSIQTKVKKYFKNKLRKRILFLNEKIRNKVDEIHWKTINYLTNNYQNILLPKFETQKMTKNLHRKVNRKMMFWSHYKFKQRLIWKCNLKNRNIKIVNESYTSKTCTNCGWLNHNLSNKDYFKCNECCIEIDRDTNGARNILLKELAGYES

SEQ ID NO: 52105 - protein, 361 aa, unknown
  TnpB Polypeptide
VGFLAVFCEAHKAWRRKITIARKDGDKRWLRKLLRREPQDPFTNGMQRKVPIWFDSRFGAIEHSKRIKLCSYVARVSTLRRGVKLTVPLNPAQYHLELLQRGTMKSFQIVKRDGKYYVHVKVEYAVPTQPVHAIRGIDLGVKRSMASVMLKPNQPPRSSDFSIRRDRLKQVQLNRLEKRIGELQQARKWEALKRIRHKRLHVGEYYDRLAAKQIAATSHGSLVVVGYPKGIKYENYRGNANANQRRRLARWSYGRIIRYIEEECTKQGISTEAPQELWSSRTCHRCGSRRTERLTQSLFHCWNCELVYNADYNAAINIGSPFLPMATTRRATDDLAYARDEQAREIVACEPRSPPPFMGGS

SEQ ID NO: 52106 - protein, 396 aa, Leptolyngbyaceae sp.
MLVFEFKTYGKATQFNAIDEAIRVTQFIRNKSIRLWMDGEAKSWIELSRHCALIAKAFDFANKLNSMARQASAERAWAAISRFYDNCKKQIPDKKGFPQFQKDCRSVEYKTSGWKLSENRKSITFTDKCGIGRLKLKGTRDLHFYQPDQIKRVRLVKRADGYYVQFCMSVDRAESIEPSGTAIGLDVGLNDFYTDSNNETIDNPRFLRKGERRVKMAHKRVSRRVKGSNNRRKARQILGKRHLKISRQRKDHAVKLARCVITSNDVVAYEDLRIKNMARNHCLAKSINDASWYQFRVWMEYFGKVFGKITIAVHPNGTSQECSSCGTVVKKSLSTRTHACQCGCMLDRDHNAARNILSRGLATVGHTGSFALDASNAWGEDTSTHAGANLPEQVTS

SEQ ID NO: 52107 - protein, 402 aa, unknown
  TnpB Polypeptide
MRLVERHIIKRADRRFEVIDRAAFASKNLFNKALYTTRQAFFQDGAFPSYPTFYHAMKGEPEYAALPRKVAQWVLKQVCAAWDSYRQARAAHDATPSAFLGRPHLPRYKHKQQGRNLLVYTAQALSFPALRNHMVRPSMLGITVRTRQQNIQQVRIIPRIGFYVVEVVYERAPVPAAVNPSLYAGVDIGLNNLAALTSNKAGFVPRLVNGRPVKSINQFYNKRRAELQNWLGTVGTSRRLERITTKRTRRIDHYLHTASRRIIGLLVAQGIGTLVIGKNPLWKQEAHMGRRNNQNFVSVPHARFIEMLTYKAVLVGIQVQITEESYTSRASFLDADPLPVYGSAEAPAFSGRRVKRGLYRAADGRHINADVNGSYNTIRKVAPEAFAQGSRGCVVHPIRLAV

SEQ ID NO: 52108 - protein, 383 aa, Ruminococcus sp.
MEHKAIKGVNTMANKAFKFRIYPNNEQKVLFAKTFGCVRLVYNYWLYKKIKQYKEYETTLNYNACAKEMAELKKMEKYSFLREVDSVSLQQSLRHLDTAFQNFYKQPKTGFPRFKSKKCKKNSYSTVCINGNIAISNGYLKLPKVGQVKVKQHRNIPNEYVLKSVTVSQTPSGKYYASILYEYENQVQEQELHDFLGLDFSMHELYKDSNGNEPAYPGYYRRAEKKLKREQKKLSLMQKGSKNRDKQRIKVAKMHEKVANQRKDFLHKQSRQIANAYDCVCIEDLNMQAMSQALKFGKSVSDNGWGMFVTFLKYKLEEQGKRLVKIDKFFASSQTCSCCGYINKETKNLAIRAWDCPECGTHHNRDVNAAINIRNEGMRIALA

SEQ ID NO: 52109 - protein, 254 aa, unknown
  TnpB Polypeptide
MLVEVIRVETSLGKIVITYSVGREKISRRRSTVGRDVKKKLMKLREGDRKRDILYKVASIIEELARENNAVVVIGDIDGDDKEKMSRNKGGRLRHRIHRWSVSKLIELLEDRPIHVVKVSEKGSSSVDPFSKRRIDGYSPLVIRSAVKRASGRYKAIKIVLRIAYVDGRVFERDVVGAINIGLEYLSSGGRPVAFGSTGAHEVLGETGDPEPRCNPANGNTSIWKYHQIPLAGKRVSLGARGETHSRSPSRVMA

SEQ ID NO: 52110 - protein, 323 aa, unknown
  TnpB Polypeptide
VGFLTKTQAKQSKPTFKSRKYYSQSSTIKNVKYKTQAGSQTQIEVLSPHHLRIGKKNGLIIRTNSLNTLRNVKIQKAVISYRQDLDRYYISFSVVKNRQQLAQYKEKSNKTGKAIGIDLGLDKEWLVTSDGERFGVPDTFKVEKEMRKRQSHYDRNRTAIEKQVARYNCEHENKIDKYNFSNWQKLRKTRSKYQLKINNKRYDYIQKITTELVKNYDVIAIEDLKVKNLMRNHKLAHNIANASWSMFRRLLAYKCEWYGKKLIVVVPQYTSRICSQCGEKNPRFAHMKVRDWLAVREWDCPFCHAHHDRDINASKNILARAIS

SEQ ID NO: 52111 - protein, 659 aa, unknown
  TnpB Polypeptide
MTVILKKKPPDKPLDTYKAIKIPLKHILKNYDINQPKINDLVVMAHKIVIHTLQFMKLYSLDYYDKNNKLPTIDKTFINCCMKIVCKESSTGRPAKKEIQDLKDTLTKFYDKHYKPIQLDDLQYTHMNTILDYLTMDILTVYETNIKQHYIEYIERYVNVIWKKKFFTEKIRKIKQNKTEKDNSVNKLNNQLRRIKNDLLNVENTKYKSKDFYHKWIKEQKKLVIPVRKFKKDNIYYDIQCSPMDYLPCMIYMMKQIEKEEVSMNNPFPLRSDIIPKHIRIDTTTLVHSLLTKKYGNKSDYLFKGNLKKNEDKIWEFFFRAEIQCFNKKDYSFHHMIETDGISTSILLIRTDNVGKRVKQAKTQPNEKYIDELKDYSEFKKMKVVSVDPGKCDLLYCVDGDTKDCNKFRYSQDQRRKECKIKKYHKIILKEKETKIKRKTIIEWETQLSLHNRKTLDFNKFKKYIKEKNKINKIILDFYCKEVFRKLKLNGYINRKRSEQKLLNRFESKFGSPDKVIIGFGDFEQRKHMKFKEPIKGKGMRTLFRKYGYKTYLVDEFRTSCKCANCGNDCCKFMTRESPKPYRSNLQLVHGLLKCKTCLGFWNRDCNGAVNIWKIIKNTILDKSRPGYLQRSCTSQLNDVKQNETQSNLSGIVNAIPKS

SEQ ID NO: 52112 - protein, 376 aa, Clostridium sp.
VIKAIKIRLKPTNEQEVLMFKSAGCARFAYNWGLSKWEEMNKNGFKPSKVKIRAEFNNTIKKDREFVWLKEVSAQVTQHAFEDLNDAYNNFFKGLSKHPKFKTKKRSRQCFYVRYDAIKFKDGKVNLEKIGKVKYKTNYDTPNLPKYINPKCYFDGKYWYLTLGFEHNENQVELNKDLSVGIDLGVSNLAIVNCLDKPIKNINKSIKIRKVKKKLKRLQRQVSRKYEANKKGKEFVKTKNIIKLEKQIKLIHRKLNNIRLNHIHQATNKIVKLKPYRVVMEDLNISGMMKNKHLSESIQEQKFYEFIRQMKYKCEFNGMEFVAADRLYPSSKICSCCGSKKEDLKLKDRVYVCDKCGLEIDRDKNASINLGAYKIA

SEQ ID NO: 52113 - protein, 412 aa, Halogeometricum sp.
MDWTRNTVRQTYNHALREFNQIPENEGTLRQRVWMVRDQLPALKDWWPDLKQVYSTVLQKAIERIRDNIQNLGKLKAKGYKAGSLNWKKPREYRSFTYRQSGFELDKKSGPNGRGLLILKKLKEETCEIPIRLHRDLPDHKQIKEVTLKKEPTGAWYASFCIKTKEPEKPDAEDVDAEDTVGLDLGVLNFIHDSDGRSIGRLNLSDARDRLEREQHSLSRKEYESNNWEGQRRRVAAVHDRMSNKKRDFKHKLAHFYTREYDAVFVENLNVKGMLESQENAQNKAEVGWRDFITILEHHGDKNGCHVVQVDPCGTTKECASCGVETQKPLWVREHSCPACGFELGRDWNAALNVLDRGLRKLGVVHSEVTPVETATAGSTDGDENSSIVVDASRVTEAGSPALKEATRSVAE

SEQ ID NO: 52114 - protein, 431 aa, unknown
  TnpB Polypeptide
MLMQVKESVIIQVVQPTRRKAQWLEQTAKTFSDAVQLGLEMAEQERTSSRNRLHKAVYRPARKLGLPADYARMAVNAAVALARSYVGLMKKGKRRSFPKVNNSQGIGLGVNAYTLQRNGDRSVLRVSTGKRGQYVWLPLCVPSKFRDRLSLVQGDAKLFQRNGQWYAMLPVRITPTPTVRDGEPTFIGVDLGIVHHATAALPDRVVCFNGKPSRHKREHFADLRKRYGRHKRMDRIKRSKGKEARWMRDQNHKLSYQLVDLAAQYPNPVLVFERLDGIRQRTKGSKRFNRMMSSWAFRQLVGFVRYKAERMSIPVVFIDPRKTSQSCSRCGHTTRSNRTKQADFRCVSCGYRNNADANAACNITALGPSALEQGPSDTARLAKSQTQARKAAPDVVPDLAVSLHGQTTTSLGSRGTPALSGWGGCQSYFSR

SEQ ID NO: 52115 - protein, 364 aa, Clostridium sp.
MLKAYKYRIYPNEEQQIYIAKTCGSSRFIYNRMLANRIEIYKANKEILTFKEMTKLYLTPAKFKKEYEWLKEVDSLALANAQLNLDNAYNNFFRDKSVGFPKFKKKTNRISYKTNNQKGTIYIENGYIKLPKLKSMIKIKQHRLFKGEIKSATVSKNPMGQYFVSILVDTENIKLPKVDKKIGIDMGLKEFAICSDGYIEHNPKHLRKSYKRLIKLQRDLSRKLKGSSNRNKARLKLARLHQKIANQRKDFLHKLSIKLIRENQSIAIEDLKVGNMIRNHKLARAISEASWYEFRVILEYKAKWYGRNIVVAPSNYASSQLCSSCEYKNAEVKNLCFRKWTCPNCKTEHDRDINAAKNLEKLIE

SEQ ID NO: 52116 - protein, 383 aa, unknown
  TnpB Polypeptide
METVRKTYKEKLRPTPTQERALEAVLRCCRTLYNAALEQRITAWTRSQVSVTRYQQEAELKAIRAEMPEYAAIHSHVLQDVLARLDKAYQAFFRRLKAGEKAGFPRYQGRNRYHSFTYKEYGNGARLDNGYLVLSKVGRIAVRWSRPIEGTPKTVTISREADGWYVCFSCTDVPVQPLPPTGGETGIDLGLEVFATLADGTRIENPRQYRTAERELKKAQRRVSRRKKGSKRRRKAMRLLAKKHQKVRRQRQDFHHKTALLLLRQYDTIYHEDLQTANMLKNHHLAKSIADAGWSNFLGILSFKAACAGRRVVAVPPAYTSQTCSGCGVIVQKGLSVRWHECPDCGTSLHRDHNAARNIQWRGQRLRGLAGLPAGMNREPVGL

SEQ ID NO: 52117 - protein, 482 aa, Acidimicrobiaceae sp.
MATHHTRAVVVALDPSPMQEQLLRSYCGSSRKAYNWVLELVKDNLNTRVAEQKRGVDEADLTAVMSWSPYSLTPLWVKHQDELAPWHHDVVNYAFRSGITNATTALKNFNESKKGLRKGQRVGFPRFKSRRSKLSITFVETRNQDNWFSEDARHVRLLLPRWATDPLITRHREQLAWIHTTESVRQLGRLVAEKKATIQKVTISFVGGRWQAAFSVRYAEVPASRPVKRRGPLVGVDLGVKHLATLSQPVLGISDEAGHVANPKHLETALVRLARLNRRLARCQKGSSNRTKIVRQRQRLYGRVTKTRDLQLHRLTTTLAGSFDVVAIEDLYVRGMTVKRRSSSTRGLSRSILDASFSELRRQLTYKTADRGHALVVVERFFPSSKMCSNCGETRTKLTLSDRVYECSNCGLSLDRDVNAARNIHREALRLLSITNTVAGNQLETLNAVSRHRETEAPTGVDAGTVTRAESSIHPREQLLSV

SEQ ID NO: 52118 - protein, 254 aa, unknown
  TnpB Polypeptide
MNIAYHFRIYPNREQEVLLAKTFGCCRFLYNQMLNDKIREYEATKKMLRNTPAMYKKAYPFLKEVDSLALANVQMHLEKAYKNFFRDPKIGFPKFKSKHRSRKSYTTNVVNGNIQVEDHQIKLPKLKWIRMKKHRDIPEKYCLKSVTISMEPSGKYYASLLYEKTDCENQAEELDYEDAKILGIDYAMHGMAVFSEDIQKENEGYFRKSEERLAREQRKLSHCVKGSNNYYRQKNVLHYVMKKSEIRGKISYIS

SEQ ID NO: 52119 - protein, 341 aa, unknown
  TnpB Polypeptide
MIEATEDLCREAVNFYYELLKDREDLWEENLLAIQGQLEKLTVPGKDGRVPRYIPPGGKLPVYFRRSAMNKAAMAVKTAAGAESFPEKIDANITFFKGMYRDLTDTSVVLKLWNGKKWIWTECSLTGRPFPKEAAILSPTLVHEEKWLMLHVPVKQENSDARTAKERMKEGTRICSVRFTNTDSFAVCTVLDEQSIPLAMKNCSGGKSYRHHCRELLKKIETSKTYTDKDNVTQPNRKYYMHLKHLNEHYAHQASKEIIEFCKKNQAGIIVLPEYEENFSRISMYRSGNYSPLHLSIRIRNYLKYKAWAEGTLVLELRADGTEKYCSICGSPGTATRSTVS

SEQ ID NO: 52120 - protein, 167 aa, Actinomadura sp.
MYGPLDIVWSRPLPEGAEPSTVTVSRDSAGRWFVSILVEEEIRPLAPVESAVGVDAGVTALVTLSTGEKIEDLTVRNMVRNHSLARAISDAAWRELRSMLEYKCTWYGRELVTVDRWFPSSKLCSACGILQEKMPLSIRTWECACGAVHDRDVNAARNVLAAGLAES

SEQ ID NO: 52121 - protein, 380 aa, unknown
  TnpB Polypeptide
MQLAYQYRLYPSRAQEQKLLDTLDRCRWLYNRLFEELNRAKTEGRKIGKLETQAMIVKLKREKPELKSVYSKVLQMVSYQLWSNIRALSELKKKGRKVGRLRFKGQGWYKTLNYNQSGFRLDGKKLVFSKVGEIPIKLHCEVRGKIKGIIVKHERSGKWFAIFQVEDEPKPLSPTGKTVGMDMGIKHFLTDTDGRQIQNPKFYECSLEMIKIRHRQLSKKEKGSKNRERTRIRLARAYEGLVDQRNDFLHKLSHFYVQNYDVMAVEGLNIAGMAKNRNLAQRILDASWGKFLCMLFYKAERAGRQFVEVDPRGTSQEYKRGELDRDYNAALNVLERGLVGLGWPELTPVEMEPLLRVPASAVIAGQVPSLKQEAPCESWG

SEQ ID NO: 52122 - protein, 436 aa, Lactobacillus sp.
MEISLTVKAHIKVANSADAKSLADSMEVYRLGCNFVSQYVFDHDFELVQAKLNKALYSDLRQKFNLRSQMAQSVLKTVIARYKAVQTQLENKPYKCHDVYAGKDEGYYSIKRDLDWLWKPIFFKRPQLDEVRNRDYSFKKGSKAVQNFNEKGIIVSVNTLDGRVECEICAPGFEKYLDGTWTFGTAKILRSGKHWFMHISVTKSFPDYETEQTRHVVGIDRGLRQIVTCYDEKGKTLFRSGKAIARKRQHYKELRRHLQIKNTKNSKRRIRKLGDRENRWMNDYNHCLSKTLVRHYGADTLFVLEDLTDVTFDTVYNRKNENRYEHHSWSFYDLEQKLKYKAHLNGSEVVKVDAHYTSQRCPKCGRILKENRDHGLHMYICDRCGYRSNDDRIAAMNIQTLGTMYVSGVPNPSYQSKRGTSDAKKAKNKKSKKQTN

SEQ ID NO: 52123 - protein, 355 aa, Gammaproteobacteria sp.
MTNRKITYRLYPNQQQTESLTELLGLHQRVYNAALEERIRIYQEMGKSLSFASQCKILTQWRQKYPELKKLNAQSLQVTLKRLDLAFQAFFRRVKRKEKAGFPRFKSLQRFRGWGYKTHGDGWRLLAGEGLRHGCLRLSGIGYIKIRGKARTLGEPKTAEILHKSGKWYLSVTIECQPQRVCGSKAIGFDWGVEQFLVSHDSHDQIDSVKNPRHLKKMLPLLRSLQRSVSKKRKGSKNRKKAAKLLAKQHHRIANRRKDFHHQTAAKLVKENGLIAFEALSIKAMTAKGGARKRGLNREILSTAPTQFHALLKSKAEEAGAMCVEIPTREVRPSQTCHRCRKQEKKALSELLAYL

SEQ ID NO: 52124 - protein, 384 aa, unknown
  TnpB Polypeptide
MKRHIRRFKYRIYPTEEQEKFIKQHFAATRVVYNRLFKQLEYDILDNNSFWNAIYNIADFKRREGYTWLQTVDSSVFYETIFDLFQNLRKYRKDPYRRKRLRSKNDMFQSYRIRCKGKGIRIVNNGKSLVIPKLKSVIKIKQSRIFEGTILTVAIIRKPDGKYFASFCVEEDIKLPNKKSTGGEIGIDVGLKSFYTDDKGNKSESPIKDEKLKKKIDKAWKKYYKTEEGSNRSKKARLRIAKLYERESETQADFVHKETKRLVEENKLIAVEDLDIQDMIKNKRLRRNIIRAKWSMFFVLLGYKAERIGTNLVKVPRKFPSSQLCSVCGYRNKEVKNLDIREWDCPKCGTHHDRDRNAAINILNKAKEILDKQSDEEMLKFLFE

SEQ ID NO: 52125 - protein, 372 aa, unknown
  TnpB Polypeptide
MIRAHKIRLTPTPEQEVYFKKASGTARFVYNWALAQWQTVHAANPGIAYGMMAAKKEFNRLKGEQFPWIYDVAKDVCEGAFANLGAALKNYFNGKKGQRKGEKVGFPKFKSKKRSKQSFRLNNDKFTVDGHHLRIPNLGWVNMAEELRFQGKIMGAVVSKVADWWFVSITVEVEKPAPILWEKESIGVDLGVKTLATLSGGREFENQKLLRSELNKLCKLNRSLARRNQGSNRWHKAKRRLGRFHKRISDRRCDITHKMTTTIATTYCTVGVEDLNVKGMGKSRRLSLSISDASLSDILRQLAYKAEWFGGQVVKVGRFFASSKMCSECGHVNKDLKLSDRKWACQGCRTIHDRDWNASKNIEREALRLVNV

SEQ ID NO: 52126 - protein, 412 aa, unknown
  TnpB Polypeptide
VPKHHSTTSENNLPTTILGQRIRLDLNNVQTSFFERCAGASRFVYNWGLDRWKAQYEAGGKPSWVSLSSELNACKTTEFPWMIKLPWAVPSTALSNLGNAFSNFFRRVKSGQKPGYPRFKSKKRNKAAFAIEGRALRFDGRRVKIPKLGWVRTRQEIRFPGKILSAHFTKHAGHWYVSIQVQVSDSWSYPHRCETQETVGVDLGLRDLAVFSTGERVEAPRILRAHETRLRRLNKEMSRRVIGGRNWQKTKTKLSRLHERISNIRKDVTHKLTARLVRDFRRIGIEDLNVKGMMANHHLTKSIADASLSEIRRQLTYKAPLAGSEIVVADRWFPSSKLCSDCRTRREEPLPLSVREWVCEACGVVHDRDINAAINLRTAALAGIACCQESSGSGLTARTKLSHGQESSSRVN

SEQ ID NO: 52127 - protein, 264 aa, Lactobacillus sp.
  misc_feature (13)..(13): Xaa can be any naturally occurring amino acid
  misc_feature (15)..(15): Xaa can be any naturally occurring amino acid
  misc_feature (18)..(18): Xaa can be any naturally occurring amino acid
  misc_feature (22)..(22): Xaa can be any naturally occurring amino acid
  misc_feature (24)..(24): Xaa can be any naturally occurring amino acid
  misc_feature (27)..(27): Xaa can be any naturally occurring amino acid
  misc_feature (45)..(46): Xaa can be any naturally occurring amino acid
  misc_feature (48)..(49): Xaa can be any naturally occurring amino acid
  misc_feature (52)..(53): Xaa can be any naturally occurring amino acid
  misc_feature (55)..(55): Xaa can be any naturally occurring amino acid
  misc_feature (59)..(59): Xaa can be any naturally occurring amino acid
  misc_feature (61)..(61): Xaa can be any naturally occurring amino acid
  misc_feature (70)..(73): Xaa can be any naturally occurring amino acid
  misc_feature (79)..(79): Xaa can be any naturally occurring amino acid
  misc_feature (81)..(82): Xaa can be any naturally occurring amino acid
  misc_feature (84)..(84): Xaa can be any naturally occurring amino acid
  misc_feature (86)..(86): Xaa can be any naturally occurring amino acid
  misc_feature (93)..(93): Xaa can be any naturally occurring amino acid
  misc_feature (95)..(95): Xaa can be any naturally occurring amino acid
  misc_feature (98)..(100): Xaa can be any naturally occurring amino acid
  misc_feature (102)..(102): Xaa can be any naturally occurring amino acid
  misc_feature (104)..(104): Xaa can be any naturally occurring amino acid
  misc_feature (109)..(109): Xaa can be any naturally occurring amino acid
  misc_feature (135)..(135): Xaa can be any naturally occurring amino acid
  misc_feature (141)..(141): Xaa can be any naturally occurring amino acid
  misc_feature (145)..(146): Xaa can be any naturally occurring amino acid
  misc_feature (148)..(148): Xaa can be any naturally occurring amino acid
  misc_feature (165)..(165): Xaa can be any naturally occurring amino acid
  misc_feature (167)..(168): Xaa can be any naturally occurring amino acid
  misc_feature (170)..(170): Xaa can be any naturally occurring amino acid
  misc_feature (177)..(177): Xaa can be any naturally occurring amino acid
  misc_feature (212)..(212): Xaa can be any naturally occurring amino acid
  misc_feature (215)..(215): Xaa can be any naturally occurring amino acid
  misc_feature (233)..(233): Xaa can be any naturally occurring amino acid
  misc_feature (245)..(246): Xaa can be any naturally occurring amino acid
  misc_feature (248)..(248): Xaa can be any naturally occurring amino acid
  misc_feature (258)..(258): Xaa can be any naturally occurring amino acid
  misc_feature (263)..(263): Xaa can be any naturally occurring amino acid
LDQPRGTKLWYDXKXAEXPRWXGXIKXVCIVQDADGYYASLSIEXXVXXEKXXIXRVTXVXVNVGKFDYXXXXGYAIQXTXXAXLXALYARIXHXQKXXXRXRXTNPKXFNSATYRATRTKLKRNYQRVERIQMXLLNKFXTKLXXDXDLIGIEDLDNQHMRMNXRXXKXLHRSMFXKFKIMMQYKADWNGSTLILADPMFPSTQRCSKCGXIKXGEEKLTLHGNAKYHTGHXDYICYQCGARMXXDXNAVDNLIDYXKSKVXG

SEQ ID NO: 52128 - protein, 398 aa, unknown
  TnpB Polypeptide
MTLRAFKYRIYPTEEQSIFLEKHFGACRFVYNHFLDFRSKEYKNNKRSVSGLECKRMLIPLKKNNEWLKEINSQSLQEAVLNLDKAYRRFFQKLRKYPAFKKKRNHQSFTVPQHFSIEGDLFYIPKLKTGIRMNPPLPIDGIPLSLTISRSPSGKYHVSFICETLMPVVNNKPVNTVGIDLGLASFIVTSNGDKIEHPKYLRESEKRLARVQRSLSKKKNGSMNKRKQRLKVAILHEKIASQRKDFLHKLSRKIVDENQAVYLEDLNIKGMMQNRHLSKSIADSGWHEFVRQLKYKGEWYRTRVVQVGRFVPSTKTCSVCDAVNHDLTLKDRVWTCPSCKTVHDRDINAAIVIKKVGQDMPDIKPVEKKASILSFKRKDKPSSVKQETHIKMHGVLTP

SEQ ID NO: 52129 - protein, 398 aa, Dolichospermum sp.
MIVFEFKAKGTKQQYQKIDEAIRITQFIRNKCLRFWMDNQNVKYYDLNKYTAVLANEFDFADKLNSMARQAAAERTAFAIKRFFDNCKAKVPGKKGYPRFQKNNRSVEYKTSGWKLLDYRKHITFIDKCGIGQLKLIGTWDLHFYQIKQIKRVRIVKRSDGYYIQFCVDAERNIDINATGKTVGLDVGLNSFYTNSQGDKIDNPRYLRKSEKSLKRLHKKVSRKNKGSNNRKKAINRLGRKHLQVSRQRKDFAVKTALCVVKSNDLVAFEKLQVRNMVKNSKLAKSISDAGWSLFTQWLEYFGKVYGRVIVSVAPQYTSQNCSNCGEIVRKSLSVRTHVCKCGCILDRDHNAAINILTKALRQTGYDLSTVGRTETSNACGEITRCSDLVTSLSKVAH

SEQ ID NO: 52130 - protein, 302 aa, unknown
  TnpB Polypeptide
VRQYYFAEGEFLKYEKNYALLKNSPNYKTLNSNMAQQILKEVDCSFKSFFGLLKLAKQGKYAFTDCKLPYYLPKDGYTTLIIGFVRLNGNKLVLPFSNSFKKIHKPVEITIPPILLDKTIKEIRIIPKANARFFEIQYIYEAECIQRNLNQNNALAIDLGINNFATCVTNTGESFIIDGKKLKSINPNSVKDYLSKPDALINHYNMVLKKKTIDKVNELTNNLLLEYIYHGKLPKISNKTRKLLNLEKYAGGSRPNKNYNISSYKVFNADKYLKELQSDSKEVKIDYENFCKLIQAIIPIIQ

SEQ ID NO: 52131 - protein, 418 aa, unknown
  TnpB Polypeptide
LHICYEPTNIRIYPTDEQKVLFANTFGCCRFVYNWALNMKITAYKERKETLGNVYLTNLMKKELKAENEWLTEVNSQSLQSALRNLGTAYTNFFRNTKAVGFPRYRSCKDRQSFLCPQHCRVDFSKNTITIPKAKDIPAVLHRKFRGIVKTVTISMTSLGRYFASVLVGTDIQERPKSAVKNNTTIGIDLGIKTLAVCSDGRTFDNPKNLFRSLNRLALLQKRLSRRQKGFSNRNKARIKVSRLQERISNQRKDILHKITYTLTHNSQVRTICMEDLNVKGMIRNHHLAQSVADASFGMFLTMLEYKCKWYGVIFVKIDRFAPSSKTCGKCGYVYKGLKLSDRSWICPNCGMLHDRDYNVACNIKEFGLKALPTERGKVKPVDCPLVDDRPHVLKSNGRKKQKKRGGITISEAAKSLA

SEQ ID NO: 52132 - protein, 429 aa, unknown
  TnpB Polypeptide
MLDVLKVRIYPNKKQELALAKSFGCSRFVWNFYLNKTNTQYQETGKGLTYCQMAKDLTQLKKVSGYEWLQEPTAAVLQQSLKNLETAFKNFFAKHARFPKFKSKHHKQSIRYPESCFIKNGGLKLPKLGIVKASLSKSISGKIKSVTVSKTSTDKFFAAILFETEDLENAKCPSQSSPLSHGGKAAGREISGIDLGLNSLVTVFDGENCYKVDPIKPTRKYAKRLRRRQQTLSRRVKSSNNRRKAIKRVAKVHEKITNARQDFLHKLSRKLVDENQVIVAENLCVKGMARTKLAKSVHDASFGMLLNFIGYKLEREGGKLVQVDRFFPSTKLCSCCKFKNNDLNLSVRQWICPSCQTQQDRDENAAKNLREEGLRILSTNTVGHTEFQACGEIVRLVSTCTKKQVSLNQEPPDESASLTARVSIEISNT

SEQ ID NO: 52133 - protein, 386 aa, unknown
  TnpB Polypeptide
MKTYKFKLYRQKKNKHLHRQIDIAGLIYNHCIALHRRYYKLTGKGLNAYELMKHITKLKKLPKYQHWNLVGSQAIQDIVQRIDKGYKLFFGNLKRKVRTNAPSFKKVKKYSSFTLKQAGWKLLDKNRIRIQGMVYKFAKSRDIPADIKTVTVKRDTLGNLFLYFVVDEPISQNNQPMTGNSAGFDFGLKTFLTASDGKKIESPLYYREAMAELKQAQQNLARKVKFSGGWKKARLVVTRIHQRVVNKRRDWFFKVAHFLTDEFDNLFFEDLNMKGMQALWGRKVSDLARSEFMDILSYIASIKAKVVHLVNRFYPSSKTCHDCGHVYKELKLSEREWTCQGCGSIHDRDHNAALNIHSEGASSLRLGDVRPVLSGNRCLTLESHEL

SEQ ID NO: 52134 - protein, 390 aa, unknown
  TnpB Polypeptide
MIWSDTIVKLVAQVKLLASYQQKQVLLTTLKKANEACNRMSEHAWENKCFKPFDLHKACYHNIREEFALASQLIIRCNAKVADSYKLDKLTKRNFRPTGSIAYDSRILTFFTEESQISLWTVAGRMKIPFIAGELQKQMLLTQKGECDLCFINGEFYLMVICDIAEAPQNEATEFIGADLGIVQIASDSEGNQYSGEAIRSLRRRMRKLKAGLQHTAKKHGSKSAKRHLQKLRHRQSRFTRWVNHNISRRLVELAAVSGKAIALEDLSGIRERASVMHRDGGSNLRREMRFELGNWGFDQLRKFIEYKARRAGVRVVAVDPRNTSLTCSACGYCDKHNRKSQCKFQCLECGLVMNADLNAALNIKARGAVTRPIDGEAGSPASTVKAPCL

SEQ ID NO: 52135 - protein, 202 aa, unknown
  TnpB Polypeptide
MCVPKEIEMKRNDESNWVCSLDPGIRKFQTIYSPDNDSYITIGEQASRVLYAHLLKLDKLLSKKNSKNILKIKRLRLRIQHLQDELHYKSINFLCTNYKNIYIPKLTKENDIIKCSNRTISSKTVRNMVVLGHCKFIEKLKTKAEEFTNVKIHIITEEYTSQRCLACNTFTKTKAEMFTCKDCNFTIDRDILGSTNILLKNW

SEQ ID NO: 52136 - protein, 207 aa, Clostridiaceae sp.
LPKTDSAVGIDLGITDFAVLSDGSRNYNNHFTRQMEERHRREQRKLARRALAAEKRGIPLSEARNYQNQRQKVARLYEKVANQRIEYLNKLSTEIVKNHDIICIEDLNVKGMMRNHKLAKSISDVSWTSLVSKLHYKAAWYGKEVIRISRWFPSSQICSDCGHKDGKKPLHVRGWTCPVCHSHHDRDVNAARNILAEGLRIRALTPG

SEQ ID NO: 52137 - protein, 469 aa, unknown
  TnpB Polypeptide
MAKGRMSRNKNPIRAVNAFTEQNSIKDCRLQVIFSHCAKAYKLVVDFIYKEYLINKELSDQSQPNKERLEQIITDDLLNIIPARMQTIVYQQAYGAVKSNVNLAKFYLDDLTFKFKRDYKREPGQIEIKAIKRHIRSHLACKISTKLRNIVADSHMIRIEQAERSKHFDRWIRVMNLKGLEPIYIPYKSSEYKEENLRNSMNIVKRGNRFEFLLNQDVKKLEYTPKCDVIGIDFGLKDFMAINNKILGNKFVSWLKKQDDTLTKLQASLQLNGLKPRQSKKYRKLVQRIRDYTKNEICRLFNLIVDMAPRTIRLENLEFRHQSLSKKLNRLLSKFANKTIKEKLQRLVDIYGINVEYVNPAYTSKECSECHYISTTNRVNTKIFVCKYCGNKLNANVNAARNIARRSCNSLKRSIKQVLIDRFNIFMLDNEIMRLSENKFLIRSKSRADVETVVRNKYLKLFMAKSTNA

SEQ ID NO: 52138 - protein, 266 aa, unknown
  TnpB Polypeptide
MQKGIKFRIYPNREQQKLINQTLGCCRLIYNKGLAMRNEAYENGRKVGFSQTSAMLTELKRSDAFAFLKAVDSIALQQSLRDLDRGFVNFFRKRAAHPIFKSKHNRHQSYRTVNQGDNIRIAGKYIKLPKLGYVKIRQSMEVGKIKNVTIEHTPTGKYFAVLNVEFEPQPRPNKGGRIGIDVGIKEFYSDSNGNVVSNPKYLEKTMRKLIREQRKLSRKQKNSNNRNKQRVKVASVHEKIANQRNDFLQKQSTLLIRENQTICIED

SEQ ID NO: 52139 - protein, 420 aa, Streptomyces sp.
MSRFRMYPTRGQEQQMLLHCAHARYVWNLAVEQHSHWRRWRKAAPGFAEQCRQLTEARSESAWLGAGNANVQQQALRDFAKAKNARFTSGFGEPTWRRKFRHEGFRVIGADLVPEYSTDGSPKLNAKTGKQVMGRSVTLQKLNRRWAQVKVPGCGWVRFRLSVNGKGARLPQAKTFRVTFRHGRWHIAFAVLPEPTSAPGTGQAIGIDRGVKVTAALSDGRTLNCPQLTTRERARIRKHQRRAARAEKAGPTKALEYAKVAKLKAREADRRKDWCEKTSTMLARTYDLVRFEKLNIKNMTRSARGTVEQPGKKVTQKSGLNRAILAQGWGLLRQRTGHKAPGRVEDVPAPYTSLRCSVCGWIDKDSRKSQAEFVCSSCGFTCNADTNAAVNVAAGQGGIPRPRRTAGAGGTTPPTAVERP

SEQ ID NO: 52140 - protein, 387 aa, unknown
  TnpB Polypeptide
VIKSIKVMLIPNNKQKTKLFQCFGVSRFAYNWTLGKQQENYKNGGKFISDNDLRKEFTQLKKTKEYEWLNRYSNNISKQAIKDACDSYKKFFKGYSKFPKFKSKKKSRPSFYVDNIKIQFTDTRVKLEKISNSTKKNKAKLNWIRLAEKGRIPTDCKYSNPRVTFDGINFWISVGIEVEESTEVPTNNGVGIDLGIKDLAICSDNNTYKNINKTKEVKRLKKKKRRLQRKVSRKYLINKKGVCYYKTSNIIKLENQLLKLNHRLTNIRHNYLHKITSEIINRKPMFIALEDLNVTGMMKNKHLAKAIQDQSFYEFKRIISYKANWNNIKIIEVPRFYPSSKTCSECGSIKKDLKLSDREYICLECGCVIDRDYNASINLMKYGQSIA

SEQ ID NO: 52141 - protein, 444 aa, unknown
  TnpB Polypeptide
LRTLERPSSEESSECPSAGNSRFRCGEEADPEGSGPAPVRDVGGGGYGADMSWFRLLPTPEQEEAMLAHCQHARYVWNLAVEQQRHWQPGRQAPRYLEQAAQLTEARAEYAWLRTGSQTVQQEALRDFAQAMKNFFAGTHRRPTWRNAGVHEGFRQVGVKPRHVERLNRRFGQVWVPKVGWVRFRVSGPVPEDVKSYRVTRDRAGRWHVALAQIPRPIAGPGDGSVVGIDRGVAVSVALSTGEMLHAPLLTPGESKRLKVLQHRLARAKRGSRRRQKTKLAIAKLSARERDRRNDWVEKISTDLARRFDVIRVEKLDVRAMTRSARGTVAHPGAGVAQKRGLNRAIRRSGWSKPVTRLRNKAFGRVEQIPAAYTSQRCSACGRIAPGNRKSQAVFECEACIAGRCNADVNAARNIAAGRAVTARGDLAVGRSANREPQLTTPAA

SEQ ID NO: 52142 - protein, 411 aa, Haloferacaceae sp.
MQYNYKYRLTPDEATRNELRHHIDVCRQLYNHCLYELNKSDGGIPARYDLQGQLPDLKKWWNGLKDVHSKVLQMVVKRVYDNLSTLKAQKENGRAVGMLKWKRPRDYRSLTYNQTGFKLKNTSGWPQLWLSKIGEIPIRLHREIPDDSAVKQVTVKREPTGEWFAVLGIETKNDAPPKPENPKRCVGIDVGILSYTHDSDGFSVGSLDLSEERERLERAQRKLSRKQHGSANYRTQQRVVAQRHADLKRKRRDFLHRLSAYYAREYDLVAVEDLDAKGLMELPSNSRNRASASWGTFLRMLKYKCDREGTHFVAVDPRGTTKECSQCGVSTDKPLWVREHSCPSCGFEADRDANAALNILSRGLDHVGVVHSDSMPVETALPPGTESVPAKRVVEAGSPGLTERTASAVSE

SEQ ID NO: 52143 - protein, 372 aa, unknown
  TnpB Polypeptide
MAGDAGVKRAYKYRFYPTPQQADLLNRTFGCVRKVYNLALEARTRAWATERRSMTYGQSSAALTELKKTDDLGFLNEVSCVPLQQTLRHLQAGFTAFFAKRARYPRFKSKHKSRASAEFTVSGFRWRDGRLTLAKMTEPLDIVWSRPLPDGAQPSTVTVSRDRVGRWHISILVDDPTVTPLPPVAAQVGVDAGITSLVALSTGEKVENPRHERAERHRLARAQRALARTAKESNNRGKARARVARIHARIADRRRDHLHKLSTRLVRENQTIVIEDLSVRNMLGNHRLARAISDAAWSDLRSMLTYKADWYGRSLRVADRWLPSSKLCSACGQLIVRLPLAVRSWTCAGCGVVHDRDVNAARNILAAGLADR

SEQ ID NO: 52144 - protein, 370 aa, Paenibacillus sp.
LQITITAKIKIKPTEDQVSQLNETMIAYRQGCNFVSRIVFESVDLKQASLHKVTYGALRTQYGLRSQMAQSVMKTVIARYKTNKSNGYEWSLVTFKRLEYDLVWNRDYSLSKEVFSLNTVEGRIKVPYESKGMEQYFESEWSFGTAKLVNKYGKWFLHIPMTKEVEDVLDYNINNVVGVDLGINFVATTYDSQDNTLFFNGRPIKHKRSKYKFLRKQLQQLGTASSRRKLKRIGQRESRWMTDVNHQISKALVDHYGSNTMFVIEDLSGVRNATERVRVKDRYVTVSWSFFEFRQMLVYKAVMSGSKVLTVDPRYTSQTCPKCGHTEKANRDKTKHVFCCKNCCYTSNDDRVGAMNLHRKGIEYIAEVTA

SEQ ID NO: 52145 - protein, 461 aa, unknown
  TnpB Polypeptide
VGKPKKSKKGSVPMPTVSVLKRTVTVELIQTKEQEEELKELGNLCSKLWNQVNYERRRQFFNGEHSVDIKGTYNKWYNEYKEKVGTITAQQVLNKNNEAWSSFFSLLRAKKEEKLLLPFIKKINPPGYWKDKKKRKLIIVLRKDQYKIDKEKQEIELRHLGKFEDLKIRYKGEIYYRGEQGRLEIIYNSMLRKWYAHITIKANERLDRKTGKWMKVPLTPKGNLVGGIDIGINNLLAVYISDGTQVLIKTRVLKSISYYFMKLISMKQKLLSLYKQPFSNEIRRLYVKWKRELNTIIDATVRKVVEFLYNKGVSLIKVGYPKNISQKKGNFLVANVWSYKQVMDKLRDVAEEHGITVEFVNEAYTSTTCPIHGNGCGKRVSRGLFKCTTSNKVFNADLVGAFNISIILSPNDGGVEGTTTRGIGISWGKTTPLVYTWTRGSGLVVPASYDSMRLKRIDQNL

SEQ ID NO: 52146 - protein, 543 aa, Nonomuraea sp.
VTELRPIEAPFVAPGPSGVAVRDRLKNLTVEDEQVLRLVGAHLGALASGDLKTRCADGLEHDNQTWAARKRGLTELSSSRWAGTITKASHDQWVLARRCQAAHIADLEAGIATIGHRLSLPVGEKGTRKAPGGYRSRQEWHAKSRRLRVLQDRLQRERADQQAGIVHIVRGGKRLVCTRHHLDAAGLTEAEWRHTWEAARWFLAADGESGKRYGNETIRITPDGEVSIRLPAPLAHLANAPHGRYVLACRVGFAQRGSEWADRIEANRAVAYRIHLDVRRGCWYITASLQIPPAPAIPLQAALAHGVIGVDTNADHLAAWRLDSHGNPIGNPRRFSYDLSGSAEHRDAQVRHALTRLLHWAKACGVSAIAIEDLNFRAEKTREKHGRRKRLRQLISGMPTSRLRARLTAMADATGIVIIAADPAYTSRWGAQHWQTPLTSNTRTTTRHDAAAVAIGRRALGHPIRRRTAPPRTHQSDGSGHRTVQAAPGTLGREETRRPVTDRAHDAPARARRTGTRATSASNTVRDARSTGTWVQHSLLDTA

SEQ ID NO: 52147 - protein, 339 aa, Frankia sp.
VAGGWFAYCPAVGVAGFRHGHGEFFRGSHRRPSWRKRGRSAGFRIVAVKPADVRTLNRRWSEVRIPKVGWVRFRRSRTVPDARSYRVTRDRAGRWHVAFAVVPDPIPAPGTGTIVGADRGVTVSAALSSGESLHCPGLRPGEQARLVRLQRRLVKAKRGSNRRARLRARIARVKAREVDRRKDWVEKTSTGLARRYDLIRVEALPVGTMTRSARGTVAAPGRNVRQKAGLNRSILAHGWGLLVRRLEQKAPGRVEKINPAYTSQTCNTCGTRDREARENQAVFRCRACGCQANADVNAARNIALGHQWATTWVTARGGDANGRPVNREPQHCAPPPVDV

SEQ ID NO: 52148 - protein, 411 aa, Lentzea sp.
VQLRYNYRVYPTPGQRDALARAFGCARVVFNDALHARRAAHVNGDPYLSDGELSKRVITRAKTTPERVWLGEVSAVVLQQALADLNTAYRNFFASVTGKRKGRKVAPPRFRSRKDNRQAIRFTRNARFTVLGNGRLRLPKIGDLDVHWSRDFPAEPSSVTVLKDAAGRYFASFVVTTEKDQTLPAAESEVGIDLGLTHFAVLSDGTKVVAPRFLRQAARRLRRLQKSLSRKVKGSNRRRKAVVKLARAHARVADTRRDWQHKLSTAIIRDNQAVYVEDLCVAGLGRTRLAKSVHDAGWAGFTGMLEYKAARYGRTFGRSGRWFPSTRMCSVCGHVNDKMPLNVRVWICLCGSVHDRDINAAINILAAGRAERLNDRGAQVRPAPVPAPRRETGIHPDAALSTRGVEGIPAL

SEQ ID NO: 52149 - protein, 508 aa, Acidimicrobiaceae sp.
MSACRCRTQWRRWGSNPRPQACKARALPTELRPRRELILAIEQPAFGKLSWSWSTANVTRRTDTDDVTTPDQCSGTTLNRAYVYALDPTPEQVSLLHSHIGGTRFTYNTLLGLVKDNWDENREKKRAGIEITRDDYLGTGHLDLQRLWYANRDEVAPWWSENGSSAYNYACLNLSKAFTNHRKGRTKFPTFKRRGQSGSVSFLTSAVRLADSHHVRVTRIGEVKTYESMRKLHRHLERGTGRIVASTVSLRNGKFFIAFNVEVKRAIPATRAPDRIIGVDVGIATLYTGATAGGELVLEVANPRHFKTAQKRLAHAQRIATRRQGPKKGAAPSKRWKKANGRVQKVHAGVANARKNLIHETTSMLAKNYDVIVIENLNIKGMVKNPSLAKAIQDASWGEFGRQLEYKTGWYGSTLVRVDTFYPSSKTCSQCQTVKATLSLDERMFHCEACGLVIDRDLNAAINLARKGLPGTSSGTGRGGEVSPAQQKLVATAYPDEASTETPPDVGA

SEQ ID NO: 52150 - protein, 388 aa, Phormidium sp.
MRTTYQYRLRPTAPQQAVMDQWLEKLRHQYNWLLSERFQWWEEHRCPVNACPLVCHLPQLKNQPDCYSQQRSLVPMKQARPWYKEVYAQVLQDMVKRVKLAFDRYLKGDSNGTRSGRPRFKGKGRYRSFTYPQASLKWVNGKAVNLPKIGKVKLILHRPLPDGFKLKTATIIYKAGAWYVSLSLEDKLVPSLMFDSPTPENTVGIDVGLKSFLVTSDGEEVIIPQFYRKAEKRLKRLQRQLSKKKKASNRCKKAVKRVAKVHRKITNQRKDFHYKTAKKLLSQGKSIGHESLNIKGLTKTRMAKSINDAGWGQFLQILSIKAERAGLLTIAVNPNGTSQDCSSCGVKVLKTLQDRWHNCSECGCSLDRDHNAAINVQKRAVGHPVQAL

SEQ ID NO: 52151 - protein, 307 aa, unknown
  TnpB Polypeptide
LQEVTDRLYKSYERFFEARKNGEKYGLPGFRKVRKYKSFTLKQAGYKLLSGNEVVICGQKYKYFKSREIEGKIKTLTVKRDSVNDLWLCFSVEAEVPNVVNSRPGHPVGFDFGLETYLTGSDGQRIESPEFFKQNLKEVKRLNRILSRKQQGSNNRDRAKRDVARLYRRITNQRSAWQWKIARELVERHAFIGLETLNIKAMQLLWGRKIGDYGFSDFVSILQYAASKVGTQIVHVDKWYPSSQLCSACGYRFNGTKDLSVRRWICPHCGAEHNRDVNAACNILTEALCIAGKQQRAGRSSVKVSQC

SEQ ID NO: 52152 - protein, 341 aa, Mastigocoleus sp.
MLLVEKHVIKKHNSYFKEIDNLCFLAKNLYNYANYLIRQSFIFEGKYLNYNAMEKLCQGSADYKALPAKVAQQILMRLHEAWQGFFSSLASYKEEPEKFFCSPRIPSYLHKTNGRFPCIYTIQAISKKYLKHSQIKPSKTNIVIPTNVNQIRQVRLVPKGSYYVFEVVYKRLEEPQIHTSDGIAGIDIGLNNLAAVTSNIKGFKPILVNGKPLNKINAYYHKIRSKLQSLLPSKHKTSHQIQNLTRKRNFKIYDYLHKSSRLIIDYLAANQIGTLIIGHNDKWKQSIGLGKRNNQNFVSIPFDRFISMLKYKAKLIGIKVIITEESYTSKCSFIDEEPLSK

SEQ ID NO: 52153 - protein, 476 aa, Streptomyces sp.
VKVTRIAYSRGLNAGKCEQLEEQARRLGSVRTRVWRQYGSLNGVGKTDRMIRDQWMKDGTARGFRVPANAWKETVRDAFADIRANREAAKVPVRKAISHRFADEGPRKRQHVALTYDRWTEDPYLSRMMRCHWHRGSSAVRNQIVVRSDQFRTYTLVEGGNVWLSVPSLVQRRTIAIPLNTTVAPTGTLRLILRDGRVEVHYVIDGRQPKSSRRPCGSREIGVDKGYSEVLVDSDGRHHGEALGELLRAESDFLKAKTARRARIRAIAERAREEGDAAKADSIHRNNLGTVKRIRRRRRFEGIARCVTFTAVHAVVDKAEHVVAEDLPRSFPARKRLGKDANRRLAAWTKGVTAEALANVSERRGSALTLVDAAYTSQVAPCCRILGKRQGDRLHCTRCGAVWQADHAAAINVLERHGDPDISLFTPFTRVKQIIQERDDRRRTRLPVQDSRTTVRRANHPNRTARTRNRKQEWAR

SEQ ID NO: 52154 - protein, 510 aa, unknown
  TnpB Polypeptide
VKFYDTVTRYRFTTEEGVDVDSVSADLTQMIFSMAEAEREVLASQKFHDLALKVLKGDRPTGSLNSWGRKRLSQYNFSFHKYNMNEILVTNVVSVLEAYAVSVGLFQVMSTHPKETKPEKILSYYKNTYPDAPQPTSGMVRAHLIRFHKKGERKASLPGASAKLNLAVCDTKFSPKSFRDENDSLSIVVQLRTPRYGLTSVHLRLPENTERFGDGKVCRPTIRLNSKGKLVFDIAIEHEIDERQTKKFIGIDLGKVEPFVATVIDPKNKDRSAPYHVNHKKLLGSLVKAEKKRRDLATHLYEKAGLCERHNRIDRADVLRTEAKRVSAKATRIKHEISQCIASQVVEIADKSDAHLSLENLSWLDAKGGRWPHAEIQSRVESTAKRYGLKIVKVSAKNTSKTCSRCGGKTSNNTKTRVGTCSVCGFELNRDVSASREIALRATSPSSQSRERMRCLLRQRKEMRSSAVTRQSKSVTALGGNQGHTGTSSDGLEATLMMVRETLDSRGSPT

SEQ ID NO: 52155 - protein, 395 aa, unknown
  TnpB Polypeptide
MYLTKKIRLLPTKEQEVLFWKSVGVARWSYNFFLGYNQEKYKEWLEDNTKEMFISEGEVRKYINNVLKKTTHTWLKEVSSNVMKQGVKDANTALQNFFKHGKGYPKFKSKKRSKPSFYVNYETLKRTSNGFQGEKIGVVKTRESLPKLSKGDRYVNPRISFDGRFWYLSVSYKVETKQVKLTDDKIGIDVGLKDLAIVSNIDNSYAKKHRNINKGYRVRLLGKRLKRSQRKLSRKILNNIESYSKKRVPTYTRPLSECKNIQKQKRIIQGLYRKVTNIRTNYIHQVTTEIVKNKPSRIVLEDLNVSGLIKNKHLSKSISDSKLYEFRRQIEYKAELYGIKVVIADRFYPSSKTCSCCGHVNKGLKLSDRTYKCSECGNVIDRDVNASINLARYQI

SEQ ID NO: 52156 - protein, 365 aa, unknown
  TnpB Polypeptide
MNKAFKVRIYPNEEQKILIDKTFGYARYVYNFMLNLKQKLYEYYGLNLSYNHMSKILTELKRHKVWLKEVDKCSLKTAIKDLDSAYQKFFKGDGFPKFKSKKRDKLSYRTTDNLKLNQEDRKIRIPKVGWIRFRDKSNFKGLKKIYNITISKSSSGKYFASISAEVDVTTFEKNNQNCGIDLGIKDFCILNDGTRFENPKFLVNNEKRLRLLQKALSRKVYGSKNYEKAKIKLAKFHEYIVNCRKDYLHKISISLVRTYDVICAETLRVNNMIKNHKLAKAISDVSWYEFIRQLEYKCLWYGNKFVQIDTYFASSQICSNCGHKNSDVKNLDIREWICSECGVHHDRDINSAINILSEGLRILEV

SEQ ID NO: 52157 - protein, 396 aa, unknown
  TnpB Polypeptide
MLKDFDKFMSQLKETNATLDFYTDFNKIRRNVQNIEISLNMLNFLLGKDDLYSAVKALWDRDPKVFNVLDILIATRREGKKKFIDVDGEIKLIKTLFSSVDGIMKFFNETGLADFFKKNSCRLKEDGCIHFIKNIIRPIKTKIGDNKLCQVRIIPQATCYVVEVIYEKKEQDLNLDKDNFLSIDLGLNNLCTCISNVGIKPFIVNGKIIKSFNQWYNKKRARLMSYIGDKGTSKRLRRLNNYRNFWIEDKIHKVSRFIVNICIENNIGNLVVGLNKGWKNGVNLGKRINQKFVEIPFSKLVEKISYKCKLVGIDFQVHEESYTSKVDHLAFEKLGKHDVYLGKRKKRGLFQSSIGKLINADINGAIGIGRKVFGDSYVSKIIDSGLAFNPVRVNIL

SEQ ID NO: 52158 - protein, 485 aa, Acidimicrobiaceae sp.
MADPVVTDPATVTSKKKRSPRKKFKFPDGWIARGFTFEVEWPDDHQVASSIRSQFGGRRFAYNWALAQVKADMDARKTDPSHASVQWNLYALRKRFNAEKPTIAPWWSENSKEAYSTGIADLCVALKNWSDSKAGKRKGKKVGFPKFRSKRKDRARVRFSTGPMRIDPDRRTVTLPVVGALRSKENTRRIERLVRVGKARVLNATLRERWGRLFVSFSCIVENHQYPAPAKGGRAGVDLGMRVLATIVDSDGDITEVPNPAPLRATLTERKRVGRQLSGRIPGSRGHDAAKAKLASLDRRCVHLRKQASHQLTTMLADTYSEVVVEDLDLAAMKKSMGRRAFRRSVSDAALGQIRPQLTYKMAWRGTTLTIADRWFASSKLHHGCGCRLIEPKKLAKQLVCVVTGEIVDRDINAARNLRDWPDTAGQDSSGAVGAVAPPASESSDGQDIGLSDAVGGSVRPEPRRRPHPLRPEPTREPREGVQHE

SEQ ID NO: 52159 - protein, 267 aa, unknown
  TnpB Polypeptide
MEGNRYLLSRKLGSVRIRKRDRLRYPIENLSSWTVKRENQTYYLTLLFDVDIQPMPKAEGRVGIDLGVKDLITLSTGEKIGYGDRLKKLETDVIRQQRMLSHRMKGSNRYRKQRLRLEHAYVRLRHYRENMRHQLSHRLIEENQLVGLETLAVRNMVRKVKPKKSPDGRYMRNGQNCKRTLNRLIHRASWSGFVSKLVYKAEWYGRTLIQVGRFYPSSKLCHECGWKYKELKLSEREWTCRNCGTRHDRDVNAALNILAEAERLAAS

SEQ ID NO: 52160 - protein, 301 aa, Psychrobacter sp.
LQAINETHAKSRKQFKKAKLNWRTNRVDAKRKSLGWIPFKKSAIKYLSTRQTGKKALKSTIQLSLSKGQKLIIDVFDSYNLSLYQINTLDVVQDARGRWYACITVKDFPKQVSGKGSVGIDLGLKDSATTSNGDKLTTKQTQKWAKKLAIAQRAKNKQRVKAIHAKIKNTRQDLIHKFTTKLVKDNALIVVGEVKSRSFTTKKTNLAKSTYDAGWFELKRQLEYKCKHAGCQLEMVNESYTTQTCSHCRKISGSSPKGRAGLGIRGWTCAECGTWHDRDINAAKNILAVGLDRLAVGIPSL

SEQ ID NO: 52161 - protein, 284 aa, Clostridiaceae sp.
MKKKNQDVKAYFPKNNKTDWTTERHRVKIPTLGWMRLKEFGYIPTNAKVKSGTVSEKANRYYVSILVEEIDKEIFKPINKGIGIDLGIKDFAICSNGDKFKNINKESRVRKVEKKLKREQRKLSRKYESLKIRNKNIKGGKATRQNIQKQIVKVQKIHQKLTNIRTDYINKVVNNIVKTKPCYITIEDLNVSGMMKNKHLAKAVAQQKFYEFRTKLSSKCNQNNIELRVVDRFYPSSKTCSCCGAIKKDLKLSDRVYKCSCGFTIDRDLNASINLSNVKKYKIA

SEQ ID NO: 52162 - protein, 301 aa, unknown
  TnpB Polypeptide
MRLPFYLTMPSNLEHSSIREYRILPRNGCFYLELVYQKEAVQSSVTVDSVLMIDHGMDNWITCVSNIGTSFIVDGRHLKSINQGYNKRVATLMSGKDNGFWSKRLERLTENRNRTMRDAVNKAARKVINHCVSSQIGTVIFGWNKNQKDSINLGTKTNQKFVQIPTGRLKDRIAQLCEQYGIKFVETEESYTSKTSFLDGDELPKIGEKPEWWKASGTRVKRGLYRTANGWLINADCNGCANIGQKVATILGIDLSGVGRGDLSAPVRLKLWSYESPSMKGLGRCQGNRTYTASNKKQELR

SEQ ID NO: 52163 - protein, 433 aa, unknown
  TnpB Polypeptide
VPREAGQQNQRAARAARLPNSYDYVFDTVRVRTAYRCRAYPGEQQQQVLNRTFGCVRVVWNRTLAARHARWQQERKSTSYAETDAALTLMKKDPDLAFLSEVSSVPLQQALRHQHQAFTAFFARRARYPRFKSRRGRQAAHYTRSAFTLRDGELRLAKTACLLRFTWSWPEVDVAALAPTMVVVSREPDGRWYVTFTIDTNAPEPLEKTGRAVGVDLGVKDFAVTSDGEKIANPRHLARKARNLARYQRRLARCQKGSANRAKAKMKVARAHRKVRDARSDFLHRASTRLVRSADMIMIEDLNVSGMVRNRRLARAISDCGWGEFRRQLTYKCERAGRRLIVIDRWYPSSKTCSACGYLLAGLSLSTRQWTCPSCGARHDRDLNAAENILAAGQAVTACGAGVRHSGASRVRPAVKQEPRPVTAGIPVLQGGE

SEQ ID NO: 52164 - protein, 234 aa, Okeania sp.
GIKFSVSELQKLFITQAKKTEDREWLSEVSNIPLQQSLNDLNQAYQNFFTSTKGKRKGRVVKPPRFKTRKSRQTARFRKGGFKVGQHKVYLAKIGKLKIVCPRELPPAPSSVTVIKDCRGDSRIAPTRYFLSFVVEIRPETLPKTDNSVGIDLGIKTFATLSDGTKVDAPKPLKKRIKKYRKLSKSLSKKTFGSKRYEKARLRVAKFHAKLKDTRDDFLHKLSTEIIRENQTIV

SEQ ID NO: 52165 - protein, 508 aa, Scytonema sp.
MARKKTPSFITEIPLIVDSSQEKELLSKFEASRELYNACLNEAMVRMELVRNSETFKTAKKISKSNKKERTEAFSVARQAYRYSDYDIQAYATIVANSSQWIADKIDSNTQQTIAKRAFKASERVIFGRAKKVRFKVSSRFHSVEGKTNKQGLRWKNNELVWGSLKLRAIIDESNPVIMHGLQSPVKYVRILWRNLNGKRRWYAQLINEGNSYQKEKNYVSDGLIGLDLNISNIAFVGDEKAGLLPFAEKVPTYEREITALQRKMQRSQRVNNPDNYEPDFEIKKGHRTVKKKGKVKKGKREWKRSRNYKKVAQKKRELQRKKTAYAKSQNRKIVNEILRNGKDIKTENVSVKGWQKRYGKAISAKSPGFVQSELIRKAEKAGGSVHKFSTQKTALSQTHLDGSRTKKSLSERVHHDVTGIKMHRDLMSAYLSRYVNQDDRLSLQDARNGYRGAESLLLEAWRESLNCEPVGSSESGLIALEQFSNKAGKIDQIAVSLESGRKVNSNS

SEQ ID NO: 52166 - protein, 317 aa, unknown
  TnpB Polypeptide
MDIKKDMLKHLPAWCDPVPFQIKGIAIKEAHGAFWKAKGQPQFRSKKNSEQSCYIPKSAIKQTGIYPRISGPGLHYQESLPQNIKDSRLIWRFEKYWIAIPHKAYCLKAENQSQTVALDPGIRSFMSFYSPDYSGNIGKGDFSRIQRLCAHLDNLISRRDKCTNKQRRCSLTKASRRARGKIKYLISELHFKTAKFLLDNFDIILLPTFETKQMACKAKRKIRKKSVRAMLTFSHYKFKQILKWKASLAGKTVVDCSEAYTSKTHPQTGEIKNIGGAKWIKLLDGSRADRDVIGARNILLRSLVDTPDLFQVAVNES

SEQ ID NO: 52167 - protein, 398 aa, unknown
  TnpB Polypeptide
MVDVVLSIPFSYERNEIVRKLLEDFRDMINFCIEKAIENNITSYAKLRKLVYEEWKRRWDYSTHFCHSACKIASSMLKSWRKKVRKGEANPYKPPRAKKLFIRFDPQLVKFEGDRLRISIRPRQFVYVQLKYGKYQRKFIEEWKKGKLKVGEITMNGEKVIVPFRKEVDLTNPKDWIAIDINESNVTAVSSNPHVIRIEHGLRTIHTTYFEIRKRIQELSKYKPITSKRLMEKYSGREKRKVHDLCHKIAKIIVDFAKEHNLGIIMEDLKGIRKNINKSKNLNRRLHSWNFRKLQFFIEYKAKLNGIPVVYVNPRKTSSLCPRCGGKLAPNGQRLMKCRKCGYENDRDVIACLNILRMRGVPVPPECLSMKLCRGRNSSRWLNIATYSLNHLEERTVR

SEQ ID NO: 52168 - protein, 373 aa, unknown
  TnpB Polypeptide
MLKAYQYRLYPKKSQVTVLNQTLEQCRIVYNRVLATRKDAWELEQKHVGYYETKKLLPEWKQEYPSLKNVHSQVLQDVVTRVDKAYKAFFRRVKLGEEPGHPRFRQFGRYDSLTYTQSGFELDGQKLILSKIGDVPIVTHRTFEGEIKTCTIRRSRTGKWFASITIETDTPLPTTSQKPSVGVDLGIVNFITFSTGETVPNPRFFKTDESALARAQRRLSKQVKGTVKRRRSVMIVSRIHERIANRRNDFAHKISRQLVDNYGLIAVEDLNIKEMVQDRIYSKSIHDVAWNTLLQMTQSKAEEAGCCVVLIPSYYTSQTCSFCGHVDTDNRTTQAKFVCLKCGHSENADVNAAKNILGLGLQSVASTLSTVQA

SEQ ID NO: 52169 - protein, 398 aa, unknown
  TnpB Polypeptide
VQLRYNFRLYPTAGQRQALAKAFGCARVVYNDGLRIRQEAHAAGLPYIKDTDLQRRVLTEAKKTPERAWLAGVSNVVLVQSLNDLHKAYRAFFASVTGKRRGPRIAPPKYKSRKDHQQAIRLTRNGFSIRPNGRLHVAKVGEIKVRWSRQLPSEPSSVTVVKDAAGRYFASFVVEAPGEPLPETDTEVGIDLGLTHFAVLSDGCKVASPKFLRRAERRLKRAQRALSRKQKGSKNREKVRLRLARAHARVADTRRDFHHQLSTRIIRENQAVYVEDLAVSGLGRTRLAKSVHDAGWSQFVAMLEYKAARYGRAFARVGRFEPTSQVCSACGVLDGPKPLHVRAWTCQHCGTSHDRDLNAAKNILAAGRAERLNACGAGVRPGLALAAGGEAGTHRGAA

SEQ ID NO: 52170 - protein, 521 aa, unknown
  TnpB Polypeptide
VIQRTFATRLSWDAARDPLLDAYANLYGRAERTLFARLRTGRPLAATKREFLVRFGLTARQFNALAASVRGKITAIQTRRPGLIATLERRIERARTVLAKTPKNTRAYHQKQRRLAALQQRGTALKGEGAVGTVRLCFGSRTLFRGQFALAANGYASHNDWRRAWREARSNQFFVIGSKDETAGCQGCVATVDLDGTITLRLRLPNAFAACGKYVVISGLRFRYGHQAVAAAIGRNLSPDQHHWEALCWRFVRDRKGWRVLATVSVHGGTRRSIEHIGMIGVDLNADHLAVTDVDRFGNPIASFRVPCRTRGTTHHQARAIIGDAVRHVVTYAYLHQKPIVAERLQFDEKKAALEQRGARYARMLSGFAYATLNAILTARCYDAGIALRHVNPAFTSVIGAHTVANRYGLSRHHAAACAIGRRGMHLAERPPRRLGDHVTFPLPVRNRGKHVWSFWRQVARREAALRAHGRPGPTGARSSPAPAPGSPRSAARPGIHRTSGSSAPSAGGTPAREPSAILFG

SEQ ID NO: 52171 - protein, 415 aa, unknown
  TnpB Polypeptide
LYLHCSPIHVIIYVGRKIKDKMKTSYQYKIKPTKEQAEKIDNTLEKLRYQYNYLLAQRFDWYEQNRCPIDRCPLICHIPDLREQPNYYNQKASLTQLKVNRPWYKEIHSQVLQEVPKRVELAFDRWLAGDVNAKKSGRPRFKGKGQYKTFTYPQFKRHHFTDRKITLSKIGNVKVIVHRQIPDGFDIKTVSVTKKSDGYYVTLSLDDTTVPTIKPDFDVENIVGIDVGLIDFIVTSDNERIASPKFLRKAERKLKSAQRSVSRKKKGSNRRKKAIKKLAIRHKKVADTRKDFHFKTAKSLLDKYDVVAVEKLNIKGLAKTRLAKSINDAGWGQFIDILSNKAANAGLKVIAVNPNGTSQECSSCGHKVKKPLSQRMHNCPICHVSLCRDLNAAVNIKKRGAHALKAQLMSPKGSH

SEQ ID NO: 52172 - protein, 381 aa, unknown
  TnpB Polypeptide
MRSDDDRRLLLDTIEEWRDGCNLASDLAWNQCHSKSVIEDIARDKIQNQTGLGSQHAILACHEVSRAIKSGIECRQKGKKTSQPQFTAQSITYDRRTLTVFPEKETVSLTTLGDHSRVHADLVLPDDESGYQYTYLNNDVWEHTESTLHYRDGSFYLHLGYRKPKPKQTDESTTENGTVLGVDLGVNQIAVTSTARFFSAGELNHTRREFEKTRSGLQQTGTQSAHRTIEQMSGREDKYVKHVLHSVANGIVEEALQHECDGIVFEDLTGIRDRLRDTVWHSVWAFRTLMQYVEYKAEAEGVFVDTVDPKNTSKRCADCGCVHDNNRDQDVFNCVQCGNRNHADYNAAKNIAELYLLRGHQLPSGRSVSQYALKSGLMTPS

SEQ ID NO: 52173 - protein, 379 aa, unknown
  TnpB Polypeptide
VPLETIKLTASFKLDGSISESLFSTYREILGQLLDYAWTKGITSFKRLKAEKYHELRARYPSLPSHYIYTACQMACSIYKSFRKLRKRGLAKAEKPFFKKQVIMLDDHLFSLDLEGWEASIAVENGRVKLKLLHGTYHEKFKEMKIGQAWLIKTEDGFYLKAVFSKTVELVESNGKAIAVDINENNVTFGSTERVRNIETGERAIRTAYFLKRRRLQSKPRLNEKPLMAKYKGRERRRVEDIYHKLANQIVDEAKELKASTIVLEELANIRKRIRHSKAINGRLNRWSFRKLQEIIEYKAKLAGVNVTYVNAKGTSSLCPICGGRLSPNGYRQMKCRKCSLKQDRDIIAVRNLLHRCQIDVGTSPVHSESPPMIRGGKG

SEQ ID NO: 52174 - protein, 196 aa, Bacillus sp.
VDVGLKELFVASNGTKERNINKDAKVKKLLKRKKSAQRDMSRRFKNGVKIQSAGYEKAKAEHLRLSRKIMNIRNNHIHQATATLVKTKPMRIVVEDLSISNLLKNKKLSKALSFQKLNLFFQCLSYKCEKYGIEYVKADKWVASSKICSCCGVKYDHSVQPEGQWSLKIREWRCVPCNSHHDRDVNASINLSRWVK

SEQ ID NO: 52175 - protein, 217 aa, unknown
  TnpB Polypeptide
LGYPRFKSRHCGEQSAVFTTSARFHVRHDHDARWMFLDLPKIDGGIRLRWSRDLPSTPSSVTVMLHADGTYEASFVVKAGPKAPPRPKHDACGIDMGLGSLASIVYSDGTREKVAPLRALRKAERRLRKLNKELSRRQRGSNNYSKTRLAKARLYARIGAQRRDLAYKLASRVAGENQAVAMETLCVKGLMRTRMGKSVADAAWSMFTDRVDVLCAQ

SEQ ID NO: 52176 - protein, 376 aa, Vulcanisaeta sp.
MKAYRAILIKLPRDKCDVDYVKRLMALANLAYRGYEVWVPNMPKRVQYQLYGFKNYMESLVFGTKPKRWFTKTWVPLKTLRIYSDGTKRGATDALVVLDFKKNVIKLHQVCKNEPGYSIEAPMPRWAIDRVKEGGDVKYAMIGLKDDKPYLALVAERVVEPYQPSNYMLAIDVNAWSHGIAWGLIRDGKIVSFKQDGLNPQRIVSLYNQAVRRERKVGRLKRLGLVDEANAKRAGRLARGLRSRIYRLINEEAMFMAGKLVRKALRYGAFVVIDDVDWEGLRELLTRKYGGRVGKLLLSGLKRFVKLLVTQLEWYGAPYEFRRLYSRKCPRCGHKLTQEDGRVMVCENCGFKAPRDKVPIHWAIRLSNSDREVDED

SEQ ID NO: 52177 - protein, 421 aa, Vulcanisaeta sp.
MGFNFVVLKLGWCSMRGFIRRSSRRIPEGTYHKALRAGAEVVEGNPNDLLWDLMLYRHAMQRVVDALWDLDEIPSRSQVHQLFYQVLRNYGFRAHVARNIYDYALALVKATKKNNGGNPILRKLSARLDYQDAKVELDKGVVRVILRSQWYTLRLRHRRDYVERFRGLRWKEVHIKYENGKLFVSIIFEFKYEPFMPRGIIALDVNLKMIVAYDGYEVRRRKTRFTDALSKKKRAEELQKKYPRRWRYSKRILNRVKELHRKARNIVTDWSWKFAKQLVMKALKHRYAIALEDLNGLKERASNVNDIVAWEFTMFAYRKLQHAIIAKAIEYGVPVIIMNPKNTSRTCPICGHKLTYIHRLATCEKCGFIADRDTVGAMNIWLRVLQAYAGTRGLSLSAPPMKDENRRRGRKTNEGMKIQQT

SEQ ID NO: 52178 - protein, 387 aa, Chloroflexi sp.
MIVRKAFKYRIYPNREQQQRLAVQFGHARYVYNWGLAYSEGKYPGYNRLAKQLTTLKASEETSWLREAHSQVLQQSLKNLDRAFENFFSKRAGYPKFKSKRARQSIRYPQPQERWLAPNGRHIYLPKVGHVRLVMHRPLAGAMKNITVSRTKSGSYFVSLQVEMELAEPVYCGNAIGLDLGLSEFAVLSTGEKIAPPQYYRRAQKKRRRLARQLSRKKPRSRNREKARLRLARLDEHIANQRRDFHHKLSRQLVEENGFIGLEDLNVRGMMTNHHLAKSIGDVGWSAFTAMLAYKGGWYGCHIEQVSRWYPSSKTCSTCGAVMEAIPLQVRQWQCPECGVIHDRDVNAAINILHQSTAGAAERNAWGQYVRPDPVGQRWLNQEANPL

SEQ ID NO: 52179 - protein, 322 aa, unknown
  TnpB Polypeptide
MLFRQGFLFKLKPNGRQARLMSRFAGCCRFVYNKGLSWAKEQYENKTGKHPSYKNLSALLPDWKKDPEMLWLSECYSQCLQQSMKDLSRAYCNFFSGRTAFPVFHRKYGANDAFRYPQGFKIDETGKQIYLPGIGFVKYRRSRYIEGKAKNITVIRKADGWYVSIQTEYEKEVPVHKGDEVGMDMGVAWFCTLSDGTQIAPCNALKKHLKKLAQMQRALSRKEKFSSNWKKAQREVAKLHQRIGNIRQDFINKVALDLSKKHAVIYREDLRIKNMTASAAGTVEEPGHNVGQKSGLNRAILDQAWGKFFQRLEWKCEQRGAK

SEQ ID NO: 52180 - protein, 371 aa, unknown
  TnpB Polypeptide
MKSITITAKVKLYPTSEQMIILNKTLSVIRDVLNFVSAFVFGREGIRYLELDHALYYPVRQQFGLRSQMTQSVFKTVLAKYKSMKSNGHPFSKVSFRNFEYDLVWNRDYSISDQSVSLNTLSGRLHIPFEPKGMEHWLRAGGRFGTARLIRKNRKYYLHIPVTLEVENRNILNHIVGIDLGVNHLAVSFDDEGNTRFFSGRAVKEKRAKALALRKRLQVCGTKSAKRKLKKLREKETRYVTAVNHAVTKALISQYGAGTLFIIEDLTGIRTATEHVRLKSRYVMVSWAFDQFREMLEYKAALSQSEVLAADPKYTSQSCPVCGNTTKANRNRRKHEFCCTVCGYRSNDDRTGAINIYRKGCNTLFAEACQA

SEQ ID NO: 52181 - protein, 366 aa, unknown
  TnpB Polypeptide
MNVDRTIKLKLSVSEEDKETLKQTITIFNTVFNEVAEYGFENKTYSKVSIHHATYKQIREKYPKLPSSLVQGARDVACEALKGVKLKHLPKAKTYSSIRYNQRVITYYLRYGKVSLATINGRIKATFNVPEYYRDYINWEVRSSTLKYDVRKDAFFLHVIFRTESPKPSGDKVLGIDRGIVNIAVCSNNVFFNGKQIKNVRAKYAFLRQKLQSKGTKSAKRLLRKISRKENGFVTDTNHCISKTIVNMPYDIFALEDLTSIRVQSRKGKDFTRKLNNWAFYQLAQFIEYKAEALGKSVIYIDPRFSSQKCSKCGDIRKSNRNGNSYHCKACGFEIHADLNASRNIAQAGISCLSRLSVNQPNVTTV

SEQ ID NO: 52182 - protein, 389 aa, Streptomyces sp.
  misc_feature (337)..(366): Xaa can be any naturally occurring amino acid
VHLRYSYRLYPTAGQRQALARTFGCARVVYNDALAARKQARKDGLPYPRSADLQKLVITGAKRTAERAWLASVGVDPLIQSLRDLDTAYRNFFDSVSGKRAGRQVGLPRFKSKRDNRQSLRFTRNGFRIRGNGKLNLAKIGDVRVKWSRALPADPSSVTVVLDPSGRYHASFVVDVEPQHLAPLDTEVGIDLGLTTYAVLSDGTVIDNPRFLRKAEKKLKAAQRALSRKARGSKNRAKARRKVAKAHAKVADTRMDWAQKQTTRIIRETQAVYLEDLNVRGLARTRLAKSVHDAGWSTFRRLLEEKAARYGRHVGIIGRYEPTSQVCSTCGVLDGPXXXXXXXXXXXXXXXXXXXXXXXXXXXXXXAPPAMTVTSMLLETSWPPDGRTG

SEQ ID NO: 52183 - protein, 424 aa, Ruminococcaceae sp.
MNIVHVQSTPIDNTMVKSYRIKLIPTEEQEKMLWAHVDAMRSVWNWGLSVNMERFRNGEKHLTKMSLGKILTELKQNDEGFKWLNEVSVQTLAMALLDLDNAYAAFFGIQKKGPKYTENKIKKFKIRNKKLTPYEMNGHPKYKSKHEAESKFYTRNDGVYLLKGSVVLEKIGRVKYQTNYAELPIVGKRSENTTKYINPRVRYESGKWILSFGIERESAKRELNDYSVGIDLGVSDLAVYSYDHGTQSGRAKNVNKKKHVRRLKKRMKRRQRSVSRKYRANGNHEKTARIVKEEAKIKKLYRKLANIRHNHAHHATSEIIKLSPGRIVIEDLNISGMMKNKHLSEAIAEQCLHEFRRQIEYKAKWAGIEVVLADRFYPSSKKCSSCDAIKRDLKLKDRVYKCDECGLAIDRDLNAAKNLEMYAV

SEQ ID NO: 52184 - protein, 403 aa, Streptomyces sp.
VAKTQVKRAFKYRFYPTDAQAAELSRTFGCVRKVYNMALAARTEAWARQERVNYNATSAMLTAWKKTEELAYLNEVSSVPLQQTLRHLQGAFTNFFGRRAKYPHFKSRKRSRKSAEYTTSGFRFRDGKLTLAKMAEPLDIMWSRPLPEGASPSTVTVSQDAAGRWFISVLCEDPAVIPLPATDAEIGIDAGLDHLVSLSTGEKIANPRHERKDRARLARAQRELSRKAKGDGTNRAKARRKVAKIHARIADRRRDRLHKLTTRLVRENQTLVIEDLTVRNMVKNRSLARAVSDAAWRELRGMLEYKCAWYGRNLVVVDRWFPSSKLCSACGALQDRMPLNVRSWTCDCGATHDRDVNAAKNLLAAGRAVSACGTGVRPQRRTPGGQSATKQEIHGATRGISRL

SEQ ID NO: 52185 - protein, 636 aa, unknown
  TnpB Polypeptide
MAKTQLLSFPIRLPDCMQSDSLRLLDESQSAINQLIEELWDRLDEFAGERTGIAWKQVEHYLVTRSGHGSRQERCEMEQAGRILRAQATRKQVFQTILPLLIDTLIKPAEGSRRAPKDYRAIKEQVSALREALDAPDAFMAMTNVVEQACNYFLETEEWPASYEELQPVPVLKAGMLSFAGDDGMVKGQTYRARIDARHVCDVATHQVREGARLFLHLRAPDETGTWKWGSVCGIIELPKPVVEALAKGAVPQAPTLREIRSDDGSRVAVLDLILEVGASYVGDLDQQTRVLGWDWGVRSLITVSILQKPEGAGDYQQIGRPVFLDTGGLDGRQARLRREIDRLKTCRDRYVKLVKAAVIARVERKIPLPPHFQKWQDHIDAYDARIKLCWKKYERRNRELAHLAANLLILLALMYDCQLICGEDLTTLKTIGRGRGVRGRFRNWRNNTTVRGELWRVLRYKCYLLGLRCRHVEARGTTHTCPRCHQPAKTYLSPDPTHRRKADDWAPWLCCGNPACDWNGARDYAASLNIARLGLAFLITYHDTKRYEAYRMSESKDLLKPVSYTGTGATLLLPSQGITPRPSEGKHVYYAGWSNSIALRTSQSKSILATLSTSQLRKRLLDSAYSSLSYVFLQR

SEQ ID NO: 52186 - protein, 397 aa, unknown
  TnpB Polypeptide
MYQVRRVTIGKTVQLDELARECGRLYSQTLSSFWRTVRHKCIWLKPKHLMRWHTSEKLHAHTADACVQAFFASLKSWRGRKKSGDPDAHPPRKRKWYFRIEYKSTALRHKNGKLTLSNGKGNAPLVLDWPWETPKTVVIHWMGTQYEAIATYKIEVQGQPQGDKVAGINLGEIHMAVSHDGTETIILNGRLLRSKRQYQNKLKEHLSKKIDVKKRGSRRRKKLARSKQKQLKQLRNQIKDIEHKQTTRLVSTLQSDGVQTVVIGDVRDIRQDLDVGSKTNQKLHQWSHGSVRHKLTYKAERHGMLVALQEESYTSKTCPCCGHRRKSAVQGRVFRCTNKKCRWTYHRDGVGAINIRQKYRGDFGSCVVGHMARPISIRFVAGVARSEKMYEREAVGL

SEQ ID NO: 52187 - protein, 388 aa, unknown
  TnpB Polypeptide
MRANLIAFKYFKLQRCMMETRMYEFRIYPSGRQKARLFSQFDICCNLYNTLLEQARIAYKVDGKTDTRKFTLINAIKAIKSGGPALAQVYSQSLQNVADRLSKAYANFFRRVKERKAGKKVKAGFPRFKKRFRSITYPQSGFKFKSASRLYCSKIGSIPIVLHRIPKGKIKTLTIKKNQAGQWFAVFACEADIKAVPSTGKTVGIDVGLENFATLSDGVVIENPRFLRKSEVRVKLLQRRVSRKVKGSHNRGKAKFRLAKTHIKVLNQRKDFLHKLSRQLVASYSKINVEKLGISNMLRNHHLAKSISDASWSDFISKLRYKASSAGCEVIEVCARNTSQRCSNCGEIVKKSLRTRQHTCPVCGFSVHRDLNAAINIRALSRAGLART

SEQ ID NO: 52188 - protein, 376 aa, unknown
  TnpB Polypeptide
VKAYKFRVYPTKAQERELNKHLWIAKNLWNELLEHSKQNYENFELFPTKNTLQAMSKNHGLFSQTQQEVSHRVFESVMRTFKLRKKGIDCGFPRFKSIDRMRSLSYPQAGFKLLSDKELKVSPFGKLKIRQHRKIEGKIKTLTLKKAPTGKWFATFCVEQEPKLPRENLGQQVGIDLGLKELAVISDGTVIHNPRHLKDYESDLASAQRQLSRKVKGSKNRKKSKLRVAKLHEKVSNTREDFLHKTTTQLVSNYSLIALEELAPKQMAQENFGKQINDASWGKFANMLGYKAESAGCQIVFVNPKGTTKTCSCCGFSQDMPLSERIYYCPSCGMIKDRDLNAAINILNRATLGHSGSNASGDYPIGLSVKEEAHAL

SEQ ID NO: 52189 - protein, 335 aa, unknown
  TnpB Polypeptide
MILTYKVKHGRDFTTELGKARKIAKFAIVNRDKLSTKSVKHIGLKAAISNQILRKYGRNKKAESITSVNLVVPNYHIRNTGTHITIPCLKLELDLPVKNFTKVNQVELNKEYAFISVTVPEQELVEPKSYLGVDLNATGHIAVMANPETGKVEKMGKQARYIHDKYKHIRKTLQKQGKLGLLKKIKHRESNKVRDLNHKISKHIVEVAKEKGMGIKLEAIKGIHNTRKKSRSFNHTLHSWSFYQLGQFIEYKAKLNGVAVAYIEPAYTSQNCSICGYLGKRNGKEFECSHCGHVDHADSNASFNIAERQIQNIGLLNIDRDMFKGYTDTPKEALV

SEQ ID NO: 52190 - protein, 388 aa, Clostridium sp.
MIKTIKIMLNPNNKQRTRLFQYAGASRFAYNWTLAREKENYNNGGKFISDTDLRKEFTKLKKQEEYKWLNEVSNNVTKQAIKDACNSYKRFFKGQSKFPKFKSKKKSKPSFYQDNIKIKFSETHVKLEGFTPSKKQNKQKLNWIRLAEHNRIPTNCKYVNPRITFDGINWWVSVGIEYEDNYNISKNEGIGIDLGIKDLAVCSDGKVYKNINKTKRVRKLEKKRRRLQRQISKKYELNKEGRSYCKTNNIIKSEKKLLKLNHQLTNIRHNYLHQITTEIINRKPMFIVLEDLNVNGMIKNKHLSKAIQQQCFYEFYRQIEYKSSWNNIKFIETDKWFPSSKTCSKCGSIKKQLKLSDRVYVCEECGCIIDRDLNASINLMKYGIKSIA

SEQ ID NO: 52191 - protein, 397 aa, unknown
  TnpB Polypeptide
MSKLVIPNGYVLKAFLIRLEPNNKQETMLYKTTCTSRWAYNLALNKKKDYYEKTKKTLSGGEIRKELTQLKKTDEYKWVSEFSNNVTKQAIKDCDTAFSNFFKGKADFPKFKSKKKNKWSFFCDGNKTKYLGSHIQIEKIGKIRLSEKDRLSFEDDECRITSTRVSKRGNNWFISINTIIKDRATYSIPTNNGVGVDVGIKDLAIVSDGTVFKNINKSKTVKKLEKRLKRLQRKVSRKYNINKVKKGESVSFIKTNNIKRLEKEIQSIRDRLNNIRRNYLHQTTNSIVKQKPSYITIEDLNIKGMMKNKHLSKAVQQQSLYEFRRQLAYKSKRNNIELRVVDRWFPSSKTCSECGYIKSDLKLKDRVYICPCCGLKIDRDYNASINLANAEIYEISL

SEQ ID NO: 52192 - protein, 400 aa, Roseomonas sp.
MLNRGYKFRLYATAEQGVLFGQYVAVCRLVYNLALEQRRDWWRQFKANTGSSISYASQCRELTALRAEFDWIAAVSIICQQQALRDLDRTFGNFFAGRADYPTPRKRGLNDAFRFNGRECPWRKLNAKWGAVKLPKIGEVKFRLTRDMPVTVKNVTVTRDDLGWHVVFSTEVEHDVPQNFGPAVGIDRGVVRTLALSDGTFRDLDRERLNLLDRRARKQARALSRKKRGSRRRAEAKRLVAHTKATAARLRRHWNHERSREIADAFGVVVLEALDTKGMTASAKGTAAKPGRNVRQKAGLNRAILNNNWHQFETFVGYKLAANGGQLVKVPAAYTSQTCSSCGIVDKASRESQATFKCGHCGHAANADTNAARNILRAGTQPAPRLADGRSVKRELKRVA

SEQ ID NO: 52193 - protein, 630 aa, unknown
  TnpB Polypeptide
MKKKKKEKDKDKKRKSFFSQKEKGPIITIKTSLKSILKDYKSNYSIINKLVIDCNDIVIRTYQFIRLYLLDCYHKNKTIPILDKDNILYFIRAGGIRDNRGRHQINNEFQTELELFYDTEFKECINKEKYNLKNKSYIIPYLAIQIQTGLNNNIKEHFITRIRRFMNVFAPIDLSIDENKKIFNTVKNLILLDTMDEIPDEIKEWSKWIRNNFLPTEYEKSFGYDCKVNPNKYFYYTIKMNEEIEKKNLNCNDKIKLFQPIPLRNSIIPHYITLDASGVLSIFGDDGESHLGRKINENKEKIWNKIFNMKNKILNKKGYEFKTFQTDGVGVSICYQKIGCKIKQDNEFIEWDELYITDLDDEELKECKKRKLVAVDPGKHSLVYMLDEDNKKLRYTACQRRIESYRKKCNMISRWEKLNNNIIEEETKLSNQNCKTIDYNNFKIYIKEKTILNDKVKNFYEQDIHRKFKWRTWIYQRKSEDNFISNIEKTYGKKEDILLCYGNWSNTKQMKYLMPTKGIGMRRAIEKKFDVVLVDEFRTSKLCSCCHGELENYKIKNKKLHRLLICRSCKSNGLENKNITFMNRDMNACINIRKISSDWINHKSRNNNFCRNICIDSNKGEKQCRSIVFT

SEQ ID NO: 52194 - protein, 294 aa, Escherichia sp.
VKRLQAFKFQLRPGDQQECEMRRFAGACRFVFNRALALQNENHEAGNKYIPYGKMASWLVEWKNATETQWLKDSPSQPLQQSLKDLERAYKNFFRKRAAFPRFKKRGQNDAFRYPQGVKLDQENSRIFLPKLGWMRYRNSRQVTGVVKNVTVSQSCGKWYISIQTESEVSTPVHPSASMVGLDAGVAKLATLSDGTVFEPVNSFQKNQKTLARLQRQLSRKVKFSNNWQKQKRKIQRLHSRIANIRRDYLHKVTTTVSKNHAMIVIEDLKVSNMSKSAAVRSASRGAMSGQNQV

SEQ ID NO: 52195 - protein, 386 aa, unknown
  TnpB Polypeptide
MKKLLKSFKTEIDPTPEQKVKINKTIGTCRYVYNVYLSHNKALYDKGEKFMTGKSFSVWLNNEYIPNNPDKAWIKEVSSKAIKKSIEDGCTAFTRFFKHQSSFPSCKKKGRSDVKMYFVKNNPKDCKCERHRISIPTLGWMRMKEKGYIPTTKDGYAIKSGTVSMKAGRYYVSALVEVPNVNVRNNTNDGVGIDLGLKDLAIVSNGKIYKNINKSARLKKLEKRLRREQRCLSRKYDNRKKGESTQKNIQKQRLKVQRLHHKIENIRTDHINKTIAEIVKTKPSYITIEDLNVSGMMKNRHLSKAVASQKFYEFKIKLKAKCEDNGIELRVVDRFYPSSKLCHCCGRIKKDLKLSDRIYKCECGYIEDRDYNAALNLRDAVTYEVA

SEQ ID NO: 52196 - protein, 317 aa, Geobacillus sp.
MPTITLKLELHNPTKVKQDMYERMTEVNTSFANWLLNHPKLNQATSKLFKEFSSQRFPSAVVNQTIREVKSQKKSQKAKKFRTFWCCFNNQNVKVEKKGEFYTVSFPTLEKRVGVPVVTRPYQEAWLNRLLNGTAKQGAAKLYKKRKKWCLAVAVTFEVEPRHETKVMGVDLGLRYLAVASVGTKSWFFKGNQCAFVRRRYAALRRRLGKAKKLHMIRKIGRKESRWMKEMNHNISRQIVNFALANGVGVIAYKAEMAGIRVEWVDPTYTSQTCKCGYREKANRNGIHFRCQRCGYTLHADLNGAINIAKAISGFVA

SEQ ID NO: 52197 - protein, 456 aa, unknown
  TnpB Polypeptide
MILIMPNKFVICGETQHRALKLRIYPSQEQEVLINKTFGCVRQIYNNRLFERNQFYEQIIKPSKPEEHKALWKTAHFSTEKEMKAKFPYLAEVSSQALCSATMFAEQAYKNFFASVKGTRADSQVGKPKFKSKKSHDFSYRECMNIALIWNERKIKVPKLGLVRFRHSGNKKGKLDFFLRGEVELKSITIRKNPANEYYAVLLFEREYCHKKKVYEDDDSQAIGLDFSPADFYIDSDGSSGKDFGYVAQKQANLKKLTKLQRRLIRKQIGSNNREKARVKVARMEHYIAECRNDWIEKETKRLVSSYQVIGIEDLNLKGMMKFSRNAKNYGDASWGNFTNKLLWKASLNENNCQIVKADRFFASSQICHCCGFKNPITKNLNIRSWTCPECGAEHIRDVNAAINLKMNAIKTVGQGVSEFRSVEGVEDLATLALQIGASEEAENLTGDGQNVLTLL

SEQ ID NO: 52198 - protein, 526 aa, unknown
  TnpB Polypeptide
MSKNTLYRSYEIEFPKKLIPTYDVLQTKLLEILNNRHYYDQFNNFPIHNDDGSLILNGTFWQIGRSLFPENYFDTWNLGGNAWYFRMLLDTIWRSLKSLDEKRQIYTILKRHDFKKTEALRKELSDNKLFPTNKELKNLIASKKYPNLSKDLTFIMDFSVSSSTTLKTVAENHYQLRVDKDTWCDYRILTPLSLRLELTGHLAKPSFRRKASGRYHGMCSYEVKPIDMGLEDNILGVDLGFVKLFSAVVLTSDNSLSREYNNSERLQALYDKLTRVYEAKRRLYNRIRKSRATTQHIYTKNLRRCVELENLNTKIKNLKKTLMEELAAETIFLALREKCNIIKVEDLGVMSNITGKWNYGCYHKKLNDLAELYHIEIVKVNPAFTSQRHPITKEKGVLRGRNIVFSDGKTYDRDYIAAINIALSPRGQKHSERTIETRTIETLGPKKKRERFTPETSNKKMKQQRLLKSQMKKSFKQSQVREIVTYCHKANELSLNYAAVLGYNSVMSSYRYKRPISTHNYRLDPQ

SEQ ID NO: 52199 - protein, 359 aa, unknown
  TnpB Polypeptide
MLRSFKTKLKLDDRQATVMARHAGYSRWIYNWALRLWGEAYQAGLKPSAHRLKKFFTNHIKPLYPWMNELSSKVYQYTFIHLGEAFNRFLTGLGNYPQFKKKGRHDSFTIDNSGKPIQLVGINHKLPFIGQVKTFEPIPECVTKKVTISRAADGWYLSFTYCSEPIKTAKICQAVGVDLGLKTLATLSSGIIFENPKPYKRAFKKIKGLQRKLSRKVKSSENWSKARHKLARAHQKVTNIRKNTLHQITSYLAKNHSQIVIEDLNVLGMMKNHCLAGAIADVGFYEFGRQLEYKCAWYGSELIVASRWYPSSQLCSSCHHQQSMPLSVRVFKCDRCGFEIDRDLNASINLENYPHTAVG

SEQ ID NO: 52200 - protein, 560 aa, Mycobacterium sp.
LRQWRGAKPVAAPPGVAITTRLRTTADEDRVLNLVADHLGRLRRTDLVAASRPVSLDVRLDPDARRGVRRGQLNARKKALTRQSSARWANTVIAGNDDQYRLSRDSQCRHIAMLRSAISTIEARLVAPTADTLTMAERRACRKAKAVKGYATQTERFQKQRRAQHLRAELAGAERDWVAGRVHVVEGGKHLASKRHHLEAAGLTAQQWRQQWAAARWRICANGSRDEPFGNLTITVTPDGKVSIRLPKPLERLANAPRGRFVLAGAAAFSHRGDQWAERITSGNSIQYKISRRPGRGGVYLTGSWAIPPLPYWAGQAGRGPGNDLFTAGTVVGVDLNDGHIAARRLDEYGNPVGAARRINFDLRGSTGRRDAQVRHAITQLLRYTGRHGITTIAVEDLNFADARATGRETMGRGARGSRFRKTVVGIPTAVFRNRLAGMAPAAGIELWAVNPAYSSIWGGQHWQHPFVNVTRHQAAATVIGRRAQGFSARRRKGVTPKRPEDRPVRATNQTAPNSPTATGNRHETGIRGTTSRAPNSTRKRLSGRVTVTPATANNGRLQL

SEQ ID NO: 52201 - protein, 342 aa, Okeania sp.
MVTYLLLPDKGKHYYNSFSYPQLSNTKIVKNTNGRYCVNLPKIGLVPFVYNRPIPEGFKVKTGTVIREADGWYISLTIEDQAIPLRRAEIQPTSDNSKGIDLGLLHYAVTSDGEFLEVPKFFRFSEHRLSKLQVRLAKKSKHSQPWKIIKRKIAKLHQLIARQRLDWQFKLAYHLLSDVSVIFLEDLQIASLVRRCKAKLGDNGQFLPNGQSAKSGLNKSLQDAAFGKFVQILEYVGWKLGKRIIKVDPRGTSQHCSRVDSVSKSLSERWNSCPKCGQELDRDYNSATPLAPLPGGDGGGLDYYQHRGRTSPLSKRRSGFPRLKNPALSRKGKVGSMSIKYC

SEQ ID NO: 52202 - protein, 288 aa, Okeania sp.
IVKNTNGRYCVNLPKIGLVPFVYNRPIPEGFKVKTGTVIREADGWYISLTIEDQAIPLRRAEIQPTSDNSKGIDLGLLHYAVTSDGEFLEVPKFFRFSEHRLSKLQVRLAKKSKHSQPWKIIKRKIAKLHQLIARQRLDWQFKLAYHLLSDVSVIFLEDLQIASLVRRCKAKLGDNGQFLPNGQSAKSGLNKSLQDAAFGKFVQILEYVGWKLGKRIIKVDPRGTSQHCSRVDSVSKSLSERWNSCPKCGQELDRDYNSATPLAPLPGGDGGGLDYYQHRGRTSPLSK

SEQ ID NO: 52203 - protein, 382 aa, unknown
  TnpB Polypeptide
MLNLTYNYKLEPTTQQIEIIEHNLDVCRSVWNHALYERKLWYNSRSCKVNQCSISSEYIVEPFEYPSYHTQSAKLTLAKKDNAFLKSGNAQAMQQTLRKLDRAFNDMKSKNIGFPRYKKKMKSFNVLGTFTLEENSLKMPLLKKVKVIKSREIPKGFKIKQVQIIKKASGYYANLMIELDVNVPSPFPHGHAVGIDVGILSMLTTSDGLTIPRPKFLDKALRKIKLLQRKLKKKILGSSNWKKLQHQIALLHEAVANRRKDYHFKLAHQLCKDVGMVFVEDINFVSWSKGLFRKQSLDMGLGQFFNILEYICSVTDTYFAKVDKNYTSQICPNCGTHTGKKELSERVHRCQECGFECERDLAAAIVIRDRGLTNIAVGLPVI

SEQ ID NO: 52204 - protein, 403 aa, unknown
  TnpB Polypeptide
VRKTFKYRLEPASAQERTLEVVLWRCRTLYNVALEQRRRWWARGQGVGATYYQQKRELPDLKAACPEYASIHAHLLQDVILRVERTYQAFFRRVKNGETPKPVGYPRFQGQDRYHSFTFPEYGNGVVLDGAILSLSKIGRIPVRLHRPLEGTPKTVTLSQEADGWYVCFSCADVPTQPLSLTGWETGIDVGLRVFLITAEGKVVENPRYYRTAERELKKAQQRVSKGKKGSTRRRKAVKLLAKKHQHVRRQRTDFHQKTALALVRQYDVLYVEAMQPANLSRRPAPVPDGSGGYLPNGASAKVGLNKSIQDAGWGRFLTILACKAEWAGKRVEAVSPAFTTQDCSGCGERIQKSLSVRTHVCTNCGLVLDRDENAARNIQWAGQALRGVPTLVGAMNREAPSL

SEQ ID NO: 52205 - protein, 339 aa, Acidimicrobiaceae sp.
LTGLDEVRPEVVASGITLCRGTLKRLDRAFAAFYRRVKSGGTPGFPRFKSAQRFDSLLWEDKSGWKIKFDVSRLYVLGIGEVKANFHRPLGGTPKAITVKREGTKWWLSVRCIDVPALPLAPSGREVGIDLGITNVVATSDGELIVGEHFGGDTKNRLKLEQQRLSSKQRGSRRRRGQVEVVARLHRKVANQRKNAAHQLSRRLVNEYDVIVLEDLAITNMVRKPRAKPDPNRAGVFLPNGAAAKARLNRSIHDAGWGNLASLLSYKAESAGRVVVTVDPRYTSQRCAECGHIEAANRVTQAVFRCCSCGHGDHADVNAARNILGAGRALQALACIDRN

SEQ ID NO: 52206 - protein, 331 aa, Mycobacterium sp.
LAEVEKAFVRSEGGFVVAVDAAAVVDPTVGAFDHPASGLDGEAVVGFRPGNHLHGDIRLGRGGGDDLAGVAVVHPHAISRRGGRWWIFVNVEAADLHPAHQHPASDPAGHARWVGVDRGLSAFLVAATADGTEVARISDAPKALAAGMKQQRRLSKSLSRKKKGSHNRTDAAARLGRHHHRVADMRRHFLHQVSGELVKTHDRLVIENLNVAGMLANHHLARAISDAGWSEFARMLRYKQAWRGGRLVEADRWYPSTRLCPQCGAVDSAMTLADRVFSCGCGHTADRDTNAATNLARWARPIMTLIDPRTPSRRPGHQCPPTGRRWPTPSC

SEQ ID NO: 52207 - protein, 385 aa, unknown
  TnpB Polypeptide
MLKAITYELKPNSTQKQAIKKACGCARFVYNMALAYKVEQYKTNKFSVSEYELDKLLTGWKKEYLFLSDCHIHALQQKIKDMCNAFGNIRKIGAGFPKFKKKGKCKETFRVPEPCRIDYDKWTCSIAKVGKVRIYKGHNKQISNIHSYTVEYKPALDRYFVSILYETSERPQKKYDGTHCGIDVGIKTFATLSGGEVFENQKYLKSNLRKLRVLQRSAARKYKRGVKTEEQSRNWHKVKRQVAALHLHIANQRKDFNHKLSRWIADNYYLVSVEDLAVKNMVRNHHLAQAINDVGWQSFLSMLEYKCYAFQKVNRFFASSQTCGVCGYKNSDVKDLAVRSWVCPQCGTRHERDLNAAENIDREGLSLWRRKVSGCAMLAPEPCVL

SEQ ID NO: 52208 - protein, 433 aa, unknown
  TnpB Polypeptide
MGGGGMECVRRAIAVELERPLPELYAVEEPYRRIVEEVAAYVAERGTLEKEKYKELYRKFRKLYPHLPSQLIQQAMNQGVEIGKSFLELKRDGRVHKPRPEVGRVSMRFAKDSWSYKKAISSVAPVRLALSLPGGRRKVWIKPHRRFWLYWWKVLLKEAELASTLVLKRRRGRWYAVFIFDVASKREPPAEAVAFDVNENSVAVARVTLLSTVDAVAQWNRQYINPAVYSIRTDFGRLAKRYETVRNAKLEELKRKYPYAGRDEEERRQNVADTREFRKFVRRLRERRRKEGRIRQIASEVTRSPAVIITEELGKNPQEEMIGVEEKAKKGVKKKVEKRELRHRIRQTPFKRLVRAVEDKAAEAGSVVVYVSPYRNSKVCPIHFAFLRDNGSWHTLYCPHGHAVDRDAAAVLNMLWKTTPTGWVKGVWWDLKK

SEQ ID NO: 52209 - protein, 278 aa, unknown
  TnpB Polypeptide
LKQNGYNVGSLNWKAPKVSVVSPTYSLASSSIVRTANPYCRCRKLADIPLIKHRAIPDAETVKEITIKKESTGEWFASFTVGDKETPEKPTDPDRCVGIDVGILKYAHDTDGTAVESLDLSDERERLERAQHDLSQKERGSANWERQRQVVAERHADLKRKRRDFLHKLSNYYATEYDLVAVEGLDAKELVELPGNSRNRAGAAWGTFLRMLEYKCEREGTHFAEVDQGTRRKRARLAASRRTSRCGFVNTLVPLVWVWGRTGTRTQRGTFFLAVLKI

SEQ ID NO: 52210 - protein, 168 aa, unknown
  TnpB Polypeptide
MRSRSTSRNSRRRTTQANFTMPTPSVSRTKGYDSTTSPRTLSSGTSKIPHHGDYHLWMPAQPNPEQRDWLEALNAGDATMGESRLFERDGTWYLHVTATRDAEGGSEVSDEERTPIGVDIGEASLVTVCHRDDHGLPDRSRTMGRRREDRSSAPQDLLHRHEATSDTR

SEQ ID NO: 52211 - protein, 369 aa, Microbispora sp.
MRTAYKVRVYPIAEQVAVLNRTFGCVRLVWNTVLAWRQARYRAEGVTMPYAQTDRYLTELKRDGGHDFLYEVSSVPLQQALRHQHTAFVNFFAGRAKYPRFKSRRGRQSATYTRSAFRWRNGQLWLAKMDGPIAFVWSWPEVDPTTIDPTTVTVSRDSDGRWYASLAVETATEPEPAPATSSHTGIDLGVTHFAVLSTGEKIPNPRHLERKAKKLARYQRRMARKQRGSNNRAKARAKVARAHTKVREARADFLHRTSARLVRDHDLIVIEDLNVKGMIRNRSLARAISDCGWGEFRRQLEYKTQRCGRRLIVIDRWYPSSKICSVCGHLLATLSLSTRHWTCPDCGTRHDRDLNAAKNILAAGRAVSA

SEQ ID NO: 52212 - protein, 418 aa, unknown
  TnpB Polypeptide
MKLQKTLKIKIGKLSKNKQTILNRLITKNTKAINFCLQKAKKGKIITHNLVYKDLRKLNLPATVIHGCRAKSIEIIKSYKKVKKRKSKFPELKNSRVRYDNQIVKLRKTDNKLYKYFVSLLYKAGTKGKSNNRTELPLITNSEYQKEIMQQIGDTYKLGSTELVKKGENYFIHISYSKDIDIPTPDKSFSPVGIDIGINNLAVSVAQSGTVFHNGKRVSFKNEFFRRQKAILQRNFAMQEMKRLKGRQTRYNNHYINEISKSIINQAKKETKPMIVMEDLTHIRDTAKINKKQKYKLHSWVFKRLQKLIEYKANWEGIPVEYIDPYHTSQICSKCGELNKRIKHTYKCKSCGYEANADYNAGKNIQQLFLAKCQEEQASINNAFNPINLESKAEIDNRVKNISIHPTNKFVGILEVIL

SEQ ID NO: 52213 - protein, 434 aa, unknown
  TnpB Polypeptide
VLSLFKGVSTVHTFPLVAGGARSYDHRMQLRYAFRLYPEPGQRAALARAFGCARVVYNDAVRAREDARRAGEAFPAVGELSQKLITQAKQTPGRSWLGEVSSVVLQQSLRDAESAYRNFFASLKGERKGAKCGAPRFKSRKDRRQSIRFTANARWSVTASGRLNLPKIGAVRVKWSRTLPAQPSSVTVIKDAAGRYFASFVIDTDPAADATRMPDTDQAVGIDLGLTHFAVLSDGTKIVSPRFLRRAEKKLKKALRELSRRQKGSRNREKARLKVARAHARVADARREFHHQLSTKLISDNQAIGVEDLAVQGLARSRLAKSVHDAGWSAFVHMLEYKAARYGRTLVKIGRFTPTSQTCSACGAKDGPKPLNVREWTCTACGTRHDRDHNAAINVKTAAGLAVSACGAPVRPGVIPAQREETGSHGIPTDPCAA

SEQ ID NO: 52214 - protein, 396 aa, Methylophilaceae sp.
MLSATKIRIYPNAMQADKLAKAFGCARWYWNNSLAETQKVYQETGKGLGQYALNARLPRLKQELPWLAETHSQVLQSVSLHMSRAFVNFFERRANYPKFKSKHQKQSIQYPQGVKIVEDCKLYLPKIGHVKAIVHRPIIGSIKTVTVTKDPDGRYFASILTEDETSTPEVSFDGDILGVDVGLAHLAITSDGSKFANPKHVLRAEKNLKRKQQQLSRKQKGSNSRAKAKLLVAKAHSKTSNARKDYLHKISRRLVDENQVIAVEDLHVKGMMQNHCLAKHIGDAGWGMFTNMLKYKAARAGKGYIEVNRFFASSKTCSCCLHQQDSMPLNIRTWTCDKCGVKHDRDINAAQNIRNEAIRMIAAGAAPTANGGTVSQATGRKSSVLAGAVEVRSPCL

SEQ ID NO: 52215 - protein, 426 aa, unknown
  TnpB Polypeptide
MQLSHKIALCPNQKQLSYFRKAAGTARFVWNYALAAWEEAYRADGTVNPFKLEREFNARKADLFPWIMEMSSKIPNRAFANLRSAFGSFFRKQAKHPKFKSRRNRDSFYVHNREFKVVGKTLILCPAKGFGPIRMQEALRFSGKVMGATISREADRWSIAIQVDVGEYRRPRTGNGVVGADLGVKSLAVLSTGETVVGPKPLKKGLKSLRRLSRRLSRKEKWSNNRSKSVRKLAKLHARVSHIRADFLHRLTTRLCRENQAVAIEDLNMRGMMRNRRLARAVGDAGLGEISRQLGYKATIFGTEVVVADWWFPSTQTCSECGAVRVVKLTLADRVFVCDVCGYEADRDFNASCNLKKLIPVNDGELTPVERKALARPKGRVKPCLAEAGILVGVGGLIDAHAQLGQLGGRQEFWHGGLGAGSEGLL

SEQ ID NO: 52216 - protein, 356 aa, unknown
  TnpB Polypeptide
MLLTYNLKHNRDYVKELTLAKKIAEFAIKTRSNSSKDVRHIGLKSAMANQILRKYCRRGIKKASNVKLTIPGQSVRYDPKTRMTTIPCMKLDLDCQYFPLFSRIRQIEIGKEFAHLSVDVQEAPVASATKFIGVDCNTTGHVAVASNGATGKTYKLGKSAIHIHTKYQSIRKRLQKQGKYHLLKQIKNRESRIVRNLNHHISKKLIQIAASENCGIRFEKLSGIRKNKKHSKSFRYSLNSWSYYQLQKFTEYKARFQGIEVVYVAPAYTSQTCSKCGSLGDRNGKKFECVKCGHADHADVNASFNIGNPVSYCAFDPHRIKNMILLHADSDVCKGSTDTPQTATQKMTVTIEPLAL

SEQ ID NO: 52217 - protein, 463 aa, Thermus sp.
MPRQRASNLFQGVHARLVFPTEGDRRDTLDVMRRFSAAKRGGYRALLRGEPVDFLKSQNGPLCTRFRLNTRYAGDALMLAEAAIASARERGEDSRKVVFGGRKLFTQLSKGHVSGKRRKRLKQKWRESRQGHLYSRGEPGGNKNLRLVPKDGALWLRINLGDGTYAWSILKTSHPNLGKLVERVLSRQSYNVGLRLHEGEVYAHVTWTEEAPAPMHTRTNGVLGLDVNSDPYHLALAVVTPDGNLKRHLALSLEEVDRAPNRGAKELLLWKVAHQVVSLAEEHGVAIATERLKYLRKTMRGDGSGRAFRGKQHRFAYASLLRKVHALAKRRGVEVVEVNPQDTSTIGMLKYAPQLSLSKDVAAAYVIGRRALGFQEKLPKGYQALIQDGTFRAHVQDFYASRVRELEARHRAERNPYLKRRLVRELRKVHHSLSLLSSLQAHRGAKRDQPREGTPLALILGGS

SEQ ID NO: 52218 - protein, 441 aa, unknown
  TnpB Polypeptide
VKVVHHGFVWELGVVKPPSTPTILTYEYRIKPSPEQEAMMLHWLELLRRHWNYALGQRLDWLNRTRCQVDRCSIKFEPIGDIPERPNYHRQSGELKQTKVLFPEYKDIYAQVQQQNLMRLDKAWQRWMVPDKTGKPGGRPRFKKSGGLRSFTFPQTNSEKAGAHIIGDNLKLSKIGVMPVVVHRPIPDGFTPKTCTLIKKADGWYASIVIEDASVPSPLSLDTVKSAVGIDVGLKEFLVDSEGDAVPIQQYYRKAQSKLARAQRELSRKVKGSANYQKLAHKIACLHQFVARVRKEFHYQVAHKLCEKYDLIGLEDINIKGLAKTRLAKSILDAAWGQFSQILEAVAVKRGNWIVKVNPYGTSQRCSGCGKNVPKALSVRTHECPHCGTVLDRDHNAAINIKNLALNAVGLTVSACGSKRGYSACEAGIFICEEKKLTLYR

SEQ ID NO: 52219 - protein, 382 aa, unknown
  TnpB Polypeptide
MARRGNKAIRATVSMKIALSEPLLALVNNYVKALRFTLFWLKENVPNPNEKGVISKVHEALYTRLKGEYNLPSKVAQDCYREALATYRGWYNNPRKGRFPRVYKPTVWLTPKASYNVDFEAMTVRIASVGELPILGYPRNLREYLSWRMKEARLVIRNDKAFLKVVFEKKKEKVEPKESIAVDINMAEVVVGKDDSHYVRIPTRLDEVHHWKSLAERLQKKYPRRWRENKRILHRIHSFHLKAKRIMEDFARKVGKWVVEIAEDFGANVIKLESLKNLIKNVDKLPKEFRDKLYLMQYRRLQYWIEWQAKKHGMVVKYVNPRYSSVSCPKCGRKMREVFHRWFRCSCGYENDRDVIAVVNLNRRGSLTLSTAPQMRDVSPNR

SEQ ID NO: 52220 - protein, 191 aa, Chloroflexi sp.
IQGLSKGLSRKVEGSQNWWKNAKKLAKAHYRVACQRQDSLHKMTTKVARTYALVGLEDLNTKGMLANHCLAQVVSDASFFEVKRQLLYKSEQYGGFVQLVDRWFPSSKTCHVCGWVKEDLTLADRVWVCEQCGIVHDRDLNAAIIVETEALRLITHVPVVASSGHKFACGAERSGPFEGETVCCEAGTTVL

SEQ ID NO: 52221 - protein, 429 aa, Microcoleus sp.
MLTLTHRYRIYPNSSQEQQLIEWMDSCRSAYNYALREIKDWCDSRKCLIDRCSIEKEYILSPDLKFPGEIQQLNNLPKAKKEFPRLQGVPSQVLQQAIKQLHVGWKYFQERGFGFPRFKKYGQFKSLLFPQFKENPVTNLHVKLPKIGAIPINLHRPMPSGFVVKQVRILRKADRWYASISLQCNVRVPDPAPHGHPIGVDIGLSKFLATSDGVLVKPPKFFKQRHRQLKLLQRRLSRKKKRSKNYEKQRIKVARLHHQIDNMRKDFHYKQAHALCDAGAMVFMEDLDYRTSAKGMFGKHMLDAAFGQFRTIVKYVCWKRGKFFAEVDARGTSQECPECNGEVKKDLSVRVHDCPHCGYKTDRDVASGQVIRNRGIALLASLRPASPIISTLGHSGMETACADDLPKPEVTQSRQVSKSRKGKTRKTQS

SEQ ID NO: 52222 - protein, 423 aa, Saccharopolyspora sp.
MISMRTAYKVRAYPDPEQMAQLGRTFGCVRLVWNKTLADRHRAYHAHGKKASCKETDAALTAWKKTAEPAFLSEVSSVPLQQTLRHQHTAYQNFFLGRARYPRFKSRNGRQSAHYTRSAFRLRGGKLTLAKHTAPLAFVWSWGAETLASLNPTMVIVSREPDGRWYVTFAVDTDGPEPQTETGRAVGVDLGVKDFAALSSGEKIANPKHPDRKARNLARYQRQMTRKQKDSNNRRKAKNKVARAHREMRHARQDFVHKTSTRLVRENDVIAIEDLNVSGMTRSAKGTAHEPGRVRAKSGLNRAVMDAALGEFRRQLEYKADRAGKTLVVIDRWYPSSKTCSACGHMLSSLKLSVRHWTCPDCGTRHDRDIDAAKNILAAGRAVAGEAPGDACGAGVNPQGSSPRLSATKQEPSGASPMGIPAL

SEQ ID NO: 52223 - protein, 425 aa, unknown
  TnpB Polypeptide
VSHPWKSTGEKRTIVWYYEPPDEVVEYLKDMQEAIRYALQVAYRMTLRDEKHRLPSPIALRREVGGWFYSRYDYARHHINPVCRTAVAMLRSYRKNHQGELRIPEVKRLAMRIDGELFKIVEGKVRITMQPNNYVWLPVNTSNKHCQEYSKGRASELLITDTKVCLTFIIKGNAVKPLGNRLVAQDLNFKSVDSTKASLSSSQPSLTSVDTRSLKEIVRIQNDFSRRRRALQRHVKNPKKRIAKLRETRGRQRNRIKDALHKLSTKTVRENPDASFVFEDLIGIRKTSDGAKKSKKLRTYLNRWPYRMYQSMVDYKSDNRTVYVSSRGTSSKCPVCGGKLEHPVWAVSRCVKCGVDYDRNRLASLAILCRGLRLCGQPFAVSADASWKALRDEYLYPHSRPDALGAGWTEPSSVPNPDAYTKIHV

SEQ ID NO: 52224 - protein, 544 aa, Planctomycetes sp.
MSEEKKDKIKNGQVLAYPIVIEEKKVAEKLRETLEYVQQKSNEYLEFAHENRLYNVFDKNKSKYSYKVLEPIFVKLYRQSKLPSRINRGVLEIVGRTMRQVRDRKRVFDLLMKKTQDPKKWTSKLLVKDGIYIKIDYIKNIKEQVINYKRKNNNELPQDFYALQKPPKVKKKILTYAPDDGQAIKIEKKNNKVVVSFKVIDRKNGAIKWYWLKTNIKLPLFLEDKHITSPDIRFECVRGNYLPVLDFKVTIEKPQKIESGNFITFDWGVRKLTTLCVFNEKGQQLSQPHFVNFSRVQDKLQRIYKDIDHWKSKRDKLAHKDSLFKKCNREIAKRWSKITTLNKEIAHTTANIIVFFAQHFNCSKIYCENLKSLKSQKKSKDKNREINTTVRQKIMSLVDYKARLCGITLAKPVHPAGTSSLCPRCSHKGQHIKASDNKQKIHKTFSWFHCAKCKFSADRDYVACINIARKVLFKKNLKKCTKTVVYKKTRLPDSLFRQDAGAKTHCTSHIHYLKGWIHSVSLSSMVVQKSFNSFKGTIFGILRV

SEQ ID NO: 52225 - protein, 419 aa, Planctomycetes sp.
MLKVKKINFRTNKSDLQRLFDCNRISAKVYNDCLQISKNYSKQTGKWITKTELQKATKRKYPLHSQSIQAVCHKYLDARDAARSARAKGYNNRYPWREKNYFSTKWTKDGFRISEDKKRITLSLGIKDRKRQKSIVVRVKNLPQGKIKEIELVYNKKLMLAVCFEDGKKILANNSTQVAAIDMGEIHSIASVSETGKSLIITARELRSIKRLRNKKYREIYKKLARRKKGSRRWKKLKRAMHSIAGKMSAQQNDILHKTSHNFVKWAKENNIKTVVVGDVEGVQRNTSGRKKANPKKKRRSRKINQKLSQWSFGLLLSYLTYKLAANPIELVKENEAWTTQTCPVCNRKKKSRGRVYSCYCGYREHRDLHGARNILSLYKYKVIKNLDIKIDEIKYLRPAASGKSSRKLCSEPVRRVRL

SEQ ID NO: 52226 - protein, 405 aa, Planctomycetes sp.
VIKVKKTPFQTNKESLSRLFNCNRISAQVYNDCLKISKAYSKDNGKWINKTHLQQATKRKYPLHSQSIQAVCHKYLDARNAAREARKKGYKNRYPYKQKKYFPTKWAKDGFYIDYDKGKITFSMGIKDGKRQKPLSVKVDKLPSGKIKEIELVYSGKLHLAITYEDGYHPKENNSKTIAAIDMGEIHSIASVTENGESLIITARQLRSIKRLRNKKHSQIRKKLSRTKKGSRRHRKLRRAMHSITNKTDRQQQDILHKTSHNFLKWAKENEVKTVVVGDVEGVQRNTSARKKTNPNKKRRRRQVSQKLSQWSFGILLTYLAYKLAANSIELVCRSEAYTSQTCPVCHRKKKPSGRVYRCHCGYREHRDIHGAKNILSLHKYGSIQNLEIDVKQITYLRPAACGKK

SEQ ID NO: 52227 - protein, 474 aa, Planctomycetes sp.
MQVTIQAKLNKEHIQYLEKCAAHTAKRRGELLRALLRGEKLNELKKTFIAEKGMMARQFNSLHSEVKGIIKAAKELQKINVEDAQRRSKSLKRSIKKLSKALAGNKKDTVSEKKEQRKKLHFVLHHKKRKLRNVENRIEKLKKRGICLGGRKLFKKQFHLEENGYENHQKWLEEFRAKRGNRVFFIGSKDESFGNQNCQLLGDKLRVRVVPSLEREWGKYVNIPVKFSYKQETISAALKSQKAINYRFVKKGSDWYLFVTTKEKPAPITTKKELGTIGVDLNHSHVAFAETNRHGNLTNYGKIHTPIQDRSSEQVTAMLAEACKEIITLAKKQQKPVVIEKLDFSKKKKDLSAQKVPYRRMISYFAYKKFAFLMKSQGARNGVEIIEVNPAYSSIIGKYKFAYFWGISVHIAASFVLARRALNYSERLPARTARCLPVDRHCHVWKYWAAFTKIAASNRGSQVELFFCSRHIPF

SEQ ID NO: 52228 - protein, 376 aa, Deinococcus sp.
MAFHDPDRFITRNHTSSYPLLESLFEGRSSEASTHGPKGRIFDLPAGLQVTALDAHHLQVGEHVLRTDVFALPSAPLIAVVAASPLFRQYEGLDALLQALHDPDTGVDAFRRQLSAVVAGGLRSEQPAQLVNPSSGFLASWRPDQTRFIRTDEGHWFTALGCELNPSADLLSAPVRTTFGVDLGSSPVVCAAGGDRRVLGFGGQHFPLLDDLRRRRDYEEAERWVLRMLTYAVGRAEAEAAIRYLAEHGRTVYAEALTLEGMWGGFVANGRLQATFDFHFAWLPQGLYRAGVPFKRVSARGTSRLCHLHIHTIGKRLGRQFFCPECDGQQHADTNAAFNILDRGLARFGVLPMRRVRSLRRAGQEAKRRSGTYQSE

SEQ ID NO: 52229 - protein, 313 aa, unknown
  TnpB Polypeptide
LAISTASPARARPKTPSTASCAKTDLTANLVQKGIRRAIEAVTSGVEKLKQGKKTSQPEFDVWSVVYDKRSATFNDDHATLSTPNGRVTVEYVLPPKEEREETPLGRYYGSDDWDASSATLQYDEQDDTFYLHVTLKNPDYKVDGTERQEAGSRDDTRENGVVLGVDLNVTGTFAVTSTGEFIGSADYLTHKRDEYERRRGRLQQTGTRSAHLTIQSIGSRFSDWSLDWLHNRANDLIAEARDADVDGIIFEKLDHIRENIANGSKFQQWAYAKFVELVEYKVESTALFVDTVTPAYTSQRCSHCGFYPRGQS

SEQ ID NO: 52230 - protein, 465 aa, Gloeocapsa sp.
MYKTLPLKLYLSDEQRGYWLDQCTHSNKLRNVALYLIRSAHYERLDRLQAYGIYWFDDCLKSCWQTWYCSAPTSTYPSLYQELKTNEHYQALAAQSAQQTLRTVCESIKAYNALVKLYYEGQLDQKPKLPKYRKNGLFQVTFPKQALSFRDGFCYPSISRGAKDEVLSDIGIQVPDFIDTDWIKELTIKPLFGEFWAYWVIDDGKESVSCNEHLNYSEAIAFDHGGANWLTGVSTLGKSLIIDGRKMRSLNQGYCRLVAKYKHGKSDFYWDENLDRIQAKHNNQKRDLINKTARFIVNYCLNNQIGNVVFGWNGDIKQGSQMGKQNNQNFVMIPTKRLIDRVIQLADEYGIKVTVTEEAYTSKASFLDGDKLYPHGEKPDEVKFSGKRVKRGLYQTANGWAINADCNGAANILKKVVTQLGLNLIKVGRGALTLPNRYDLFTCVSKSYRKNAMRATSKDWQAAPI

SEQ ID NO: 52231 - protein, 528 aa, unknown
  TnpB Polypeptide
MMSIVTLENQPLLPQSATVESQAINNVATLNDKLNSCEINTLPHNSSETSEADSIPTFVGTCFKEEVLKPFWNEQCQELTSHLWLPTETGLQDLGLTSFDKLSSKMVENSWFSTRLYSRQNKNLQQTCSISSTYFPQECTDLEVIKSKSIKLSPTPEQNRLFKHWQDVSRWVFNQALNFMIVYETSEELGVKKPSWMDIKKMFTKTLPEWTKDVPFLIKGIAVKEAVEAFWATLKAHKGKKGKISFHFRSWKDTTQSCYVPKTAISDKGIYPRVSGKDLKLLEFLPEEVMDSRLVWRAGRYFLTIPTKQRVSYGENQAHVVAIDPGVRTFSTFYGTDSCGFLGQGDFSRIQRLAFHLDDLISRMSKVANKQKLRKMKLAAARMREKVSNLIDELHHKVALFLVTNFDCILLPTFETQQMVSRGNRKIQCKTVRSMLTFAHYRFKTFLKHKAFEFGKEVVDVCEAFTSKTHPETGEVKKVGSAKRIKLLNGQWINRDIVGARNILLRALVDQPHKVTWQLANVNKINVC

SEQ ID NO: 52232 - protein, 438 aa, Geitlerinema sp.
MLRQAQQQHGLPASLEGFDAPKIDRPQRFIEIVLKWQAKEVKALIHKAVKVRIYPTDEQKQTLAQHFGCARWWWNYALNLCNTTYKETGKGLTRTAINAHLPKLKKSEETAWLSECYSQVLQTTTLNLTAAFKNFFDKRAKYPRFKSKKYRQSIQYPQNVKVIGNRIKFPGRVGIVKAKLHRPIDGKIKTVTVSMTPSGRYFASVLCELEGDAPSPSPEGKVAGVDLGLKDFAIVNDGVKTSKYSNPRHLEKHERNLTRKQKKLARKSKGSRSREKARRLVARVHERLSNARQDYLHKLSRKLVNDNQVIVVENLNVKGMVRNHSLAKAISDVGWGIFVNFLSYKLEREGKVLVEIDRFFPSSKTCSECLFQVSEMPLDVRVWDCPHCRTHHDRDENAAKNIRAEGIRMLTVSGTGTAADGGNVRPKRGRKSVLRQSP

SEQ ID NO: 52233 - protein, 408 aa, unknown
  TnpB Polypeptide
MERTVRIQLHPTPEQAQSLLETMRQFTQSFNAVCKEGWRLKEGNAYTLHRLTYAQCRFDSPALNSNLHIQARQKASEAVKSAISLAKHKNAKHKNAKKGRKVNCPQSALCPPRFNRDTIKVDWQNSVVNLSTVAGRMLLSFRLSDHAAYAVNHQVATADLMYRKGKFTLHVVLKLDGVAFHENGQALGVDLGVCRPAVTSDNRFHGKKRWREVSKRRFRLRRKLQSKGSKSAKRHLRRLAGRENRFRRDCDHILSKSILNGITAGTTVVVENLTNIRQRVKATRGEAKRRLHSWSFAQLRQFLEYKAEALGARIVGIDPRHTSQRCAVCGFIYRGNRPSQSRFVCRSCGHRANADKNAALNIRDKFLVGWSSPSDGPLPDGLSSQPSPLPCAEADVLRTSPQPLGGGI

SEQ ID NO: 52234 - protein, 444 aa, Salinarchaeum sp.
MKRSNEFSVRLASSKKRRVFTRWLDASASLWNETNYARRQNFLNDESVWDADTGRLEGQYKSLLSSSVAQQITRKNSEAWRSFLSLNEKYHAGKLDEKPSPPGYWGNEDDGRVLRTYVRNDQYTIEFGQRSRLELPIGKELKDELGLNRNQRLRVEVSGDPKWRGEQGRLELVYDELEDTFRAYQPVTVDDSRLDSPLASEEAALDVGANNLVACTVSTGSQYLYSGRDLFEEFRSTTEQIAYYQSLLENQRKSSNRIDRLYRERTNRRDHAQDSLVRDLVERLYDEGVSTLYVGDIKGVLSTHWSARVNEKTHNFWAYRRFINRLECVCEEYGITVEEESEAWTSQGCPECGERDEAVRHEDSLTCRCGFEGHADLVASESFLRQQTTEVRPMARPVYLKWNNHNWREHHSPPSIAVETTANEEYTNQSTASSENIALGDSDD

SEQ ID NO: 52235 - protein, 430 aa, Lactobacillus sp.
MNLDSKQPSTEGDKHTFDSVSLKYKVVNRMPIKTHKIRIYPNAEMTTVIAELMDYNRFCWNKGLEAWNDMYNASLAMKDKKRRPSEYKVRDELVKNKTDWQYQFSARVLQTAVHRLHQAWQNFFNPAMPDAHKPKFHHKWNPKQSFTTDRAVITGKFLTLDRPHAASHRFGAIKMAETLRFTGEIKTVTITKRGKKFYASVNVLVEDTPRPAFYDCWDIVGIDVNVGHIRWNGGDINTFTPRMAALHQRIKYYQKYLNRKRRRNPGDYRSKTYQQITAKMNRAYEQVHALQDDLIHNFSHMIIKNYPVPCLEDLDVHGMMMDDKKVKGLQRGLFRRLRTAIEYKAAWHHRHLVIANRFFPSTQRCSNCGCIKTKESYGGKMTLQGDSIYHQHDVYRCYECGLVIDRDDNAVQNLIQYAAGLTPEWETVQR

SEQ ID NO: 52236 - protein, 341 aa, Lactobacillus sp.
MQNTQVLKMQIKFAPDDTSGPAAMQETMNHYRDACDLISQHVFDRNFKFSTFYLHAVFYKKLTDKTSKMYLKAQMAQSTTRTVAAQYKALETKQHQKAWGWNNPDTKKWVKERAKDLTDLWHPIHFKRPQVDLVFNRDWSVLDNWAKLSLNTIRGRVIVTPITTHWEKYLTGTWKFGTAKVIKSGQKWFVHISVAQEVPDVPLESIQRVVGMDRGLINILTAYNDETGETEFVSGKKLLNRRRYGKQQRKHLQQKKTSAARQRLKKIGHRENGWVTNMNHQLAKALLDFYGPGTLFSIEKLNDIREALENRQRIRSTSGSAGLITRWNSFCCTKPNNTAVS

SEQ ID NO: 52237 - protein, 403 aa, Lactobacillus sp.
VDLTKTVKLQIKLANDEDITLLKSAMEHYRLACNDASRYVFDHSFPLNAVKLQIALYSGLRDQFNLKAQIAISVLRTVIARYKAVRTQLKQKPYRYQDDTGKWRKQTKDLNWLWRPISFHRPQLDLVRGRDWSIRKDGSFSLNTLAKRIIVWPIMAHWANYFDGTWKLGTAKVLTSGGKWYLHIGATKAVPDYEQEQTTHVVGVDRGLRFLAAAFDDTSKTMYLSGTRALNKRRRYKKLRARLQAKGTKSAKRVLKRINQRENRWMSNENHRLAKTLVDHYGPNTLFVLEDLTGVRFVTEQVAKDQRYEQVSWPFYQLEQFLIYKAAAVGSQVLKVASDYTSQRCPQCGTINKQQRDREDHQYRCACGFLANDDQSAAMNIKELGDQWLAGTAKPRYTRKQAG

SEQ ID NO: 52238 - protein, 585 aa, unknown
  TnpB Polypeptide
MEQNIGRDGPKPDRRPKAVSRFHRGKLGPASKGIKGVFQHVLLVAETAAMVSRQTGITDTHTIDTMMYHMVKSDRVKADATQAAIKTGVAAMKAARTIGKDTEPEFKVPTIKLNNKCWRLNRVADGYVATANIGSGKHPVCMAINVPASVARRVLECRLGELTITPEKYVISYTKAVEPMPERDPSLGDTYTVSELASGVDRVAGPPRNVLGTDINATNTTTTSGSTTFWIDTSSEVEEVVNAKTRQVEAAKRDHARWEAKKGRPITRAKEEAREGAQRVRRGGPKKHNKLKRDSRGVERRRDEKKGEITKLEKEALAEPRKAWRKGIRDAKGNPEKQEAIKAERKAVTKELKAETRRLKKDADYKCRQELGRLKREMKRCIAPQNQKSDDGASPLQKQAQNNAKMRGAARASRNLENTLHLVSLFIVSWAAVTGSVIALEDLRNMASGWMRENKRFGRGMRRRLYSAAMLKLSDMIHYKARWAGVWAIYMNPRNTSKLCAACRYALEGRDYHLRYCRRCNVCVDRDVNAPHNVRRTTAAALFGPAVRARPDEAVRSPVKKLCYGDLRNDGMSIMADGKIVWVGR

SEQ ID NO: 52239 - protein, 375 aa, unknown
  TnpB Polypeptide
VEEKDMVLRHKSYKFRLYPNEEQKQLFAKTFGCSRAIWNMMLADKIKHYEDTKKTLYNTPAQYKKEFPWLKEVDSLALCNVQLNLQKAYKNFFQSGFGFPKFKKKSHRQSYKTNNNNGNITLENGCVKLPKVGWVRVNAHRQIKGVIKSATISMTPTGKYYISILCEVEITPLAKTNSSIGVDLGISDFAILSTGEKIGNRRFLTQLSKKLAKEQKILSRRALEAKKANRKLSESNNYQKQRIKVAKIHEKIVNMRRDFLHKLSTNLVKNHDIVCIEDLSSKNLMKNHKLAKSIGDVSWSEFVRMLEYKSSWYEKQVSKISRWYPSSQICSDCGFSSGKKPLSIREWTCTNCGSHHDRDINASINILNEGLRLLS

SEQ ID NO: 52240 - protein, 173 aa, unknown
  TnpB Polypeptide
MLKLVSRWKLEKSMRKLMREQRKLSRKEKGSGNRNKQRVKVALVHEKITNQRKDFLQKQSTMLIRENQTICIEDLKVKNMMRNHKLAKHIGSVSWSKFFDMLTYKSVWYGNDVVKVPTMYPSSQTCSACGYKNPLVKNLAIRSWMCPECGTKHNRDTNASINILNKGLQIQSA

SEQ ID NO: 52241 - protein, 361 aa, unknown
  TnpB Polypeptide
VINKQVTTIIIKLGKNDNLNSTVSTYNKICQEIINYGFENHTFNKNKLHYGTYKLIREKYPRFSSAMVQTARDHASDMLKSLKFKVKPIKKEYSSIRYDKRCLSVMFDKKKISINTMFGRLKLPLNVADYYLKYKDWKYTNAQLIRRKYKNYFLNLQMEQSPVEKQKEIKVLGIDVGIKNIATLSNNIFFNSKKLRNIKGKYQKQKSDLQSKGTKSSKRKLKLISGKENRFVKNVNHIISKQIVNLPYTLFAMENIKHIKTKRLNKTMRKNIGNWSFRKLMSFLEYKAERLGKSVIYINPRYTSQECSHCGFTDKNNRNNNLFHCNECGYELHADLNASRNIARIGISDFVQGAVNHPNVA

SEQ ID NO: 52242 - protein, 402 aa, Shigella sp.
VKRLQAFKFQLRPGGQQEREMRRFAGACRFVFNRALALQNENHEADNKYIPYGKMASWLVEWKNATETQWLKDSPSQPLQQSLKDLERAYKNFFQKRAAFPRFKKRGQNAAFRYPQDVKLDQENSRIFLPKLGWMRYRNSRQVTGVVKNVTVSQSCGTWYISIQTESEVSTPVHPSASMIGLDAGVAKLATLSDGTVFEPVNSFQKNQKTLARLQRQLSRKVKFSNNWQKQKRKIQRLHSCIANIRRDYLHKVTTTVSKNHAMIVIEDLKVSNMSKSAAGTVSQPGRNVRAKSGLNRSILDQGWYEMRRQLEYKQLWSGGQVLAVPPAYTSQRCACCGHTAKENRLSQSKFRCQVCGYTANADVNGARNILAAGHAVLACGEMVQSGRSLKQEPTEMIQATA

SEQ ID NO: 52243 - protein, 478 aa, Sulfurihydrogenibium sp.
MKTNQEIIGTYFYPCYANKGKADKVIQIITEYRKTAQRIAKYLWSEFFKTGKFSKYKDVKSIRSNLSERYKQTCLWQVISTLNSFVSNIQEKFKEIVYNSTLPEEIKKTLFIINKNKAWFSKDFECSSKIKKLARKIFKHNLKQYNKPSFKNINLHLDSKVAVVEHNKQSKTFDRWIKLSTLEKGKPIYLPIKNNRYAENLEGELANFCQISVDNNNIIVKLMKKLKKRKYLPETDTISIDLGLNPLFAASKGNLIGRNFMSFLKRIDEKITKRMAHLQKIGIKPKQDNKYRELVRKFREFLKNEINRYINRLVEIYKPATIVIEKLDFRNPELSKRINRLISNFGKRYIKDKLNRLQEIYGIKIIQVNPAYTSQVCSSCGYVDKKNRKDTNTFECKVCGAKINAQVNGAKNILARRSCEDIKLHHSKKQVLRILVKRYLERQKGCYSAPLEVIKSNPYFKDYLDDFLNPAVVGNKRL

SEQ ID NO: 52244 - protein, 489 aa, Sulfurihydrogenibium sp.
MPIRAYKHKHNANKNKVETVRRILKDYRKTAEKISKLQWYLFFKEGSFNKNYKINHIPSKLSERYKQTCQYQVVSVLNSYTSNRQKDFIKTVYRSSLDEDTKFILFVINKSKAWFNEKLTTAVLKDDKGKVIKELPIEKHHYKLSRKIIKQTFKKNRFPSFKHISMQLDQKVAKVEKRKEDKAKEFDWWIKLSTLEKGKPIYLPVYKNSYFEGKEGIHLNFVQINEKEGNIEIAFLKEVPKETSYLPKTNKISIDIGLKALFAVNTGDLYGKQFYKQLKYYDKIITKLQADLQRQGINPKGTKRYKELNRKLKEYIKNEINRLLNRIFKTYQPKEIVIEDINFQNSDLSPQLNRLLNRFGMKIIKQKLADFEERYGIKIIKVNPAYTSQTCSNCGYVDKRNRKSQEKFECLICGKKINADVNASRNIGVRSSNPMKSQSRRSVLRMLVRAYLRDDKHYACNSRAREVILGNRYFICFHEPLKITSKEKS

SEQ ID NO: 52245 - protein, 448 aa, unknown
  TnpB Polypeptide
MKRSAAGTVYRTAVVPVRLTGADYRLAHAAHHVAGRLWTHGIAGVRQFWRDHGTDPDLNEIRRILANADRELRALHAHSRQAIADDIVDAIATYRANRTRGHAGRARAPWRDKSYRPLTFTRGYGWRLDAKNSGRLWLSLGRGRPRLGIRVPDVIDSATGHPVAPHLWGQIQLCWNRDARTHELHIAYPSAAAALTLDPDLVVAIDEGIINPMTLATATPAGIEVTVINGRHARTLKHRRNTAVAALRKRMAKCIKGSRQWRRYDAALRRANHTAAAGLRNVDPQVSRKAADMIIAANAGQVSIGDVRGIERHTAHAERRRAGRHQRRRLSQWSRGRQERYLADKTGVTVEHINESYSSKTCPACLNINRPTGRHYRCHACQFACHRDAVGAINILMRTRHGAYTRIDPHSTIRVTYLRATPITAARRDRCGTEYSPEPGHPQHRLVA

SEQ ID NO: 52246 - protein, 448 aa, unknown; identical to SEQ ID NO: 52245
  TnpB Polypeptide

SEQ ID NO: 52247 - protein, 474 aa, Streptomyces sp.
LLLTSPTSQATCCIHGDSRYSRSGPTRSHTPSVSAIAIRCHLWGNVTRVRLVFSRPTPLSVPPVRVVIMRLRYAFRMYPNGPQRSALARAFGCARVVYNDALRARETARANGEAFPTTGDLSKLLITEAKKTEERVWLGEVCAVVLQQSLRDLDTAYRNFFDGLKGKRPRMGAPRFKSRKDNRQAVRFTANARWKITNGGDLSLPKIGDVRVRWSRNLPSVPSTVTVIKDAAGRYFCSFVVETVASEVLPESTGQVGIDLGLSHFAILSDGTKIDSPRFLRRAEKRLKRAQQALSRKAKGSNNRGKARLKVARAHAQVADARREFHHQLSTKLIRENQAIAVENLAVKGLARTRLAKSVHDAGWSAFVGMLEYKAARYGRALIRIARFEPTSQVCSACGVKDGPKPLHVREWTCGACEAFLDRDINAAVNVAKAAGLAVSACGARVRPGLVPAQRGETGTHRDGQPTVVGISSR

SEQ ID NO: 52248 - protein, 398 aa, unknown
  TnpB Polypeptide
MSRYRLLPTPAQEAVLRDHCAHARYVWNLAVEQHSHWHPGRTSAPGYLEQSRQLTAARAEHDWLAAGSQMVQQQALRDFAQAMAAFFDPANPAGPPSRRKARRDEGFRVVGRRGRQWDVRRLNRKAGEAWIPKVGWVRFRWSRAVPPGVKSYRVTMDRVGRWHIAFAAIPDPVPSPGNGEVVGIDRGVAVSAALSTGELLHVSGLTVRERKRLRRLERKLARARRGSERRKGVRLAIARLKGRETDRRKDWAEKASTDIARRFDTIRVEDLLIKNMTRSAKGSAGNPGRNVRQKSGLNREILRSGWGLLVRRLEEKAASRVEKIKPAFTSQRCSACGHVDAKSRESQARFVCTVCGFACNADVNAARNIAAGHAVAARGGFRDAGPVNREPQLLLQSA

SEQ ID NO: 52249 - protein, 512 aa, unknown
  TnpB Polypeptide
MKRRRAASTTIVPLAHLPFWSPSVAALSAQLWQPPHGRGIPVLPHTGWSSATCQSALVCPTLDEVRADYTAPVVKRQTKRRRGLVEGPQLPLPPTAIIVRKYRLMLSMDQRVTLKRWMGAARWVYNQVVAWIREHKSMDKAGRQAMRDTFVKNTAFPVGHWMRDIPTDVRAGAYRDALDAYDTNMKKRKKDPTFIFEMSYRSKKATSESIYVCSRGYHPVGDRQAKIYPTFLTMPFTARPALPSSVDKDCRLQRTVLGHFYFCVPTDVPLEPRPATSDNQARVIALDPGVRTFQTGYDPWGHLFEFGKGNIRRIERLCKHLDQLQATLAKPEMRAPRRYRVGRAAARLRQRIRDLVDDVHRKTAHFLATSYDVVLLPMFESQRMVNKNQRVGLTSKTARMMLTWAHYRFQQRLIQRGKRTGCEVRLVDEAFTSKTCGACGALHPGLQGAKLFVCPSCQHTIDRDANGARNILLRNAASIHLDVRPRPPSGSLSPGTLPQGSAQLAGAQASTS

SEQ ID NO: 52250 - protein, 466 aa, Bifidobacterium sp.
  misc_feature (360)..(360): Xaa can be any naturally occurring amino acid
MSAYEAVRIRLDPTPRQTRLLESHAGGARFAYNLMLAHVRRQISLGEKPDWTLYAMRRWWNEWKDEIAPWWRENSKEAYNSAFEWLSQALRNWSDSRKGWRAGRRVGWPKYKSKRSSVPRFAYTTGSFGLIEDDPKALRLPRIGRVHCMENATERVHGRRIVRMTVSRHAGFWYAALTVERPTESVPAKNRKRKNRNRQVGVDLGVKTLATLSDGTTFPNPRNYVRTQRKLRHAQQSLSRRDRGMSHGCGSKRYNRALGRVRRIHARIAAQRADNIGKLTTWLADNYSDISIEDLNVQGMSHNRRLAKHVLDADFHEFRRQLEYKTARAGTRLHVIDRWYPSSKTCSNCGTVKAKLSLSXVIDRWYPSSKTCSNCGTVKAKLPLSERVYHCEECGLVIDRDVNAAINIQVAGSAPETLNARGGSGRQTRLECGTMRHPAKREPSGGDSRVRLGAGLGNEAMQMTSL

SEQ ID NO: 52251 - protein, 280 aa, unknown
  TnpB Polypeptide
VRKINRAVKIRIYPNAEQRVQIEKTIGCSRFIYNCMLADKIEHYKKEKKMLRNTPASYKKEYPWLKEVDSLALANVQMHLESAFHKFFREPSAGFPRFKSKKSSRKSYTTNVVNGNIFLEGKYLKLPKMTAVRMKLHRPISEKWKLKSVTVSREPSGKYFASLAESFDAVCVEDLNLKGMAGGLHLGKGVHDNGYGLFLSMLEYKLEERGKYLIKVDRYFASSRICSACGKKKEKESSKTVCNSDEKKLAAVFDGTPGNGTSVLLCLHADGRSGDRIQAV

SEQ ID NO: 52252 - protein, 494 aa, unknown
  TnpB Polypeptide
MGVMKQEKQDGHAEGNRVIQYNTIKVRLCPTPEQEELFQKTFGCCRYIWNQMLSDHERFYEETDAHFIPTPAKYKKGAPFLKEVDNQALTQEYNRLSQAFRNFFRDPKTFGYPKFKRKKDDRDSFTACNQFFGSSATIYATRDAVRMTKAGLVKAKFSRRPRSGWKLTRLTVERTKTGKYYGYLLYTCPTHQPEPVEATAERTIGLKYSVSHFYVADNGNSADPPRWLRQSQEKLAVVQRKLSRSQPGSQNYQELVQKYRLLHEHIANQRRDFLHKESRRIANAWDAVCIREDSLRAISGKLGGSAVHDTGFGMFRELLRYKLERQGKQLLEVDRLVPTTKGCSSCASPNESVTTRVRRGQRDPLHPGTPLGLPRVRSGAPAGHERCNQHQGQGTGKRPEPAGRGGPSTPLIQQHLPAGTPVKAHAPGLGALSEAAYRKMPFPSAFSGRGTLGNERAPPPPGAAPEARSDGRSQYYDDVYTQGDPHASALSAPR

SEQ ID NO: 52253 - protein, 355 aa, Acinetobacter sp.
MKTLKLRIKDKHCKVLDQLASEVNFVWNYVNDLCFKHLQRKQQFFSAYDIAKYTKGASKECNLHSQTIQAVTEELVTRRKQFKKSKLTWRVSNKKSARRSLGWIPFKKVAIKYADGYVQYGKHQFKLWDSYGLSKYSIKTGSFVEDSRGRWYVCLVVDSPKQDKPTATKAVGIDLGLKDIATCSDGTVISNPKFYRKYEQKLGIAQRARNKKRVRALHAKIANCRKDHLHKASTQLVKDNALIVVGDLSASKLVKTKMAKSVLDTGFSALTTMLKYKCENAGVMFEEVNERFTTQTCSSCGVITASSPKGRADLRIRVWECECGSVNQRDLNSAKNILALGHKRLAVGITLLSGG

SEQ ID NO: 52254 - protein, 414 aa, unknown
  TnpB Polypeptide
MQIAKKIRLYPNNAMLDVLDNLCDYRRYCWNQALDVWMSLVQQRQEHLPADLRYKIKQAITDKSIMFTNDEKALLSQYPAPTNYHVRNILVANKKDWQYLLSSRVLQQAVADLAKAWKYYFSNKDNISLRASKPSFKAKKQPKQGFKTDMSSIQNGKLVLDKPRQYKGDWYGIPFKGYSLPDGPIKYCSITKINDKYYASLVVETPIEPLVQTGHNTAIDANVNHFDYTDGQYSINPKRLNTLYKQIAFYQKRLARKRKENGKKASDSKSYTVMRAKLQALYEKVTAIQNDLLHKFTTYLYRTYDIIVIEDLDIKSMQMSKKAKNLHRSLFGKFRFQMEYKAIKFGKQLIIADRYYASTQRCSKCGHIKTGDDKITLTGNAKHGTVHKEYVCYNCGYKADRDVNAVNNLLALIK

SEQ ID NO: 52255 - protein, 397 aa, unknown
  TnpB Polypeptide
MLSAYKYRIYPNSEQKLRLKRSLLSLCNLYNRLRTEKIEKYKQHHISLTQTDLRAIALKERKASADLQLAYSQVVQNVADRIHSAFVNFFKGRARFPKQKKPRKYLSLTYPQSGFEFKEGRLYLSKIGRVRIFLHRAIEGTIQRLTIKYEAGEWHAIFITEGEAPSKPSINPIPDETIRGVDLGLEKFATLDDADSIEYPRFLRRSEEKAKKLHRRLSKKVRGSKRWKQICFSLARLHLHVKRQREDYQNKLVAQLYKENDILVLEKLNVQGMLQNHDLAKSIADASFGKFIRKAMFKAEMLGKHFMAIDPWGTTQFCYNCLAWVPKDLSERKHICPNCGVKLPRDLNSAKLIKRLGILSMERTPPSDGGSSPAELKPLPSLRRMVSRSVEAGSQRL

SEQ ID NO: 52256 - protein, 332 aa, unknown
  TnpB Polypeptide
MILTYKVKHNRDLSVELRKARQIAEFALKTKTRSSKDVKHFGLKSAIANQILRKYSRNKNLKRIGNVKLAVPNQSLHVEGEMLKIPCLKLSLPVTFRRDFSKINQIELDATYAYVSVTIPESPLKQVSNWIGVDRNATSHVAVVANPVSGKVWKLGKQTQHIHRKYRAIRRRLQAAGKYRKVKSIRNRESRIMRDINHKIAKEIVGIAERADSGIKLERLGGIRRNRRHGGSFNGVLHSWSFHQLQGFIQYKARLRGIPIVYVEPRNTSKECSRCGNVGTRIGKDFACQCGHVDHADANAGFNIALRPSIGQSVADRDAMEGNTDIPRGATL

SEQ ID NO: 52257 - protein, 373 aa, unknown
  TnpB Polypeptide
MRKMFQYRIFPTKKQVHKLNATLEECRWLYNHLLGKRKDTYEQDGTSLSLYQQQKTFAILKAERPTLDSVHSQVLQNVAVRVDLAMKAFFRRCKDHAEKPGFPRFKGYGRYDSFTFPQSGFSITHDRRVVLSKIGALKMVYHRQIKGKIKTCTLQRSSTGKWYVSFSVECESERLPDVPTPIGMDVGLKTFATLSDGEEIENPRFFRQEEKALAKVQRKHSKLTKGTPERRTHRKAVARVHERIAWRRENFTHQESRKIVNTYGVICVEDLNVNRMLQNHGLAKSISDASWSAFFAQLSRKAEEAGRAFVKVNPAYTSQECSRCHHRQKMPLSERVYHCPCCLLSMDRDLNAALNIRAVGLHSLGLSLEASCL

SEQ ID NO: 52258 - protein, 398 aa, Cyanobacteria sp.
MEKAQNYRFYPTPEQESLLRRTLGCVRLVYNKALHERTQAWYERQEKVGYSETSSMLTLWKKEDDLSFLNEVSSVPLQQGLRHLQTAFANFFAKRAKYPNFKKKHQGGSAEFTKAAFKFKDGEIYLAKCKEPLPIRWSRQIPEGGQPTSVTVKLHPSGRWHISIRFDDPTIKPLPANNKAVGIDLGLSSLVITSDGEKFPNPKHLKKHYRKLRRLQKNLSRKQKGSNNRYKARVKLAKAHLKITDTRKDYLHKITTQLIRENQTIGVEDLAVKNMVKNRKLSQAISDASWGELTRQLEYKCQWYGRNYIEIDRWFPSSKRCSNCGHIEEKMQLNIREWDCPKCGTHHDRDINASKNILAAGLAVSVCGASVRPDLSKSVKATARNQKPKASCGGVSLT

SEQ ID NO: 52259 - protein, 278 aa, Brasilonema sp.
MPINLHRPVPDGFVVKQVRVGSIASGWYAQLILESGVSVPDVMPNGNSIGIDVGLEKFLAVSDGQLVERPRFFNSLQRELRWLQRKLKNKTKGSANYRKAQHKIRRLHERIYDTRKNFHYLTAHSLCDGVGMVFAEDLNLKATSRGMLAKHCLDAAWGSFLDILSWVCWKRGVYFAKVNPNGTSQTCPQCGTHTGKKKLSERVHVCHECGYTTDRDVAAAMVVEQRGLAAVGHTVKLPVEVRQPCRRVSRQRGLRTRRVSSSGDASLGTTREAGRTRE

SEQ ID NO: 52260 - protein, 382 aa, unknown
  TnpB Polypeptide
MISYKFKLYPNKEQREKLELSLDICRRTYNYLLAELDKGFTKVEIANYLLDLKVVNPEMKEVYSKVIQKENDNLFSNLSGLSASKKNGNKVGRLRFKGKGWKKTFTFNQSGFKLIDKKLHLAKIGDINIKVHRQIEGKIKQIIIKREINKWYAIIQTDANIQLTKGDKEIGLDFGLINFYTDNEGNKISIPKNIQQIQKRLKKAHRNLSRKQKGSNRRLKAINKLQNTYQKQTNQKNDFFHKLSNKLVTDCKVIAIEDLDLKGLMMKSHNAKNYQISSWKTFITKYLTYKAESAGCKILVVDRFEPTTQKCSNCGELRKLELSERTYNCYNCGLSLNRDTNSAKNIIKYFGLGISPLREDSSLPAMVKESSMKREANHFNGW

SEQ ID NO: 52261 - protein, 398 aa, Streptomyces sp.
VTPGQVKRAFKYRFCPTDAQAAELSRTFGCVRKVYNLALAARTEAWARQERVSYSQTSAMLTAWKKTEELAFLSEVSSVPLQQTLRHLQSAFIHFFAKRAKYPRFKSRKKSRRSAEYTASAFCYRDGKLTLAKMSGPLDIVWSRPLPEAAMPSTVTVSQDSAGRWFVSLLCEDPSVRPLPATDTAVGIDVGLDHLLTLSTGEKITNPRHELRDRARLARAQRSLARKARGDGANRRKARIKVARIHARITDRRRDGLHKLTTRLVRDNQTLVIEDLSVRNMVKNRKLARAISDAAWSEFRSMLEYKAQWYGRGVIAVDRWFPSSKLCSHCGTLQDTMPLNVRRWTCGCGTTHDRDVNAAKNLLAAGLAVTVCGAGVRPQRRTPGGQSATKQKPSQREP

SEQ ID NO: 52262 - protein, 436 aa, Halococcus sp.
MKRTNTFEVVPMSDADEELLRRVMDASASLWNELTYERRQQFFDGDSVWNTEDYRKRYVGVLGSASAQQTIRKNDQAWKGFFDSDEPDEGLPGYWGNEEDGRKLRWFGRNDQYTIQWGKRSRLEIPVGKDLKDEYSLSGRLRLEVRGEPRWDGKQCQLELQYDEQPDQFRAYQPVEVTDTDSHPRLGTPVADGSAALDIGANNIVACTTTTGEQFLYAGRDLFDRFRDTTQEIARLQSLLEDGRYSSHRIRRLYRRRTRRRDHAMDALARDLIERLHKEGVATVYVGALTDILETHWSVEANAKTHNFWAFRAFIDRLATTAEEYGLSVEARSEAWTSQECPQCGSTERTTRHKDTLTCECGFEGHADLVASETFLKRYTTVARPMARPVCLKWDNHDWLEISHSHRPNEEHTNPQVASVGVGSDARPPARGIPRL

SEQ ID NO: 52263 - protein, 394 aa, Burkholderiaceae sp.
VILAHKIELDATFKQRKYFASAAGCARFVWNRAVAEWDRQYADGEKPSGMKLAKEFNATKYDKFPWMKLVHRDAHARPFLNLDKAYKGYFKKISQKPKFKKKGRCKDSFAVANDKFRLDGKSVVLPKIGSVRLREELRFTGKIMGAVVSRTADRWFIAIQVDVGEHHKPRTGNGVVGVDLGLNVTAMVSDGQRLVGPKSLKSNLKKLRRASRSHSRKQKGSQNRKKASRRLARIHAKVANVRNDWLHKQTTKLARENQAVYFETLSVKNMVKNRKLSRAISDAGWAEITRQAEYKSAIYGGVFGKIDRWHPSSKECNQCGQIKKDLKLSDRVYRCDGCGHEEDRDLNAAKNIRTAGLAGSYAHGPEGADHRRKAKMKPCRVEVGTKPCPQVDTL

SEQ ID NO: 52264 - protein, 367 aa, Clostridiales sp.
MQRIRGYKYRAYPNKKQKEFFEKTFGCCRFVYNYYLEQKQRLWREWRDTQSYIQMSKDLSSVLKRKREWLKEVDSIALQQSLRHLDRAYDNFFKKRGGYPKFKSKRYKQSYRTMNINANISIDGDSITLPKAGRVKIVNTRDFDGRIISATVSRTSSGRYYISLQVEEEYEIFPNDGGSIGLDAGLKSLYTTSDSDIYPNPKTLSLHEKRMKRLQRSLSRKKKGSKNSEKARLRLAKEHEKVSDIRNDIQHKITHKLASENQVVCVEDLDVKGMMKDHRLAKHISDASWSELCRKLEYKIADHGGILIKVPRAYASSQICSCCGRKESKLKDLRIRSWICPSCGAGHDRDVNAAKNILEKGLEMLAS

SEQ ID NO: 52265 - protein, 367 aa, Clostridiales sp.
MKRIRGYKYRAYPNKKQQEFFAKTFGSCRYVYNHYLAMRRSRWEEWHDTMSFPETTKDLANNLKKEHEWLKQADSSALQQSLRHLENAYENFCAKRSGYPKFKRKRSDQSYRTMNNNGSIRIEGAAVRLPKAGKVKIVKTREFDGRIISATVSLTSGGRWYISLQVEEEFELQPNKGGKVGIDAGLSALYTDSENNRIENPKTLSKHEKRIRRLQRSLSRKQKGSKNREKARIRLAREHEKVADIRNDFQHKISYRLASDNQVVCIEDLDVRGMMKDHKLARSISDASWNEFFRKLEYKMGDRGGILIKVPRTYPSSQICSCCGRQNRKVRDLAIRSWTCPECGAQHDRDKNAAVNILVKGLEMLAS

SEQ ID NO: 52266 - protein, 363 aa, unknown
  TnpB Polypeptide
MSLQTKTLKVRVKDKHRDILNRMAYECNQVWNAANEESSIGSLIPIPEVGFIRNNISAFDMQKVILPIRQERGFIIPSHTAQEVMAVHAKTRKQFKKDKLRWRVSGGSRRSLGWVPFKKGSAQWKNGQIRFAGHYFKVWDSYGLSNYEFRSGSFSQDTRGRWYFNVVVHVERKVSTGQGEVGIDLGLKTTATCSDGFILERGEFYRCMEEKLGNAQRANKKNRVKAIHAKIKNKRLDTNHKFSTQLVKENSLIVVGNVSSSGLAKTKMAKSVLDAGWFMLKTQLDYKSKAMQVVFEEVNESYTTQTCSNCGELPDSRPKGIAGLEIREWTCTGCGATHDRDINAAKNILALGHERLAVGIPLL

SEQ ID NO: 52267 - protein, 498 aa, Fervidicola sp.
VITIQAKLGFQSKEDEQAVADLMRRWSSCVRFAYNRLLEGKSRNELKRDLQGVFNLNSRYVDDAIMKAKSVLESCKEREENPGKVIFGGRNLFEKLKKRHINGNEYKKLQQEWQERRKGNLYSRGDKSKKGNLNTRIEIDENGAVLRINVGERKYVYARIQAGCKKGKSREELLEAISTCQEAYSVELKLKNGKIYAYFTIEENFPEVLITKENGIIGIDINAYPDHIAWSETDENGNLASYGKIPMPELVNGSSDKREYYRWQYAHEIVRLAEEKKKAIAIERLDIKDKGKRGDFSGRKSRRIRHSFSYRSLIEKIKVLSKRKGIQVIEVNPAYTSVIGMLKYAPQYMISKDVAAAYVIARRGLGLKEQIPEGYMTILKELDADELEELKEHVRKTVNNKQLKKRQLKELDKAIKLIQSLESGTGKASGPLDGTSLGACSESCNLWRVLKVAVVTPLSPEKVLRDISVLKGVLHSGQVGRPVRARVPASWGRGYGSA

SEQ ID NO: 52268 - protein, 425 aa, Haloarcula sp.
MAKQVVKRTIIGSITNHQQVQDDLDSLGFAASKLWNVARWTTGRIWNETGHIPEDGELKSYLKSHERYSDLHSQSSQRVLEELSEAFTGWYGKRRNGDSKANPPAYRKHNDEHPRSTLTFKGAGFKLDTTNGRLRLSKGENLKEYWSDFVLCDIQIRPDVDLSAIESVQQVRAVWNKQRNEWELHVVCNVTVDIPENSAEKTVGIDLGICNFAALAFENQESELYPLNCLKQDDYYYSKHIARCDDSSSEEATRLHAKKSNRRTHYFHTLSKHIVERCVDENVGVIAIGDLSGIREDEDGEMKDWGKHGNLDLHSWAFDRFTDMLEYKAEEVGISVKRVSEENTSKSCSSCGCERDTNRVERGLYVCNECELVANADVNGAENIRQQVSPNPRSEDRSNGWLAQPSTLLFDKETGVFAPQEQVVS

SEQ ID NO: 52269 - protein, 286 aa, Planktothrix sp.
MIVLEFKAQGKTTQYNAVDEAMRTAQFVRNKSIRFWMDNRDVGQKELYRLSKTLREDFSFVKALNSSACQAAIERAYSSIARFYDNCKKGIPGNIGYPKFKKNNRSVEYKTSGWKLSSSRKQITFTDKKGIGKLKLKGKWDLNFYQIEQIKRVRGSTNRKKAINKLGRVHLKISRQRQEHVKRVARCVIQSSNLVAYEDLRVKNLVKNHCLAKSINDAGWYEFRKWLEYFGLKFGRITVAVNPAYTSQECSNCGATVKKSLSTRTHSCKCGFVLDRDWNAAINILK

SEQ ID NO: 52270 - protein, 334 aa, unknown
  TnpB Polypeptide
LKDFRPEVVASGITLCRGALKRLDRAYGAFFRRVEQGETPGFPRFKPASRFNSLRWEDPGGWKLKTQHRRLYLLGIGEIKTNYHRPFVGDPKAITVKREGTKWWLSVDCVNVPATPLEPTGCQIGVDLGVVNQIATSDGEFKKGQQFGSTAQKKLAQAQGQLETKQRGSNRRRRQVDKVVRLHCKIKNQRNNAAHQLSRHLVNDYDFIAIEDLKITNMVRAPKGRPDPEQPGAYLPNWARAKAVLNRSIHDAGWGQLVSMLVYKAESAGRTVVSVNPCYTSQTCAECHYVDAGNRVSQEEFRCLRCKHCDFADINAARNILRAGRALQASACDG

SEQ ID NO: 52271 - protein, 334 aa, unknown; identical to SEQ ID NO: 52270
  TnpB Polypeptide

SEQ ID NO: 52272 - protein, 390 aa, Selenomonas sp.
MMKTLKFKLYRSHRNRKLHKQINAAGLAYNHCVKLHKRYYRLYQKHLKKARLQKHITKLKKIPKFSYFLEFGSQAVQNVAERIEFGYEKFFRKENKRPPKCRKVRKTKSFTLKQAGWKLDEKNHTIVINGQKYRYHKSREIEGTIKTVTIKRDAVGDIYVCFVCQVEQNTVIPRFGKSIGFDFGLKDHILVAPTEEDDVDMPRFFQQNRNKLKKMQRKVSRKLLANTDHFVKKGKGQATVYKRPLWECKNIQKCFKEQARLHRKIANQREAYHWHLAYELCSKYALICLESLNMRWMQKGHGKKVGDYGFSAFLTILKYVASRRGTTIIQIDKWFPSSQLCHDCGYQNKEIKDVRIREWNCPNCGKQHIDRDRNAAKNILREGLRQFEAA

SEQ ID NO: 52273 - protein, 520 aa, unknown
  TnpB Polypeptide
MAKNQTYKAFTAHPSHVMDLSGELLDSTPIMAELTTEIRGISGYATYVARNDVTLESRLAQITVSAPAEAGRQAGVRMPEFLVSGRGKSRKEKLTQYNAVTAFRSWQERIKAATGESSKHVSQGWKRCVNANPPSYGEDYVNLAATDKQYVAIENDPFVDGEIVLKLVIKGNWHRLIFPFNNTRFPVGKVTLPLIKIQDNQPVFIFAVVTDNPVVQFSGDYVIGVDVGINNYATIVVRNIKTGEITYKTTLSQRVHSLWNSVRASERQVHALRKKAKPLVYDRQGKMAALDEAQLHREAASRKKRELAILAAQEIADLSHQYDNAVVVVEDLSWVRNTMQNGRWNRGTFVKWLTHYVSQNGGWVVSVNAANTSQICHECGSKVTHPEHKISDCPTCGAMDRDVNAAANIAARAIAKVKTARNTRAKNRKLQKKTSLKTPTARKTLKHPGGSRNKNYPTPKRKKRRSSKGVKLPLRPARVRAFCVDTRVLADCLTSGVAETSTAALNQGNTAYECKLCSLN

SEQ ID NO: 52274 - protein, 538 aa, unknown
  TnpB Polypeptide
MAKNQTYKAFTVRPTHVMDLNGELLDSVPIMADLAAEVQGISAYATYVARNDAKLPGELARAGAIQPTTAGRRAGVKMPDFLVPDKKDKNGEPLKDKKTGEPIKIKTGRSRKEMLIQHRVVGEYRAWEERIKAANGESSKHISQGWKRTVNASPPSYGEDFVNLGAVNRNYALIENVPFIDGEIVLKLVIKGNWYRLIFPFNNNRFSVGKVTLPVIKIQDNQPVFIFSVATDNPIVQFSGDYVIGVDVGINDYATVVVRNTKTGEITYSTTLSQRVHSLWNSVRASEKQVRQLREKAESLSLYDRQGKMAALDEAQLHREAASRKKRELAILAAQEIADLSHQYDNAVVAVEDLSWVKNTMQNGRWNRGELVKWLTHYVEQNGGWVVTVNAANTSQVCHECGSKVTHPEHKVSDCPKCGEKDRDVNAAANIASRAVPKVKTARNSRAKNRKLQKKTSLKTPAARKALKHPGGSRNKNYPTPKRKKRRSSKGVKLPLRPASVNTTTVLADWDTYGVSETSKAALNQGNTAYECRLCSLN

SEQ ID NO: 52275 - protein, 438 aa, unknown
  TnpB Polypeptide
MIKRKFTTVTQLHEKNNQDIIDYFESARGTYAQALRKTFYAIRNSPDFNKSSYNTYLQETYGVLKRTANSIIADAQGQLNALKELKAHEQKQLTLKIKVLEANIHALEVEKSTLKTGLPVCLGKYRNLKRKLVAQKSKLNKLTQKSANLSYQIESGRYKICFGSKRLLQTDYQAFVERRDAQMSFVGSKSEASGNQILHLRFNSKNNQFELRLRKDIGGFKNTKDKYVYGRVYCNHHKRWIKEALRQRNTPLSYKIIKKRGRFYLYCTFEIQMDKSDFQTRSTHGTVGLDFNKGFVAIAETNQYGHLVGTHLLPYRFKAGNRTSTDLELIATKVAERALTTGKDICVENLDFRGKKASPQSKRERKYNEMLHSLAYRQFVDKIEQRAYRYAVSVRRVNPAWTSWLAKQLYCPTMKLNTHVGAAYVIARRGQGYKDSVQ

SEQ ID NO: 52276 - protein, 469 aa, unknown
  TnpB Polypeptide
MRKQIALLLKDEEYRNWRTEYDSLSKIEKPSKAEKKRKKALASDMNTRRTKLGLSRSELEKYIKVCGARYKKLLSSQQVQAEAANVWKGVEDFLFSNGKQLHFKKFRDFRTIGGKSNINGICYDTETRQIQWLGLQMQCYLSKKASDREYVLQSLDHKISYCMIKRQMFPNGWRYHIILVLKDDAPQKLEHGFGDMGIDPGVSTMACTADTGCVLEELAPETDRYDRQIQEILRKMDRSRRKSNPDKYNLDGTIKKNNHSRWKNSKNYIRLLRRLQILYRKRSQYILTSHRTLCNRLIQMADRICVERMTYKALQKRSKKTERQDKISEVKKKDGSIVMIRKFKKKKRFGRSINRRAPSLFLTELKRKITTAGGTYEEVKTETFKASQYDHSTDEYTKIPLKQRTKVIDGHEVQRDLYSGFLIKNADDSLEHPDREKCKEEFLKFIEMHDELIKDIKRSGVSMKQCFGF

SEQ ID NO: 52277 - protein, 590 aa, Haloferacaceae sp.
MSDHLSLPIRLPDEEDNRFERLAILTQRVANHVLEDHWTPVHLDGIADASHQAWKYFDEHEPFEELDLYLPSRFRRCILQKVGETLRSHADRRDAFQSIQSVLPEHKIRRIHRRRIKEQLWDDGDYLSSGYVDILIDQLTSYYDRHGAYPATYFEMQDCPEYDSGVLPFSADDGPTSGQAVKYQYDADSEMLIIRLKTPDTPSPETRGDWSWTEYERDGYEAFHELLSYGDLSAPEFQLSRRKTGDAYYELSFPVEVDQIETNDDVDCVLALDAGMRKDMTAVVVTDDGEQLSQPHFIQFTDRDGMRRLHRERTRLNDRLAALRRDGRSHTDEFAHIQSEYERVNSKIRHKREQLTHDVANQVLALALTYDVNAIVHEDLRSLSPPGDEGTLSWELSSWARREIIENIEYRADCAGVAVERVYPQGTSRSCPRCGSTGHTCKSPDHQQEHWWGGHFRCDNARCGFEGDRDYIGALNVARVFFSDTDELDHGFTSSYTGDCETVLAGRSAGERSAASRSTSELASDAGTRLTFGSGIVAYEPDQAAATAGGGSAVIAPAVAVPESNADGSDGRGPVVQQCTRFIRCATESY

SEQ ID NO: 52278 - protein, 440 aa, unknown
  TnpB Polypeptide
MRGRTAFATLAPTGNSSKKVSKPMATATKTLQATLAPPTTHKERKLQETLSGYREALHDAFDAGCGTKNAVNEVVTPYDLSSYAKDALKNYVPQLCGDSYDADELADDHPVRFTERGFSLDYKPENAVEWYVKIPHHEDYHLWLPVRINPTQADLWHDLLDGGADVGEFRLQRHRTSWELHVTVDYEVQEPDYDSTDEDVTPVGFDIGEAHLLAGCACENDSPSDPLLVNGSRARHLRKEMSTTLTRLQKRDAAQWRIDERFDHYQNALTDIIEKVSRQAVEYACRFEKPVIVLEDLAEIREDLDYGEWMNRRLHAWAFARLQQRIEDKAREAGISVEYVWPEYTSQTCHACQHVGYRNGDEFRCTNEECWVTEYHADINAAVNIADRLDPWGESLPLKLADDDIPRDGSACDSATTHSEQSQSEQMTLGAFGSEPTASD

SEQ ID NO: 52279 - protein, 182 aa, unknown
  TnpB Polypeptide
MQCREWQCFQKRLRRKKQVFSEKMKKRLAREQRKLSRCVRGSHNYELQKKKVARCHEKIRNQRRDYLHKLSRKIVDSYDAVAVEDIDMKAMGQCLHFGKSVQDNGYGMFREMLDYKLAWKGKKMVKVDRFFPSSKKCCKCGRIKKELKLSERVYRCACGNEMDRDRNAAINIREEARRMLTA

SEQ ID NO: 52280 - protein, 135 aa, unknown
  TnpB Polypeptide
VYAESIHALKKHIPQLTTTYNTVELHDDHKPESTTEWDVKIPYHEDDSLWMPAQLNLEQRDWLEALHAGDVTMGESRPSESDGTWYLHVTATRDGEERSEVPAEERTLIGVDIGEASLVTVCHPDDDGSPTAPEL

SEQ ID NO: 52281 - protein, 444 aa, unknown
  TnpB Polypeptide
MAKQVVTRTYKASIRNHRQVSDDLDSLGFAASKLWNVGRWMCDRIWDEIGHIPGHSELTSYLKNHERYDDLHSQSSQRVLQELAEAFSGWYGKRRNGDTRANPPGYRKHSDEHPRSTVTFKAAGFKLDTQYNRVRLSKGSNLKADWSDFILCEYQTRPDVDLSTVESVQQVRAVWTGDEWELHIVCKVEVEVSDSPGDKTVGIDLGINNFAALAYEDGHAELYPLNCLKQDDYYFSKQIARCDDSLSKQATRLNHTKSARRTHYFHALSKHIVERCVKEGVGTIVVGDLSGIREDDDTNEAKDWGKHGNLDLHSWAFDRFMDLLTYKAEIEGIEVKEVSERDTSKSCSCCGQTRDANRVERGLYVCDNCGTVANADVNGAENIRQKVTPSLACDGGDRSIGWLAQPSTYLFDKETGAFAPQEQVTSALLKSPSSDILSSETAGR

SEQ ID NO: 52282 - protein, 251 aa, Clostridium sp.
  misc_feature (5)..(38): Xaa can be any naturally occurring amino acid
MGRHXXXXXXXXXXXXXXXXXXXXXXXXXXXXXXXXXXRYYVSLCCTDVDIEAFENTNNHIGLDLGIKEFCISSCGEFIENPKYLKKSLNKLAKLQRELSRKTIGSLNRNKARLKVARLQEHIANQRNDFLQKLSTKLIKENDIICIEDLQVKNMIRNRKLSRLISDVSWSEFIRQLEYKANWHGRQIVKVGKFFASSQICNKCGYKNEEVKDLNIREWICPSCNEIHDRDINASINILKEGLRLITIQNK

SEQ ID NO: 52283 - protein, 506 aa, Nostoc sp.
LAAKTSSFVTNIPLITTFKDLSVLAVRLEAGRQLYNAVLSEGKIRLQLVRNSELYQQARLINKNDKKAKSLAFQKAREAYRFSDYDLQAFANKTSIASIWIKSHLDANTIQKIATRAFKALERMAFGKAKKVRFKQKGQFSSLEGKTNKQGIRWTGNGVEWSKLKLPGIITNDPVILHGLSSKIKYVRLVRCILNQKTYWFAQLICEGEPYQKPKNIISDGTVGIDLGVSTVAIVGDKKTTWTSFAVELTSKQKKITKLQRQMDRQRRANNPNNFNSNGTVKKGSKRWNKSSRYKKTSVKKREIQRKQAAHRKSLHGNLVNQTLALGKHIKTEKVSVKAWQRNYGKSIGFKSPASFQSELIRKAESAGGTVLMFSTRKTALSQTCLCGNKQKKSLSQRVHNCSKCGLTMQRDILSAYLSRYVDPKTETLSIQSAGDGWLGMEQCLLDGWRNGSNQSARTATSLRSLIGNNESELMFSNPIPCEESEPERVNETHAVSWNPLPKGRG

SEQ ID NO: 52284 - protein, 427 aa, Escherichia sp.
MHQENTMLPRRISVSLFIDQSIIWPVKRLQAFKFQLRPGGQQEREMRRFAGACRFVFNRALALQNENHEAGNKYIPYGKMASWLVEWKNATETQWLKDSPSQPLQQSLKGLERAYKNFFQKRAAFPRFKKRGQNDAFRYPQGVKLDQENSRIFLPKLGWMRYRNSRQVTGVVKNVTVSQSCGKWYISIQTESEVSTPVHPSASMIGLDAGVAKLATLSDGTVFEPVNSFQKNQKKLARLQRQLSRKVKFSNNWQKQKRKIQRLHSCIANIRRDYLHKVTTTVSKNHAMIVIEDLKVSNMSKSAAGTVSLPGRNVRAKSGLNRSILDQGWYEIRRQLAYKQLWRGGQVLAVPPAYTSQRCVCCGHTAKENRLSQSKFRCQVCGYTANADVNGARNILAAGHAVLACGEMVQSGRSLKQEPTEMIQATA

SEQ ID NO: 52285 - protein, 340 aa, unknown
  TnpB Polypeptide
LDKSWKSFYRLKESDGIENPRPPRYKKDKMPITYMQNGIQHERSSSHVRLSLPKKLKEYMADIYDIHAAYLYLKNPVFSNMDIIKQIKIYPPANDGTSRILVIYEVEDVLPEENNGRYLSIDLGLHNLMTCYDNAGKTFILGRKYLSLSYFYNKEIARVQSQWGRIQAAREKEDLKTSKHLQRLYRKKNNCIKDYIHKMTRYITNYCVKKDIHTVVIGDIKGIREDKNLGRKTNQKLHSLPYARIYMQLEYKLKMQGIRLIRQEESYSSQCPPQSEEVSRIYAEKKNRKKRGIYIVDTVIYNADAVGAYNILRKYHAVSGEEIDMPVTGLKSTKTIKVAV

SEQ ID NO: 52286 - protein, 401 aa, unknown
  TnpB Polypeptide
MIVYEGKLKGKEYQYRRLDEAIRTGLFIRNACLRYWEDGHAKSRNDLSKYCAVLGKNKEFPWAGKLNSQARQAMAERTWASIARFFDNCKKKIPGKKGYPKYKKNRPLHGSVEYKTSGWKLSENRDHITFTDGFKAGEFKLYGTRYLDDYQLNQIKRVRVVRRADGYYAQFCIDHDRTEDKKPTGNTVGLDVGLNHFYTDSKGQTVDNPRFLRKSERQLKRLQKRVSRKFKKADAVSVSRTGQPQSNNYKKAKRKLAKKHLKVSRQRKDFAVKTALCVVRSNDLVAYEDLQVRNMVKNHHLAKSISDAAWSEFRCWLEYFGKVFGVATVAVKPHYTSQHCSNCGCVVKKTLSTRTHKCKCGCVLDRDWNAAINILKEALRTVGHTGTFQKDWINASGQLAL

SEQ ID NO: 52287 - protein, 548 aa, Streptomyces sp.
VAEPRRELRTIATPFVALGPSGVSIRDRLKALTAEDEKVLRLVGAHLGALAGHDLKARCADGLRHSNESWAGRKRELTPLSSSRWAGSITKATHDQWSLSRRAQAAHLAGLDAGIRMLRHRLSLPVGQRGTKRAPGGYRSQREWFAKSRRLASLEARHAAVSADREAGRVRVVRGGRKLANTRHHLDAAGLTEPEWRERWEAARWFLSADGESGKRFGNETIRVSPDGEVSIKLPAPLAGYANSRNGRYTLAARVAFPHRGEEWRDRTSTDRAVAYRIHYDTSRGRWYLDASWTRPAVQTIPLPAARANGIVGVDTNADHFAAWRLDPHGNPVGEPHRFPYDLSGTAQHRDAQIRHAITRLLHWAQRCGVTAIAIEDLDFTDEKTREKHGRRKKFRQLISGIPTARLRVRLVSMAAERGLAIVAVDPAYTSLWGAQHWQRPMTAPRRTTTRHDAASIAIGRRALGHPVRRRTAPPRDDRSDRRGHRTVQAGPDTRGREETRPRVPGPRTRCAQPGHGAKAGNQHAQHRPGRAAEGDQSWQQDSLPPSL

SEQ ID NO: 52288 - protein, 375 aa, Solibacterales sp.
MMRTFQFRLRPNATQRAMLERILVDNAETYNACLQERIEAWKLQRKSITYRDQQDELTELRKDERFQWLACDIQRDPLRRVDRAFKAFFRRVKAKSGKAGFPRFRARARYDSFAFSLPVCRERSIKIPNVGDIRARGGRSITGREKLCTIKRDGNRWTASVVCDIGPAPEKVTVSTAVGIDVGLTTLATLSNGVEIENPRWTRKHERRIADAGRVLARKQKRSNNRTRARQALRRAHQCAANARLNYIHHVSKWLISTFDLIVHEKLNIHGMSQGRLAKSIMDAAWGILLYQLKYKAEEAGVWVVPVNPRGTSQRCSNCGEVVKKTLSQRVHSCPNCGLELGRDHNAARNILSLGMSDAGASLQNLALLPSGGLK

SEQ ID NO: 52289 - protein, 414 aa, unknown
  TnpB Polypeptide
MEIKRTVTITLPDDADLRATLTAFRDVQNAVSVDAFNDGQPLAAVPLQRVVYDRVKGTLNSQMTITALRLVVGAYTSALKGQTRRAKAEARRKERCAAKGWRYIERPIKPLGLCHFERMAAMFLVGVRGRDADFRDDGTLSIWTVGGRKRLPYDLVASHRALFEAATEINSVTVIERDGHMYGRVALTLEAPEPKGVVPVGIDLNETNALVAVDADGRELFISGLATKVKNKRTMQTTKRVQSKLATKKAEKRDTHSVRRALKRLSGRRKRRTRDFARVTAKTLVHWVPADAVLVFEDLARIPRPEKGLTKGVALRRRLSLWQYDAIRQAVTSKAEMAGMALAYVNPAYTSKNCARCGLRGVRRRHTFTCPSCGHEAHADVNAAFNIRNRFVQSRLDAAPSVAAEALSPFFGKG

SEQ ID NO: 52290 - protein, 386 aa, unknown
  TnpB Polypeptide
VATHRFCRTNRLPWPSWQDLYKAFNVAKREDYPFVTKVASRVQEGAFMDFGAAVKNWRDPGHPAGPPRFRKRRRTGAGSFRVASGVVQLRYDGKRRIKLPVIGSVKMAHTLPAGIPYEAHISLRNGRWVLSVKYWREPTEQPDPDSRIAVGAVDTGINPMATDSEGQVWENPKAYYLAERKMRRWQRAQARRTPGSRGWWEAQRRIDRLQRRVTGLRRNAQHQMTSALVNKFQSLAIEDLNVKGMMAGLTPKAQADAGMGDIRRQLLYKGHWHHCKVLLADRYYPSSKTCSACGVVNAKLKRERRWRCRYCGVTHDRNLNAAVNLRNLLILPSGRGVTLRDGKALAAGLLCRETGPNDRRTASSNDLFDTADCVRAISPELNVNTP

SEQ ID NO: 52291 - protein, 250 aa, Lactobacillus sp.
LAEQPRWQGELKQVCIVQDADGYYASFSIEVQTSVEKRPVLTVTGVDANIGKFDYQTSTGYATQPTLPDRLPLLYTRIAHYQRQLARKRKVNPKHFNSAAYRTMRTKLKRQYQRVERIQTDLLQKFTTRLITDYDLIGIEDLDNRHMRMNKRLAKNLHRSLFGKFKVIMQYKADWYGNTLVLADRFYPSTQRCSRCGYVKTADERITLRGNLKHRTGHDDYHCYRCGVKLRRDENAVENLTAYAKSKVTG

SEQ ID NO: 52292 - protein, 283 aa, Crocosphaera sp.
MRGKARDWGTPNTCTIIFKQGKWYASVTVSCDPKRETGKEACGIDFGTHHALAFDDGTVIDNPRFLKQSQDKINKTAKKSRKKRAGKKGVKGSRRWKKAVRKIGKIQSLVGRQRQNWHHQVSTQIVSCNSLVATEKLNLKGMTKKAKRGSKRKRQKTGLNRSILDVGIGNLKSLIKSKVTEAGGFYIEVPTRKVKPSQTCPNCGHQKKKTLAERQHNCEKCLYSCDRDVASAQVCLNWARGQELSSLDVESPSSTLCGSMRQLGAKKHNNAKKRQKHLAQQSG

SEQ ID NO: 52293 - protein, 444 aa, unknown
  TnpB Polypeptide
LRLTRGQRRRLTRLLVSAGDVWACVLEVNAWRRAHQDVLLVSYQALCRELAVAGPGCFGELDSTGARSVLRRYSDAWFAAAARRKNGDASARFPRRRHWMMPVRWYHGTFALEGRRLRIPVARGCPPLQVRLDRELPYPPGQVRSVTLLYDAGRLWVDVTAEVPVTVYPPGAEPDPERVAGVDLGIIHPYAVAGPGGQALLVSGRAVRAEHHLHLKDTKARRRAVARRAPKPGQRGSRRWRHYRRRQRLVEARHARRVGQAQHEAARTVIGWAVARRIGTLAVGDPRGVLRLAAGRRHNQRTRDWRVGHLISTLRDKAQLAGIALTLVDERGTSSACPACRARVPKPRGRVFCCPCCGQLGHRDLIAAANIAGRLPGGITPAVTAAGVTHRRAGKHLPGVSAARRDPRRRPHHGDARGSPGRHLPAPPAATAGRGVARPTARTS

SEQ ID NO: 52294 - protein, 503 aa, Streptomyces sp.
MGHLVGGEHLRVLTAVVPVWLNRAHHERAHEACHASALLWNRTLAWVREEWETGRSPGREDIRRYVTSLPAEVRPIHAHTAQAVAYDLADAIALARANKAQGIAKAKLPWREKKYRPLVFTARFGWKVRDGDRLLLSLGRLRDRIVLPVPEFTDRSGHLVTPERWGEMKLCWSTVARSWALHISYRAVDDSLPGAGSPEAPEPGAVSVHAVTVAVDEGVINPMTLAALGPYGAYEVLVINGRGARAAKQVRNKGMARLQSKMSCCRTGSRRHRRLAEAKRKLRAKTTRRLRDFNHQVTAKANRFIRELVAAHERTTADGTDVVVRLVVGDVRGIERNTEKRRRASRSTRQQLSQWERGTQERQLAYKTGLPIQYISEANSSQTCPFCLHRRKVRGRRYVCANKACALVLHRDAVGGVNIHTLAVNDGTFVPVPPGTDIRVKYLRAQPGWSSGQRERHGFHQHAQARAGASRWREARSSAWYRATCTADVGDAGVAAVPKGEPR

SEQ ID NO: 52295 - protein, 416 aa, unknown
  TnpB Polypeptide
MLILEYKAYGSVSQFVAVDEAIRITQFIRNKALRYWMDNEKVSKYDLNKQCAVLAAEYDFADRLNSQARQAAAERAWSGIARFYDNCKKKVKGKKPRSPDELGSEGRSQRGLGYPQFKKNVRSVEYKTTGWKLSEDRKSITFTDKCGIGKLKMKGTRDLLFYHPSLIKRVRLVGKADGYYVQLAIDVDRKERLEATGKTLGLDVGLQDFYTDSNGHKEENPRFLRKAEKQTKKLQRRVSKKVKGSNNRRKAVKRLAKKHLRIQRQRRDHAIKLARCVIQSADLVAYEDLRIRNMVKNHSLAKSISDASWYQFRTWLEYFGKVFGRITIAVPPQYTSQACSECGCKVEKTLSTRTHKCPHCGYVADRDENAARNILTLGISTVGHTGTHAWGDSASTEPAETTDFVSAVAEPRIPRL

SEQ ID NO: 52296 - protein, 387 aa, unknown
  TnpB Polypeptide
MIKTIRVMLIPNNKQKTKLFRYANTARFAYNWALAREIENYENGGKFLSDSDLRKEFTQLKKAEEYSWLNKISNNVTKQAIKDACNAYKRFFKGYSKFPKFKSRKYSVPSFYQDNVKIKFTETHVKVEGFTTSKRKNKQKINWIRLAEHNRIPTDCKYTSPRIKYNGLNWWITVGVEYEDSTTIPSNDGIGIDLGIKDLAICSDGAKYKNINKSQKVKKLEKQKRRLQRSISRSYEKNKKGESYCKTNNVIKKEKLLLKRNHRLTNIRKNYLNQTTSEIVNRKPRFICIEDLNVSGMMKNRHLSKAVQNQGFFEFRKQLEHKCSDKGIQLIVADRFYPSSKLCSCCGNIKKDLKLSDRIYKCNCGNVIDRDLQASINLKAYGERFAS

SEQ ID NO: 52297 - protein, 376 aa, Bacillus sp.
MILAKKVRLIPTPEQEKVLRNHAGAARFAYNYCKRMSDRYYKLFGKSVSQLALQKRFTKIKKRKRYEWLHDINAQVPKQASKDFDTARKNSFKTYKNGYHTSYKSKKDVIQGFYANYERLIIGKKVVHIQSIGEVKTSQQLPRNKKPSNPRVTFDGRHWWISVGFQEDFESQELTDESIGVDVGLKELFVASNGMKERNINKDAKVKKLLKRKKSAQRDMSRRFKKGVKIQSAGYEKAKAEHLRLSRKITNIRNNHIHQATAKLVKTKPMRIVVEDVSISNLLKNKKLSKALSFQKLHFFFQCLSYKCEKYGIAYVKADKWFASSKICSCCGVKYDHSVQPEGQWSLKIREWCCASCNSHHDRDVNASINLSRWVK

SEQ ID NO: 52298 - protein, 439 aa, Caldilineaceae sp.
VPDTRHPTTEAPETVHRTVRLRLYPGEAATGLLLTAIAGACRHVWNHLLADQERRYRLWQVYRIGPKPVPTFFTLGLRFTELRNDPDHAWLKEYPYKVVRYSLKYLADAYTRFFADSENEGKPRFKARHRTVPAFTIPGAVRMDGDRLYVPKVGWLRLAGSDPYAGCRPLTVRARMEGTEQHPKWYAYVCYEVPAEQVKQPAADGALGLDRNVGQATDSEGTVYAMPDTDKLDAQIARKQRELSRKQGWGPKDRRPKSNRGRRVNGQLNKLQRKGARKRDDATHQASRKLADTAHTVVVEDLNTKGMTKSAKGTVEAPGQQVKQKSGLNRSILESGWGSWERKLAYKAGELLQVNPAYTSQTCSRCGHVDKSNRPSQAVFACGACGFRANADHNAAINILARAGLPSRARFGPRDRGICTARGDPLGSSRTREQGMPTA

SEQ ID NO: 52299 - protein, 371 aa, unknown
  TnpB Polypeptide
MKTAYKFRMYPNKQQEAMLDVTLETCRHLYNTALADRKNCYEMEGISRSYEDQAATLTLEKKEGKWQGIFSQVLQDVLRRLDKSFKAFFRRVKAGEKPGYPRFKGRGWYKSFTYPQAGFKIEGSKLTLSKIGTIRIFKHREVEGKIKTCTIKKDLLGHWYAVLVAEIEEAHIVEPTTIIGVDVGLKSLITTSAGESIQYPRYYIQLEETLAAAQRSLSRKKKGSANRRKAKAKVAKISKRIQNLRDEFLNQVSRKLVDSADLIVFENLNISGMLKNHHLAKHIQDHAWGKLIQFTQSKAAKAGKVVELVDARYTSQKCSQCGIMVPKTLADRTHLCPNCGLEMDRDLNASLNIRTLGLRGRASRDTAKAGQ

SEQ ID NO: 52300 - protein, 439 aa, unknown
  TnpB Polypeptide
MKTTISAKLKLHLTLTQFHAVRHTQLAYRDALNFVSRYAFAHGKMSNKVGLQEGTYAELRATFRLPSQMACSVPRQVGATYKGLWTKLKQNAQARRDTRTKKRYKGLDAAPKYVSPTLTYQYGKDYSFKKEKQVSVLTLDGRVVVPYTGYDRHVALIHSGSTIGAAQLWYDKPNKTFYLIVSLEVETANPSPDLQTRVVGLDVGIRYFAVTADTRGGCSFHAGKRVVAHANHFARLRKRLQKKGTRAATRRLVAVSGRERRFKQDATHVVSKRIVEQYPHALIGLENLTDIRERTRRKRGKRASTKQRRANAQQSKWAFAELQRRIAYKAQMQGSLTVQVDAHYTSQACPLCGHTSRDNRPHKGLLFVCQGCGYTLHADVIGARNLAMRTSLIRQDWMRTGDLSVRPDVSDVEAKAARLLRYAELRWSPDASPRVPRVG

SEQ ID NO: 52301 - protein, 386 aa, Escherichia sp.
  misc_feature (180)..(263): Xaa can be any naturally occurring amino acid
VKRLQAFKFQLRPGGQQEHEMRRFAGACRFVFNRALALQNENHEAGNKYIPYGKMASWLVEWKNATGTQWLKDSPSQPLQQSLKDLERAYKNFFQKRAAFPRFKKRGQNDAFRYPQGVKLDQENSRIFLPKLGWMRYRNSRQVTGVVKNVTVSQSCGKWYISIQTESEVSTPVHPSASMXXXXXXXXXXXXXXXXXXXXXXXXXXXXXXXXXXXXXXXXXXXXXXXXXXXXXXXXXXXXXXXXXXXXXXXXXXXXXXXXXXXXGTVSQPGRNVRAKSGLNRSVLDQGWYEMRRQLEYKQLWRGGQVLAVPPAYTSQRCTCCGHTAKENRLSQSQFRCQVCGYTANADVNGARNILAAGHAVLACGGMVQSGRPLKQEPTEMIQATA

SEQ ID NO: 52302 - protein, 430 aa, unknown
  TnpB Polypeptide
MILTYQYRIQPKPDQKATMLFWLERLRRHWNWSLGQRYDYLRRTRSRLDRCSLVSEPIGEIPERFPNYNLQAGQLKQTKELFPDYRNIYHDVQQQNLKRLDKAWERWVKPDKSGKRGGRPKFKKAGQLRSFTFPRINCSKAGANLNNGVLKLSKIGEIDVIVHRPIPEGFKLKTCTIVKKADGWYASISIEDETVPAPKPLDTVKTAIGIDVGLNKFLTTSVGETVPIQQVYRKAQKHLARQQRKLSRKQKGSNHHATQQNFIARIHQHIRRQRRDFHYRIAHQLVGKYDLIAVEDLNIRGLARTKLAKSILDAAWGEFITILETVAVKCGVRVVKVNPHGTSQNCSGCGTKVPKTLSVRTHQCPKCNCVLDRDENAGRNILNRALSEVGLILPVRGGLDVSQPELALADAALASKRKLLDGDWVQLSLF

SEQ ID NO: 52303 - protein, 384 aa, unknown
  TnpB Polypeptide
VGDEWQSLNIFHGNKIVVTETLRTFRYHLYPNEEQETVMDGQLRTLCDLYNLLRNEKREKHLPLNKLRMMALEHRGNVHSQAAQNVASRVNSAFKNYFEGRTRFPKPKQAERYRSMTYLQSGFRLEGKIVKRGKRTELVGKLYVSKVGLVRIFMHRPLEGKVKTVTVKREVDGWYACFSCEGPETPRKPIEQIPPERIVGGDLGLKKFLTLAGGSSVDAPQFLRQAENKIKRLQKAFSKAKKGSRNRQRLGIRLAKVHLHVARQRSNEQNRIVSLLYANADVLGLEKLRVENLLKNHRLAKSIMDAAWSQFIRKAEFKAHVLGKYFIPVDPWGTSQFCWRCLSWAPKQLGNRTHACPICGEALPRDQNSAKIVKTLVLSCAHGG

SEQ ID NO: 52304 - protein, 485 aa, Streptomyces sp.
LKTFQTQPGFTVQAYRYALDPNSGQERALRSHCGAARAAYNWAVAWVSASWWQRKAEATYGIPEEDLTPWRPWSLPALRKEFNKVKKTDLRFADWWEGNSKEAYSTGLSNASAAFDNYAKSKNGKRRGKRMGAPRFKSKRKARLACRFTTGTIRVDADGRHVTLPRLGTIRTHEPTGSLLTRVQAGTARILSATVRHERGRWFASFQVEVKRDLERVTRPDVAVGIDLGVKTLAVMADSTGEIRAVPNPRHYDGALKSLRRASRTVSRRQGPDRRTGRRPSKRWEKANARRNKVHHRVANLRTDALHKLTTAVAAEYGTVVVEDLGVAGMLRNRRLARQIADAGFGEIRRQLDYKTRRRHATRAIVADRWYPSSKTCSGCGAVKAKLPLHVRTFACDACGLVLDRDDNAALNLAALAVAGTTGTGVAGDRDTPQAVSKPRGADRKTRATRPRPVAGAGRAGGATLPHQRREETRDRPQPEALTLW

SEQ ID NO: 52305 - protein, 374 aa, Salmonella sp.
VRKLYKFRFYPTAAQEEYFRNVFGSTRWVYNKILTWRYSIWETEKRFVGFAEASRKLTELRSMLENAWLAEIPYMPLQQAVRDQDKAYTNFFKRRAKKPTFRTKRDTQTIRYCGGAFYCKKGIVRVAKLKQPLKVKWSRELPSTPTSVHVTKEASGRYYITFTCEVHEKRLPDHNTKIGIDVGITTYASLSTGEKVDNPRHLIASERKLKKLQKKLSRQKKGSSNHSKTRARLAKIHAKIRDSRCDFIHKLTRRIVNENQVICIESLRISSMVKNHKLAKHIQDATWGTFVVLLTQKAKEAGRQLYKIGQYEPSSKKCHVCGSVMKTLPLSVRMWDCPSCQTRHDRDTNAALNILHIGLPWANAERFKAGLPAL

SEQ ID NO: 52306 - protein, 454 aa, unknown
  TnpB Polypeptide
MPAKEQDVTISIKAKLYPDQNTIEEFKKLTTAYSEAATWLSDLMFNDFSSPEMITDCRTLHDKYYYDIRQKKDMKSQLAESLIRSVSAKYRAIDTTLKKQHYTYTDTDGNTSRYKKDLNWLQHPVVYRRPQADLVRGRDWSFVNDKNGGLLLSIATLTGRTKVRFVVKGFEDIFNDSDMPGLNIEDPKWRFGEAKLLSSGGKWFLHISVTAKLPVTENEDISNIAGLDRGLVNIVTAADQSGLTARYSGDDARKIRARYNRTRASLQKKGTRGAKRVLKRLSGRENGYMNDVNHCLTKALCENYPEDTLFVLEDLTGVSFEERNFHSKEQTNELRSWAFYDFGEKLKYKAALRGQQVIEVDAYKTSQRCPHCGRYDKAARHRDTHEYVCPECGHIENDDEVGALNLMFLGAEYLKGDKNPSFTKMEPSGKKRKAKAAKKNAENTIAENAFVLIR

SEQ ID NO: 52307 - protein, 401 aa, unknown
  TnpB Polypeptide
MEEQLKLCVRAVIPPKDVGLRKLMHEYVVYNKVLIPRVKQAVRQVIKDKNITVYSQQKWMIDKKLNEYLKNLPFHPMPFHNQSVWVQEKDGKFWIHFKTKQGEAVCYLHVPAKYHSLIEKACGEDNPVLGQVELIEDQKYGWVNCHITLRLPKPKPYEPKGWVGVDVGWNKLATSIACTCNPHIRFFNPTFHGKKFKTQIIQLRHLLKQFQRKDTNVNKWENRLKNTIKYAVGAAAKEIVSKAKKLKAGIAMESLTFKAVSKGYLVPRYKLMIAVKTLCEREGIPFKLVPARYTSITCPKCGVKHEKNRQGKRFRCLKCRYEADADVVGAMNIALKAFDSFPDGGENDVGFTPASKADRGLPREVGHVASPQAPMNDDSYKAGRKHNKIENEVRKEGLSRL

SEQ ID NO: 52308 - protein, 529 aa, unknown
  TnpB Polypeptide
LRNANSRSRIGISSRAASVGTYGSSQSHQREIIAMAMLGVSCLDDFNSSKPATSAWIPLRIASRSACCAIPTSSRKTVSIAAASCPSWALLTLACGIANADFPISSIICLAFFGIYSQFLRRRPLPSGNGGMRPPFIYLTNTNKCAMIPAVKLIAQVKLQHNTEQAAALKETIQRANAACSYISDVAWKSKTFNQFRLQKLVYRDVRNRFGLTAQVAVRCISKVADAYKLDKKHKRTFKPLGAITYDDRILRWYIDKDVVSIWTVNGRMRITFVCGDKQREMLKYRKGESDLIIFKDQFYLSATCEIEEPIPTEGNGVLGLDMGIANLAVDSDGNVYSGETVNSVRRRYRHTRSKYQSVNTKSAKRHLKRLSGKEKRFAKNVNHVVSKQVVKLAKDTCRDIAIEDLSGIRDRVTVRHGEQRATLHSWSFFQLRSFLAYKSKLAGINLILVDPHNTSRTCPACGNIDKRNRPNQATFKCVVCGYSGLADHIAARNIASRAAVNPPMVSTVGAHLSPVGESPMASGTSRPL

SEQ ID NO: 52309 - protein, 262 aa, unknown
  TnpB Polypeptide
MPIKPSKEIDFSQFKICESRLYKFRDDFFVNITIQKEVNTKSSYSSILFIDLGEKVIAASVVLVNQRPQFYGREVRGIRRKYSYIRKNLGKRKLLKEIKRFGQKEQRIVNNILHNISKQIVEEAEKTDSVIVLGDLKGIRNNSKGKKFNRIVSNMPYLKLTQFIEYKANWNGIKVIKISERGTSHTCSMCGSKGIRPYQGLFKCNKCGYQVNADYNASKNILKSSLDYMSKEGVDVNQPKTHPGDGKLSSECSKDAHGFSRE

SEQ ID NO: 52310 - protein, 538 aa, Thermus sp.
MAILPHRRPSVIGEAASQERPGKRKKGKAFTGAHALLVFPSGEDHKATLDLMRRFSAAVRYAYNRLLEGQTREGLKRQDGPLCALFALNTRYADDALMKAQAVLDSARELGENPRKVVFGGRRLFETLKRGHLSGKPLKRLKRAWQEKRQGLLYSRGDKTKGGNLNLRLLVKEGALWLRINLGDGSYAHALVKTRHPNLSALVERVYASLPYNVELTLREGKVYATFTWEEEPAPLAATKENGVLALDVNSDPYHLALALVSPDGNLRRHLTLSLEEVDRAPNRGAKELLLWKIAHEVVSLALEHGVAIATERLKHLPKGRRGDGSGRPFRRKAHRFAYASLLRKVHSLARKRGVQVVEVNPQDTSTIGMLKYAPLLSLSKDVAAAYVIGRRALGFAEKLPRGYGKLLREERFRGHVQGFYASRVQELRAKREAESNPYLRRRLSQELERAKRHLSLLSSLQGSPGSQEGSTEGRNPFGANPWRVLRVGFFLPLLGKAVPRDLSPLKAILHRGAWEGWKGGLGPHPGGGPECVNVRST

SEQ ID NO: 52311 - protein, 383 aa, Geobacter sp.
MEQDCLRTFVFKAYASRRNRKLHRQIDIAASIWNHCIALHKRYFRLFGKHLNQFQLMKHVTKLKRIPRYSFWSEIGSQSIQDVVQRIEKGYQLFFQNIKKKSGRKVQPPSFCKRAKYRSFTLKQAGYSLSGNRLRISTQQYRFFKSRDIEGKIKTLTVKRDTLGDIYFIFVTDAEHQPFRAATTEIAGMDFGLKDFLVISDGRKEPAPQPLKQALKQLAKANRALSSKQKGSNNRRKARKNLARLHRTIANRRKDFHFKQARELVNRYNAIAIEDLTLSGMKTLWGRKVSDLGFSSFVSILEHQSTKTGCSIVKIERWFPSSKLCSSCGTINEALSIRDRHWTCDCGAVHDRDINAAINIQRAGTSALGLGDVRPGLNPAVAV

SEQ ID NO: 52312 - protein, 365 aa, unknown
  TnpB Polypeptide
MQKGIKFRIYPNKGQKAFIRQTLGCCRFIYNRGLAMRKEGYEKGEKIGYGQTSAMLTELKKQEEFAFLKEVDSIALQQSLRDLDQGFVNFFQKRASHPTFKSKHNHFQSYRTVNQKDNIRIVGRYIKLPKLGYVKVRQSMEVGNIHHVTIEHTPSGKYFAVLNIDFEPEPRPNVGGTIGIDVGIKAFYSDSNGNTVSNPRYLERSMRKLIREQRRLSRKQKDSHNRGKQRRRVARVHEKIANQRNDFLQKQSTMLVRENQTICIEDLNVKGMIRNHKLAKSIASVSWAKFFEMLEYKASWYGNELHRVPTMYPSSQTCSSCGYRNPRIKNLSIRIWECPKCHAVHDRDTNAGINILKKALQMQSA

SEQ ID NO: 52313 - protein, 371 aa, unknown
  TnpB Polypeptide
MILGRKVRLCPTNEQEQQLWKSVGTARFIYNWTLARQEENYKNGGKFISDNDLRKELTILKKTEEYKWLNEVSNNVAKQAVKDACNAYKNFFKGLTDRSRFKSRRKSKPSFYNDTSKLKVKPNMVLIEKVGWVKVAEQIPMDVKYTNPRVSFDGKYWYIAVGIEKKQPVVELTDESIGIDVGIKDLAICSNGMTFKNINKTKKVKKLKKTLKRKQRQCSKKYEMNKEGRKFVKTSNIIKLEKQIRLIHRRLSNIRNNHLHQATTKIVKTKPSKVVMETLNIKGMMKNRHLSKAIAQQGLYEFKRQLDYKCQLYGIEFVEADKWYPSSKTCSECGHIKSRLSLSERTYICEDCGVVIDRDYNASINLSRYSA

SEQ ID NO: 52314 - protein, 406 aa, unknown
  TnpB Polypeptide
VGVPDVVVRGYRFALRPTVGQAQLLAAMLEDHRELYNAALQERRDAYRSHGITVRYGDQSAQLKEIRAVCPDQGRWSFSSQQATLRRLERAFAGFFRRVKAGRKPGYPRFRGRNWFDSVTWPVDGDGCRWDSAPQSGQTRVRLQGVGHVKVNRHRAVEGRVKTVTVKRQGRRWYVILACEVQRPAPLPKTGRSIGIDMGVASLLTTSDGEHVENPRHAAKAAARLASAQRALSRCKRGSKRRVKARERVAAAHGKVRRQRLDHAHKSALDLVRAYDLIAHEDLAIRNMVRAPKPKADPDEPGGFLPNGRTAKAGLNRSIQDAGWGVLLSILAYKAESAGRVVIAVDPRNTSRTCPCESCGHVAAENRVTQAEFRCVACGYAAHADVVGALNVLRAVLARRDTAPAA

SEQ ID NO: 52315 - protein, 405 aa, unknown
  TnpB Polypeptide
LCPTPAQEVVLRGHCGHARYVWNLAVEQHSWWTPRRGAAPGFVEQARQLTEARSVFPWLAAGSQTVQQQALRDFAQGMKNFFAGTHGKPTWRKAGRDEGFQVVGCHAQKVKRLAKRVGRVWVPKAGWVRFRWSRKVPRAKSYRVTLDRAGRWHIAFAAIPEPVAAPGNGLTVGVDRGVAVSAALSTGELLTVPGLTPGQFGRLMRLHRRLAKAQPGSNRRARLKAGIARLKARETDLRRDWVEQTSTHLARSYDLIALEDLKVGNMTRSAKGTVEQPGRGVAAKAGLNRRIPASGWGMLAKRLEDKAPGRMVRVDPAYTSQTCHRCGRVDANSRKSHADFACTSCGHREHADVNAARNIVARALDAQHTAQHVVAEFAAGHAVTARGGSGLPGPVNRELQLAFTS

SEQ ID NO: 52316 - protein, 409 aa, Lactobacillus sp.
MNQTVTIKVKLNFDNQTIANKFEKTMEAYRLTCNYISEYIFNHNFDMSQTRLNKAIYSDLRSKFGLKSQMAQSAIRNVVAKYKTVKTQLFNNPLYYDTGQKNAKGKKVYQRVYRNLDWLWNPISFNTPQVDLQRNRDWSYLASKNLLSLNTLDGRVKVTPICKGFDQYFTPEWKLGIGKLLNIGNKWYLHVSATKEIPDYQVSQTEHVVGIDRGLRFLATCYDEHGKTAFFDGKQVARKRRKYKKLRAQLQAKGTKSAKRRLKKIGQRENRWMTDVNHQLSKTLVNKYGKNTLFVIEDLGGVREATEKTNKDSRYENVSWAFFQLGQFLTYKSNLNSSQTVELPAEYTSQRCPKCGRIRKENRDHDLHLYICDKCGYSTNDDRLAAINIQQLGTRYVSGEEEPIIIKDK

SEQ ID NO: 52317 - protein, 402 aa, Escherichia sp.
VKRLQAFKFQLRLGGQQECEMRRFAGACRFVFNRALARQNENHEAGNKYIPYGKMASWLVEWKNATETQWLKDSPSQPLQQSLKDLERAYKNFFRKRAAFPRFKKRGQNDAFRYPQGVKLDQENSRIFLPKLGWMRYRNSRQVTGVVKNVTVSQSCGKWYISIQTESEVSTPVHSSASMIGLDAGVAKLATLSDGTVFEPVNSFQKNQKTLARLQRQLSRKVKFSNNWQKQKRKIQRLHSCIANIRRDYLHKVTTAVSKNHAMIVIEDLKVSNMSKSAAGTVSQPGRNVRAKSGLNRSILDQGWYEMRRQLEYKQLWRGGQVLAVPPAYTSQRCAYCGHTAKENRLSQSKFRCQVCGYTANADVNGARNILAAGHAVLACGEMVQSGRPLKQEPTEMIQATA

SEQ ID NO: 52318 - protein, 451 aa, Micromonospora sp.
VSDVQLRYNYRVYPTPGQQAALARAFGCARVVFNDGLRVRQAARENDEPYVPDGELSKRVITRAKRTPERAWLCEVSAVVLQQALADLNTAYRNFFTSLSDKRKGPKVAPPRFRSRKDNRQAIRFTKNSRFRLLDNGRLRLPKIGDVAVRWSRVLPTDPSSVTIIRDAAGRYFASFVVTTTDDPLPPAGVEVGIDLGLTHFAVLSNGTKVTAPKFLRRAARKLRRLQQDLSRKQRGSANRKKAVVKVARAHVRVADTRRDWQHKLSTRIIRDSQAVYVEDLCVTGIARTRLAKSVHDAGWAQFVHMLEYKAVRYGRTFARIGRFAPTSQRCSVCGRVDGPKPLHIRSWTCPCGTVHDRDINAARNVLAAGRAESLNACGAQVRPAPVLAQRREAGIHPGATRGSTRSAEGIPVSRGGESVNTAGSPTSTCPPSTPPWRSPAPSVPAASCPG

SEQ ID NO: 52319 - protein, 443 aa, Micromonospora sp.
VQLRYNHRVYPPPVQQAALARAFGCARVVFNDGLRARREAREAGEAYLPDGELSKRVITQAKRTPERAWLGEVSAVVLQQALADLNSAYRNFFTSLSGKRKGRTVAPPRFRSRKDNRQAIRFTRNSRFAVLDNGRLRLPKVGDVPVRWSRALPAEPSSVTVIKDAGGRYFASFVVQTTEEETLPRVEPEVGIDLGLTHFAVLSNGKKITAPRFLRRAARKLRRLQQDLSRKQRGSNNRTKAVVKVAKAHARVADSRRDWQHKLSTRIIRDNQAVYVEDLCVTGLGRTRLAKSVHDAGWASFTAMLEYKAARYGRTFRRIGRFVPTSQTCSTCGRLDGPKPLSVRSWTCPCGAVHDRDVNAAINILAQGRWESLNACGAQVRPAPVPAPRREAGIHPHTACSTRNVEGISALQGGENVNTTPASTRGRRSPTRCGRRCGRSAST

SEQ ID NO: 52320 - protein, 428 aa, unknown
  TnpB Polypeptide
MSSYRRYNYRAYLTQGQRAALACLYGACRYAYNWVIDQREIMRTRRGKMQTYAQLSSMFTQLKQDPDHQWLQDMPAVPLQQSIRHADTAYKNFFRLYNTGKTKIIVNKRTGRKHITGKPRFKSRRDGEQSAEFTKAARFKVEHVNGYKWGFLTLPKIGRIKIRWTRDMPSMPNSVNVMKHADGTYEVSFVVQVDDIIIAPEPLHDACGIDMGLDSLMSIVYADGTREKIPHPRTLRKHARNLRKLDKQLARQKKGSNNHAKTRILRAREYSHIQNQRRDMAFKLASKVAGENQAVAMETLNVKGLARTSLAKSLLDANWSRIINRIRELSAQYGRDFHQIDRWYPSSQICAVCGHRDGRKPLRVRAWQCPDCGAFLDRDWNAALNILDAAGLAESLNAREGDVRRRLVCTSRNADTNEAGTHRTASLH

SEQ ID NO: 52321 - protein, 406 aa, unknown
  TnpB Polypeptide
MQVTRVERHIVDVSQPLIDLSYASKNLYNCATFIMRQNFIKNHKIINYNTMDKIIKRDYPDVYKGLPAQSSQQVLRLIEKNWKSFFKANQKYKQNPDKFKGKPKLPKYKDKEKGLNIVIFTNQQCKLRDNQIRFPKKVGLSELNTTVDNLQQVRIIPKYQHFVIEVVYKKEVSNYELTHDNILGIDLGLNNLATLVSNQPDVNPMLINGKPLKSINQYFNKKKAKLMSFIGDKGTSYSIARLSRKREQKIDDYLHKASRNIIDYAVETNSGLIIIGENKHWKQEINLGKKNNQNFVSIPYDKFKAMIEYKAEDFGIDVIFTEESYTSKSSHLDNDPLPVYKKGESHRFTGKRVDRGLYRWSKGIINADLNGAIGIIKKVVPEALDFLIEIRNRGAGFAPFKVVNIS

SEQ ID NO: 52322 - protein, 439 aa, unknown
  TnpB Polypeptide
MGRCAVKQDADDLSHVRTSQLSCHSARTTLRTFKYRIYPSRKQIIRLDYQFLLCREMYNTLLRRCRKEYRTSGTSFNRKAELCRIIKGIKDEDSRFNAVFSQSLQNVADRLAKAYQHFFRRVKERKVGKRVKAGYPRAKKRVTSITYPQFGFRFKSEDRLQASKIGSIPIVLHRVPRGRIKTLTIKRNRAGQWFACFACEVNEAEGTPADGEVGIDVGIEHFATLSDGTVIENPRHLLKSEKRLKRLQRRMSRKKKGSRNRRKAVRRLARHHVHVADQRREFLHRTSRALVDRYGLVAVEKLNESNMLKNHCLAKHIQDASWDTFIGMLRYKAVAAGAELVEVDPRNTSQMCNQCGNIVLKALSVRVHRCPHCGFEAHRDVNVALNILARARVGQTRSHACGDLASTPVTEAGASGVIESGTIRGRPHARVATAGRPGL

SEQ ID NO: 52323 - protein, 418 aa, unknown
  TnpB Polypeptide
MLKGIKIRLYLDDEQIVYVNKLLGCSRFIYNNLLSYKIEEYNSNKYDVSFGELGKKLVKLKSEYEWIRESHSKVLQQSLINLEKAYHNFFVNHSGFPKFKSKRDNKQSCRFPADAIGKINGNRINIITSLKNIHFKCSSSDEKYLNKYQSLIKSATLSKTKSGIYQFSILIDRPNKILNKPTNNIIGIDLGIKAFVTASNGQIFENLKLNRSDKRKLVKLNRQLSKKQIGSNNRNKARIKLAKYNEKLNNKKENYLHHVANQLLNENQVIVMEDLNVKGMMKNHKLARSIQELSLFRFKEILTYKSVWYGRDIVQIDRFFPSSKLCNCCGYKYQNLSLNERHWDCPVCGAVHDRDLNAAINIEHEGNRILKIGLSKPELKLVENGSVDELSRKAMLKSIHSMKQEDQAAKLINENIKI

SEQ ID NO: 52324 - protein, 363 aa, Catabacter sp.
LYPNKQQEILLQKTFGCCRFVYNQTLDYRKKLYENENKSMNKFSCSKYVTQVLKKEFEWLKEVDKFALTNSVWNMDAAYQNFFVLHSGYPKFKSKRDNRKSYKTDFTNNNIEILFEKNKIKLPKLKWVKARLHREFVGKIKSANVLQEPSGKYFVSILVDGNYNQMPSKVDSKVGIDLGIKDLLITSNGDKFENIHTFKKYENKLIKQQRELSRKVEGSNNRNKQRIKVARLHEKIHNIRLDCLHKITHKLISENQVIVSEDLSISKMIEEHNLAKQIQDCGWYELTRQLQYKADWNNRQYIKIDRYVPSSQTCNCCGYINPEVKNLSVREWICPECGTKHDRDINAAKNILTEGLKQLINAQ

SEQ ID NO: 52325 - protein, 228 aa, Moorea sp.
VAIGQGRAKYPRFKSYHHRQSIQYPQKVKQVGDCLKFPGKLGVVKAVIHRPLDGTIKTVTVSKDPSGKYYASVLMEDESDQPKPSTNGKVIGIDLGIKDFAITYDGEKTSKFGNPKHINRSEKKLAKKQRIAARKKKGSNGRKKARKIVAKVYERIGNVRQDYLHKLSRKIVDQNQVVVVENLNVKGMVCATRTLRERNHKLAKAISDRVAWPLGQSELGNLCKFSFL

SEQ ID NO: 52326 - protein, 407 aa, unknown
  TnpB Polypeptide
MLLKAYRYRIYPNVEQKILIAKHFGSCRWLWNHTLNKKIEAYAKDKTHLSRFDLQKEIPALKKAEDTKWLKEINSQSLQATLEHQDKAFTKFFREKKGFPKFKAKCNEQSFQCPQSVEVDFDGGKLLLPKFKSGIKTIFHREFEGKIKTTTIRQKSSGKYYVSILVETTESEKKLKKPNIKKAIGIDLGIKDFIITSDGIKVSNPKHLNKSLKRLKRLQRWQSRKIKGSNGRNKSRIILAKQHEKVTNQRLDFLHKTSHELVCENQATSFCIEDLNVSGMLKNHNLAQLISDVGWSKFVSFLEYKSRWNGKNVIRIGRFEASSKTCSDCGSVNKTLTLADREWVCANCGTTHDRDINAANNILQFAFHPKNNYKQIGQELSESTLMESGVHRKVSRSKKSEAPIPLG

SEQ ID NO: 52327 - protein, 483 aa, Desulfofundulus sp.
LEVKEVAETIRSTKIEIDLDDRDAGGANIQKRKCLELTQKILNEARVFYVTFFLSLPEKFDERITYYSEKHGEYRERKLNSKELLAWAESITVSTREHPDVLDEQNFSLKFSGMPVVYRRSVINDAIGKVRSYLSHLKKWEKSGEGKGKPGWPKADNYPVLYKGTYSLQLIGLDRKGSFVRIKVFDGSKWVWVNYPVKIGRWQEKRLAEPGWETKSPKLVIGAKKIFLSVPQAREVRARKVEESKLDPELVTVGVDLNVKNLAVVTVMKSGKVIETVFIKDSGLDRHRYLHLKLISKHQRQSGKAVRGERFDWRLWSHIKRTNLDFAHKVSRKIADVCAKYPRCVLIFERLGRSGHGKGGKARRINRKQANQLRGLIRDLSKHKAFQYGTVTVETDPHGTSHYCARCGEKGERFSFKNGKRVKRGWGKLFYCPHCGYEVNADFNASVNVHHSFYREYHWRIEGKARSGLKRPARLQAGWEKLP

SEQ ID NO: 52328 - protein, 396 aa, unknown
  TnpB Polypeptide
VSSGEYHRRTPITRLTLRSREDEQLLLDTIEVWLDGCNIASTLAWNECHTKSDVRKLAKARIKQNTELGDQHATLACHEVSGAIKSCIERRKNGKKATQPQFTSRSMTFDRRTLTVFPDQEKISLTTLGDHSRVHADLCLPESEDGYQHEYLDNDEWEYTESTLHYRDGDWYIHLGYRTPKEDESETATENGTVLGVDLGVNQIAVTSTARFFDAGNLNHYRREFEKTRGNLQQTGTQSAHRTIELLSGREERYVKHVLHSVANGIVEEALDHDCDGIVFEELDGIREDLPEAAWHSEWAFRKLKDFVEYKAEFEGLFVDTTSPRNTSRRCNHCGFTFDANRHAGQFECQSCGKSNHADYNAAKNVAELYLRRGHQPSGRRSASQYALKSGARTPS

SEQ ID NO: 52329 - protein, 163 aa, Nitrosococcus sp.
MHDKVCVLINENHVIYSESLKLKNMLPNPRLATSISDAAWGEFVRPLEYKADRVGRSLVAIDQWYPSSKPCSACGCLKNKMPVHIRAWRCSECATHHDRDVNAAVNIKAVGLACLLQAGGVSLWRECRAAWGQFPCLILVELGIPFLVKGGGVVNVPSMTYSE

SEQ ID NO: 52330 - protein, 321 aa, Cyanobacteria sp.
MAENQTITVACKLKTDSNVSKEIDQTLLAFSSACDWVNSNTPAELTNKTAMQSLVYHDVRSQFGLSSNLAIQAIRRVCANRKAARDKGKTVKGFFPTSISYDARTFSFREKDLTVSIKTLNGRPRLELSIGNYQRHLLKEAKPTSATLVKRKSGDYYIHIQIDLDTPEVAKNKDALGVDLGRTDIATTSEGDSWSGKQVTAKRNYHTKMRAILQKKATKGTRSSRRRCRQLQKRLSGKEKRFQSWINHNISRKLVDNAATNKKAIAIEDLTGIRERTNQKPRSKKDKRLGNNWAFYQLRQFLTYKCALAGVELITVVITAV

SEQ ID NO: 52331 - protein, 261 aa, Phormidium sp.
MAIRHSQQAGCQTSNPERQCWMLSSFVQRAMLQTAWLRERHEVDSNKLLSPSLIFNERNCHLSVPFECHPMKRQPDSNVVAVDLGINTTATFSVVTFDGTVIWREFIHPGRDIARRDKRLKSVSVRASKTMGKGGKLCKGFCSKTYRKCRHINQNIAHHVSKRIVDVAKQFNAQAIVFENLKGWKATGGRKGSTLRQRFHGWLKAMIRSFTEMKWQEVGGKALDVIAAYTSKLAYDGSGVVQRDSKNYALAKFPSWQALQR

SEQ ID NO: 52332 - protein, 626 aa, unknown
  TnpB Polypeptide
MSQVPKFPSNSESASPPSATGKRKAKFKPLEHVADIGSTTSRTSYKKPKTTRNRTTRGTTSSTVGFPPPNSPTTSNDKFSICVHNFQGTKSSQTSDQALTSKEKGCEPFWAKHKEAEYAKLLWPTETDYVDSPLTSLSGSSPKGARHSWFKTESKTFNTSSQRTSWPSYTCSVVDSTACDGTSALSKPTPTKKKKTKKEEDNEDNEEQKGETLQRKIRLFPTAAQATQLKRWMEASRWSYNQAVFAINQRHTANQRRKTQDKKVRRQWSAISLRNVVSRTRKHLRLFEDVPVHIMSYAVMDAVGALKSNMAKWKKNPKHYFELNYKRTNDKMAAITIEKTAAKILESALLFYPSYMEKLPIRCSKIPPLIPRGKPQCDNRLSVDAMGHFYFHIAIQETPSELHASSTPRQSVVALDPGVRKFLTAYSPDGWIAHLGTKHDTGRLAFLKRRVQTLVARTKALPRKQRQKKYRMKKAAQRARNRIKHLVLDMHCKITNYLVKSFSVIVLPDFRSQQMSKKKRPNGKKRQIGRGTVQLMQTLSHYSFRTRLLQKAARTPECSVLICSEAYTSKTCGLCGNINSKLGSSERFRCTCGASLDRDVNAARNILLRNLHSVEAAQEVCQLGHV

SEQ ID NO: 52333 - protein, 423 aa, unknown
  TnpB Polypeptide
MKLLKTLKVKIGKLSNNKRNILNILIKKNTKAINFCLQKAEKVIYITHNLVYEDLRKLNLPATVIHGCRAKSVQTMKSFYKRKGKKTFPIFKNSSVRYDNQVVKVRYTDNKLYPEFVSILYKRGIQGKQNNRIELPLIINSNYQKEIIHQIGDVYKLGATELVRKNDEFYIHISYSKEIEIPKLDKSFSPIGIDLGINNLAVSVAQSSVKFFSGERISYKNEFFRKQKAILQRNGALQEIRRLKGRQTRYNNHYINIISKNIVEQAKQENKPVIVMEDLKYILETTKTNKKQKIRLHSWIFRRLQRAIEYKALWEGVPVEYIDPYHSSQICSRCGELNKRDKHTYECKSCGFECNSDYNAGRNLQNLFLAKCQEEQASINYASNNVILEPKAEKDNNVRNLQDKGVNAALLNNKLLGILARDL

SEQ ID NO: 52334 - protein, 427 aa, Erysipelotrichaceae sp.
MHTVRLKLETDKEQRDMLERSFHALSHIHNVLVAHVRKLLCQLEHNHEYQDMREAYIDLLGRKKLSREEECQKKALSSGMKGIRESLGLSEYALQAYIKVCAKQFKQLLSSQQIQKEATRVYRSAQAYLFKNGKSVHFKKYRDFSSIEGKSPQNGAVFDPESFTVRMNGQTIIVKLPKDADSAEYICEALNDSISYCTISRLMFPNGWHYYVIITLKGDAPKKLIPGNRTIGIDPGVSTIAAVADDEAWLEELAPRTHAYAKKLSDIQRRMDASKRASNPSHYNADGTVNRQCREPWVFSKNYLKLRDLYKYLHGCKSRYIKCSHGALANRIIEAGTDIIAEKMNWKGLARRSKKQTETTDRTMEVTDSAGNRKQIRKCRRKKRFGKSLSSRSPGLFMSILEKKSLILRRQRQIHRYSEVQSEPVLP

SEQ ID NO: 52335 - protein, 458 aa, Erysipelotrichaceae sp.
MDQGNKDVTRYIVHTKGISQQVSRYIRMTSDLYHATLNYVINVCVSHWDEIRGLDTLDAKTYVESLIHSTKNRSALYSSFDRLYYKFPSYLRRDVIMRAIGHVSSFVSNTERYEDIQYARVSNGMRPTKRHAPKFCAGPDIAPSFYKDNMYVPNTDGSLSVKLWNGKDWCYYRIKVKSSDAHYISKKMADGWKMASPSLVRSFGHWVFAYVLTRKKTSLRENVNVIVGVDLGIGNDAVCSAMLPDGTVTARRFIRLAGEKDRLEHLRHRKRGIRAQSGRYASLSHINTKILGTNMNIACQTAHQIAAFAEEVHADAVVFEHLSRNFRGSEKTAQWRKMEVFHKTCGMLHRIGIRYATVSPKYTSRLAFDGSGRVKRGHEISENTPYDVCQFKSGKMYNCDLNASYNIGARYLMRLLKSTLVETEWSRVTAKVPDAAKRTKITLSVYRQALAVCSAPEE

SEQ ID NO: 52336 - protein, 462 aa, Erysipelotrichaceae sp.
METVVQYLVKPGHYNTLCQYAAKNAKLAKNLYNAALFRIRQTFTGWNKTSQSANEQEVFAELASTEAAYPSLVIRRRLSYRALDKIMRVNKNSDFFAGLPMQTAQAVLKQATSDFENWLRALSDYRKHPDKYTGRPKMPKYKTSEHASFTVTNQDAVIYPAYDSDGNQIPDCIRLKLPGLNEKDHPVFHGFRADGRLKQVTVKPYCGYYIFSLVIESPDVPVRTDLPNMAGLDFGTDNIAALACTDGSSAVFKGGAVLSENRWFAKKKADAVSDITKGHKHMHAESAHLDRLSLRHSFRNGNFMHQCSRRIIDWCLEHSVGVLVIGRNKRWKQNSDMGKRNNQKFVSVPHYQLLQLIEFKAMKAGIQVIEQEESFTSRADISASDFMPVYGRDKGTSCVFSGRRVKRGLYRTHTGYLINADCNGAANILRKAMPDAWKDILDFRFLGFPESFSYKRIIGAVR

SEQ ID NO: 52337 - protein, 540 aa, Erysipelotrichaceae sp.
MRERKKCKLTDYQKQLRQYHKNSPRHVLVLEADIPYQDRCRIFHYADLVRKAGNELVGIMKNNLEQLTRTKKYRYFNREYGKCKAAEDEDGLKAAAKKLKELQQSYNVTFDFCRKAMVPLDNKYGIDAVFGLTKAEDVWRGVEKCLYSGGKDIHFSKRGDLPCIRAKQINRGIIMKAREDSLTFSFHGMTFGVLVKDRFESDEVSAVLSYMNDPEASDRAAVSAMNASGEIISTYRPCYVSLSCSVIRGKMRVFVHITIEGRSVTKYNRFGCRRHKLGHGVVGCDIGTQTIAYTSDTEVGLRNLAERGSSVSENERKERLLLRSMDRSKRATNPDNYNADGTIRKGPKKWKFSRRYMKLKAKHTELCRINAVNRHLAINEEVNHLRSLGDIFVTEPKNTKKLQKRSTKDGTDKNGRCTRKKRFGKSVKNRCPGYFQTQAEQKFACYIEVPNNYRASQYDHTSDSYIKKELSQRMYSLSDGTAVQRDWYSSYLLYSIDTVNMTIDKSKCITGFSDKYAKERAMISWIIKNKIRVLNSGIRF

SEQ ID NO: 52338 - protein, 269 aa, unknown
  TnpB Polypeptide
VGNFKSVSLNSDRIRVDFKNGFLILPQLNKVRFRGYRHKNNLIGDIKNVVIKECAGKYYASILAEEPLTLSQLRPARIVGLDLGVKDIIITSYNEKIENSLKALSIKTRIKGLQKGLNRCEIGSKNRYKLKLKIQKAYLRLKNMRKCLIHSITNKIVNESDIIVIEDLDVKSMYKTRSVARSLTDIPLALIKQVLEYKCKWQNRILLTVDRYYPSSQLCSKCGYRNRKVKDLSIRSWECPSCGTLHDRDYNASENIMFEGLKIYMKSLI

SEQ ID NO: 52339 - protein, 450 aa, unknown
  TnpB Polypeptide
MYKVEMTRGRKILFPISNKKLDMALREETAMFVKTTNMFLRELVSWLQRCEFDVIGFSSHGELYVSDSEWYIGPGGGFHKPFTHKERSGELLPFPKIKDSQLKYLFSYVFRECGCFESHATWKDNISASAINKLKAVVRRFKKQRVESIADYIRRMVPPQVTNGTIGHKKTLMKYKDGVIKMTLANRNIIEIKDFSLPQSMYKQIHKAAFGGNLTIKNKANSKNHCYTVLFNCDKTFYEPKKWIGMDINKFDPYWVVIAENSPDGFEEIIGKPNHIKELEDRMKEVDKKIGNKDRKSISNKQRTILREEKFSIINLYNKAVHNLLSDNPHGESFLDFLENNQYGVGLDGVQTKGYAFGQSAINPILIKECEKRRIPYFLTKAAYTTRDCYYCEARNKRPKGQDPYICENPICEKFESEEIPHVNAARNIAKKANAGFLGLAKKQSMVHSS

SEQ ID NO: 52340 - protein, 436 aa, unknown
  TnpB Polypeptide
MGSYMAVKVRLDPTQRQERLMASHAGAARFAYNAGLAHVKESLENNEPPEWSHYSLRRWWNANKDELAVNQATGEVWWDQNSKEAYSGALRDLARGFSNWSQSRKGQRKGRRVGFPRFKSKNTTMRFAYSTGFTAPTASDPYGLKLPRIGRVHCMENVHERISGARLIRITVSRRAGCWYASLTVEREQSSSPVCSPKRGVVGVDLGVKNLATLSDSTVIPSPRALSAKLRALRKAQKALSRKVKGSARREKAKGRVARLHARVADVRANAINKATTMIAENYSVVCIEDLNVAGMVKNHNLARSVSDAALGEFRRQLEYKTARTGAVLCVVDRWFPSSKTCSNCGVVKAKLSLSERTFNCDACGLSIDRDVNAAINIKVAGSAPETLNARGGDVRQNQRTVGNADPGEARTKLARQSAMGLGAGLGNEAMQPRIN

SEQ ID NO: 52341 - protein, 381 aa, unknown
  TnpB Polypeptide
VNLGAVDRQYAAVENNPFADGEIVLRMVIQGAWYRLIFAFDNKRFTEGKVALPIIKAEGGQPVFIFTVVTDNPVVQFSVDYTIGVDVGINNYATVVVRDVKTGRIVYETTLSQRVHSLWNSVRASEQQVRDLRRKVALLLCDRQARMAALDEARFHREAASRKKRELAILAAQEIAYLSHTWGNAVVAVEDLGWVANTMQNGRWNRGALVQWLAHYVSQNGGWVVAVSPANTSQQCRVCGAKVSHPMHELSVCPEHGEMDRDVNAAANIAARAVPRVVKVRATRAKNKKLRSQPPLRTPVTRNSLKYPGRDRTKRKSTPKRKNHRRPVREVILPVCPARAQAQRLEARVLADQGACGALGTNVAALKQGNVAYKCRLCSLI

SEQ ID NO: 52342 - protein, 433 aa, unknown
  TnpB Polypeptide
MFESVKVALDPTPSQERRLASHAGAARFAYNAGLAHVKEAIDAGMKPEWHFFSLANWWNANKNELAVDADGETWWQENSAESYYRALEALAKGLSNWSKSRRGDRKGRKVGFPKFKAKGSATPRFAYGTGCFGLVKGDPKALKLPRIGRVHCMEDVAARVGDAKVKRMTVSQRAGRWYASLTVEREEPEVRETPRGGAVGVDLGVKVLATLSDGTVISNPRHLAASEKKLKKAQQALSRKTKGSNRRAKAKARVARLHARVANQRSDTMHKLTTRLTRKYSGISIEDLNVAGMVKNRHLAKAVSDASFGELRRQLEYKAARTGVRLHVVDRWYASSKTCSRCGSVKAKLSLSERTYRCDSCGLVLDRDLNAAINICVAGSAPETLNAHGETVRRSDQTGRATLVSVKCEPSSGGSRVSLGAGDRKGALQATSK

SEQ ID NO: 52343 - protein, 434 aa, unknown
  TnpB Polypeptide
MGSYEAVKVRLDPTPRQERLMVSHAGAARFAYNAGLAHVKEAIENGESPEWSHYGLLRWWNANKDELAVNRDTGVVWWGQNSKEAYSMGLRSLAQGFSNWSKSRKGQRKGGRVGFPKFKSKNTTMRFAYSTGFTAPTAGDPYGLKLPRIGRVHCMENVHRRMAGARLIRVSVSRRAGNWYASLTVERDPAVTATPKGGAVGVDLGVKNLATLSDGTVIPNPRALGTRLKALRKAQRVLSRKTVGSARREKAKGRVARLNARVADVRADAINKATTMIVRSYNAVCIEDLNVAGMVKNHHLARSVSDAALGEFRRQLEYKTARTGAALRVVDRWYPSSKTCSNCGVVKAKLSLSERTFNCDACGLSIDRDLNAAVNIHVAGSAPETLNARGGDVRRNQHTVGNADLGEARTKRAHKSAVRLGAGLGNEAMRPSVN

SEQ ID NO: 52344 - protein, 489 aa, unknown
  TnpB Polypeptide
LASLASEVHDISTYATYVVRNDGTLGNELALVTATAPAEAGRQAGVTMPDFLASGRTGRSRKEKLVQHRVVAEHRSYRERVKAANGESSKYVSQGWKRTVDDSAPSYGEDYVNLGAVDRAYAVIENNPFTDGEIVLRIVIQGAWYRLIFDFDNERFTEGKVTLPTIKVQDGRPVFIFAVVTDNPVVQFSSDYVIGVDVGINDYATVVVREVATGRIVYETTLSQRVHSLWNSVRASERQVRALKKKADGLLSQRQERMAALDEAQLHREAASRKKRELAILAAQEIAYLSHVWGNAVVAVEDLSWIVNTMQNGRWNRGELMRWLTHYLSQNGGWVVAVNSAHTSQLCYKCGSKVTHPTHEVSVCPEHGVMGRDVNAAANIAARAIPSVTKARVTRAKNRELRPQAPLRTPPARASLKYPGRDRTKNKPTPKRKNRYRASKGVILPVCPARAQAHCLEARVLADGGTHRATGTVQAALKQVYITYNCMLL

SEQ ID NO: 52345 - protein, 379 aa, unknown
  TnpB Polypeptide
LKRYSKAVNLFLEKIFLERVSSLFGLNKFRKEIYTKTKTTGYNSVLAMRSALAIYRSWRRNKRKELPKVKSKFIQLQPNYNCKLVGNKLRITFEKRKYVWLELKVGNYQQTFLDLIENGKLKLGQIIVGKDFAILSVKKECLPYQHQGILALDINEKSIDGVIFKNDELKSIRWDLNKNYDLNQRYFGHKRKLQTKYPNRFVLWKKLPHNKNYRNRIRWQLDNVTKQITDFAEKEKLMIVMENLKNIKKGINRKKLKVNKYNNKEQMMRTKSLSLLGRLNRANFRKSQFLIDYKGRWNNIPIEYVNPKNTSRTCSRCGHINGSLKEKRILECKNCGLKIDRDLNASLNIGMALCGSESGLPKIEDIRSRISEVALTKTA

SEQ ID NO: 52346 - protein, 442 aa, unknown
  TnpB Polypeptide
MQIISSYGVELRKQNIPIRQTLEIYRSAVSYLIGIYVQVWEELAEIPDAKRRFNAAEHLVHTTKKNHACFDFDIRFPKMPSYLRRSAIQHALGTVSSYKTRLDLWEKTDGKSGKPKLVYENHAMPVFYRDVMYREGAEGKDEAYLKLYDGHDWKWSCVRLDHTDMEYLRKCWSGKKASAPTLEKRHQKYFLRFSYKEEVTLTKTPVKEQIICSVDLGINTDAVCTIMRADGTVLGRRFIDHPSEKDRMYRTLGRIRRSQREHGSAQTQGRWAYTKRLNTELGKKIAGAIVRYAEENHADVIVFEYLEMQGKIPGKKKQKLHLWRKRDIQRRCEHQAHRKRMRVSRICAWNTSRLAYDGSGAVTRDWEDYSLCTFQTGKRYNCDLSASYNIGARYFIRELLKPLPVTERSLLEAKVPPVKRRTSCVYADLRKLHSEMEFLKAA

SEQ ID NO: 52347 - protein, 545 aa, unknown
  TnpB Polypeptide
MSKEMIIKTFKYRIYPKKSQARKMELWFKFCGLMYNFFIEFAERAYKEENKHLSLYDLTAVIPLVRHESEGIRDMYSTILYDVAKRVSLSYENFFRRWRNGEKNNHPPKTRDVNRNFSFTYPGRQGFEIKGRYLWLSKIGDVKIVLHRPPEGKIKSCTIKKYSTGEWFALFICELPAPEPKEGSNPVGIDLGINRFAVLSDGTEIPNPRFQRSFQKQLTKAQRKLAKTPKDSPEYAKRIRIVSKARMKISNRRRDFFHNVSKDILEKFNIVGVEDLRIRMMQRNHKLAGSITDTSWGTFLKILENKAKDRGARFVKVDPANTSKTCSSCGTITNLKLGEQIFECPTCGLILDRDYNAALNIKRLATQSLGEIPKSPKGSVDVQSSVPFVRKGTDEKRQSRTSKKQRKTKARKDQTIKNDKRIDKEITEKLIIYILANYEDKTRLTEKVLRSLVYHCDFNYHRLYGETMTKSRYTETKRRLLNPELSSIMRNLLKNRIIKKNFYTSFDGRLKNYLTSAFPFCPSAFTEKQRQVIDETIRQHISSGR

SEQ ID NO: 52348 - protein, 426 aa, Nostoc sp.
VQKAFKIILIPTHNQQVLINKTIGCARFVYNRFLALRKEFYSTEKKALNYNACSQQLTLLKKEIEWLKEVDKFALQNSLKNLETAYKNFFSCVGCANADLKKNKNKKNVGFPKFKKKYGCKQSYKTNFTNGNIQVIENRLKLPKLGWVKFYNSQEITGKIVNVTVTLTNTGKYIASILCETEIQKYPQVTQNIGLDLGIKSYLVTSNNETVDNPKYYITQKRKLRKAHKKLSRTVKGSSNRVKAKIKLARTYERITNLRDDFLHKLSTRLIKENSIICIEDLRVANMVKNHKLALSISDAGWTKFVTMLEYKALWHDRIVQKVGTFYPSSQTCNHCGFINPLVKDLKLREWSCPSCGNHNLRDVNASLNILSEGLRLIAESPVWGFPPLRGLSKTAAVGIPEALNVCGELVSPGAIQAEIVEAGIA

SEQ ID NO: 52349 - protein, 412 aa, unknown
  TnpB Polypeptide
MRSQKLRLKLTKDQENKAWWYSKVSRNFWNLLVDIDKRNNKGEFDDILSRSGNKTYYSKLYDREIYCLSQSDYLNLAKIIVAKNLEEDYEAWVWYYQPNQSFIYTFLAREIATVRKRNKGKLNFRGIDKIQPSFNVRCDMSSDKKRPSRIYLKDNGKLQIPTLGDVRFGSTRQDFDLSCKKQIATISFDGKYWYLSYTEDIEVQVTNLPDYTEGVGIDLGVKTLATISDGTVVPNIKTFRRVRILNKRLKRLQRKVSRKYLINKCNKHNKTKNIIKLERQIKLIHRSIRNIRINHIRKFVSELVKTQPEFIAVEDLNIKGMMKNKHLAKDIANCSFYTIKEHLIRKAKERKIAVRLVDRFYPSSKTCSYCGSYKQDLKLSQRVYHCDNCQEKIDRDLNAAINLANTDKYVLA

SEQ ID NO: 52350 - protein, 401 aa, unknown
  TnpB Polypeptide
MIIFVSMYKAFRYRIYPTNSQKELIHKHCGSIRFIYNLALETKTMAYVGSKVNLSRYDLQKQMVDLKKELPWLKETNSQSLQVALLNLDTAYKSFFKGCGFPSFKKKSNRGSFNVPQNVIVSGNQLIIPKFKEGIKIKLHRDLVGTIKQCTVSFTPTGKYFVSILCDTETESPKKKPIKEETTIGLDLGIKDFAITSDGEVFENTKYLRKSMQRLKVLQRRASKKQKGSANRKKANLRVAILHEKITNQRKDFQHKLSSKLINDNQVDSIALETLKISNMVKNHKLAQSINDVSWYSFTEMLEYKADWYGKNIIRVGTFFPSSKMCSSCGYINKELKLSDRSWICPVCSKEHDRDVNASINIKQFALKHSGKEFPVEPVEMSTLVESMKQEAYLSPLGVGG

SEQ ID NO: 52351 - protein, 436 aa, unknown
  TnpB Polypeptide
LSSLIRTAQFIIGNGHPSYAGCAYVTQIARRIKNATNYLIKKRVNPDSKPISHRDADKILKSEQADLYRKMPSAFSQRSTQVVGQEWSSFYQSIKAWKINPSKFKSKPVAPGYAYKATTCYIGRNGFRVEDGKIIFADHVIAPLQTHFEFSQGWNSKQSETIAQEVRIVPKGSCFVIEVVYNLSSLEGVKTDPVLLDRSRSIGIDLGINNLLAIVSNQPDLKPVLVNGKHIKSVNAWYNKRASQLRSTGQWRHLQQCGFKRHRQIKDALHRASNYVTQYCFANDVGLVVLGHNQGWKQEVNLGKVNNQKFVSIPHSVLIEQIKYKCESAGIEVVIREESYTSKASALDNDPMPKAPNRGQENSFSGRRVKRGLYKSKSGLINADVNAAMNILRKETGDAFGPASRGVVFSPTMITLGTAPRKTVRKNSLSSQLLVA

SEQ ID NO: 52352 - protein, 505 aa, unknown
  TnpB Polypeptide
MNNTKESRIFGSYLFANHANKGKIKKIRKVLKEYRKTANDISKYLWNQFFRLGKLPHRKSINIKHIPSPLSERYKYVCLWQVYDILSGYVASIQRQFAKIVLNSSLSREDKSILLAINNAKGWFIYDKDEIDIYDKKDGGIEKKSVKVSEYHRKLAKKIFKHLLKRNKRPSFDNISMHLNGKIVEISKKKEKGAKSFDYWIKVATLEKGKPIYIPLKANTYAEEVEGEFLNYCQVVEDDAGNIEFRIVKELKKKEYIPLTDKLAIDLGLNPLIATNNGDLIGRQFFDFLKKMDEKIIKRMAQVQKSGGLPSQDRKYREYVRKLREFLKNEINRLINRLIKLYKPAKIIVERLDFRSPELSRRMNRLVQNFGKRYIKEKLERLQQLYGIEIVEVNPAYSSQECSSCGYVDKRNRKNTQEFECRLCGKKINAQVNSAKNLLERSSLKEFHPNLPKKQILKALTKRHLERLKGCKSPPLDILKNNPYYKEFFEDILNPWQVGYAHMGK

SEQ ID NO: 52353 - protein, 590 aa, Nonomuraea sp.
MGQAERRPLPDRLEVGSGRDDAGPGRQDRDRPIPGARAARRQGRAGRGVLPGLERRPEGGPRAAGGACRHRRDRDGADRLGRGHRGRIRAERQAAGTGPAAARCVRFGDRGRAPRPPGPVRHGASVGRTRGERAAHRRDRRRRGGRRSGAGHDRSPHLVLRPPVRAALGVPPRQGRSARRPAGRVSDRQGYRVELTPTLEQRARLGQHAGLSRVVENFCLEKVKAALEQREAERTYDIAEEDLTAIPWSAPALERMWRLEHRDRYPWFTEEGLSSRVPKEACRVRAAGFKNFFDSRSGKRKGRKVGFPDWRKRKHGSRFRYDAGRARPESPRIIRLPGVGKVRTLEDMSWLTGRIADGRARVIGSTVKESAGRWWVSFQLQIDRADINEHRTVPGDAPACGIDVGVKTFATIVDDDGTVIELHAPKPLKAALRKLRKAGKAVSRKKPGSSNRAKAIERLARVHLEVANRRADFLHKTTTMLARSKRAIAIETLNVTGMVANRRLARAISDLGFGEFFRQLEYKTRWYGSSVWAADRWFPSSRLCGGCGTINRELTLADRVWTCGCGLVHDRDVNAARNLLEAMNLEQKAA

SEQ ID NO: 52354 - protein, 202 aa, Anabaena sp.
MGCGVNKLIFGITGTEEPGLIDFIVTSDDERIAAPKFLRKAERKLESAQRRVSRRKKGSNRRKKAIKKLGIQHKKVSDTRKDFHFKTANNLLNKYDVVAVEKLNIKGLARTRLAKSINDAGWGQFISILTVKAENAGLKVVAVNPNGTSQECSSCGNKVKKPLSQRMHNCPACHGSLCRDLNAAINIKNRGTHGLKAQSMSS

SEQ ID NO: 52355 - protein, 411 aa, Marinospirillum sp.
MKRLQAFKYELRPDGQQERQMRRFAGSCRFVFNKALALQKEHYEQGDKKLSYSGLCTQLTQWKSDTLTDWLTDTPSQALQQSLKDLDRAYANFFAKRADFPRFKKKGQRDSFRYPQGCKLDQSNSRLFLPKLGWMRYRNSREVLGVVKNITVSHSCGKWFVSIQTEREVEKPIAKGDALGIDMGISRFATFDRPLPEFDHEDHLAPLSSFKKHQTALRKAQQAMSRKVKFSNNWKKARAKVQRIHSRIGNARRDYLHKATTTISQNHAMVCIEDLQVRNMSRSAAGTVIQPGRNVRAKSGLNKAILDQGWFEFRRQLDYKLEWNGGWLIAVPPKNTSRTCPSCGHVSANNRKTQSVFECVDCGFKENADVVGAINILRAGHARLACEVSGATRPPAAGTHQSDSGLAPCHT

SEQ ID NO: 52356 - protein, 420 aa, unknown
  TnpB Polypeptide
VSNQVVTRTLKASITNHSQVYDDLDSHGFAASKLWNIGRWTISRVWDAIGHIPDADELCSYLKNHERYADLHSQSSQRVLQELGEAFVSWYKQDDSGANPPGYRKSGDEHPRSTVTWKNQGFKLDTEYNRVRLSKGTNMKKSRYAADYILCDFTVQADNQTLDGVESVQTVRAVWTGEKWELHFVCEMQIDTPETPGEKTAGVDLGICNTAAVSVGDKTLLYPGNALNEDAHYFRHEEYATEGENGPSNEAQRLRQKKARRQEHFLHALSKDIVEQCAIHDVGTIAVGHPKKVRDGSDWGRHGNKRLHGWAFETLLSHIEYKTEERGIDVERVPEGALKTSKTCCECGTEADSNRVERGLYVCENCELVANSDLNAAENMRATVTPNPARDRSNGCLAQPSVRLFDKSTGRVAPQEQVVP

SEQ ID NO: 52357 - protein, 432 aa, Halobacteriales sp.
VTATATKTLEATLAPPTAHKEQRLQRTVAAYRRALSESFEGGADTQSAVNDVVTGYNLTSYAKDALKNYVPQLRDSYNARELDDDHPVRFTNRGWNIDHSDDRTHEFCWRVPQAGRGNAFWIPLRVNPAQRELWDDLLNGDVSVGEFRLKEYRTNWVLHVTVKFPVEEPDYEPTDGDVTPVGFDVGEAHLLAGCACEQETPTDPLLINGGRARHLRKEMFTTLKRLQKRDAAEWRIDERFDHYQNALTDIIEKASRRAVEYTRQFEKPVVVLEDLSDIREDLDYGEWMNRRLHAWAFARLQQRIEDKAREAGLPVSYIRPEYTSQTCHECSHVGYRNGDEFRCTNDECWVTEYHADINAAVNIADRQDPWGESLPLKSAGNDIPRDGSACDSATEHREASRESRQTTLSAYSSETSSHNEAFLVGSPAAHGG

SEQ ID NO: 52358 - protein, 477 aa, unknown
  TnpB Polypeptide
LWYDNTKSIVKAEGVMKTTFQYRFYPDTKQKIELNDWLRVSRYWYNRQLGDRFDWWEMNRTSVDACPLVSSIATLRDKPNFYAQKKQLPVLKKDLVKVFHSGELLDFSRVDASVLQDVSKRLDKAFERFIVGDSNGNKSGRPRFKSVASFKTLTFADGKAIKISLVRKNWLYLRLPKLGVVKVRMHRAIPDGFIIKQVSVTHKADGWFVQLILEDPDVPEFSKEEITPTWDNSLGLDAVLHEDVYLATSDGEKLPSLKPLRKNQAKLDHISTKRNKRKRGSKSRRRLAKREAKQHQKIARSRQDFHYKTAHKLVRTGKKVFFSEDLNLKGLTRRNQAKQDEAGTFLPNGQSAKSGLNKSWSDAAFGNFFKTLEYIAAKAGSVVISQKPAYSSMVLCYRDEIIFTDCSIRDYWDEQHSLKVDRDINAAINLKRLGLGIFPSIKRRSGKLTVVGTMDQSTTKEILHTLHRAVGSLPCNL

SEQ ID NO: 52359 - protein, 402 aa, Moorea sp.
MIILEFKAYGKDYQYLAIDEAIRTVKFIRNSCLRLWLDNKGTGKYDLSKYCKTLAKQFSFANELNSTARQAASERTWSSIARFYDNCKKKIPGKKGFPKFKKHCRSIEYKQSGWKLYPDKKSINFTDKKGIGKLKLKGTWDLWQFDKKQIKRVRIVKRADGYYVQFCVAVNNNEQLEPSDANIGLDVGLKDFYTDSRGQTEPNPRFYRRGEKRLKFYQRRVYQKNKGSANRKKAINRLGRHHLRISRQREEHAKRLARCVVRSNDLVAYEDLRVKNLVKNHCLAKSINDAGWYQFRKWLEHFGTKFSRVTVAVNPAYTSQNCSNCGKVVKKSLSTRTHVCKCGCQLDRDHNAAINILQRALGTLGHNGTWILDPNASGDLASTFPGSGLVKQAESLRTSSCE

SEQ ID NO: 52360 - protein, 200 aa, Hydrocoleum sp.
VINGRPLKSINQYYNKVKSFLQSQLRKNQSSLRLKKLCNKREFKINDYLHKASRLIINTLINQKIGTMIIGHNEDWKQKINLGKRNNQNFVSVPYNKLIEMLSYKAKMVGINVIITEESYTSASSFIDNDLIPVYKKGEKNQVTFSGKRIKRGLYRTASKRLINADVNGSLNIMRKAVPNVFDYGIEGVVVHPVRITPAK

SEQ ID NO: 52361 - protein, 395 aa, unknown
  TnpB Polypeptide
MNRVFEIRLYPTKEQQKLLNSTFGACRFVYNNVLSLRQSYFNDYNFKSTELNIEQLLKAFNPWLNNVEAKALQQSIRDLDKAYSNWFNSLSHKTKQKSKAPKFKKKSDKQSYRTDQMRKDFFKLLDIENRKITVPKIGKITYRSGYDFSKYNITKVCNITLKKSKTNKYFCSICCECNEPEKLPENEYKIGFDLGLKDFLIDSDGIVIDNPKYFRKSLDKLLKAQIKLSHCVKGSNNYKKQKLKVALIHEKVRNQRKDFQHKVSSRIIHENQVIVSEDLKPSNMVKNHKLAKSIADASFSSFCNMIDYKSKWYGRTYIKVGSFYPSSKLCHCCGYKNTTLTLADREWECPNCHTLLDRDKNAALNILDEGLKILNKTGQELSKEPIDTGSNRNLE

SEQ ID NO: 52362 - protein, 317 aa, Escherichia sp.
LSGLTKTSSGSGLLFPDSKKRGQNDAFRYPQGVKLDQENSRIFLPKLGWMRYRNSRQVTGVVKNVTVSQSCGKWYISIQTESEVSTPVHPSASMIGLDAGVAKLATLSDGTVFEPVNSFQKNQKTLARLQRQLSRKVKFSNNWQKQKRKIQRLHSCTANIRRDYLHKVTTTVSKKHAMIVIEDLKVSNMSKSAAGTVSQPGRNVRAKSGLNRSILDQGWYEMRRQLAYKQLWRGGQVLAVPPAYTSQRCACCGHTAKENRLSQSKFRCQICGYTANADVNGARNILAAGHAVLACGGMVQSGRSLKQEPTEMIQATA

SEQ ID NO: 52363 - protein, 437 aa, unknown
  TnpB Polypeptide
LSTWTFLDYEFEDYASIYKSYRQSASLRETKAKRKEQRCRVYELKVNNAKLNSTQRNHLDMIFVEAKWIYNDIIKDVSNKATDAYVRSLKEVAVRYPDGFSYQTISHISSQMKQSIATGVISSLKSLAKLKANGQEVGELKFVSEYRSVDLKQYGNTYRIDFAKKTIKLQGLGKPLKVFGLEQIACNADIANAKLVKRFGEYYFYITTYSKDERVRKNEVLGLDFGISENLIMSNNMELTYKTPISPRTIKLQQSLSRKIGAKKGEKKSKKYLKNKRALTKSHYTDRMRRRDANNKIFHFIDGYNKIAMQDEQIKGWMGSKEANKAIQYSAMGTIKSKLSGLESSRIEVLDKFKATTKTCSCCGAIRRMSKKDRVYKCLKCGLTIDRNLNSTFNMINMSRFATEYSKTMPVDSSNKDFINLSNIEGLEIRILSREAR

SEQ ID NO: 52364 - protein, 437 aa, unknown
  TnpB Polypeptide
LKVYKTAKIPILGKKKIEPTVLIYRKALSDIIDVCYKERDAINKMQGIKRVSFVENLIHVTKKNPTPKYSYFDERFYKYPSYLRRSTIAIALGIVDSYLSSLANYEKKKADALAKNKKFSHKPPRLSYNHKAFPVLYRGNTFDDLDLDGTCLIKLFLDNDWKYVKVSLDTKALYSSKSFRFKEYITESPTLVLKFKRFYLYVPFVKDVELTNSKNIAIGVDLGLNKSAVVSAIASNGTVMGRLFIDQPVEKDRLEATLKRLNEANRKSGRNKKPNIWRKINNLIKAISQDTANRIVDFALRYNADVIVFEHLTFKKIKKKKLRTRMQYWAKRRVQELAKNKAHSLGLRFARINPKNTSALAYDGSGFLTRNENKAIATFSSGKRYNADLNASYNIAARFFLREIARAKVPVETDRTSQTLSTLIDLSKRNNLPLKVA

SEQ ID NO: 52365 - protein, 482 aa, unknown
  TnpB Polypeptide
MSEYIGTRIWYSKNIDKSVYSELSEIARRLGILRTYLWHKYSSYPRKLNDRAIRDNWLLAKKSNKSYPKIIDEIPARLWKETLRDTTKDINAYFEAGFTAVAKNLYKSYDKPKAKELCKLLRTGDYKNHGYCLEAKIVHCMVRRALPKGKSYADNIICLDADCYSYADGRLNVMSLTKNRRLSFELTTNRKPSGNFKLVLRNGIVELHTPNRIASTNNVDKTYSELGVDKGYSEAFVDSEGNRLGLGLGEVLTAKTEALNLKYRNRNKILAIYRKALTKGDLTKANRIIKNNLGKAKLNRYKAKAEGKIKEIVYSGAKALCKSTKVLALEDLSHEFKAKNGARVNRILSSWMRSILDEAINKYSLIYDTKLVFVNAAYTSQGDHRYDSALTGRRNGDTFTGHDGVVLDADENAAKNIKARMYDDEITRYTSAKKVKEILLLRAKRVLAAHSVETARPVLQPRNTVKGLKPKPSAKSELAQGY

SEQ ID NO: 52366 - protein, 511 aa, unknown
  TnpB Polypeptide
LDKATRSKKLAETTTKANKKRKRLEKQAATRKAKKTTLVDQPLTRDPESGDGDDPDADLNQPPPPPIKPPAEKVITIRLFPTLEQATTLKSWIGTARFCYNTALGGVLEENVSVNKQALRDFVLNNNQFKRFDLMDWLQDVPYDVRRAAVDELFEAYQSNFAKWKLNPTHTFKMAFRKKKGPGQEGIVIHYPHIRLLPLPVENPVAHCRTQGQLVIYPGSLGKEPILSAEPIPADALNYDCRITRDRLGHFYLLVPRPLNPQPLPESLPSVIRNPTPAEPASRLRIASLDPGVRTFMTIFDVHGQLALEWGKGDMGLIARLLHHLDRLQSKRDHMDTRARQRYRLNRAMERVRQRVRNLVDDCHHRLAKFLCESYDHILIPVFETSKMSRKATRKIDSETVRSMLTWSHYRFRTLLTNKAREYPWVKVHMVTEEYTSKTCTGCGHLKNNLGGAKVYDCSACQSRWDRDVAGARNIYLKKFEGAGTLSQCLLCPGTIWLGNHSRPRCRKWTW

SEQ ID NO: 52367 - protein, 352 aa, unknown
  TnpB Polypeptide
LFLTADGEKDKAWGNETIRWNPDQCWLEIKLPAPLAHLANRPHGRHRLSCPVRFSDRGDEVAAQAATGAIRYDITCDPRRGRWYIDASWKAALAPAAPLDDLRQHPVVAIDVNHGHLDAAVITPNGNILGTPATIGLDLAGLSSAARDGHLRAAITSLIATAGEHGACAIVIEDLDFAQARAEGRERAGSRPSRGRRGRAYRRMVAGIPTARLRDRLTQMASNAGLSVIVVDPAYTSRWGAEHWLVPLREHHPEATGHHAAALVIGRRGLGHRARCRATGNQAAPEEAARPAQARTRTKPATGTAPRKPATPPGPRQPPGAKTGRPHRTTAGNQAAHDRSGLPARWDYLLAQ

SEQ ID NO: 52368 - protein, 282 aa, unknown
  TnpB Polypeptide
MPKEKSHNKNTITYVLELLKPTQKKQKLFFRNIDEVAKSRRAIAKELNKGKEKLSTADFSYINLPSAVKNQDIREVKALYKRFKKSNSKKETLEFKPNQPICYNNQNYKIDKHIISIPLFINKTGRYAFPVKQNERFEALQRHIENGAKLEKASLFYKGNKWFFAVTLSFETEKVDTKNTMGIDIGLRQLAVCSIKTSEGKEISRGFHSGNHAGFIRKKYNALRRKLGKAKKQKAVEKIYNKEQRWMKDLNHKISRQLIDLAVKEKVSTIVMEDLKNIRQTA

SEQ ID NO: 52369 - protein, 420 aa, Enterococcus sp.
  misc_feature (24)..(57): Xaa can be any naturally occurring amino acid
VERLKAYKFRIYPTEEQEIFFAKXXXXXXXXXXXXXXXXXXXXXXXXXXXXXXXXXXEIFFAKTFGCVRKVYNLMLNDRKKAYEEVKNDPSKKMTFPTPAKYKKEFPFLKEVDSLALANAQLNLDKAYKNFFRDKSVGFPRFKSKKNPVQSYTTNNQKGTIALIDNKFIKVPKLKSLIRIKLHRQPKGMIKSAIISRRASGKYYISLLYKEEINELPKTNSAIGIDLGITDFAILSDGQKIDNNRFTSKMEKKLKREQRKLSKRALLAKNKGIPLSEAKNYQKQKRKVARLHEKVMNQRTDFLNKLSTEIIKNHDIICIEDLNVKGMLRNHKLARSISDVSWSSFVAKLQYKADWYGREIIKVDQWFPSSQICSECGHKDGKKSLDIREWTCPICDTHHDRDINASINILTEGLRIQTLA

SEQ ID NO: 52370 - protein, 212 aa, Enterococcus sp.
  misc_feature (157)..(205): Xaa can be any naturally occurring amino acid
VERLKSYKFRIYPTEEQEIFFAKTFGCVRKVYNLMLNDRKKAYEEVKNDPSKKMTFPTPAKYKKEFPFLKEVDSLALANAQLNLDKAYKNFFRDKSVGFPRFKSKKNPVQSYTTNNQNGTVALIDSKFIKVPKLKSLIRIKLHRQPKGMIKSATISXXXXXXXXXXXXXXXXXXXXXXXXXXXXXXXXXXXXXXXXXXXXXXXXXCDNITSC

SEQ ID NO: 52371 - protein, 159 aa, Enterococcus sp.
VNFVERLKSYKFRIYPTEEQEIFFAKTFGCVRKVYNLMLNDRKKAYEEVKNDPSKKMTFPTPAKYKKEFPFLKEVDSLALANAQLNLDKAYKNFFRDKSVGFPRFKSKKNPVQSYTTNNQNGTVALIDSKFIKVPKLKSLIRIKLHRQPKGMIKSATIS

SEQ ID NO: 52372 - protein, 234 aa, Enterococcus sp.
KGMIKSATISRHASGKYYISLLCKEEISELPKTNSAIGIDLGIADFAILSDGQKIDNNRFTSKMEKKLKREQRKLSKRALLAKNKGIPLSEAKNYQKQKRKVARLHEKVMNQRTDFLNKLSTEIIKNHDIICIEDLNVKGMLRNHKLARSISDVSWSSFVAKLQYKADWYGREIIKVDTWFPSSQICSECGHKDGKKSLDIREWTCPICHTHHDRDINASINILTEGLRIQSLA

SEQ ID NO: 52373 - protein, 421 aa, unknown
  TnpB Polypeptide
MSEYLGKFKGLNKILLSKRMMKTSVLRTERIKMKQNFTLKQLARQSKNLYNYGNYIIKKQLERSKYLTKEYDLANMLRYHPCYTKMPAHSAQQTIKFLCKSWKGYIRAKRDYKKHPEKYNFEEPKEPKYKKKRGFHTVYFTADQVSLKEGSYLHFPKRVGLKVETRLATNTKINHARLLFKGTCFILEIVYEQEIEELGDLKAKHILSLDLGVNNLLAGLSNSMSPFIICGRKLKAINQWYNKEKARIQSVYDLQGVGEYGQKMKKIIDKRYWRMEDYIHKASRKVINVCADNDIDTIVIGYNQKWKQRTQMGKRNNQNFVNIPFLKLIQKIQYKAEEAGIQVILTEESYTSKSSFLDGEPIQKHVRYLGRRVKRGLFRSKTGLFLNADCNSAGNIGRKVFPVLFNYGTVDAVSHPVCLTV

SEQ ID NO: 52374 - protein, 372 aa, unknown
  TnpB Polypeptide
MRKSLKYRLFPTKKEKRIFQEQLDQCRWLYNHFLEERKNNWEKEKKGISYFQQCNSLPALKKKRPSLSTVYSHVLQNVADRIDKAFQNFFRRVKQGREPGYPRFKGFDRYDSFTYKQAGFGWKINDNHLELSKVGSIKIKLHRPIIGIPKTCTIRRQAGKWYACISVEYELKPLRKSNKAVGIDVGLENFATLSTEERIENPRFFKSEEKAIAKAQRKLSRQNKNTSERRKAKKVVARIYNRISNKHHNFIHQEARKIVNHFGVICIEKLNSKGMMKNHYLAKSIADAAWNQFARVLASKAEEAGRKFIAVDPRGTSQICSQCGTIVKKKLSTRWHKCPVCGIRLDRDLNASLNILALGLQSLGLVPRSSRL

SEQ ID NO: 52375 - protein, 704 aa, unknown
  TnpB Polypeptide
MLTGCAPCSAYRALDESASQELGTQALSQRVGWLAGLTSTIAQGVLGSSWDEQTLTWFNRDTTPDGQPTPRKAYVAVRRHQLGSGQVAGLYIPDRVYRMGQEHAGQLLRSAGYRQQVLDAILRTWPDNPLERTQAEWDRLRTAAPGVVTAELRNRTRQIVAFMGRQQTLPAGLCELETTPRVAPMALAAAADRQAVTLTRLSADRALLRILLPRCEQPRARRDWSWVLITFNLPPTVPADSGLHTPSLRALPCRVAIDMPFDLPAPSLSGMGHLRAVGLDWGVCTFLLGAVGQLTTDESGHPRVVTDGRQLRFDPAGPIRKWEQLRLLGNHLRKQIGQLEKIVGDKQGHPADRKLAVLRRENLAVCARQRNLGHAIAWSAARWAVNHALAAGATAVYVEDLGTLEPAFDRKQNVKIAGSVRGQFQHALIYLAAKEGIVVVLLPAGGTSSGCPWCLQPLAHWTSPQRTKRGYHWAGCTHCPLSRDRDQAASWRVVARGLASQPFTRRDRKTGRFSVTQHRDLPVTVLPTHKPVPPTPGPDTARADTTDTDVAGGKVKKLYRPRVAKFKSGSRRSRYAGNNRARTHPQPKPKPRSKPKPAGAVPAQAAPVATVVRSVPLRRCSALPVRGLGGRGRPASGGTVPAVSPHGASQDGSIITRFSDVAERRKHEPRWARLGGGFHRNAYATPVRAYRDGAKGGAATLRQT

SEQ ID NO: 52376 - protein, 704 aa, unknown; identical to SEQ ID NO: 52375
  TnpB Polypeptide

SEQ ID NO: 52377 - protein, 320 aa, unknown
  TnpB Polypeptide
MNTTLTRTICCKLAVDGHDAVLAATQRAFNAAATWIARVCWDEGIANTNTAHHRVYGETRLAYGLGAQLAVCARMKAIEAIKAVKAKQRATCPRFGPRGSIRYDARTYRLMSLDRVSLNTLEGRVVCRLIVGARQHTLLGDPAWEIGGADLVWRSGTYYLHVTQSREAPPEAEPDGGVLGVDLGIVNLATDSEGEHFTGAMIHAVRNRYCLRRRRLQKCGTRNAKRRIRRMGRREARFQSHTNHVISTALVHKAVVARKALALEDLSGIRQRTTVRRAHRYERHSWAFFQLRQYISYKAAWAGISVYHSPPEDPALAGWG

SEQ ID NO: 52378 - protein, 374 aa, Methylococcaceae sp.
MNKAYKYRLCPNKEQAILINKTIGCVRFVYNQMLANRKTVYEQYKEDKEALKLQKYSLPASYKKEFVWLKEVDSLALANAQMNLQTAYKNFFRDKSVGFPKFKSKHHDRKSYTTNNQKGTIRLIDDKTIRLPKLKDVHIKLHRQLPQDAVIKSATISQTPTGKYYISILVEFEADIEPITPTVETVLGLDYSSKSLYIDSESVNAEYPRFYRKAEAKLKKAQRKLSKRKKGSKNRDKQRQKVAKLHEKVANQRKDFLHKLSRQITNAYTAIAIEDLNMRGMAQGLNLAKSTNDNGFGMLKTFLAYKLAEQGKQLVTVDKWYPSSKLCHVCNYKNTELTLADRVWTCPDCHTEHDRDINAAINIKNEGCRLLGIA

SEQ ID NO: 52379 - protein, 668 aa, Mycobacterium sp.
MASGPTDITTAASGDVVPPRRRGKSKARNFTYDGPVSVIRLELDAAEDVTRRRLEQHWGAVFRLRRACQRDAAARCRAYWAAHRGRAADPKALRERLGLSRKGIEAAAKRHIEGSGWMRDHLTKAIGLHVADEVWETIDRHLFADASGRRHGPPRVGSWWEFARIPGRARSHTKTTPTWETYRLVGTLDGHLNTYRHRRLPASACTASAAADQPAGVSILAQPARLPAPRRPPSGSWWDHDGALAMVFTGLPAGDVVLPVRLPQGAGQWAHVAHFLADPTIWHKIDLVRVADRRAPGGWRYYPHLLTHRGGYQSASTKARRATVPAGRRAGADANVSNLSVASFPTQHPEQLAIGRIDCTPEQLAAAAAQAKRARNRQRALDRSRRNTNPDQYGPSVRQHQRALRRAERGLQARRVTDPGGQRDARADGVPCRAYRHDQLSGRYRTIRADHTEAARSASQAKHARAAAVAATIVAAHGNTITVEDCRISTWARLWGKRIAVFSPGMLVSALHAECAATGGQFYRAGTRLTALSQHCLCGQRVDKPLDQRTHDCGHCGLRSDRDIVSAALAACVELTDPDDPRTAAVDYRLAHALRAGWASQQEWEGSVNRHQPPTPPDGAESARTGSRNPVASAEHAAPGTPPNRPGRKPGRRGTSRKQPAPKLIGAA

SEQ ID NO: 52380 - protein, 368 aa, Mycobacterium sp.
MRHHLDQAGLTETQWRQRWDASRWRVRANGSPDEPFGNLTITVTPAGQVSVRLPKPLEHMANAPRGRYVLSGPAVFTHRGQEWTERITGGNSISYVLTRKAGRAGVYLTASWAIPALPYWDGRHETDPGDDVVVTGPVVAVDLNDGHLAVRRLDEYGNPVGAPGRIDIDLTGAAARRDAQVRHAITQLLQYTRRHGITAIAVEDLNFADARATGRETMGRGPQGKRFRRTVSGIPTAVFRNRLAAMTARAGIELWAVNPAYSSIWGGQHWQHPYPNVTRHQAAATVIGRRAQGLPARRRKGVTPQRPEDRPVRATNQTGPRSPTVTGSRHEPRTRGSTSRGPCSTRTRQPGRATVTPAQVANHGQLQL

SEQ ID NO: 52381 - protein, 480 aa, Cellulomonas sp.
MTRHTTFQLVAAPTAEQARALTRHEGAARFAFNQGLRLHLDARRTAKRDDVEDIDAVKVPWTGFDLINALNAWKKTEDAGRRFVVGTDGTVELEVTGLAWRSQVSAQVFEEAVVDLGNALRAWTDSRRGRRAGRSIGHPRFKKKNPERGSFRMRNKTSKTKTGVRPTIRLGENGPRSVTLPGIGAIKVHDDTRRLRRLLATGRARILFATVSRRGGRWRISLTTEAADLHPAGRHEPRADADRGGWAGVDRGLHAPVVVALADGTKTLRIDEAPKALSTSRAVTRRMQKSVSRKVMGSANRRSAVARLARHHERVRARRHYFLHQVSNLLVKTHDRLVIEDLNITGMLANHRLAAAISDAAWGELARQLLYKQAWRGGTVLTADRWFPSSKTCSACTNVNQTLTLADRVFVCESCGHIVDRDLNAAINLATWGVRNFSQVLDPEARGQVTNVHRRGGSGPRIRASETGPDDVETLTVTAA

SEQ ID NO: 52382 - protein, 451 aa, Haloarcula sp.
MTSLSADKANTPRLDLGDEADTQGYKPLSEHIGNQDTAIEYSHRYQAYPTQEVAERLEHHLNVHRQLYNHVRWDYEQAPEDDKPSEYDQNNKLPEWKQKWPVFGDLHSKAAQATVARFHRNLSNLRKKKEKGYNVGRLKRQSPTDYLSVTYNQSGFDLDEKRGRDRFAYVRFSKIGWVKIRYYRPIPDRASIKEVTFKKETTGEWFVSFGLETDDADLPEKPSVDTLNASNSVGIDLGIQNYIHTSDGKTVDWLDLEDEYERLRREQRKLSRKERGSSNYERQRKQVAKVKRHIKRKVLDYQHKITTWLVKEYDAVFVEDLDVAGMLQSDGNARNKQDAAWRQFITLLEYKADLYGCHVKQVEARGTTKECASCGVETAKPIWVREHSCPSCGFETDRDANAAMNVLQRGFSELGLGWPEDTPVETVTATDTTHFESVSASHVVETGSLGA

SEQ ID NO: 52383 - protein, 475 aa, unknown
  TnpB Polypeptide
MAGKVTRILHSQGLNRAKYDRLADMAERAGRVRADAWCRCSGVSTAAQTPYAIRDAWMAEGCAWHGLPARLGKATLADALGDIEAAREAAKVSVRKAIRHRTRGHDAERQRLYSLLKRNQWTEDPFLHRQMRKQWRGGRSHVTNQIVADSGSYTTKLWHGRAWVHLQSMERGQRIAIPLKSDRLPTGTLRIILQGNGQVAVHHAIDETQACSTKPGGSGTVGVDKGYTEAYTDNEGERHGEGLGDLLAEESDARKVKGQRRNKLRDLEEKHRAQGHTRKADNIRQHNLGHRKRDRRQVRHRKQVRDHLCQAAHTVVDKAGTIACEDLSASMKSAKVRHKDTNRRLNGWVKGVMADTLTSISRRRGSALALVNPAYTSQIDSRTGLLQGRRRWDRFYCLDGVVLDADANAACNILARLYDEEITLYMPYREVKALLAEQTRLSVGTAPPGLELRGLATVPPSTESEVPATVPNSAV

SEQ ID NO: 52384 - protein, 483 aa, unknown
  TnpB Polypeptide
MVRTYRVNHNANINKQDKITAVIKEYRKTAKSISSVQWQRFYREGKPFNKNLDIKCIKSLLSERYKQTCQYQVVSVLNSFISNRQNDFRRMVYHSHLPEQIKIDLFTINKYGWWFRKELRKIDIDTLKLARKIFKHVLSKHRKPNFKNISMHLDQKVSLISGKVQDKATSFDYWVRLSTLYRNHPIYIPVKTNHYFENIEGKLKHFCQIGLKGDRDIALSFIKDVPDEKDSYTPAINKVSLDTGLKMLFATDKGDLIGKCFYGTLQKFDTQITKIVSMRQRQGLKVRCARYDKAVNRLRAYLKNEINRCLNRLIRLYQPAEIVIERLDFRKPNLSKRLNRLVTNFGKSIIKAKLQSLSEAYGIQITEINPAYTSQECSVCGYVDKNNRQEQEAIKCRFCNTSRHADVNGARNHLVRSSDEVINIYKNKKAVLRVLVDRFLYKLSDTERKYAMPHSKAITLLSKNPYYWGSLAQVKGFLWSVYV

SEQ ID NO: 52385 - protein, 432 aa, Gammaproteobacteria sp.
MRTNILRLIPDKATERTLRLMGDRVSALWNAANYVRRQAFVAHAAMPGYAKLCEDFKEHEAYRALPTHMGQEVLKKLIEAWESCFALREKWQSGALKDKPGLPRYRKHKDGTRPNDWIPVKSTAAYAVGPRHVALTLPADLRKKGRLQIPCRGLRRYVGPMKSADLLFDAGRGRWYIKYRVERDDNRPKPWVREAALDLGVRVAVSLSINGVGPSFNFLGRDLLKDWDYWGRKLSEHMSELSHRPKNQQSSKKLRRMFSQRGKRWEHAWEALSARIVAQLRNHKVGHLYIGWPKDIRRDKNYGKKWNGRIHNFWGFDKASKILERHCARAGIQTSRVLEGKSSSTCPECHSENVVRKPRHVLACRDCGFKAHSDQSGSRNLLRTQNPAAQFPNIPGPSRDRAEAAPKPETHRWHYHRWADASNPLSNERLAA

SEQ ID NO: 52386 - protein, 233 aa, Thermococcus sp.
MNVRIRSNGEWLNFRMSAPEKFLSVILDVQKFKYGAQVVLRNGKVYLHVQVPFGIYLKHLGKTTGGGLYAGFDLNSDRVNMVTLDENGIIRDVRVEHFPEVNSPGFSRRKARDLRLKTLARLLDYAFYHGVGTVFFEDLSRIKRRNGKATNSKKGNRKASNFAKKELLEHGVVMASKRGFDVYLVNPAGSSKLGRELAQGLGLDVHTASAFVIGWWGVNSLKTHKHPKEEQFG

SEQ ID NO: 52387 - protein, 373 aa, unknown
  TnpB Polypeptide
MNKAYIYRIYPNNEQSILINKTFGCVRFVYNQMLANRKAIYEQYKDDKQALKEQKYFTPADYKSNYEWLKEVDSLALANAQLNLKTAYNNFFRDKSIGFPKFKSKHKDRKSYTTNNQGGTIRLIGNKLVRLPKLKDIAIKLHRPLPEKTKIKSATISQTPTEKYYISILVEYDACIEQVTPTLERTLGLDYSSKSLYVDSQANSADYPKFYRKVEAKLKKEQRKLSRRKKCGKNRDKQRQKVAKLHEKVANQRKDFLHKLSRQITNAYDTIVIEDLNMRGMAQGLKLAKSTNDNGYGMLKTFLQYKLKEQGKQLVTIDKWYPSSKMCRFCGTVNGELKLGDRVWTCSCGAFLDRDINAAINIKNEGCRILGIA

SEQ ID NO: 52388 - protein, 391 aa, Tolypothrix sp.
MLNLTYTYRLKLTSQQSQTYEAWLETSRRVWNFALAERKDWYNSRSCRIDACSRKSEYIISADAPRPTFASQCKALTQARKTNPELNASHSQMLQQVLRRLEKAFIGMWESGRGFPRFKKQGRMRSLLFPQLGVKPIQGNQVKLPGVGWVKMQLSRPIPDGFVAKQAQVVHKASGWYVMLTLQADVDVGSFAPHGQAIGIDLGLKSFLATSTGEEIARPRFFVDLQRKLKLLQQRASHKKLGSNNWQKAQLQVARLHEHIHNTRKDFHFKLAHHLCDQVGMIFAEDLNFKAWAKGMFSKHTLDAGFGEFLSILEWVCWKRGVYFALVNPNGTSQTCPNCNHHTGKKDLGERVHRCGECGFETSRDIAAAMVVMQRGLRAVGHTGLVCLARG

SEQ ID NO: 52389 - protein, 367 aa, unknown
  TnpB Polypeptide
MEYSYQFRLYPNSAQRNLIQHTFGCVRFVYNYFLAERIAQYGETGKSPTRFQQDKELTALKKELEWLQEPDKCALKNALKYLDAAYKNFFRRVKNGEKPGFPKFKSKRDHRQSYTTNCNIKIFENAVQLPKLGHVKCRVSKEVKGRILSATISQNPSGKYFVSLCCTDVEIEPLPKTGCVIGVDMGLKAFAITSDGTEYPNPRYLAKSQKKLARLQRLLSRKPKGSNRHEKARLQVARLHEHITNQRSDMMHKLSTQLIRENDVVCIEDLAPQNMVKNHCLAKSISDASWGEFRRQLEYKAAWYGKKVIQIDRFFPSSQLCSCCGYRNIGTKNLAVREWTCPKCGTRHDRDINAAKNILHEGMRLMA

SEQ ID NO: 52390 - protein, 303 aa, Bacillus sp.
MLCQTSCYEKKFVWLKEVDSIAIQSSVRNLADAYTHFFKKQNSAPRFKSKKNNVQSYTTKQTNENITVVGNKIKLPKLVLVRFAKSREVKGRILNATVRRNPSGRYFVSLLIETEVQELPKTHSYIGIDVGLKDFAILSDGTIYKNQKFFRFSEEKLAKAQRVLSRRTKGSSRWNKQRIKVARIHEYIMNSRKDYLDKISTEIIKNHDIIGIEDLQVSNMLTNHKLAKVKWYGKLLIVVSKTFAFSQLCSCCGYQNKDVKNLNLRKWNCPSCCTHHDRDINASINIKNEAIRLLTARTVGLAY

SEQ ID NO: 52391 - protein, 446 aa, unknown
  TnpB Polypeptide
LCLPAQKALLDALNVENTFILVLSEEFLDHQNRGALEWDKEKVKGKKQWRLLPKYKVDIHSGEYKKKLRESLLEDWPFAAHWVDSVIKTAYSILKSWRKNYVKGERKRNKPTARRLFVRAKQTLIKLEGEKLRLTVKPGEHVYLDLSARYFKLPSEVSSAGLGEPVITPEKIHLPVHYEEDGQNVKPAIAWDFNLLSLDGYSPETGWIRIDTSKLASVHISSFEKRRSVQRKASRSKKAKRVLSKYSRRERNRARKHQLEITRVIQSLCSSVGLEELAKQGMYTRSRLWNRRISRSDWRSVARILVEKMGEARVEELDPYYGSSSYCSRCGWENKDLNGAVFECKECGLRINRQLNAAINLYMRMRFGYTEKWEGGKKSIKLRMEGASRVAWWDRVVLPSLVGGCVLTGGKRSDPDELVRGLHDALKPKLYYAYDRHADAYLRIPT

SEQ ID NO: 52392 - protein, 430 aa, unknown
  TnpB Polypeptide
MKLNQAYKFKLKTNYNIESKIDFYLGCSRFVWNKSLALIKARLENRNIEKVIQKNIITKYKKPEYLPNYNELSAMLTFWKKTDDCYFLNKAPAQAIQQTLKDLFEAVGQAFTKGSGKRFPVFKKKGRTQTGLRFPQGFKIDNNRVFLPKLGWIGFFKSRDINGKVKSITVKKLADGYYISVLIEKELEKGKWSDITDVNKLNPVGIDAGIKKIITLSNGIYFKPLDLSKIDAKIAKEQTRLNLKLHSRKKGDKVKKSKNYVKQSKKVALLNKKKADIKYDYLHKVSSAIAKNHGLIAIENLKVCNMTKSAKGTIENPGNKVKAKSGLNRSILNQSWSMFYEMLEYKLLLNGGKLIKVNPARTSQECPLCHYTHKDNRQTQESFVCKSCGFSINADLAASVNVINKALPDYNFNPPQDLRELTPVEYLSLY

SEQ ID NO: 52393 - protein, 375 aa, unknown
  TnpB Polypeptide
MLKSYKYRLYPTAKQADSLTFQLDGHRFLYNQALAERKEFYEREKKGISYSYQAVNLIPKLKKENNSMAICNYSSLQQTLRRLDKSFKAFFRRIKAGEKPGYPRFKSTDRFNTINYAKLGDGCQIKDDKLYIQNVGYIKVKWHRAIAGDIKTLSVTRRNDKWYVMFSVEFENIPIPKTGKKIGIDMGLEKLATFSDGNSYEPDKFFRKSEKRLKKAQQCLSRRKKGSNRRIKARKLVAKAHEKISNQRLDSYHKKAKQLVKEYDSFTVEDLNIKGMVRNGHLSKSIHDAAWGMFLSILKSKAESAGREFKKVNPRNTSQICSSCGKNVKKSLSIRIHKCPYCGLILDRDLNAALNILARTEPSVLAAKSAAPPRS

SEQ ID NO: 52394 - protein, 457 aa, unknown
  TnpB Polypeptide
LKICVYAICKNEEKFVERWFNSAKDADGIFVLDTGSTDNSVKKLKKLGVKVKTKEIIPWRFDEARNESLKMIPNDYDLCVCLDLDEVLLPGWYENLKKLYSNDYTRVRYIYNWALNLNNELYKKDKKKYSSTELNKMLTQYKKQKNWLNEVSNATLKEAIRNLDKAYTNFYKKRTSLPRFKSKKKSKLSFYSRYEKIKFYENNRVNLEKIGKVKYKSSYNIDFSKETSFKNPHVSYNGRCWILTFTLDVENKIESLTNEVIGIDLGIKYLAICSDGVVYKNINKEMIVRKLEKRLKRLQKQVSRKYEKNKKGGCYIKTNNIKKLEKDIKRIHRRLKNIRLNYLHQTTADIVKTKPYRVVMEDLSITNMMKNKSIAKQVSKLGLYEFIRQMKYKCEWNGIEFIQVSRWYPSSKKCSNCGNIKKDLKLSDRVYKCDKCGLDIDRDFNASLNLMNYGLSL

SEQ ID NO: 52395 - protein, 408 aa, unknown
  TnpB Polypeptide
MLLVEKHIIKPHHKYYDELDHLCLLSKNLYNSTLYTVRQYYFANKQFLSYQAVNKLFVSSNQPDYRVLPTRVSQHTQMLVDYNFRSFFALLKLKAKGKYDKSVKIPKYLNKKSGRQVVHYEKGALSFKAKGFIKLSKTNIKIKTKLTKETVQFVRLVPKNNYVVIEIGYNVNEPELKVNNNVLAIDIGVNNIASCVTTDGDKYLVNGRQLKYINHNYNKAVADAKSKLKITHNQDSSKYIIQITNKRNHRINDYLHKITTYIVNHAVSKNIGTIVVGYNKEWKQDTNMGKVNNQNFVNIPFYRLINLLAYKCRLKGIKFQTITEAYTSKCSFIDDEEIKKHQSYSGRRISRELFKTKNGLIINADINGAYNILKKYMQKNATWNESLSQTLVQVCSVPSVRKINIRLS

SEQ ID NO: 52396 - protein, 440 aa, unknown
  TnpB Polypeptide
MNKEKNEKIREKRRRTKEKRKSQSIKVFKIKLDKSKISKQKMNNLKRLFLEGKWFTNYVISRGIINLVSHRDYKIKKVKVKVKDKFEERELKLLSSQMKEYIITRLKNNVNALAKLREEGKKVGKIKYIKALHSIFLQQYGNTYKLDKKAKLLHLQGIGDFKVIGLEQIPDICDITTANLIERDGDYYLHVTVYLPKEEKVKNKKVIGIDLGVKDQITFSNGIKLRYSIKIPERLRRLYKALSRAKYNKETKQFSKRGEKILAKIKKEFMHQNNQKKDIINKITHYLSKNYEFVAYQNDSLQEWQKIFGKKIYQTSIGEFRDTLKRKVSTPLEVGRFTKTTGICMYCDHSMHLNLSQRLLICPSCGHALDRDVSAANVILKEGLSLWNVGETLVDESASTSNMLEYLNSIPHVKASISDEARSPKQADGAQIEAPSVRVG

SEQ ID NO: 52397 - protein, 400 aa, unknown
  TnpB Polypeptide
MLMKRVEKHKIYKSHPTYSKLDEMSRKANNLYNQCVYFAKNSKNLSEDLKNLDKVMKSFPDEYDNYRSLGYVQCAQQILRLFHQNMRSYFASIKDYKKNPTKYTGMPRFPKFRKSGERFQVIFTNQNAKLTGQTISIAPKTFENKLSVRLRTTSAKKLCQVVFSPRNEYFLVYVIYDTTDAIVSQKSNKVAAIDIGLKNLATITFSEQDEPLLYRSDLVKINKDFNRLSADYMSILKKTQNKYTSNRRKRLSEKRSGLMEDRLHKISRAIINDLSQRGVSTVVVGKNTGQKINSRLKNFVQVPLFRLIEMIKYKAELAGITFIQVNESYTSGTSFLDNELPTKEFYNKERRKYRGLFLSNNLKRINADVNASFQIMKKVDEKFTYTNFVKYANPIVKTIC

SEQ ID NO: 52398 - protein, 391 aa, unknown
  TnpB Polypeptide
MLKSYKYKLKPNDEQIVLLNKHFGSIRFTYNYFLNERKVEYETNKQSLNYNTNSKTLTELKKNKEFKWLREINSQSLQHSLKHLDDAYNSFFKKRTKFPKFKSKHTKNSFKVPQYVKVIDGELNIPKFKESIKMIQDRKFKGEIRQCTISKTTTNEFFVSILIETTHIKLEKTGLTIGIDLGIKDFVITSDGFKYKNNRYTKTYEKKLKTHQQHLSRKTKGSNRYNKQKLKVAKIHKKITNSRVDNLHKVSIDLIKKYDTIIIEDLNIKGMIKNHKLSKHIADVSWGKFINLLTYKTVWNDKRIVKIDRWFPSSKTCNNCGYINQNLKLNIRKWVCSSCNTKLDRDLNASKNILNEGLKIKSSGTDDNKCGDEIRPIKIGIIDEAFKKKKL

SEQ ID NO: 52399 - protein, 365 aa, unknown
  TnpB Polypeptide
MSRKAKGLETTYQVRLYPTPEQSHLLMAHCMEYISTVNVLVQAIDADMLADGFSTKDFSARLPSAVKNQALRDAYSVYKRSFKLGVLPVLKTPICQWNNQNWQLTADTLTFPVCIEGAAKQIHMKVAGGLVYMGLPGLLRIKKKRGKWIADITMTLEKPKPVEQDGIMGIDLGIKVPAVVYISGKGARFFGNGRYQRVMRRQFYARRKRLQKAAKGRAIKKSRGKEARWMKNINHQLSRQIVNHAHEQGVGTIKVEALAGIRKGTTRTSRGAKARKNNRMHNSWSFYQLTMFLTYKAERLGIKVEQVDPAYTSQECPACEARNKAQDRTYVCAECGWRGHRDSVGAINISRRTGLSDERVGATGA

SEQ ID NO: 52400 - protein, 388 aa, unknown
  TnpB Polypeptide
LSLLLYNEAINICDCYFKETGKYIGINELYNQIKKSENYTGMLAKAAQQLLRNLDKNYRSFFSLLRRKREGSYLENISAPKPIKGKHGMYHLILPNDQVILKNGILKLTKKIKIPFSYNGIKKVQQALIKWNGVNFIMYLTYDENLEINKTKNKIDKNENLEATRILSIDLGINNLMTIFSNVGPSFIVNGKPLKSYNQYYNKHIAKVKSQLKKVNNKYTSILTNRINENRNNYINDYLNKSVALIKKYCLENNIGRVIIGYNELWKQNVNMGKINNQKFVYIPHGRLRMKLEHKLVEAGIIVDMVEESYTSKCSFMDREKVCKHDDYVGKRVKRGLFKTENGIFINSDVNGAGNIMRKLIDEKNVFLEKQFDKIVGSIISPVRLNVI

SEQ ID NO: 52401 - protein, 389 aa, unknown
  TnpB Polypeptide
MTTTYKFRMYPNKEIREKLDFALDICRQTYNNLLEEMNNQVKIDRKAIQHKIVELKEVRPELKEVYSKTLQYECYRLFSNLSALRELKKKGRKVGRLRFKGKDWFKTISYNQSGFWFEQKGKKGILELSKIGIIKVKSHRQVEGKIKQITIKKSLGKWYCMIVTDFIQKRICGNKEIGIDLGINNYIMDSEGNSIAHPKTIDKYAEELKTAQQELSRKKKGSYNRNKVRFRVAKIHEKIERVRNDFLHKLSNQYVKDCKLIVIEDLAIKDMIQSSYNAKNIADSSWNRFVQFLCYKAENAGCKVEKINPKNTTKQCSNCGNIQKMPLWIRTYKCSSCGFEIDRDLNSAINIKNKFLGSERANVENNSSVQNEQELSMKQEAITLTGVRL

SEQ ID NO: 52402 - protein, 458 aa, Moorea sp.
MIAKKSQKIIRTDQWSLKPSAPQQLMFAETISVYQRACKFLTSILFTHWDTIGSLDTKEAVTAVERLMHQTKKNPNPKYKIFNRVFYKLPSYYRRAAIAFSLGQVSSFVTRYRDWQCGQSRKRRDAKPPLLTMGANCYPALYQGQCYRLDSLEEIQIKVLNGKNWVWTTVGIVSTRNRHTIPANKQLSPSLIQRNGKAWLSVPFHCKPDHKKEVNRVVGVDLGINKTAVISVVESDGTVIYREFIHPGRDIDRRDKKLKSVSIKASKTMGKGGRLHKGFCRNTYRKCRHINRQIAQIVSKGIVEISIEYNVSVIAFEYLKNWKPKGGKKKSNLKQRFHGWLKSIIRELTEMKWIESGGKIHDVVARGTSSNAYDGSGTVWRDRKNYALARFSNGKRYNADLSASYNIAARAIQELTRRNDSENRSSKSSTRLPRSRAVLCDLWVTSNDSIGHPHLKQS

SEQ ID NO: 52403 - protein, 459 aa, Moorea sp.
MYRTIPIKGTFTDEENAFWLFQCEQANSLWNCATYYSKQKHYSWLEQQPEALTTYWRGDDLRYGWKTYKCAVKYAELCKSFKENPHYKAMAAQSAQQTLKTVAESIASYNQLVGLYYKGQVDRPKLIRYRQKGGLAAVTFPRQALTYKKGLFYPSISKESKPELITEITLEPPGFIDPDWVKEVTIRPYLGQLWIDWVIDNGKQPVEQNSNLDYSQAWSFDHGGDNWLTGVSTHGKSLIIDGKKLKSLNQGYARLVAKYKAGKPEFYWDANLDRVQRKRNNQMRDGINKAARFIINRCLSDRIGNLIIGWNERQKNSINMGRRGNQNFVVIPTKRLIERLKQLACEYGIKLTVTEEAYTSKASYLDDDSLPKHGEKPQGWTPSGKRVKRGMYKTSFGDLVNADCNGAANIARKVATQLGLDLTKVGRGSLTLPHRYDLFGSLSRSYRTRCGAARFQPAA

SEQ ID NO: 52404 - protein, 436 aa, Moorea sp.
MNYTYRIYPDAAQQEAMLSWLETCMRLYNRCLRDLKDWMNSRKCRIDRCSINREYIMSPDISFPGYSSQKRQLTQWKKTEPDLQEVHSQVTQDVVKRLHNSWESFKQRGRGFPRFKKYGRYQSFLFPQFSTNPLRVNQIKLPKIGLVDINLHREIPHGFKIKGVRVVSRCRGTKWFVVITIQADLSVPETSPFGRAIGLDVGLIDLLATSDGLTIPRPKFFGDLQGKLKLLQRRLSRKQKRYKNYSKAQIKVARLHHKIANTRKDFHLKIAHQLCDQADSIFVVGEACPKDIDIDYRVMAKGFLGKHSLDAGFGQFRDLLKWVCWKRGKFFSTVDHKGTSKQCPECGYQWNNNLSIRWHTCDECGYSNNRDVASAEIIRNRGIEKYPRTIGERKLPAECVLSGILNLDKCNAGMPNREVGKPALYRAFQRREDVTK

SEQ ID NO: 52405 - protein, 358 aa, Moorea sp.
MQRAFKTKLKLNNKQKTLMAQHAGYSRWVWNWALNLWKEAALAGLKPSANKLKKFYTHHVKPQYTWQSTLSSRVYQFAFLHLGEAFSRFFQGIAQHPKFKKKGRNDSFTLDNCGKVMEFSGTRLKLPFIGWVSTYEPLPEIQTKRVTISRVANSWYISVAYEFESESTPKSREYLGVDVGVKVLATCSDGTVFHNPRAYKQAQNKLARLQRELSRRQIGSNNRNKTQLKLAKVHPIANIRKDAIHKLTSWLCKNHAVIGLENLNVSGLLKNHKLAGAIADAALYEIRRQVEYKSEWYGCQLVFADRFYPSTKTCSSCGHVQEMPLKERVFNCEACDYTADRDLNASLNLERYAEGFSV

SEQ ID NO: 52406 - protein, 406 aa, Moorea sp.
MRSAYQYRLRLTKSQVVKLEKWLDMLRHQYNYLLADRFNWYEQNRCATNACPLVCHLPELRDNPDYFSQKKTLPSLKKNRPWYGEVYSQVLQDCLKRVDLAFKRFIKGDCKGVRSGRPRFKSKNRYRSLTFPSLGKNPISGNFLKLPKFGEVKMVYHRPIPDGFKVKTATITRNADGYYVTLSIQDDSVPDIIPIDEVSNPIGIDMGIKSFLVKSDGTEVAIPQFYRKAQKRLKKVQKAVSRSKKGSNNRKRAVVKLGKAHKKVADTRKDFHFKTAKGLLDSHDLVAHEKLNIKGLAKTKMAKSVLDAGWGQFLSILSTKAENAGLVTKAVNPKNTSQNCSNCGKKVPKKLKDRIHSCPHCGYTEDRDINAAKNILNLAVGHPVSSKAYRVSQPLGGVGKKPALYR

SEQ ID NO: 52407 - protein, 469 aa, Moorea sp.
MPRKVGAAKKISTQIVPVVGMTKSVKLELLQVMKKLGIVRAESYNKLGSINHWGLDWKKAIPEVKSFRTPDALGLPAKLMDWTINDVAKAITASQAACTDAVIKKIYKRFPGKENQKTRKKLCKQLKTLAFLDSPLLHRLVRKEFQRGHSWVKNQIVYQQVGYSCRRLSRNTYQLELAGLRRGKRNRIILRSNRKVKGQIRLIYNQLLQIFEIHFLVDYGTVEIPSSRRSIGVDKGYTEALYDSDGQAHGKGLGKAVTKKSDRICAKNRNRGKLWALHRKLEKIDSAKSAQILENNLSRKTENRRYRQNQSELTAIIGAASKSLFNGESLKVFAEDLTQPIKNKRQSKIMSRKLNSWMKGEIRNSLQKWANWTGSVVTEVQPSYTSQVDSRNGTLLGKRTGDSFTGFDGVVLQADHNAAKNILTRGTDKEITRYMNKAEVQAVLLRRTARFLKGMGLSLLDAVELGWIG

SEQ ID NO: 52408 - protein, 449 aa, Moorea sp.
MNRWLDMLRSQYNYLLRDRNDSYDQVKAPRLGSYCDLKSGGEACPLTCSVSKNHSVGYPWKSSNKNPRRSAYEAQSSSLPTLKKQRPWYKEIHSTVLQQTLRQLDVAFSKFFKGETGYPKPKRRSRFRSFKYAPGQVKLDGDKIYLPGIGWMGFYNSRSIPEGFNLKSVTVRRKARGWFVSLQIEDKTVPIPSVTGKNEIDPQNVKGCDLGIKKLVSLSNGKTIANPAKTKSFRCKERRLELRQRAASRKKKGSKNRGKAYSRVASLHERIANNRSAYHWDTANKLVDGADALIFEDLNIKAMKSRCKPRPNKNGSYDRNGQSAKRGLNRSISNAAWGELVKKIEVVAAKSGIPVIKVNPKHTSQRCPKCNHTSKENRKKEKFVCTNCGHYDDADVNGAVNIKLRGLKKLGIDPIQLPPVRGKVTPTEITATNVVVPGNPHPSKGGEVQ

SEQ ID NO: 52409 - protein, 448 aa, Moorea sp.
VKTPTKVIRTDKWQLNPTPDQKLLFGETVKVYRHACRFLVGIIYTHWSELGSLTADQLTPAVECLMHQTAKRPNIKYPQFNKAFYKFPSYYRRAAIAFAAGQVSSYVTRYNEWQSGTRKRRDTKPPKLNANTGCYPALYKGQCYKLHGFDQVEIKVFNGLDWVWTTVQITGLRERHQVASNKMMSPSLIFNERYCHLSVPFNCKPEKRKPEANVTAVDLGINTTASLSVVTHSGTVIHREFIHPGRDIDRRDVRLKSVSMRASKTMGKGGRLHKGFCSKTYQKCQRINNQISHIVSKRIVQVAEKFNSEAIVFENLRGWKPKGGRKRSNLRQRFHGWLKAKIRDFTEMKWAELGGKVVEVVAAYTSKLAYDGTGIVRRDSKNYALATFSSGKQFNADLNGAYNIGARGILQLTRRNGSEGRSSKSSGRSPRSWACLCDLWARGSSKLA

SEQ ID NO: 52410 - protein, 293 aa, Moorea sp.
MIIIEFKAYGKSLQYQAIDEAIRTVKFIRNSCIRLWMDNKGTGKYDLSKYCKILAKEFPFANELNSTARQAAAERAWSSISRFFENCKKKVSGKKGFPRFQKHCRSVEYKQSGWKLSPDNKSITFSDKKGIGKLKLKGTWDLWRFDKKQIKRVRIVKRADGYYVQFCISVTNEEQLDPVDATVGLDVGLKDFYTDSRGNTEPNPRFYRTGEKRLKFYQRRVSRKKKGSANRKKAINRLGRQHLKISRQRVGEACAKRIEHAKRLARCVIRSNDLVAYVRAACRKARFESKEPS

SEQ ID NO: 52411 - protein, 459 aa, Moorea sp.
LYRTIPVRASFTDEEKAFWIFQCEQANSLINSAIYYTRQAHYSRLEQLEDAFTTYWRGDELRYGWKIYNCNMTYPELCKALKESLNYKAMAAQSAQQTLKTVAESVNSYNKLVNLYYKGKGNRPKLIRYRKKGGLAAVTFPRQALNYKDGWFDPSISRETKAHLLTEITLQIPDFIDSDWVKEVTIRPYLGELWIDWVIDDNKEPISNNRNLDYNQAWSFDHGGTNWLTGVSTRGKSLIIDGRKLKSMNQGYARLVGKYKTGKPDLYWDSNLDRVQRKRNNQMRDAINKAARFIINRCLIDRIGNLIIGWNERQKDSSNMGKRGNQNFVAIPTKRLINRLEQLCPEYGIKLTITEESYTSIASYLDDDSLPKHGEKPAGWTPSGKRVRRGMYKTSIGHLVNADCNGSANIARKVARQLEINLTKLGREALTLPHRYDIFKSLKRSYRTRSEKARFQPAL

SEQ ID NO: 52412 - protein, 386 aa, Moorea sp.
MKYTYQYRLYPETQQTLTLNEWLRVGRYWYNRMLGERFDWWEKNRCPVNACPLICYLPELKDQPNLYSQKKQLPVIKKDLVKIGWSGELIDFTEVYSTVLQDVCTRVKNAFNRFIAGDKNGKRSGKPRFKNVARYRTLNFPNAYNSWLKFCTVNGKWLFVQVPKIGLIKLRIHRPLPDSANLKQLSITRKADGWYCNLSLEDKSVPEFNPDDIIPTWENSIGMDAVLDRGFYLAISDGKKLPSLKPLRRNQDKLTKVSQRKNKRKKGSKARRKLAKREARIHQQIARSREDFQYKTAHQLVNTGKKVFFHEKLNLKGLTRRNTPKRGRDGTFLSNGQSSKSGLNKSWLDAAFGQFFEVLGQVAAKEGRQCSRSQAKLHISTPLLSR

SEQ ID NO: 52413 - protein, 418 aa, Moorea sp.
MNYTYRIYPSAAQQELMLRWLETCRRLYNRCLRDLKDWINSRKCQVDRCSIDREYIMSADIPFPGYMEQKRQLTQWKKTDPQLKAVHSQVTQDVVKRLHNSWEAFKQRGHGFPRFKKYGRYQSFLFPQFQKSPFVGNQIKLPMIGWVKINLHRYIPTGFRVKGVRVVSRCRGTKWFVVITIQADVSVPDTPSYGRAIGVDVGLNDFLATSDGLRIPRSKFFVDLQSELKLLQRRASRKQKGSKNWEKAQIKVSRLHHKIDNTRSDWQFKVAHALCDQADSIFVEDIDYRVMAKGFLGKHSLDASFGQFRELLKWVCWKRGKFLATVDHRGTSKQCPKCGAEWDNNLSIRWHTCTECGYSNNRDVASAEVIRNRGIEKYPRTIGERKPPAIGVLSGIFNLDKCYAGIPNCEIGKPALYS

SEQ ID NO: 52414 - protein, 339 aa, Moorea sp.
MSHKQQILALRQMCHLSKNMFNVGLYNVRQYFFQERKHLRYESNYYHSKENENYKLLPTDIAQQTLKIVDRYFKSFFGLIKLKSSGGYQEKVRIPNYLPKDGHFLLVIPIRKRDWNKLPAKNWVFTVPMSRQFKKTHGTVQFTIPERLRSKTVKEIRILPKYKARYFDVCYCYENETLAQVEQTGEVLGIDLGLDNFATCVSTTQKSFIIDGKRIKSENQFYNKRHAKLQSIKDLQGIKTLTNRQARLLRKRNHKIRDFTNKAARYVVDWCIQNKISKIVIGYNPDLKQRVNMGKRNNQKFARCAFQWPGNPALGRTSRFRFTCSKTSWKASVSDMGLN

SEQ ID NO: 52415 - protein, 347 aa, Moorea sp.
VSRYVFNKTVKILQSGEVKANWKAIKTGILNDLPDWCKEVPYQIKSIGIKDACTAVREAKKKYKKTLDINRVRFRSRKNPIQSCYIPKSAISDVGMYHTKLGELKYSEPLPIEVCDSRLTSNNGDFYLVVPHKVTKTNAENQGRVVALDPGVRTFITFFSETSVGKIGHGDFSRIQRLCQHLDNLLSKISKAKGGQKRRMKKAARRMVIKIQNLVNELHHKTARFLVDNFDVILIPTFETSQMSRKGNRKIRSKTVRNMLTFAHYRFKEFLKHKAQEMGKLVIDVCEAYTSKTVSWTGELLNIGGSKIITSKVDGRSMDRDINGARGIFLRALGDTPWLREQLALVS

SEQ ID NO: 52416 - protein, 427 aa, Moorea sp.
MLLAEDWMLTQVNNLRLDEQQILALKQMCHLSKNMFNVGLYNVRQYFFQERKHLRYESNYYHSKENDNYKLLPTDIAQQTLKIVDRSFKSFFGLLKLKSSGGYQEKIRLPQYLPKDGHFLLVIPIRKRDWEKLPGKDWLFTVPMSCKFKREHGAVQFAVPERLRTKTVKEIRIIPKYGARYFDVCYCYEDESEEQVEQTGEILGIDLGLENFATCVSTTQKSFIIDGKRIKSENQFYNKRNSKLQSIKDLQGIKTLTNRQAKLLRKRNHKVRDFTNKAARYVVDWCRNNKISKIVIGYNPDLKQKVNLGKRNNQKFTQIPIYTFKDKLESLCERYGIEMIEQEESYTSKASSLDKDELPVWNADNPKSYKFSGKRIKRGLYRTSKGWLINADCNGALNIIRKHTSNPNDCIGGFRGCLAQPVRVLCS

SEQ ID NO: 52417 - protein, 395 aa, Synechococcales sp.
MLTLTYEYKLKPTPEQVEALENSLDVCRRVWNYALRERKDWIASRKCSVNACSMRGEYIMAADSPYPGFVHQCKSLTQAKQANPDLKTVNAQSLQQVLKTLEKAFKDRSERGFGFPRFKKPGQMKSFVFPQLGKNPLGEGWVKLPSLGIVKIRQSRPYPDGFEVKQARIVKRASGFYVMLCFQAELSIPDVPLVGQFIGVDVGLEYFLSASDGLQVHRPRFFCDLQSELKLLQRRLKKKVLGSKNWRKLQLKIAKLHERIGNTRKDFHFKIAHLLCDRGDVIVVESLNLVGLSRGFLGKHMLDAGLGQFLNQILPWVCFKRGKGCLKVDARGTSQECPDCGHAVKKTLSDRWHHCPHCGSSMPRDIASAIVIKQRAVGRTVQEKACGDGLAGVAA

SEQ ID NO: 52418 - protein, 375 aa, unknown
  TnpB Polypeptide
LIKSLKIRLKPTEEQEILMKGFVGATRFVYNWGLAKWEEMYKEGLKPNGKKIKKIFNNTIKKEDEYKWLNEVSSALISQAFNDLQKSFDNFFNGKANYPRFKTKKRSKQSFYVRYDRMNIKKDTVNIEKIGRVKFTTNYDIPILKTYINPRCHYDGKYWYLTLGFETDENQVELNKDLSIGVDLGITNLAVVSNIDSPIKNINKSSKVKKLKKKLKRLQRKCSRKYEMNKDGTKFIKTQNIIKLEKEIKLIHRKLSNIRNNHIHQATNSIVKLKPYRIVMEDLNISGMMKNKHLSESIQEQKLYEFLRQIEYKSEFNGIEFIKVDRFFPSSKMCSKCGNIKKDLKLSDRIYVCECGLTIDRDKNASINLSNYKLA

SEQ ID NO: 52419 - protein, 419 aa, Clostridium sp.
MSKVHEGYIYSIEYYIVWCVKYRCKIINKRYREVVSLSMETKTVIKGYKYRIYPTKEQEVQLAKTFGCCRFVYNKILAMKIDLYKNEGKSLSKTTCNNYCNRELKKEYSWLKEVDKFALTNSIYNLDEAYQNFFRRVKENNDKVGFPKFKSKHNHYYSYKTNFTNNNIKVLFKDNLVQLPKLGKIKAKLHREFEGRILYATISKVPSGKYYVSFNIECEHNILPKSNNKIGIDLGIKDLLITTDGEPIDNQKLTYKYEKKLAKLQRQLCKMQLHSNNYKKQTDKIAKLHEKISNKRIDNLHKISLRIIRENQFIFSEDLNIKGMVKNPNLSKSIHDCGWHELTRQLTYKGLWNDRTYHKVDRYFASSQLCSNCGYKNEEVRDLTLREWDCPICKAHHNRDINASKNILMQGLKDLNVGL

SEQ ID NO: 52420 - protein, 410 aa, unknown
  TnpB Polypeptide
MYKAEIIKIKKSDKLWKQLDHLCFLSKNLYNYANYIIRQEFIKNRTWIRYQDLNKKFIKEKQIDYFSLPNNSSQQILMILDKNWKSFFKAIKDYMKNKNKYKKKPNLPKYKDKKTGRNILTFSTNQCKIKNGYLYFPKKANINSIKTRIKNLKMVRIIPDTYCYKIEIVYKQEKEIKNDLNEKNYLSIDLGINNLCSLTTNQILQPILINGRIIKSINQYYNKKQALYQSYIGDKGISNRIKKLNFKRENLINNYFHHISKWIVKYCIEHNIKNIVIGYNQGWKQEINIGKINNQKFVSIPYLKLIQQLQYKAEENNINVIVQEESYTSKIDSLALESIEKHESYLGKRIKRGLFQSSIGKFINADVNGAINILRKVIGNDFIKNLSDRGYIGYPLEVIPSSYNFGFSKI

SEQ ID NO: 52421 - protein, 375 aa, unknown
  TnpB Polypeptide
VRRKSLDFHAAMPILRSMRRAIRVTLKFATQSKRRRLQHLIAEYQRVVNFYIRSLWQMPGGLNAQTRERLPASKTRCSFAFRNQAVRQALGIIRATKNSAKGRACSMPIFNGAPVLGHSMVLIQDGCGSFDLVVRLSGLSKGNRITIPTRKTQIFNKWISRSGARLIQGCTLGNDHLVLWVDVPERPTKKSGKRLGIDIGIHKLLTDSDGKHYGTEFKTIRDKIRRRKPGSRNRWQACQERKNYINQIVNRLPWTRLSILGVEHLTGLKTGKQKGRGKAFRKAVAPWTYRQVLNRIECKAQENRVRLVAIDPANTSRTCPICGTVRRDNRRGEGFACLGCGYTADADSVAARNILARTLATLGSVESPKPKKAMA

SEQ ID NO: 52422 - protein, 406 aa, Gracilibacillus sp.
MLSFFPEMTDPPYKIWYNRCIVIQREVKALLVNKAYKFRIYPMKEQERQNAKTIGCSRFVFNHFLAKWNDTYQETGKGLTYNACSAQLPHLKEELSWLKEVDSIAIQSSLKNLSDAFSRFFKQQNKAPRFKSKKHPVQSYTTKQTNGNISMEGNQIKLPKLGLVRFAKSREVEGRILNATIRRNPSGKYFISILAETDVQPLEKTESAIGIDLGMTDFAILSDGQKVDNHRFTTKMEKKLKREQKKLSRRAQHAKNNGIDLLDAKNYQKQKRKVARLYEKVMNQRADFLSKLSTDLIQNHDVICIEDLNTKGMLRNHKLAKSIADVSWSSFVSKLTYKAEWYGKTIVKISKWFPSSQICSACGYHDGKKSLEIREWTCPVCHTHHDRDVNASKNILAEGLRMVASA

SEQ ID NO: 52423 - protein, 390 aa, unknown
  TnpB Polypeptide
VRTAYRCRAYPDEQQQAVLNRTFGCVRVVWNRTLADRRARWHRERAGTSYAETDRALTAMKKDPGLAFLNQVSSVPLQQALRHQHQAFGAFFARRARYPRFKSRAGRQAAHYTRSAFTLRGGVLWLAKAPAPLRFVWSWPHVDVAALDPAMVIVSHESDGRWYVTFTVEAAGPQPLPSAGRAIGVDLGVTDFAVTSDGGRIANPRHLQRRARNLARYQRRLARCQPGSANRAKAKAKVARAHRKVRAARQDFLHKTSTSLVRENDVIVIEDLNVAGMLRNRRLARAIGDCGWGEFRRQLDYKCQRYGRKLMVIDRWYPSSKTCSACGHLLAELSLSVRHWTCPSCRARHDRDINAAKNILAAGRAVARGSPGDACGGDVRHPGSSGCSRR

SEQ ID NO: 52424 - protein, 430 aa, unknown
  TnpB Polypeptide
MIINQKIEIKFDKESSLILDSQSRMCSKLYNILLENCKKEYEETGQNKLLTGRNLRDLVVDIKQEHAYLYSVHSSPLKNTAFRLKSAFEKYFKSLKDKIYDFGYPKFHSNKKKWFSLLYDEPNKGIRIENKHIRISLGYKLDEEGKKIRLYVNGILDEKIKVGNVKTYRITKELNKYYLIVTIEVSYKTKERKENKIISIDPNHTNFFVGIDNEGKTIELGKLYLIKYFDKQIDKVKSKRDKCLKKSKTVTNENGTSYTVASKRYQRLDKALTKLYLKRKNQLKTALFTIAHKLCDEYTHIVIGDYVPTPDLAKYHTMARAMLNQSPIGQFRSILQHVAAKRGCKFEIVDEAYTTMTCSVCGEVCHHEPNEREFICPCCNTKLYRDINSAINIGVKAKVLSSSDYKGMDLSKPLYTANYNLRKQRVSGWN

SEQ ID NO: 52425 - protein, 377 aa, unknown
  TnpB Polypeptide
MRKTFQYRLYPNRAQTEALTVQLSEACRLYNAALQERIEAYATHRKSINYYDQAAQPTEIRKAGHLDLPNCHCAQDVLRRLDKAFKAFFQRMKRGQKPGFPRFKSRRRYDSITFPSHGDGNKLLPSGHLFVQGVGNIKAKLHRPLHGKIKTVTVRRQNERWYVCFSVEASAQTLPESTEMVGIDLNLENFATLEEGNLEEKRIENPRFYQQAQKKLRRAQRRVARRKKRSNRRRKAVILLRKIHQHIFNQRLDHQHKLARMLVNQYGFIAVEDLNVKGLAGGMLSKQVHDASWASFIAKLAYKAEEAGRQLVKIDPRGTSQRCPCGAKVPKKLSDREHVCTACGLITTRDHASAAEILRLGLSLQAQTKPEVRVCVA

SEQ ID NO: 52426 - protein, 279 aa, unknown
  TnpB Polypeptide
LDKRTLTIKDRSCTFSTVNGRVKADYFLGNYQKQILDDPNYDFRTATLTFKNGNFFLNITIVKPALVKKPETVMGVDLGIKNIAVTSTGKFFKSGLLNDSRRQFREKRASLQSKGTRSCKRVFKRLSGRENRFSDWVLHNVSRQIVNEAINHNVEIIAFENLTDIRERVNQWRKKERAKVNLWAFSKLQQYVQYKALEAGMKTIFVESKYTSQRCFKCGHIEASNRNGFNFVCKRCNYSINADYNASKNIAFKVLSGKSPDWAGLPRKLALKTKRFAYV

SEQ ID NO: 52427 - protein, 368 aa, Actinomadura sp.
MAQIVKRAYKYRFYPTPGQAEELARTFGCVRLVYNKALEERTRAYTLEGRRVSYVESSAALTQWKRADELAFLNEVSSVPLQQALRHLQSAFANFFARRAKYPTFKSRKKSRASAEYTRSAFRWRDGRLTLAKMSDPLDIVWSRPLPEGAEPSTVTVSQDAAGRWFVSLLVEEKIAPLDPTGSLVGVDAGITSLVTLSTGEKVTNPRHERADRRKLAKAQQALARKAKGSANRAKAQLKVARVYARIADRRRDHLHKLTTRLVRENQTVVIEDLTVRNLVKNGSLARAISDASWRELRSMLEYKAAWYGRELLVIDRWFPSSKLCSACGALQESMPLAVREWACACGAAHDRDVNAAKNILAAGLAER

SEQ ID NO: 52428 - protein, 412 aa, Pyrobaculum sp.
VRQVSIRFAKDSWSYRKTAASTTPVKIAVSLPGGRREIWIKPHRRFWLYWWKVLRKETELASTLVLRRRRGKWYAIFVFDVVPKRESPAEAVAFDVNENSVAVARVSLLSTVDAVARWNRQYVDPAVYSIRTDFGRLAKRYEAVRNAKLEELKRKYPYAGRDDEEKVQNVTDTREFRKFVRRLRERRRKEGRVRQTAREMTKSPAVIITEELGKNPQEEMISLEKTKKDVKKKVEKRELRHRIKQTPFRKLVRAVEDKAAETGSAVFYVSPYRNSKVCPIHFDLLENGGGWHTLQCPHGHAVDRDAAAVLNMLWKITPEGVVKAVWWDVKEVRKRLKKRRRLVPKEAVRRRNPLVPWPIAYAVWTSLGSLKASPQWPAVLARAAPTTPARGADEGGTRAPVNRPSGRGGGQT

SEQ ID NO: 52429 - protein, 235 aa, unknown
  TnpB Polypeptide
VALTALSEDGVEDTLVIDFPEIKFERHRRYFTMRKRVQNAGKDSIHDTLEGHEERFVRDRLHKVSRHIVEWSQQFEKPCIVFEDLKEMRDGIDYGTRMNRRLHHLPFRALQFYTSYKASFEGIPTAWINPEYTSQRCPMCGHTERNEPEQEAVQVSVVFPSRPQRSWCKRQYCRKRREETQLECACSQQPSRCSEGATASIGAVDAPTVTHPTARAIRPMVGWGVRLTHGKPRGA

SEQ ID NO: 52430 - protein, 447 aa, unknown
  TnpB Polypeptide
MIREYRKQYSSVLHYAYNRRVEGMSEKDTEVLCQSLNNTPLIKSFHRRCAVKNASQLVKSQGDDKVRVIFGGKKNCVGRAKGLITKEEYRELRIGKLFFIGEANYHGNRTLRINEDIESFTFTPERGKSATLTIAGGYRRYKEMLRKLYKLQQSKAAPITYSLDGEYVYVTFDELLIEKPHSRRIVKNRVFAIDLNPNYVGWSVVDWLGSERFNMVASGIYSTKGINDADFALKEKKLPSTDPQRKYLTNKRNYETLEISKALVNKATHYHCELFAVEDLSMESNDKGKGKGTKCNKLVNNLWNRNKLVANLQKRCNCRGIKFYAVVANYSSFIGNVLYRPLGLPDMVLASIEIGRRGYEFHGQYVTKEKDIRKNIVIPEVSGFGDWYSKSLEEFGVSGEAMKPIELYNYLKETKCRYRLSLDLFTDRLKFSRCFSHKSKIIKININ

SEQ ID NO: 52431 - protein, 363 aa, unknown
  TnpB Polypeptide
MNKGVKFRIYPNKEQQNLINQTLGCCRLVYNMGLDMRNKAFENGEKINYSKTCAILTELKRSDEFSFLRDADSVALQQSLRDLDGGFVKFFQNRARHPRFKSKHSNHQSYRTINQRNNIRIVGKYIKLPKLGYVKIKQSMEVGHINNATIKKTPTGKYFVVLNVEFEPEVKQNNGGSIGIDVGIKEFYSDSNGNVVANPKFLEKSSKKLRREQRKLSKKQKGSNNRNKQRIRVARVHEKITNQRNDFLQKISTMLISENQVICIEDLKIKNMVRNHKLARCISSVSWGKFFNMLEYKADWYGNKLVKVPTTYPSSQTCSCCGYKNPLVKNLAVRKWECPNCHTKHDRDANASVNILNKGLSIA

SEQ ID NO: 52432 - protein, 374 aa, unknown
  TnpB Polypeptide
MTNKAIKYRIYPTTEQSIMFAKTFGCCRKIYNLMLTDKIAYYKATGKSIQTTPAQYKDKYPYLREVDSLALCNVQLNLQAAYNNFFDKKRKAWSGFPKFKSRKARNSYTTNNKNGTISIVDDKYIKIPKVGKVKAVIHRKANADWRLKSATISQERDGSYYISILYEFERVIAKVPKSKNAIGLDYKSNGLYMDSGGNVGTNHKYYRESQKKLAKEQRKLSRMKGSKKNEPKSNNYIKQLCKANRIHRHITNQRLDNLHKISTEIANQYDVVCVESLNMRSMANKGFGNGKATMDNGYGMFLNMLEYKLSNRGKTLVKVDKFYPSSQLCSCCGNRRKLELSERKYICACGLEIDRDLNAAINIKNEGLRLLKVA

SEQ ID NO: 52433 - protein, 301 aa, unknown
  TnpB Polypeptide
VRRYRNWGLSPTIKPVLKAQTIRFTRNASFAVTPGGKLRLPKIGDVPVRWSRPLSAVPSSVTVIRDAVGRYFASFVVQVGDDPLPEVAAEAGIDLGLAHFAVLSDGRKIGSPRFLRRAERKLRKAQKALSRRVKGSRNRDKARARVARIHAKVADSRRDWLHRESTRIIRENQAVYVEDLCVAGLARTRLAKSVHDAGWSAFTAMLEYKARRHGRESGRTGRFEPTSQVCSACGVKDGPKPLGVRVWACAACGTVHDRDVNAARNVLALGRRESQNARGGQVRPAPVLAPAGEAGSRRGAA

SEQ ID NO: 52434 - protein, 418 aa, unknown
  TnpB Polypeptide
MEQPMSTVRIYRLTHLTPTRFRRLKEAQMEAAQVWNTCCELHRAARKAHMRWPDERELRQATKRQFALHSQSVQMIVHAFLANVETTRQLRQKYQQMKMKYPWRTKRFYPVLWPAQAVCRERGRVVLPMGRGRPSLILPLDLPEESGACTLVWHNGFELHVCIKVPQAEEAPGENRATVDLGEIHLAAVTTNTGHALVVSGRGIRSLKRQRNIRHGKLTRKQARCKKYSRRWRKLQRARNRMRGRLERRIRDLRHKATRKVIDFCKAQEVGTLFIGNPHGVRQQNTGRHHNQRMAQWEYGKDIDYLTHKAKQAHIKSFTGSERGTSSQCPVCGHRHKPRGRQWNCKRCGFCGHRDLVGSVNMHPLAYGEKVTFPRIVTYLRPGSIRRCSRAGTPPCCLSESAAQPRSTATVSLETGHP

SEQ ID NO: 52435 - protein, 383 aa, Chloroflexi sp.
MRTFEYRLFVKKHQAHLLLQCLKETRVIYNEMLESVKAQYEEKGTFPSKYDLEMAFKGQGAPVPATTVQMLADRLSTSLKRFLAAKQHTIPGVGFPRFKQPNRWHSIQLRQYGKDVYLHEDKKHLIVPKKIGHCLKIKLHRPLEGTPKTVHLVLRADGHWYALIVCETPPPQEHLPAVCPHPDIGIDVGLKSFLTDSEGTTVANPRYYRSSQKTLRRKQRVLCRRKKGSHRRRKAAKNVATTHLKIARQRRDFHFKTAKQYATRYGRIAVEDLNIGGMLKNQHLAKSISDASWGAFLDILEAKAANAGHQVMRVNPRFTSQKCHQCGEIVQKSLSVRTHICPCCGYVADRDVNAAKNILSKARAWPSGTVSAGSPVELRSPQL

SEQ ID NO: 52436 - protein, 245 aa, unknown
  TnpB Polypeptide
MVKAIKVMLIPNNVQKTKMFQYAGASRFAYNWALAREIENYEKGGKFLSDAELRKEFTKLRHSDEYAWLLNISNNVTKQAIKDACTAYKNFFRGLQKFPRFKSKKRSMPKFYQDNVKIRFSNTHVKFEGFSSSRKANKQKMNWVRLAEHGRIPTNAKYMNPRISFDGLNWWISVCVEFPDCRETLNDDGVGIDLGVKDLAVCSDGTKYKNINKSQKVKKSEKQKRRLQRSISRSYEKNKKRGKLL

SEQ ID NO: 52437 - protein, 366 aa, unknown
  TnpB Polypeptide
MKPITTTLKTLKVRIRDKHAPVLRQWAFECNQVWNSANAYTAEYSNIPIPGVGWIRSTITAFDLAKQQAVYKKERGFTLHSQTVQEVTEAHAKARKQFKKDKLRWRISGGAKRSLGWIPFKSGAAVWKDGQVRYNKHFFKVWDSYGLSQYAFRSGSFSEDARGRWYFNIVVQVDVAPHESMSGIGIDLGLKTTATCSDGTVLERQQRYRNLEVKLGKAQRAKQKRRVKALHAKIKHQRKDDTHKFTTALVQQHGAIFVGNVNSAGLAKTTMAKSILDAGWFMLKTQLKYKAMARSVVFAEVNEAYSTQTCSCCGSLSANSPKGRAGLGIREWRCADCGTLHDRDVNAARNILAAGHSRLAGGIPFL

SEQ ID NO: 52438 - protein, 403 aa, Promicromonospora sp.
MVLGRMVCMPRHTSFRFLLDPSVEQERVLSRHVGAARFAFNQALRLHEDAYAAAGCKHTPGIGTGSSGEQPVDDGDPDVRVPWSGFDLINAFNAWKRSEAAGRRFLVDTAGRTRVQVTGLVWRDQVLAQVFEEAAVDLARGLKAAMDSLTGARKGPKARLPRFKKKSATGGSFRIRNKTNKGRSSIRVGDGERVRLRLRRLSKAVTRKKKGSKNRKKAVVRLSRQHARIRDRRRHMLHQVSNQLVKNHARLVLEDLNITGMRSNRKLSRAISDAAWGELARQATYKQAWRGGRVLLADRWFPSSKTCSTCGTLRKDLTLKDRVFECRSCGHVVDRDLNAAVNLAAWAENHTLTIPADTAAEGGGCGAARVGDRQAAGPVNNAYRQNAPTQHTPSGRVGRDWTT

SEQ ID NO: 52439 - protein, 530 aa, Promicromonospora sp.
MPRHTSFRFCLDLSVETERVLSQHVGAARFAFNQALRLHKDARTAARRRLGPDTTLVLAAGVVPDGDRPGDGHASGAVWMPWTGFDLINAFNRWKVSDAAGRRFLVDSTGTARAEVTGLAWRDQVLAQVFEEACVDLGRGLKASNDSRTGARKGPKVGFPHFRKKNPTGGSFRIRNTVRRGRSSVRIGDTSPGTGESTVRSVSLPKIGVLRVRECTRRLRRMIAKDRARILHVTLSRGASQWWISITVEAVDLHPALRHTPRPTNSFPQMTQGDARHRKQDWVGVDRGLHALAVAGSSDGVEVLRLNNPRALRRGLPRLRRLSKAVSRKRKGSRNRKKAVVRLRQQHARIRNRRRHVLHQVSNQLVKNHARLVLEDLNITGMTKNRKLSRAISDAAWGELARQIAYKQAWRDGQVMVADRWFPSSKTCSTCGAVRKDLTLKDRAFECGECGLVMDRDLNAAVNLAAWAENHNPPVDDGAGRCVARAGDRQAAGPVTNAHRQDTPTHPRPRGRGGKGLDDVGTNPQTAPAA

SEQ ID NO: 52440 - protein, 390 aa, Promicromonospora sp.
MCSHVWVIRGRIVYMASHTSFRCCLDPSVEQERVLSRHVGAARFGFNQALHLHKEARHAAHRRESPGLGVGSDGGHSEDDAVPGVARVPRTGFDLITAFNAWKRSEAAGRRFVVDANGSARVEVTGLVWRDQVVAQVFEEAAVDLGRALKAHHDSRTGARKGPTVGFPRFKKKTPTGGSFRIRNKATTGRRAGIRLGDGDRPRSVSLPKIGVLRVREDTRRLRRMVAKGRAQILFVTVSRGANQQEDAGRAAGWVGVDRGLHALAVAGTSDGVEDLRVSNQRALRRGLPQLRRLSKAVSRKKKESKNRRRAVVRLSRQHARIRDRRCHVLPVVNAHRQDTPIHDGPHGRGGKGLDDVGTSRPHTRSDWTPEKGGVSQGTQLLKHAVGCPP

SEQ ID NO: 52441 - protein, 392 aa, Vibrio sp.
MLIRKAYKFRLEPTAEQAARLTVLCGHARFVWNHGLRFCLDKLESGEKIPSAFELNKLLTQWKKQDGLLWLKEAYTDNLQQKLKDLQSAWMRCFDKSLAAEKPRFKKKGKNQDSIRFVNFNKYCELDGKRVKLPSKLGWLKFRKSREVKGTIKNCTVSFKSGHWYISFQVEQEIGEPKHKSSSAIGIDVGIAKFIALSDGSHLKPLNAFRKHEKRLAVEQRKLSRKVKFSANWQKQKAKIQKLHTLIANCRKDYLHKASSLISKNHAMIAIEDLRVSNMSKSAKGNIEEHGKNVKAKSGLNKSILDQGWYEFRRQLEYKQLWRGGLVVAVPAQYTSQTCPCCGHVSKDNRKTQAHFKCVECGYTNNADVVGALNILERGHRLLACGESALAA

SEQ ID NO: 52442 - protein, 422 aa, unknown
  TnpB Polypeptide
MLKTWKVSLKDLSAVEYKYLREICHLSKNVYNESVYNIRQHYFAEGTYLRYEANYYQMKDSENYILLGSNISQQSMRAADQSFKSFFGLLKKMKQGAYENWRVKLPGYLSKDGFFPVVFSHAGESDLKDGKFKVPVSHGLRKKYGNLKFFLSVPTYIIGKKIRQITIIPRGKGKYFEARYIFDDIDVEKYSLDPSKALSIDLGVNNFATCATSEGDSFIIDGRKIKSINQWYNKENARLSSIKDHQHMNKVWTHRQYLVTRKRNRRVQDFIYKSSKYIVEYCIKHDIGNIVVGYNDGFQNKVNMGRVNNQTFVMLPYGQFKNRLEYLCKEVGIKFTQQEESYTSKANFLGKDEIPTWNPLKPKQGNFTGKRVKRGLYKTDDGKTLNADVNGALNILRKSNVVSLSALYSRGVVLTPMRIKLS

SEQ ID NO: 52443 - protein, 241 aa, Staphylococcus sp.
MLLRKHYDKIKFVINHGSDEQLRDIGLDQKTITRLREDISYIQEVKLSTALKLYHFYFDYWAIIVGIDIGTSEFLSASDLSMKKIYTDQSKEVSRIITKYKNRLTDKNMDARKIERKFLKGLKKHINSVIKELLELYPHPRVFVIGKGSSINKEDSIYGKVFAMTHKCLYKAIEDYDEIVLIDEQFTSLICPRCNHKNKKNRTRNNHFHCQSCGYENPNDNVVASYNIAQRFWENNVTGKK

SEQ ID NO: 52444 - protein, 373 aa, Campylobacteraceae sp.
MSIRTYKYKLYKTKRVKHLHDVVNISGIIYNHCIALHKRYYKLYGKSLNKFQLQKHLTKLKKRDKYAFWNRVPSQAIQNITERIDNAYKKFFDYAKGRTKLRTSPPSFKAVKKYKSYTLKGKVGYKIDKNSISLNGYTYKFWLSRPIDGIIKTVIIKRDTIGDFYICITIDKKEDKGNTTTGKSAGIDFGMITFLTLDDQSEIESPLFHLNNLSLQKKLNRNLSKKKKGSNNRKKAKVLLAKLHIKTANQRRDYFHKLSNKLAKEYDTIFMEDLNMKAMQMMWGRKISDLAFSEFVNILEYKTHVVKIDRFFPSSKTCSHCGHVLEKLDTRTREWTCPSCNASHQRDVNAAINIKRVGTSTLSGETVRATKVA

SEQ ID NO: 52445 - protein, 308 aa, unknown
  TnpB Polypeptide
VDSCSLRNASNDLECAYDHFFKQGGFPKFKAKGVKDSYKTNNVVSTYKEKVYNSIELDLEKRLIKLPKLKWVKIKGYRNKESINGRIRSAVIRKDVERYYVSILVEEDVYKPMFTPQSIIGIDLGIKDLIVTSHNEKIKNIIKDRSKRLKGLQRALARCKRGSKNRYKIKLKIQRLWQKIRNARKHLIHDITNKLIKENDIIVCEDLDVKSMYKDHNIAKSLNSNPLGEIIRVLKYKAEWNNKKLIQIDRYYPSSQVCSVCEFQNKELKNLSIRKYECPMCHTKHDRDFNASVNIMFEGLKIYMQDLT

SEQ ID NO: 52446 - protein, 665 aa, unknown
  TnpB Polypeptide
MIKSVEALERKRKKDLLLWEKLLDLPDWKFKQCGRWLTKHLSYAIKHLPDKEGLIFTVFRNSVAMLYMIKKSKLFKNKILYMLGSRPKSKWTTFLDKLNTSIVLQPNFLVIELLQILLLDLISREKVYLPFWKPVCKDLSERLLLPTVTDSAGLDLISSSNWLPKQVEKLRSLTILTTKHLNKNLQKISYPLSMSSLVDKWASEAISPVKLKTLKIKIYPTLEQKKKLDEFIDTSRYVYNRTLEHINNGHKINFMDLRDLLVTDHTKKYYPEYKEYDESISQLKRLKVDASTETIKDINEQIKTINTQRRNAMKKFKYKKNEMIHSFEIKTPKNIRANAVKQCCDAHKSGFSNLKNGNIKHFHMNYKKKKDSIQTIELSPELISIKDNTIKICPGIFDNPILKIDKHNNKLKRKLKDLQIENNVDIQRKTSGSEVGYYIFICVKTNPVRTKNLVLNRVCGVDPGVRTLATVYSHSMSNHETNISEYKALNKKNVDLLAKYNKKIDSLKRNKSIPKLKKNKNRKNLSKPKRIRKKHINKLDKKKVDYTNRLHWEFINDIVSKNDIIYFGDIKSHGIVKNGYNHTLNRCFNDLKFHVLKQRLIYKASIQGKQVILVPEHYTTKTCSCCGLINETVGSKHVFNCSKCNLKTGRDMNASKNMMLKGLFL

SEQ ID NO: 52447 - protein, 286 aa, Aneurinibacillus sp.
LVKRGGQIFTKQCHPQRDTAFKNFFEGNARFPRFKSKRKSKQNYTTNMTNANIKVDFDRKVIQLPKVGEVSFRCGKKVKAIKGTIKSATIRRHSSGLFTVSIVTEEQIQREDVQIFDLSKVKTEDIMALDMGLTHFAITSTGQKIDNPRYYQENLVKVASLQRKRKDFLHKVSFELVDKNHVIVIEDLNVKGMIRNRKLAKSIQDVGWGMFKTLLSYKCERKGKRLVLIDRFFPSSTKQCHGCKEKNPLLSLSDRVWVCPSCGCEHDRDLNAAINILEEGMALLYA

SEQ ID NO: 52448 - protein, 447 aa, Lentzea sp.
MSTATVMQAYRFALDPSAAQARDLERHAGAARFAFNWALAQVKANIGQRTAERSYGVDGEDLTASLGWNLPALRRAWNAAKSEIAPWWSECSKEAFNTGLDGVARSLKNWADSKSGKRAGRKVGFPRFKARRRTTPSVRFTTGVIRVETDRKHVTLPRIGAIKTHESTRKLARRLETGTARVLSATVRRDAGRWYCAFTVEVARHVSAPARPDATVGVDLGIKALAVLSTGEPVPNPRHLNRALKALRTASRTLSRRVGPDRRTGQRPSARWETARREVTRIHTRVANLRKDAIHKLTTDLATTYGTVVVEDLNVSSMLKNHKLARHIADASFGEIRRQLDYKTGWNGGQLAVADRWFPSSKTCSGCGTVKPKLGLADRIFTCDACGLVIDRDLNAALNLKQYVDLEWPGDAKQGVEPTRRPSPAWQVAVKRQPRTISVGKTGTADR

SEQ ID NO: 52449 - protein, 392 aa, unknown
  TnpB Polypeptide
MLNRTFGCVRVVWNRTLAARRERYATEGASTSYAETDRALTAMKKDPGLAFLSEVSSVPLQQALRHQHTAFSAFFARHARYPRFKSRAGRQSAHYTRSAFAMRGGELRLAKTSTPLRFVWSWPDVDLTALNPAIVIVSREPDGRWYVTFTVDTTQPEPLPETGHAVGVDLGVKDFAVTSDGEKIANPRHLDRKARNLARYQRRLAHRRKGSANRAKAAAKVARAHRKVRSARRDFLHRASTRLVRENDIIVIEDLNVSGMVRNRRLARAISDCGWGEFRRQLEYKCERARHELVVIDRWYPSSKTCSACGHLLAGLSLSTRHWTCPSCRARHDRDINAAKNILAAGLAVARGSPGDACGADVRHPGSSRVQSALKQEPRPARAGIRVLQGGE

SEQ ID NO: 52450 - protein, 374 aa, Thioploca sp.
MFSNKGCTHDEITRTKSIKLYPTLKQRQIFKKWQDCSRYVFNQTIDYLRSCINFSPSWMDIKKDLLKQLPKWCGPVPFQIKAIAVREAHQAYWKAKGNPRFRSRKAPMQSCYIPKSAINKDEGIYPTISGQGLRYSEPLPETPLDSRLVYQYHEWFLSVPQKKITHVAENQGRVVALDPGVRTFQSFYSEHLAGQIGYDDFGRIQRFCYHLDNLISRTSKATGKAKREMKRAQAKIRKKIKNLIKEIHFKTARFLVDNFDVILLPTFETSQMIGKSARKLRSKTVRAMLTWAHYQFKVRLKNKALEFGKKVIDVCEAYTSKTVSWTGEIKNVGGSRVISSGGITLDRDLNGARGIFIRSLVDSPSLTGAIVNVC

SEQ ID NO: 52451 - protein, 372 aa, Lachnospiraceae sp.
MINRTIGVCRYIYNFYLAHNKEIYDREKKFVSAMDFSKWLNNEFIPNNPEYCWIKEVSSKSVKQSIMNAEKAFKRFFKHQSKFPRFKKKNKSDVKMYFIKTDLKSIIQCERHRIKIPTLGWVRIKEKGYIPITKSGILIKSGSVSYKSGRYYVSVLVEIPEEEKPKLNDFGLGIDLGIKEFAVLSNETVYKNINRTQRLKKLERQLKREQRCLSRKYEDLKKRSKKKGEAARQNIQKQVRKVQKLHQRIDNIRTDYINKCVSEIVKTKPSYVTIEDLNVSGMMKNRHLSKAVAGQKFYEFRIKLQSKCNEFGIELRIVDRFYPSSRLCHKCGRIKTDLKLSDREYICECGYHADRDYNASLNLRDAGAYKIA

SEQ ID NO: 52452 - protein, 556 aa, unknown
  TnpB Polypeptide
MTGSPGRVEGCSTVVQHCYVTLLPLVISTDPVLQYTHTILSALKRGGSPEVPGSAVSRTYPRRPYAAFSKDGEPLDLKGVLDGIRRDAELVAEYAMREMTEQNLALVTYFDRFKPAEAGRMMGLFLPSEVKKRFRSGSSRLERMFREQVVTNLRSWTARSEAVSGDYTGYISAGWKRTVNDSKPKTLRPWLALSATDKGYHKKIDVTSERIILEMVVQGQWVTLDFPTPPQLLEDGCEPGIPDIWVDKNNRVMFGFCGKTNPGRPEFSSRYVVGVDVGVTNPAAYVVWDTKKKKIVEQSLLGQRAHSLSNKIKRTQTQVSSLKRQGKDEEAASHREHLSNRRKELSILIAQEVADAAWRYNNALVVFENLSHIKNTMKFGRWFRGEVHRRTRDMVEADGGRVLKVNAAFTSKRCHVCQSGLNMSDYSQPRCTTCGITHHRDLNAAANIAQRANHVKACQTRKRHATKTKRVRRSKCHVRPLKHPGTKNRPTPKAPQNRPKNRTVATPFREVSKRMCPADNRVSAVDHTEWFQTTSGTTVPKENQATNMVDVVYPKE

SEQ ID NO: 52453 - protein, 367 aa, unknown
  TnpB Polypeptide
VICTLKVKLLPSPEQHAQLLATMHRFNEACNFASKVAWENKAFGQVRLHKLCYYAIRANFGLSAQFAVRAIGKVVESYKVNKRSQHTFKPTGAVVYDDRLLSFNGLDEASLLTIDGRIKVPMILGNYQRGVVSGRRVRGQADLVLVDGTFYLLLAVELPDGSPIDTTDFLGVDLGIVNLATDSDGETYSGRQVNGLRKRHAKLRARLQKKGTKSAKRLLKKRRHKESRFAANVNHVISKRLVAKAKGTGRGIALEDLKGIRDRITVRKAQRRTHHCWSFHQLRQFIEYKARLTGVPVVLVDPQNTSRTCPECGTIDKANRPTRDHFCCVSCGFAGPADTIAAVNISRRAAVNQPYAVAHSLTASPWL

SEQ ID NO: 52454 - protein, 367 aa, unknown; identical to SEQ ID NO: 52453
  TnpB Polypeptide

SEQ ID NO: 52455 - protein, 398 aa, unknown
  TnpB Polypeptide
MQLRDNYRLYPAPGQRQALARAFGCARVVFNDGLRARQDAHAAGLPYLTDGELSSRLTTAKATPERAWLGEVSAVILQQALADLNAAYRNFFASLHGERNGPGIAPPRFRSRKDRRQAVRFTANARFKILPDGKLRLPKVGDVQVRWSRELPSEPSSVTVIVDAAGRYFASFVVNTEPGPLPETGSAVGIDLGLTHFAVLSDGRKVANPRFLRRAERRLRKAQKALSRKARGSSNRDKARVRVARVHGRVADTRRDWLHKESTRVIRENQAVYAEDLCVSGLGRTRLAKSVHDAGWSAFTGMLEYKARLYGRTFRRIGRFEPTSQVCSACGVKDGPKPLSVRAWTCAACGTMHDRDVNAARNILAAGRADSLNACGGDVRPGRALAVASEAGSRRGAA

SEQ ID NO: 52456 - protein, 448 aa, Moorea sp.
MCPVYGKMANAREVIKVYGCQQVLLSPDLDLSAILNFLCIQSHRLTNMGIYFARQIYFKANRYISKFELEKEYKQNRHYQALHSQAAQQILRSVYESFKSYKELIKAYQKGKIEHRPRLPKYRKKGGLALVSYPKQALRLIDGNIRIPLGRQVKCWFGIDSFRLPIPSTIEFDDIRELRILPRNRCFYVEFVYKKEIEKPSGEPDNVLGIDPGLDNWLTCVSNVGTSFIIDGKHIKSMNRWYNKQISTIKQGKAQGFWSNKLATITEKRNRQMRDGINKAARLVINHCLENQIGRVVVGWNKGNKNLIELGKKTNSEFVPIPTARLKERIAGLCEQYGIEFIETEESYTSKASFLDGDYLPKYGEKPKDWKPSGRRTKRGLYRTAMNWYVNADCNGAANIIRKVTRTLGMSLDGLARGVLTSTGFFCGQLIRKQRGVTWINPVTKHPY

SEQ ID NO: 52457 - protein, 392 aa, Flavonifractor sp.
MVGRSQSSHVQAGKTSLYTTIKARLYPTAEQAELFEKTFGCCRFIWNRMLSDQQKFYDETGAHFIPTPAKYKDGAPFLKEVDNQALIQTHNQLSQAFRIFFKNPEHFGHPRFKRKKDGRDAFTACNHVFSSGPTIYLTRDGIRMTKAGVVKAKFPRRPRNGWKLKRITVSKTRTGTYNCSIVFEYPAPAPQPIPPTPERTIGLKYSVSHFYVADNGAMADPPHWLKLTQEKLARLQQRMARMTPGSRNYEEAVQKYRLLHEHIANQRRDYIHKESRRIANAWDAVCVRADDLADGNRAMKLSNGLELGFGMFRACLDYKLSRQGKSLLMVERCAPTSRQCHSCGYLLPEGVDYRREQWRCPACGAALQREINAAQNIKTAGLRQVLTTQKSA

SEQ ID NO: 52458 - protein, 408 aa, Cyanobacteria sp.
MRTAYQYRLQPTKQQNVELDRWLAMLCSQYNYLLADRFNWYEQNRSPINACPLVCHLPERRDNPDYYSQKKTLPQLKKTHPWYGEIYSQVLQDVVKQVKVTFERFLKGDSNGKRSGKPRFKPRNRYRTFTYPQMKDGCLQGNLINLPMFGKVKVVLHRPIPDGFKIKTASVTKKADGYYLTLSLEDKTVPEIKPDFNPNSITGIDVGLKEFLTTSEGETVAIPQHYRKAQKRLRVIQKRVSRRKKGSNSRLEAIKQLGLQHKKVADKRKDFHFKTANWLLSKHDVVAHEDLNVKGLARTRLAKSVLDAGWSSFLSILTNKAVNAGLLVIPVSAHNTSQDCSNCGEKVPKKLHQRWHSCSCGCELDRDHNAAINIKNRAVGQPVLKAQSMSYVITGVAEKPTPYCTQLV

SEQ ID NO: 52459 - protein, 246 aa, Moorea sp.
MIILEFKAKGKKHQYSAIDEAIRTVQFIRNSCIRYWMDNKGVNKFDLNKYSAVLAKRFPFANELNSTARQSSAERAWSSILRFFDNCKKKVPGKKGFPKFHKNCRTVEYKQSGWKLSPDKKSITFSDKKGIGKLKLKGKWDFWRETAKQIKRVRIVRRADGYYIQFCVSVDIKEQLEPADATIGLDVGLKDFYTDSRGNTEPNPRFYRTVEKRLKFRQRRVSRKVRLVLSRSLLKQEGYALGGSRG

SEQ ID NO: 52460 - protein, 423 aa, Microcystis sp.
MKLVERHIITKSPPCWSEIDHYAFLSKNLFNLANYHYRQYFFENSQKLSFNQLYHLVSKTSDYLALPTKPKHADNQKIGAAWVSYFAAFKAWKKQPEKFLGKPKIIKYKDKTKGRNLLIYSQESIYKKPLKEDPPNPPDVGGARGGCHLSMSDLKIPTSKREIIAVRIVPKSSCYVIEIVCERRSETTDKQQIAGVDLGVNNLMAVTTNKTGVAPLLINGRPLKAINTFYNKQRSKQQAQLKTRNNQSLSKGLILLTHKRNCRGENYLHTASKRVIDWCIFHQIGTLIIGHNERMKQSLNLGKRNNQQFVNIPHYRLIEMLTYKAQLKGIKVIITEESSTSQSSALDRDELTKYGEEKPLFKGKRLARGLDKMETNQLLNADVNGAFNIIRKVIPDVIDQGIKGLPFNPVVLDPLRMTKLSGF

SEQ ID NO: 52461 - protein, 446 aa, unknown
  TnpB Polypeptide
LKSFKTFSTILEDDNAKEIIEYFEETAGNYGFLKRCTLHILRNSSEISRNDLNKLLQERFSVTSRTASSAIYEVEKIISSALALIPLNIEKLETRIDGKTKLIEKKKKEIAKIHASRKTNTKRLGKLKMHIYNIHNSINRIRQKIENLERQLNEKKPNICMGTKKLARNDMKSFKQHRDSQINYIGKACEKQGNTNFQFQYVKKGNFFSMKVRRDFGKWKDDRSPERFAYGKCHFKYGSRQLRDAMRDNASPVTVSVIRRDDKYYLFVTVAISYENSAIVTRKEHGVIGIDFNKGFINICETDEKGNIVNIKKMKYPFGKAGITDAGLADVISMVCNKATDTGKSIVVEDLSFERKKRKAKKALTPTEKERMRMLHSLPYSRYAKILENLTFNRRIELIKVNPAYTSRTAEQKFCNQMKLNIHNGAAYVIARKGMGIKDNFLKKTG

SEQ ID NO: 52462 - protein, 343 aa, unknown
  TnpB Polypeptide
MVLTYQYKIRRGMRFLNVTARKVNLIFNYCNETSINAIKRNGKFLSGYDLQALTSGTSKILKINSQTVQIVCAEYATRRKQFKKRKLNWRKSSGSKRSLGWVPFKAAGVRVECDTVTFMGEKIRFFKSRELGGKILTGSFSQDAVGDWYVNFQCEVQLLKAAPERVVGVDLGQKSLATTSDGEVFKNPKAFYDAQDALAKAQRHGKKKRAKKIHRKISRIRKDNLHKVSATLTSNYAKLILGNLRLASGKAVLDASFGTLKTFCEYKAIRRRGMCVLVNEAHTTVTCNNCLERSGPSGLSGLSVREWACASCGQTHDRDVNAAINILRIGLDTPKTFNEPLAS

SEQ ID NO: 52463 - protein, 355 aa, Crenarchaeota sp.
MVNESLRIGMANDASSLRRLSLLSYNQLAQYDSPSYYKLCAISRAAGILAARKKSTRRGYATRTPYAVRPVLVSCYGFKIRNGRLEIPVSRGKRLSLLLTNHTLEVITQLGVKVRSFTLTRTRLSLCIARDPPMIECASTVGVDRNLRNLTIGNDDQTSCYDLSKIVRIASTTTSIVASFRRDDDRVKTRIASKYGRRRTARKGHLLHNATKTIVALAVRRRTAIVLENIEGLRSLYRRGNGQGRKYRGRMNGWGFGEAQRQIEYKARWVGLPVIRLSRRETRGSSVTCPRCGERLQSDKRLERKLWCRGRVRFARSQPPIDEAQGGAGEAMKGNPTPTVIPGVDAPKLTQPTKS

SEQ ID NO: 52464 - protein, 265 aa, unknown
  TnpB Polypeptide
MKIISSYGVELRKQNIPIRQTLEIYRSAVRYLVEVYESVWEELAQIEESKKRFNAAEHLVHTTKRNPARFDFDFCFPKMPSYFRRAAVQHALGSVSSYRTRLEQWKAEGQKTGKPYLKSEQYAMPVFYHDVMYRENTEEKDAAFLKLYDGHDWKWFAVRLKHTDMEYLRKHWSGKKASAPMLEKKHDKYFLRFTYAEEVALNRTPVKEQTICSVDLGINTDAVCTIMRPDGTILGRKFINFPSDKDRMYRVHVRPIHLPSKIYAR

SEQ ID NO: 52465 - protein, 415 aa, unknown
  TnpB Polypeptide
LFLTYQYGLRPARAQHRALEAILEGQRLLYNAALQERRDAWRLAGRSVTRIDQSKSLTQIRADDPEGYGALPVNLSRWSLKKLDESFQAFFKRIKKKNGKAGFPRFKSKARWRSFGFAEFSGIRLVDGKLMFNGLPGGLRVHMHRPLPAGASIKSCVFTKDGGRWKVSFQVDAPDVHTVRREAGDLVGIDWGVETLAVLSTEEAIENPRFGKEAAPEVRRASRKLARAKRGSKRRQKTRAQLARVRRKVANRRKTYLHRTTASLARRFGCLAVEDLKVKNMTASAKGTAENPGTNVRQKAGLNREILDTSPGMFFAMLRYKAERAGGNFVAVDAKETSQECSGCGGLVRKDLDVRIHRCAHCNLRIHRDENAARNVLRRAVAGPWSGFAHDNVPAWAQARARGRRSGNLGPKIAA

SEQ ID NO: 52466 - protein, 539 aa, unknown
  TnpB Polypeptide
MRCWAIRRMRSACVRRSRPLRKRALRRWRSKRRLRRRGLGGTRRPRTFSTFRACRNAWWCGTEAVVAWISPKEKWSRPAWIGSSWSLWLPIPAARRPALCWWSTGGCGNWESGITRISWQVMMSQGTTYRNITYRLLPVTRAKAQQLSSLAGACRYVWNQILADQEDLYRIARMCGAKPPSVSFFTLGKAFTDLRRVTPWLQALPFKPVRHTLKYQADAWQRYFRGQGSRPRFKGRHGDDSFTIPENVTLSGDRLHVPRIGWVVLRRRGGNPYPAGVPRQAVVKRQIGKWTCTVSYEIEAPRVDDDGLAVGVDMNVGQIAVSTGEILCGPDLTRLEARRRRYQRMVTRRRKGSNRRERAKRMLARTSRRIAQCRTNWHHQASRVLANSAHTVCVEDLKVGNMTKSARGTAEDPGKNVRQKSGLNRAILGTGWQGLRRMLAYKAGELVAVDPAHTSQTCHRCGTIDARSRRSQSEFQCVRCGHAGNADVNAALNVLALGTGATGRRGALTLVTPMNRQQITNGWRPKLPTVRYRFQLGVR

SEQ ID NO: 52467 - protein, 412 aa, unknown
  TnpB Polypeptide
MRSQKIRLKLTKEQERLAWWYSKVSRNFWNLLVDINKRNNKGEFDEILNKNGNKTYHSNFYDREIYTLSQSDYTSLAKLVVAKSYEEDNDKWSWYYQPNQSFIYSFLARELVKIRRRNKGRLNFRSVDKIRPNFNVRCDMSADKKRPSRIYVKDNGKLQIPTLGDIKFGSVKQDFDLSCKKQVANISFDGKYWYLSYTEDIETQLSDLPDYTDGIGIDLGIKTLATVSNGTNVPNIKTFRRVRILNKRLKRLQRKLSRKYLINKCNKHNKTKNIIKLERQIKLIHRSIKNIRINHIRKFVSVLVKKQPQYIAIEDLNVKGMMKNKHLAKDIVNCSFYAIREHLIRKATERHIAVRLVDRFYPSSKTCSNCGDYKKDLKLGQRVYSCNHCQGKIDRDLNAALNIVRTDKYILA

SEQ ID NO: 52468 - protein, 489 aa, unknown
  TnpB Polypeptide
MAQLVAEIQGISSYATYVTRNDTQLEGGLAMAGAVQPATAGRRAGVTMPEFLVTGKSGRSRKEALVRYNVVTAFRSWQERINAVNGESSKYVSQGWKRTMNATPPSYGEDYINLGAVDKQYAVIENNPFTDGEITLKMVIQGQWYRLIFRFDNTRFTEGKVTLPLVKIEDGKPVFIFSVVTDNPVVQFSGDYTIGVDVGINDYATVVVRNAKTGKITYQTTLSQRVHSLWNSVRASEKQVRQLREKAGSLSLYDRQGRMAALDEAQLHRKAASRKKRELAILAAQEVAHLSHCYGNAVVAVEDLSWISNTMQNGRWNRGAFIQWLAHYVSQNGGWVVAVNSANTSQLCHACGSEVTHPKHKVSECAQCGVFDRDVNAAANIAARAVPKVEKARKTKAKKQKLQKQAPLKTPIARASLKYPGRDRTKSVSTPKRKKGVNTFSSPARAQANRLEATVLADCNTCSVNVTGTSQAAIKQDYVTRECRLYNPI

SEQ ID NO: 52469 - protein, 471 aa, unknown
  TnpB Polypeptide
LKRKNIYKNIITWKIKYSCSDEDLSIILDYIKAYNPVLRYTYNRYVENSKIDTKELYELQKTINKSGLIKSYLMNCCIYDSKSLYGENGDKVIFGGRANFINRCQHKIDKETFQFNRLVPLYCVGESSKYGNRFFTIVDKNTIMFKPSSKTHINLTLSGLGRKRTKDIEQLIKLQNSKAIPITYKLSTEYIYVSFDYSKIKEYKYTTISNRVMGIDLNPNYLGWVVIDWLGENKYNIIKAGSFSLKPLNDYQKKCHKSSDDKVTTYINNKRKHEICEISKQLFTICKHFKCETFSIEDLDMLTATKDKKTRSYRRLVNNQWCRKLFFNQIKKHINASSTLFLPIKPNYSSFVGNLLYRNTRLPDECLASIEISRRGFEFANQYIYKRQSQKKNIIFPSLELEDNKHQLALSLEELDVGVSNFEDNWAKLFSEIKKSKVKYRFSLEDAVKYYSSTLFSKNYKNRYIILNVFI

SEQ ID NO: 52470 - protein, 420 aa, unknown
  TnpB Polypeptide
MSKTLKGIKVKLIPNNKQKALFIQAVGTRRFAYNWVLDKQMKAFINKEKFKSANELCRELVQLKNTDEYSWLKDISCDIPKQAIKDCCEAYERFFKEQKKPNYIKFTKKTIKRCQLQHRVPTFYDMNGHPKFKKKGKCLDSFHNDCMHVQFTSDKVFIAKIGWVKLAQSNKFPLGKSGKDFKICNAKVSTDGEDWYFSGSFEVASVNKLTANKPKTDYGIGIDLGIKDLAICSDNFTYKNINKSKRVKQLEKRKRRIQRRISKKYSLNQQGNKYIKTNNILKYEYLLLKINHKLTNIRHNYTHQVTSSIIKRNPIFICIEDLNISGMMKNKHLSKVIQDQNLYEFRRQITYKCDWNNIDLVIADRYYPSSKTCIKCGYINKDLKLKHRTYKCLICGNVIDRDYQASLNLKQYGERYLNLI

SEQ ID NO: 52471 - protein, 408 aa, unknown
  TnpB Polypeptide
MNNESRVEKHIVKSSNQYFPILMNFCAFSKNLYNHANYIVRQEFIDNGNWIRYAELDKILKDDKDYPDYALMPTAQTAQQTLRLLDKNWKSFFKSIKDWSKNKSKYLGKPKMPKYLKKDGFYQLILTNQNCKLKNDIIVFPKAFKGFSIKPKFTSRNDFVSFQQVKFIPHKNKIVVEIVYNICVANQKENNERYIGIDIGVDNLATVCNNIKEPAIIINGKPLKSINQYYNKKISHYREVCKRMNGKDYSQKMDKLTEKRNQKIDDYMHKASKAIIDYCERFDISTIVIGKNSEWKQNSKLSKKANQHFVQIPFARFIQMIQYKATEKGIVVILTEESYTSGTSFIDDEEPVKTNYNKARRVHRGMFVANDNTEINADLNGAYQILKKVFPIKWDRGCALHPFVVNIA

SEQ ID NO: 52472 - protein, 413 aa, unknown
  TnpB Polypeptide
MIEPRVERHIIDRQHKYYKMLKEKCHLAKNVYNHGNYIIRQEFTKNGKWLRYEDVEKIVKSDLDYPDYWNLGLANSSQQILRTLDKNWKSFFKALKRWHIDKTAFCRKPKIPKYKKKDGLCTFALTTNQAKLKSDNLIHFPKTMNGFTIKPNFINKPYKSFQQVRIKPENDNIIVELVYTINVQPLIITDKNNYLGIDLGIDNFVTMVNNVGCPAIIINGKGLKSVNKYYNKLVVKEKSKLDKSKNSKVLYSHKLYSITHKRNNKINYFMHKASRYVVNYCLEHYINNIVIGHNKDWKRNSNLGKVNNQTFVQIPHKRFIDMLDYKCRENNIKLHIVEEPYTSGTSFLDNEKPIESNYNKERRISRGLFKTNTGKYINADVNAAYQIIKNVFCNVEIPADIGLVMNPVRINLC

SEQ ID NO: 52473 - protein, 413 aa, unknown
  TnpB Polypeptide
VKSVQLVEQHIYKKADKEYEELDKLCFLSKNLYNATLYEVRQYYFKNKKYLNYKEVNKLFQQSHNVDYFALPSKVSQHVQKLVHNNFVSFFKHLKVKKPNEVVNIPRYLHKTKGRQVLFYTNQAFSKPNSRNGLEPNTIRLSKTNVIIKPNINVNDVKFVRVVPNTTRKTITVEVGYEAKCKPIINTNNIASIDLGVSNLATLTFTNNKPIIINGRPIKSINRYYNKEIGKLQAIAKTVNNSEYRTNRMTKITLKRNNRIKTYLHKATRCIVNQLVENQISTLIVGYNKGWKQDINMSKKNNQKFVQISFLKFINLLTYKCRLAGITVVTNEESYTSKCSFLDREPIQKHSAYLGRRVKRGLFKTSNRTYINADVNGSYNIMKKYLITQEAWNENIFSDCVEACSTPVVFTIK

SEQ ID NO: 52474 - protein, 524 aa, unknown
  TnpB Polypeptide
MGRDTKPSFITELPLEVTPKQESSILVRLEFARQLYNACLGEGLRRLALMHQSKAYQSAQYIPKDEKHKKERQVAFGEARKTHGFREYDLHAYAATIQIGWIGSSVVQKVATRAFDAVSMYAFGKRGLPRFKGRGQFDSVEGKQNTVLSWNGKEVVWGGLVMPAIFLDPKRKGNDVINHGLAAPLKYVRLVRRKLNGKNRFYVQLVCEGRPFQKEKNTVGEGLVGLDIGPSTIAIAAPNAKKGELRQFCNELEHDQKGIRRLQRKLDRQRRGGNPQNYEPDGTVKKGKKEWHASKGYKKTREKIAEKHRKQAEHRESLHGQLVNHVFSLGNEIKLEKLSYRAFQRMFGKSIGMRAPGMFVSLLKRKAVSAGVSVTEFPTHSTKLSQVCQCGQVKKKLLSERWHVCGCGVVAQRDLFSAFLASCVEDGRLNADLARNFWQSGMDTCLTAALSEIQPASDGLLPATFGLGRSQSGSPEKSWEKVGDSRGVVASEPASRQRREPNKAYPIPRTSPPLGVGSGQCDPF

SEQ ID NO: 52475 - protein, 335 aa, unknown
  TnpB Polypeptide
MNEYSRVVNIFIDMFWENDFVAGQLTKDLYAIPASGLSARMRQCAAREALGMVNGAKEAKSTKPRHTGKKCIWSSQVVGLESGRNHFDLWLKIHSTGTGDSFYIPLKQHFHFNQYADWNWATSIIVHREYIQISFEKEVGQKSTSPYALGIDVGINSLLTASNKSWFGDQIKALINKIKRKKQHSKAYKRAKKELSYYLHRIVKIFFNQLPKEVGLIVVERLKSLKKGKGKRSKGFRKTLSHWNYRELLKVIQMRAEENRVRFRTVNPAKTSQTCPVPTCSHTQRENRVGKVFQCLRCGYSDDADYVGSLNILTRFLTGQYGAGFKAFHEFLSGK

SEQ ID NO: 52476 - protein, 311 aa, Proteiniclasticum sp.
MNAGRGYLLMCKIFMHCKRLKEHYNLIEVQSIVSRCIINIDMDGVNFLDTVNLEGFQMVCNKILEKVGWVSIKKNQIPLEKKYSSPRVSYDGKYCYVAVGVEMEKPELELTGESLGIDVGIKDLAVCSNGQVYKNINKSKVMRKKEKKLRRLQRQVSRKYEMNKSGEKFVKTSNIVKLEKQIKLLHREISNIRNNYLHQTTSEIVKIKPSRVVMETLTIRGMMSNRHLAKAIGNQCLYEFRRQMKYKCEFNGIEFVEVDTWYPSSKTCSECGHVKTRLSLSERTYICEECDCVIHRDYNASINLSRYGLAA

SEQ ID NO: 52477 - protein, 382 aa, unknown
  TnpB Polypeptide
MMNLAFKFRLYPNKKQREYFKDNFDACRFMWNKLLEDTMHEYQETGKYHINLPAMYKSEYPWLKKADSIALSTVQRNLHDTYQCFFSNVKNHKKKCGHPKFKKKNQCKKSYTTKNQHGTIAVYDDAIKLPKIGKVKAVIHRDIPDDYKLKRAIVSQNSDGTYYCSLVYEFDKDIKTNVDMNKSIGLDYSSHDFYVASDNTRKECHRYYRNSQKKLRRAQKCLARKQGFWKGEVQSANYKKQLMRLNKIYAKISHQRNDALQKLSTEIANRYDIVCVETLDLTGIVNRKRHLGKATLDNGWGKFLLMLEYKQEFRGHLLIKINKWFPSSQLCHCCHAKNPLVKNLSIRTWTCPNCSAVHDRDVNAAINILDEGLRLVNAGLLA

SEQ ID NO: 52478 - protein, 395 aa, unknown
  TnpB Polypeptide
MLKAYRYRMYPNQEQRILIAKHIGSCRFVYNNSLQQKIKQYQKDGTALSCYELNNRLPALKDQYPWLKEVNSQSLQWANKNLDTAFVRFFREKTGFPTFKSKKHKVQSFQVPQHYKIGDNRVKLPKIGWVKTKVHRAISSTLKVATVTVTPTGKYFISISFDDGNKQPEKVPYDESTTVGIDVGLMHYAVLSDSTKVENPRNLRQSLASLQYHQRRLSRKVKGSNNWKKCKQRVARLHEKVANRRRDFQHKLSSQIVRENQAVAVESLNVAGMVRNHNLALSVADAAWSIFLAMIQYKCDWYGKSYIKIGRFDPSSKICSVCGHYHDMDLSVREWTCPACGTAHDRDINAAVNIKKFALHKQNLIGTGLERPGEPADSGTIVPGMMQEAPTARWG

SEQ ID NO: 52479 - protein, 201 aa, unknown
  TnpB Polypeptide
VEPLAQGISLDTVRLRREQRHLDRQHRAGSPGCFNSDGTHMPGRCDWRRSNSVKRTRTRVAELHRRLAGHRKTLHGALANQLFSHGADIACEKLDYVAWQKNFPRSVRDRDLFSAYLGLHVRTGSDGSDRLDLQAARQGWLHRQDVDGRRGLAVAALSNRRGRRHPPTRRSVARINARRAAKRQSRLTRTFTTNRPTAITA

SEQ ID NO: 52480 - protein, 377 aa, Burkholderia sp.
VDIKRTYRFRFYPTSEQAAILARTFGCVRFVYNHMLRMRAESWHQREERVGYHETSAALTELKRTPEHVWLNEVSSVPLQQALRHLQTAFANFFAKRAKYPNFRRKDSAQSAEYTASAFRWDGSALRLAKMDAPLMIRWSRTIPKGSRVTTVTVSKDAAGRYHVSMLCDDAVSVKPKSTGKIGIDFGVTDFVVLSTGEKIAAPNVFRKNEAKLAKLQRRLAKKQKGSANRRKARLKVARMHVRIADCRRDFVHKLSTRLINENQVITVESLAIKHMLKNRRFAKSISDARWSEFVRQLTYKAAWYGRTLISIDRWYPSSKRCSGCGHTVASLPLKERAWVCPECETYHDRDINAARNVLAAGLAVSAHGESVNPMSL

SEQ ID NO: 52481 - protein, 400 aa, Streptomyces sp.
MDDQAHAARTLWNLLHDWWTMLPKERRSLAAADAAIRQARKEIDWLGALPAQAAQAVLKSYFQAWKNCWDGRADEPNFKARFRAVMSVDIPQGRDLNIVRVHRRWGMVNIPKVGRVRFRWTKDLPVGKRAGTVDRITGARLVKDALGWHIAFRVQTLEAAPEPHQGPEVGIDVGVSVPLALSDGDTKPHGEWLTEKEKAKLLRLEQQAAHRKTFRGRGEKTSRRLKRIYDQIQAFRATAKRRHLDWQHQTTTAIAAKYGVIVVENLTITNMTKSAKGTVENPGKNVRQKAGLNRSISQEAWGRTVELLTYKAARNGGTLHKVPAPGTSQRCSICGFTTPGSRESQALFVCKNPDCGWIGNADHNAARNIVHLYRIGLALVPAAGRAVVRRTRGVKPATAR

SEQ ID NO: 52482 - protein, 523 aa, Streptomyces sp.
VRDRLKHLTVEDERVLRLVGAHLGVLASRDLKARCADGLEHSADTWAARKRELTPLSSSRWAGSVTKASHDQWALSRRCLVAHIHSLEAGIRAVRHRLSRPVGERGSRHAPGGYRSVREWHAKSRRLAVLEDRHAAAVEDWQAGRVHAVRGGKRLASARHHLAEAGLTEAQWRQRWEAERWFLAADGESGKRYGNETIRVTPDGEISIKLPAPLAELANSGHGRYVLASRVTFPHRGPEWADRVEANRAVAYRIHLDVARGRWYLTACWQYAAAPAIPLEEALAHGVIGVDTNADHLAAWRLDRHGNPIGSPRRFFYDLTGNAAHRDAQVRHALTRLLNWARTCGVQAVAMEDLDFTAEKTREKHGRKKRFRQLISGLPTGKLRARLASMADATGIAVIAVDPAYTSAWGAQHWRRPTTSSTRKTSRHDAASIAIGRRAQGHPIRRRTAPPHDDQSDRRGHRTGQARPGTPGREEPRPRIPGPRTRCVGPGCGAHAGNQYAQNRSGRAAEQQSWQQDSLPLSL

SEQ ID NO: 52483 - protein, 537 aa, Streptomyces sp.
VAEPFVAASLTGVAARTRLKHLPPGDEKVLRLVGAYLGSLAAKDLAARCRNGLEHSADTWAARKRELTPLSSSRWAGSITKASHDQWALARRGQLAHIQNLEAGIKTVAHRLSLPVGQKGSKKVPGGYRSRREWHAKARRLHVLEDRLEQKQADREAGRVRVVRGGKRLARTRHHLDAAQLTEAQWRELWEAERWFLSADGESGKRYGNETIRVSPEGEVSIKLPAPLAHLANAGHGRYVLACRLTFPHRGAEWADRVEANRAIAYRIHLDAGRDRWYLTASWQIPPTPTIPLHAALSDGVIGVDTNADHLAAWRLDVHGNPIGAPRRFFYDLSGSAEHRDAQVRHALTRLLHWGRTCGVKAIAIEDLDFGAEKTREKHGRRKRFRQVISGMPTGRLRTRLTSMADATGIVIIAVDPAYTSRWGAQHWQKPLTSNHRKTTRHDAAAVAIGRRAQGHPIRRRTAPPPHDQSDRAGHRTAQARPEVSGREGTRPRIPGPRTRSVPPGCGANAGYQNAQYRSGRSAEHGSWQQDSLPLSL

SEQ ID NO: 52484 - protein, 522 aa, Streptomyces sp.
LKGLSDADTRVLAEVGRHLGALAGRDLKARCAAGLGHDAAGWAVRKRELSGLSSSRWAGAVTKASHDQWALARRGLAAHIRDLEAGIAAMEHRLALPLGQKGTRKQPGGYRSRREWHAKSRRLKVLQERLAAARADWAAGRVRIVRGGRKLANTRHHLQAAGLDEARWRGRWEAARMFLSADGESGKRFGNETIRLTPDGELSIRLPAPLAHLANAPHGRYRLTARGVFAHRRHEWAGRIAANRAVAYRIHHDPVRDRWYVTASWQRAQPATPEVSLEALLAAGITVVGVDTNDDHYAAWHLDEHGNPVGEPQRFFYELSGSAAHRDAQVRHATSRLLHFAGRCGARAIAIEDLDFHTSTSREQHGRKKRFRRLISRFPTARLAARLVSMAAAQDLTIIAVDPAYTSRWGAQHWQRPMCSPTRKTTRHDAASIVIGRRAQGFGARRRTAPPPCEQSHRVGHRTAQAAPRTPGREGNRPPRNGPPPGVVSPPGMRTRQPSPPNTVRGRRSEQEWIHDSLPLTT

SEQ ID NO: 52485 - protein, 276 aa, Streptomyces sp.
VIVKLVVQVKLEPTPQQAAALEATLHACNEAATWVSEIAFERGEFKNFALRKHTYDAVKSRWNLGAQAAQHSIKKVCDAYTTLKANLKAGNLGRPGSRRYRKASEKPIAFRPRGAQPYDDRMLSWQIPDRTVSIWTVAGRVKNVAFTASPEQLATLALYRKGESDLLERDGMWFLNATCEVPEAPLHTDPVDFLGIDLGIVNIATTSDGEIMAGRELNRTRLRERGLRTKLQRKNTPSAKRRLKKRRRREARRARDINHKIAKHVVAEAGGTSHAL

SEQ ID NO: 52486 - protein, 512 aa, Streptomyces sp.
VSGAEPAGSGKKKCRGFEARPGFHVVGHRLALDPNASALQALASHCGAARVAYNWAVRHVPANWSQRAAEETYGVPEAERVAWRSWSLPSLWKAFNEAEHNDPCLREWWAQNSKEAYNTSLANGAAAFDSYAKSRRGERKGTPMGRPRFKSKRKARPACKFTTGTIRLDDRRHIVLPRLGRIRLHEDVQPLVDAIAEGGTRILSVTVRFERGRWFAVLQTEERPTIAPATRPYRAVGIDLGVKTLLVLADSAGEVREVANPKHYDQTLTQLRKASRTVSRRRGPNRRTGQAPSRRWEKANAVRNRVHHRVANLRENHLHQATARIPAEYGTVVVEDLNVKGMVRNRRLSRRISDAVFGELRRRLTYKTQRHGGCLIVADRWMPSSKTCSRCGVVKAKLSLGVRVFECDACGLVLDRDANAGHNLAALAAANGKTGTGVAGEPGPTLVVVPKPRGAKQKTRTARTCKGTGTRAAGAAPRQGTELDRTPGASNSRSGDTVTNLPGGNTRNAESR

SEQ ID NO: 52487 - protein, 427 aa, Streptomyces sp.
MQLRYAFRLDPGPGQRVALARAFGCAGGVQRRGRRPGAGPAGGCAFPSAGALSKTLITEAKQSPGRQWLSEVSAVILQQALRDMERACTNFFASLKGARPGARVGAPRFRSKRDARQAIRFTANARWKITEAGRLLLPKIGEVKVRWSRRLPSLPSSVTVIRDAAGRFFASFVVESDPDADLARMPEADGLPAVGIDLGLTLPQALNSVRAGGTPIAVLSDGTKIDSPRFLRRAEKKLKKVQRELSRKQKRSKNREKARLKVARAHAQVADARREFHHQLSTRLIRENQAVAVEDLAVKALARTRLGKSVHDAGWAQFLAMLEYKAQRYARVFVKAGRFEPTSQVCSVCGVKDGPKPLHVRTWTCTHCGTVHDRAHNAAKNVKQAAGLAVTACRAQVRPELVPAQREEAGSHGIHTGVRAAQRHSTR

SEQ ID NO: 52488 - protein, 347 aa, unknown
  TnpB Polypeptide
MTHRSRPTSCKPHETEPQKPSKVSLNAGKTARKPQNHTSRHGSPATTHEPSPSTLTTAHSPPSTDESPQILSSPTNSVTRHSAYLFNDDYDVKGATLHYDTVEDCFYLHVRTKPTVENDNAGTGDAKHVSVLGVDLGITNIATTSTGRFWSGGELNHWHREYEKSRGDLQQTGTRWAHENVQRVGRKQTGRFEQILHTISNELVEEALENDCTHMVFEQLNGIRERLPHAKAVHKWAFHRLYEYVTYKAESEGLVVRQINPAYTSQRCSKCGFTHEDNRPHNNGQDEFGCLKCGYDVHADYNAAKNIGLKYLRDQQKSGRGGAPVGVRLNSGTLNVNGEYSPTVING

SEQ ID NO: 52489 - protein, 411 aa, unknown
  TnpB Polypeptide
MIVQRVEKHLIKQNNAYYPMFCDFAHKAKNLYNHANFLVRNEFIKNNKWLRYNELDKMLKADLKFDDYKQMPTAQSAQQTLRLLDGNWKSFFKIIKDCSKNKDKYLGRPKLPKYKAKDGKHILILTNQNVRLKDNILVFPKTFCGFIIQPQFIKHDNFVSFQQVRFIPHYKSFIVELVYNIDVPSTILPDNKRYLSVDIGIDNLATVVNNIGLQPVVINGKGLKSINKYYNKQISHYRKIAKRMNGRDYTNRMDNLTMKRNCKINDYMHKASKYLINYAIANDFNTIVIGNNKEWKQKSTMSKIVNQSFVGIPHMKFIEMVQYKAQNVGINVILTEESYTSGTSFLDNEKPVKANYNKKRRVHRGLFVSNNGIKINADVNGAYQIMKKVFPNAYSNGIQGVVLHPIRVSVA

SEQ ID NO: 52490 - protein, 484 aa, Pelotomaculum sp.
MKTTVKGVILQINEQGKTYLDNLMDSFCAAVRWSYKRLLDMWKIQDIRLAVQGKFSLNSRQANDAVYEAQTTIRSQKELVKLNRSNTKKRVELTKSRLKKARSKKKKANLTRKLNKEQRRLAELQKHMENSATPPVLFGGKKLFIERCKGNISHEQWQEARSNRYLSRGDKTKGGNLNTRLYAKDGNIYLDIAAEPIETDKVIRYNRITVPVYLAHKPSQKTGRINGRNYRQMVLNYLKAGNAYQVEIIRENGRYYIHVTIEEETPQAYVARNGAVGVDTNPDGLGITRADYLGQYRESLWLPQGEWTYTRSNRRDNLIGEATALVVELAKQLNSILAVEDLAFKDDKSVTAKFNRISHSFVWSNFLEKVERGAARAGVPLVKVKPPFTSTIGILKYQQQYGISNHEAASYVIARRALGYSREKVPKPLNNKFIIEKENFSKLSNWKQWSAVKKAVMAATKKQTRQEAQSLVSWQHYRKQMIVG

SEQ ID NO: 52491 - protein, 394 aa, unknown
  TnpB Polypeptide
MRQKRAYRYRCYPTPEQAAVLARTFGSARFVYNWGLRLRTDAYYQRQERIGYAATSAALTVLKREPATTWLNDVSSVPTQQALRHLDRAFRNFFEGRAKYPGFHKKHGRQSAEYTTSAFRWDAQAKALTLAKMEAPLTICWSRPLPDGTTPSTVTVSRDTAGRYFVSILVEEDIASLPPGDAQVGIDLGLHDTVVLDTGEQVGNPRFFAQDEQRLAQAQRRLAKKQRGSKNREKARRKVARVYARIADRRNDFLHKLSTRLIRENQTICVESLQVKAMSKHPTLAKAIHDVGWGELVRQLTYKAAWYGRTLVAIDKWYPSSKRCSDCGHVLGSLSLDTRCWTCPECGCVHDRDVNAAKNVLAAGLAVSACGEAVRPGRVRPPSAGLVEAGIPRL

SEQ ID NO: 52492 - protein, 305 aa, Okeania sp.
MQTHTKNPNGRCCVNLPKIALVPLVYNRPIPVGFKVKTGTVIREADGWYVSFTIEDKTTPVEVVEIQPTEDNSKGIDLGLLHYAVTSDGEFIEVPKFFRLSEHRLSKLQVRLAKKTKHSKAWKILRRKIAKLHQLIARQRLDWQFKLAYHLFSDVSVIFLEELQIANLVRRCKAKLASNGQFLPNGQLAKSGLNKSLQDAATINSLDVLQYIAWKLGKRVVKVDPKGTSQHCWECLNRVSKSLSDRFAARHERHSCPKCGQELDRDYNSALLIQKIGLLSTQEEDITSVKTAVRVSQTEESLALP

SEQ ID NO: 52493 - protein, 429 aa, Pseudomonas sp.
MRVLLYMLQLQAFKYLLMPTGEQQRQMRRFAGSCRFVFNQALALQQANRDAGGAYIGYVAMAKHLTAWRNSSATAWLKEAPVHPLQHALKDLDKAYKHFFEKRADFPQFKHKARSNSFRYPDPKQIKLDQANGRVFLPKLGWLRYRNSRKVLGDLRNVTVSLSGGRWFVAIQTRREVQTPVPLGGMVGIDMGIARFATLSDGSHIEPLNSFKRHERALRKAQQAMSRKTRFSRNWTRAKARVQRLHVRICNVRLDYLHKTSTNISKNHAMVCIEDLQVRNMSTSASGSAEHPGKNVRAKSGLNKAILDQGWYEFRRQLDYKLAWKGGWLIAVPARHTSQTCPHCTHVSRANRQSQTRFSCVECGFSEHADRVGAINILARGMQNLRDEGQDTADASVGRETAARIACEVSGTTRPPAAGTHRGELVRQG

SEQ ID NO: 52494 - protein, 447 aa, Thioalkalivibrio sp.
MKRLQAFKFELRPDGEQRRQMRRFAGSCRFVFNKALALQKERYERGEKKLGYAELCKELISWKRNTETTWLGDTPSQALQQTLKDLERAYTNFFAKRAAFPRRKKKGLADSFRYPQGCKLDQGNSRIFLPKLGWQRYRNSRKVPGVVKNVTVSLAGGKWFVSIQTEREVEQPIPKAISAIGIDMGVTRFATLSDGTSYAPLSSFKRHQDRLRNAQQSLSRKAKFSNNWKRARARVQKIHARIGNARRDYLHKTSTAISKNHAMVCIEDLQVRNMSQSAAGTIEQPGRYVQAKASLNKAILDQGWFEFRRQLDYKLAWQGGWLVAVPPQNTSRTCPACGHVSADNRQTQARFVCVGCGFEENADMVGAINILSRGMQKLRDEGQDTADASAGCESTARIACEVSGAVMPPAAGTYRSDSGVARGQDERRRNPRPLGRGGCQESGALAG

SEQ ID NO: 52495 - protein, 415 aa, Thioalkalivibrio sp.
MKRRQAFKFKLRTAGEQERQMRRFAGACRFVFNKALALQKERYERGEKKLGYAGLCKLLTEWRNSPETAWLADAPVHPLQQTLKDLERAYSNFFAKRAAFPRFKKKGRSDSFRYPDPKQIKLDQANSRVFLPKLGWMRYRNSRDVLGIAKNITVSASNGKWFVSIQSEREVAEPVHPATSLVGVDMGVANFATLSTGEIIAPANAFKKQQRQLARAQRAMSRKQKFSRNWTQAKARVQKIHARISNSRRDALHKLTTTLSKNHAAVVIEDLQVRNMSQSASGTVDQPGRNVRAKAGLNRAILDQGWFEFRRQLEYKQAWRGGMVVAVDPRNTSRTCPACGHVSAGNRRSQSRFECVACGHVAHADVNAASNILAAGHAVMACGGDASPYQYLGVDTAAPAKQEPAEATHSGSRPG

SEQ ID NO: 52496 - protein, 445 aa, Thioalkalivibrio sp.
MTRKIIRSDKWPLQATAQQRHLMRLTLAEYRAFCRALSIVVLSNWPALCRAPSFAAAVERLIHPTMKNPKPRHHYFTRRFYKFPSYLRRAAIEFVKGQVSSYLTRYGAWLDGDRKCSDARPPAFNPVSGCYPAMYRGQQIKFNEDFTVASLKLWDGREWLWHDVQIKRVRQRHLLGAVKSPALVVNRRCYLSVPVELKPEQLPSTERACAVDIGINTLATASIVSSGGTVVARRFLHPAADIDRRNKRCTLIRGKARKTAKLSKGFCRGMYRKTRHINEQIAQITSRRLVGFALEHGAEVIVLEHLKGWRPKAGTRRSSLRQRFHGWLHRRLADLIEAKFTEAGGRVEYVYAKGTSSWAFDGSGKLKRDPKQYELATFTTGKRYNCDLNASYNIAARYWAWKLKLTRRKDGQLSEDRSSSGKPRIPVTLSTLWQREHEAPYQCAA

SEQ ID NO: 52497 - protein, 313 aa, unknown
  TnpB Polypeptide
LGGVPGQPESLGVGDPKWEGEQGRLEIQYDETDDTFRAFQPVTVPDSRQDSRKIEDFPEVENAPRFRNSPLASEEAALDVGANNLVVCTTTTGQQYLYEGRVLFDRFRETTEEIARLQSKLREGRYSSQRIRRLYRTRTRRRDHAQDALVRDLLERLYAEGVATVYVGDLTDVLSTHWCAEVNAKTHQFWAFRAFIKRLSHTAEEYGITVEVRSEANTTAECPECGEQEDTDRDGDVFRCPCGHEAHADLSASRTFLEQQAGKNVGSMARPVRLKWDDHNWSEIPHSPERARPNEERTNQSTGDGKLASVGAA

SEQ ID NO: 52498 - protein, 395 aa, unknown
  TnpB Polypeptide
MKQTLTLVCKLQPLPEQAAKIEATLKAFADACNYANQVVKPSILSKRTIQSLCYEQMREQFGLSANLAVRACARVGANRKTAKTKGKPVKLFKPTSADYDARIFAFREKDWSVSLTLNGGREHIKIVVSNYQIGKLKGKEPTSAQLCKHRDGLYYLHIQLTEDVPEPIKPNNVIGVDFGRRDIAVTSKGDKWDGKSIKATRDRFARVRASLQQKASQGTKSTRKNCRRALRRLSGRERRYQSWLNHNISKSIVEIAIATKAVIAIEDLTGIRERTNQKPRNKTERRRSNSWAFHQLRTFLEYKCIQAGVELTVVPPAYTSQTCHQCLHIGLRSEKGFKCGNCSWHGDADFNAANVISLLGGAFASLPERSVLACSLNEPQARAKAPSQRAWGKLT

SEQ ID NO: 52499 - protein, 429 aa, Deinococcus sp.
VLTSHLTLRAAGHHLHLIDVAAGQVALPGLPAPGETVVVPPVTLDDLQTGFRQARDALGWAHDVPASVYHQVVVDTARDWRALAGQTVRASELPPPWGPERPLELHLDSAAQPLDETTLEVASLGRDALVLGDLYLLPGPYRRALHHRRQRRLAHEAQRLQQFEQAWLAGGDLEAAGQAHRLRARHLAAGVVLEGQRPPPDLNPGEPRSLDRAVIRQTVGRGGQPGWEIAWAFQVTASPWTVDDCLGLDPGGRHVVAYAAGAGGGVIGRPLRGAWQLPALPAPRGLLEVALDEPRARIYHRRALFLKMLPAYDALLALALQFRAVALEDTSWQALQRRGSAFPAYAEAVGLRAALGWLVALAPHHGVQVRLTPPYNSSRTCPACLTLGRRPWSGQPFACRTCGHTEAIGDVAAAQIHRQRALGGAWRSP

SEQ ID NO: 52500 - protein, 385 aa, Streptomyces sp.
MLADHCSLYNGALQERRDAYRHNSKTSIKYGDQSAQLKAIRAFDPERQGRWSFSSQQATLRRLDKAFQAFFKRVKAGQAPGYPRFKGVGHFDTVTFPKDGDGCRWDSTPDDRQTRVRLQGVGHVRVHQHRPVKGRVKTISVKREGRRWYVVLACDEVSAEPLPATGSIVGIDMGTVHFFTDSGGVHEPNPRFLATMADELKAAQQYLSTFPKRTRRRTRKHRAAARKVAKIHANIRRQRLDHHHKTALGLVRDHDVIGHEKLNTAGMTKTPAPKPDPDNEGAFLPNGAAAKACLNKTILDVGWGQFLSILAQKAESAARRVIGVDARNTSRTCPLAAGGCGHVARENRATQAKFECVKCGLVENADAVGALNVLHRAGLVLCAAA

SEQ ID NO: 52501 - protein, 503 aa, Aquifex sp.
MSKPLRCLTIALSDIPEEYKIALGYLTYHSGKLFNQALYSVKTKQAKINTYDLYNKLKDNSLHLKNLQSRSAQIVLDQLVRAFKNWFEYLQNPEKFKGQEVKPPKFRPKNKPHRTITYDKTGFKVVGTKIRLSISKALRQWLKEKHGIELKYLWLDTGLELDENLIKNVQIVPKANAKEFELHIIYEKPQNGEKPLKQNRVMVLDPNSTNFFAVVIEGVKQPYLIDGKGLKSLLRKYLKKIASLQSRLEGAKKKGFLTHFLEERISRLWLKVKRLLKHYAHTVSNLILGLAIKYGVRKIYVGDAVKNKNKGSNLNSVVDQMWSLLPHGKVKEYLEYKAKEYGIEVEYISESYTSGVDSSQRGVVSKENYTPEGRIKRGLFRTRLLGFLNADVNACRNLLKKLGKFDLISGILKPKRLRVFFKLRKSSSTIPLYGGIGRSRGGVNPPVVVRHPEVGVNPPEALAYASGVVHPNFTPAAKPTTNPPREATGAVMPFAKFLKPSNT

SEQ ID NO: 52502 - protein, 405 aa, unknown
  TnpB Polypeptide
VQQQMLARTFGCVRVVWNRTLAARHSRYATERQGTSYAETDRALTAMKKDPDLAFLNEVSSVPLQQALRDQHAAFQAFFARRVRYPRFKSRRSRQSARYTRSAFSMRGGQLRLAKTSAPLRFVWSWPGMDVTALDPTSVTVTREPCGRWFVTFHLDVPHPAPLPATGTDVGVDLGVKDLAVTSQGERIANPRHLDRKARNLARYQRRLARCRTGSANRAKAAAKVARAHRKVRASRADFLHRASARLVRENDMIVIEDLAVKNMIRNRMLANAISDCGWGELRRQLEYKCEQAGRDLIVIGRWYPSSKTCSACGHLLAELSLSARRWTCPSCRARHDRDINAAKNILAAGLAVSACGAGVRHPETPPVQQAVKQEPQPVTAGSPPSRAGSSQFLAHARWPEREVM

SEQ ID NO: 52503 - protein, 393 aa, Streptomyces sp.
MKRAFKYRFYPTDAQAAELSRTFGCVRKVYNMALAARTEAWVLRQERVNYNASSAMLTAWKKTEELAYLNEVSSVPLQQTLRHLQTAFSNFFAKRSKYPRFKSRKKSRKSAEYTTSAFRFHNEMLTLAKMTEPLAIVWSRPLPEGMSPSTVTVSQDAAGRWFVSLLCDDPGVKPLPANGKAVGIDAGLDHLLTLSTGEKITNPRHERRDRAALVTAQRRVAKKEKGSANRAKAQRKVAKIHARIADRRRDTLHKITTRLVRENQTIVIEDLTVRTMVKNHTLARAISDAAWSEFRSMLEYKAQWYGREVIAVDRWFPSSKLCSACGILQDTMPLNVRTWRCDCGTMHDRDVNAANNLLAAGLAVTVCGAGVRPQRSTPDGQSVTKQKSSRREP

SEQ ID NO: 52504 - protein, 565 aa, Geodermatophilus sp.
MPRRPRKPTHVVAPSRGCSASTRLRLTEGERLLLEAIGEHLTRMRVADLKSALAGMAANERSKSLIRDFGVVARFAETACADNDAAVRAAKEALWNQRSMLRAAINRLESRIAAPSRSGCGCRRKRGCDVCRDGYSTEHERVMKCRRLDVLRGRLKRVERRLTERQYTVVLGSAQLQKRRHHLAEAGLDTASWRFRWQKQRAWFGAIGNAGKPGGNPCMTLTRDETGRLWLTISVPRPVAQRFGVSTRVRLSQPVAFRFCAEELADRITTRLSTRLDLAFGVTKRGRPTVTLRASWQRPSGPPRTLQQTREQGVVGVDFNVDHFACWRLDRAGNPMGRPRRIPLELRGLSTAARDGRLREALGRVLEYAVSTGASAVAVEDLGFGTAEKSREAHGRNRTFRRLLTEFPTAQVRDRLPRMAERRNLAVIAVDPAYTSRVGGAAWQRVFSDSSVIVTRHEGAAVAIGRRALAHGLTARLRGRPRERPVPHQRDGSTTDYVGQERAPSSAARSGPTRGDHNRVDALSKAPRRPSRPQAVHGQSGVETVGRSTGYPQAGHRSAGASPPR

SEQ ID NO: 52505 - protein, 233 aa, Oscillatoriales sp.
VLKAVKVRLYPTPEQELALAKSFGCARWYWNFALNACIQHYQETGNSLKLATYKGMLPQLKKDYPWLKEDCYSSVLQCVAINLDRAYKNFFEGRAKFPKFKSKHHKQSIQYPQSVTVNGESLKVPKIGEIKAVFHREIPGTIKTVTISKTPTNKYFASILCEIEGSEVKELGDKIMGIDLGLKDFAIVHDGENVTKYSNPKHFKRHQKNLARKQKKLSRKTKGSKSRAEFKKL

SEQ ID NO: 52506 - protein, 407 aa, Cyanobacterium sp.
MLNLSYEYKLSLTKIQIEQTEHILEVCRSVWNFALRERMDWSNSRKSRSNACSIQQEYIIPAPAPYPNYHIQAKALTKARKENPRLASVNAQVQQQVLRTLERAFLDRERKGLGYPRFKNHSRLRSFVFPQMLKDCIKGNRIKLPQLGWVKFRLSRPIPDGFLVKQARIVRKATGYFVILSLQSDVGIPQPIPHGHPKGLDIGFICAVVTSDNESIPRPRFLNKYSRELKRLQRMLNKKQKGSCGWKKLQKRIARLHFKTTSHRKDYHFKLSHHLVKDAGMIFVEDINFRMWQRSFLSKSSADFGFGQFINILEWVCFRTDTYFFKVDHRYTSQECPECGARTGKKDLKERVHQCPECGYITGRDHASALVIRNRGLDLVAVGQPVQEKASGDGRSGGEFIRLATNL

SEQ ID NO: 52507 - protein, 505 aa, unknown
  TnpB Polypeptide
MYLTRKVEIHPGHLLYDWCHETTALANNLSNAVRFRQRQVLTAVKKEPKDWTANEKEIMDEIANALPAMCIVGKKEKHYKLPTETKRFLNYSFLEDLLKVTKNQDYLAKGLPKQSAQQVIKTCVRDMKAFYASIRSYQKDPSKFTDKPELPGYKRKGGHCTTPITNQDCKIIPDDKTWYAKLPYIKDKPLNIGCLDEKAALKEAKVTPNNGRYILSFVFEIPEDMPVVVQQSSRIAAVDPGVDNLMAVTNNVGLPSILIKGGIVKSINQKYNKDVAAIVSRQTAGSDKKFIPTEEYYEVTNYRNNKIQDQLLKCANFLVRWCIENRIDTLVFGKNVFWKQEVNIGKKNNQNFVQIPHAKLGFILSYLCERAGIRFVEQEESYTSKASFLDNDFIPVYGKTDQKPTFSGKRRQTRYKGMYNEKGFRGLYRASDGTIINSDLNGSANILRKAFPDAFKCCQPDFEHVEIIRNIEQYHILRNQDMQCKSGTCISKARARRMKKVLPLG

SEQ ID NO: 52508 - protein, 387 aa, unknown
  TnpB Polypeptide
MRYYSLYSVKIKHYNHILKETVSLYRKVTDFFLQVCLKEWDVLSTKTAHQKLLYMEQLCHQTKKNPNIAYKTFDQKFYKFPSYLRRAAITEAIGKVSSYKSNLGNWANEVPTIRGRKPSLPKAGLIYPCLYRENMYQQTGKYTARIKVYVRYTWDWINIQLRKSDVDYIHRHCSNRKQCAPTLQKHGHQWFLDFPFEETVTLNNTSVYEETILAVDLGLNSSATIAVMKADGTILGRHFLHLSKEYDSLTHAVNRIKKAQQHGNRKTPRLWAKANGINTHIATRTATFIMDIAVQYHVNTIVFEYLDTSGKKKGSKKQRLHLWKSQYVQNIVTDKAHRFGMRVSHICAWGTSKLALMAAVLRFVERMQTFLPIVYVSSRTVKFITVT

SEQ ID NO: 52509 - protein, 364 aa, Nocardia sp.
MSRHTAFRYCLDPTVEQQTVLARHAGAARFAYNQCLALVKTALTQRRTDPDHPVPWTRFDLINAFNTWKKSAAAGRIFTVDPSGVTTVEVTGLAWRNEVCQQVFEEAATDCGRGLTGWSDSRSGKRRGRRVGFPRFKKKTSSTVSFRLRNKHAKTGRPTIRIGEGDIPRSVTLPGLGQLRVREDTRRLRRMLTTGRAKILSATVSQRAGRWWISVSIEAADLHPGHHHPARVPDDGGGCVGIDRGLSAFLVAATSDGREVARVDDPPKPLARGLARQRRLTKVLSRKEKGSRNRREAAARLARHHHRVANVRRHFLHQVTNELVKTHDRLVVEDLHVAGMLRNRRRLLSRPGYEPWTPEKGGVR

SEQ ID NO: 52510 - protein, 312 aa, unknown
  TnpB Polypeptide
VVDLRFRGKNRYRSFTYNQVEDKDLQGNYINLAKIGLVKLVMHRPIPSGFKLKTAIVIKKADGWYITLSLEDTSVPESTTDDVKPTVDNSIGIDVGLEKFLADSEGEFEEIPQYFRLSEEKLAKLQQKASVRQKGSRAKKLLNRKVARLHQKVARQRQQFHFETAKKILNKADVVFVEDLTVKNMSRRRKPKQDADGKFLPNGQSAKSGLNKSIEDAGWSQFIDILSFKAERAGLKVVKVNPKGTSQHCSICLNAVPKTLKDRWHSCPKCGLEVDRDTNSAVLIKKVGLGVVLTIKRSTRKGREARAIPLVG

SEQ ID NO: 52511 - protein, 364 aa, unknown
  TnpB Polypeptide
MHKAFKFRLYPDSSQINLINRTIGCSRFVFNHFLEKNMRIFKDTDKSLSYATSCKDLTLLKKDVAWLKEVDSMALQQSLKDLDKAFKNFFRDKGVGYPKFKSKHSPKQSYRTNANDNIQVENNKIKLPKLGWVKFAKSREIEGKILSATVRRTPTGKYFISILCDTEILPLPKNSNQIGVDLGLKEFAITSDGKIYHNPKHYRKHEKRLQKLQRQLSRKQKGSKNRNKARIKVAKQHEKIRNCRLDFLHKLSTKLISENQTVYLEDLKVGNMVKNRKLSKSISDAGWSEFRSILEYKAEWYGREMIVISKDFPSSQLCSVCGYRNKEVKNLNLREWSCPICNSKHDRDINAAINILNEGLRIAN

SEQ ID NO: 52512 - protein, 209 aa, Moorea sp.
LKARYQYRFYPTDQQKSDLARLFGCVRVVWNDALAICQKSQKTPKSGELQKLVITQAKKTEERKWLSEVSVVPLQQSVADIGTAYKNFFDSCNGRIKGRKVRPQRFKKRTNKQSARLTQRGFSIQGDGVYLAKIGVVKPIWSRELPSDPSSVTIIKDCAHNYLLSFVVDIEPIHIDVKNQSIGIDLGIKTFAVMSDGSEVHSPDYSRLD

SEQ ID NO: 52513 - protein, 442 aa, unknown
  TnpB Polypeptide
MQIISSYGVELRKQNIPIRQTLEIYRSAVSYLIGIYVQVWEELAEIPDAKRRFNAAERLVHTTKKNHACFDFDIRFPKMPSYLRRSAIRHALGTVSSYKTRLDLWEKTDGKSGKPRLVYENHAMPVFYRDVMYREGAEGKDEAYLKLYDGHDWKWSCVRLEHTDMEYLRKYWSGKNASAPTLEKRHQKYFLRFSYTEEVTLTKTPVKEQIICSVDLGINTDAVCTIMRADGTVLGRKFIDHPSEKDRMYRTLGRIRRSQREHGSAQTQGRWAYTKRLNTELGKKIAGAIVRYAEENHADVIVFEYLEMQGKISGKKKQKLHLWRKRDIQKCCEHQAHRKGMRVSRICAWNTSRLAYDGSGAVTRDWENHSLCTFQTGKRYNCDLSASCNIGARYFIRELLKPLPATEKSLLEAKVPPVKRRTSCVYADLKKLHSEMELLKAA

SEQ ID NO: 52514 - protein, 131 aa, unknown
  TnpB Polypeptide
VYEKIANIRRDFLHKESMKLVSENQVIGIEDLHVAGMLRNHKLAKHIADVSWSAFFRLLKYKSVLYGCDLVQVGRFYASSQTCSRCGEKNPEVKDLDVREWTCPYCGAHHDRDKNAAINILRKAKDILAAS

SEQ ID NO: 52515 - protein, 360 aa, Methylacidiphilum sp.
MYQNFEKKGRQYIPLMILEGGKRIVIPLSANSKIQGMICLVLKEKKATIPYAALLKVPKRLYGEAVGINARLSEFFTDDHGKKYGRGFGELLANLSKFHKEKGKKRQNLQVIDKNPGKAAKARRIRKHNLEKKKRLPRLCKAWVEIERRIHTSLQQLFKLRIPSVIASESLVFRLNVPSKDLSRRIIQLRSYVLPERIELLAPVGGSRREKVYPACSSELCPRCGYVHSKNRSGDKFMCRHRGDASYAESVGAYHLKKRIGDREIFSWRPQNRLHAMLLERFARNSGLPPDWNPEEGDCTGMDDSRQREDVLFDCQDDRLILSRFSEERNGHGDTRASQFKTMAKKNGLGSSVSKSQACF

SEQ ID NO: 52516 - protein, 301 aa, Lachnospiraceae sp.
  misc_feature (297)..(298): Xaa can be any naturally occurring amino acid
MTKEQAVLVMETMKTYIAAVNGLVSDAVSGISIVKYTSKDVNADLPSALKNQCVRDANSIYRKYTEACRQAASKKKNLKDTESAARVKEPKVPVLRKPCCYINNQNYRIKDDHLEFPVFADGKTHRISVKIRLTDEQRSVLSGSRLGTMRIVCKNNKIVAQLVYDVTEHASVEEGNVMGVDLGIKCPAISYCSDGSVMFYGNGRRNKYMRRHFSKLRKQLQTAKHPEAVKHMNDKEQRIMRDIDHKISHDIIQTAVAHNVKTIKLECLANVRSTTRTSRKNNHSLHNWSFYRLAQFXXHPR

SEQ ID NO: 52517 - protein, 567 aa, unknown
  TnpB Polypeptide
MSHHGSKLRTLADPFVVAPPAGARVRTRLRTCDTDATVLRELGTYLGSLANADLAARCRDGNSDGQVRTYSRRFRKQELTSRSSSRWAGAITRTSEDSYQLARRNQIAHIATLRSRIRTITTRLRCPVAGSDGTGIGYASVGERRQKQRRAQVLAAELARAQAAALEHGNLSVCRGGSRLARNRAHLEETGQTVEQWSAQWRAARLFIRADGEKDKAWGNETIRWHPVDHWVEIKLPAPLAHLANRAHGRYRLSTPVTWPYRGDEVAAQASGGALRYDITYHSAKNRWYLDASWKTPAAPILTLEEARRGPVVAIDVNVGHLAVAVLNPDGAPITTPITVPLTTAGLPASTRDARVRAAITTVLDLGARHHAGSVVIENLNFERARTDGREEHGNRPSRGKRGRTFRRNVAGIPTAQFRDRLTQMAYHRNIVVIAVDPAYTSRWAGQHWLGTLRRQFNTTELSGHHAASVVIGRRGLDQRARRRGTCVRRPPVDGRRLTMASAERPTPGKPGLVNPPAPTGNQETGATLGRCTEAAVRPKGQPGETRSRRPKTVRGSPTQHALTLSV

SEQ ID NO: 52518 - protein, 389 aa, Thermoproteus sp.
MGKKVYRTLLLKYNLLHPEVAGKVPALLKMQEEFRKWVTEWTKSKGSLPLPERPLKYFAQKFIYANKMLNWLKGLKKNGIEVRDVRSPLIFNTQLRLSDEKDLGRGVFVDLPKREVKIRRLGTIALKLSDKTVEWILNCTKEGGKLVMAAVWVGRSRKDSTMSLHVALTFRREIAPMEAKRLLVIDVNALHNGLAWAVVEGERIVERGILRPNISKILHLQKVMAKLESICAKEDRSCDEAMATQSRIWRLLRSWEDEAVKKIVRLALQYKAAIVIDVPDDNSVKELKEGSYKAERKAFLNFGRLHRRLRGLAEWYGVPYREERLFSTICPRCGRKMEELPNRRVRCACGFSAHRDEVPIYWAQKRFHELITPSFSSSSAVLAPLAVGR

SEQ ID NO: 52519 - protein, 223 aa, Exiguobacterium sp.
MLKGYKYRLHPTAAQAEFLVRTIGCARFIYNKLLEDRIAIHEETKASGGSKRKPPTPASYKPLFPFLCEADSLALANAKLHLDTAFAKFFAGTAGFPVFKSRRKARASYTTNNQHGTIRIEGDRVRLPKVGFIRFTQHRIFDGEIRSATVSMTKTDKFFVSLLVEQPDEPWVPAEHKIGIDLGLGHFAVMTNDAMVINVNVFMYNFVRLIMLTIAHFISHSLF

SEQ ID NO: 52520 - protein, 305 aa, unknown
  TnpB Polypeptide
LRAVRPDVLAGGVTLCRGTLKRLDRAFAAFDRRYRAGQTPGFPRFKPASRWDSVQYEDTSGWRLDTERNRLRLLGVGDVKVRLHRALRGTPKAITVARQGRRWWVTVRCVDVPAQPLPVTGREVGIDVGVDNVVATSAGELVTDGRYARLACAQRDLAAKKRGSARRRRAVERVAGAHRTVRRQRADLLHKLSRSLVDEHDLICHEDLRIANMVRRPQPRPDQEGGFQPNGAAAKSGLNRSIHDAGWGQLLAMIAYKAEDAGRTVIAVNPHFTSQTCAQCGHVDAGNRLSQATFQCRACRSSGAR

SEQ ID NO: 52521 - protein, 183 aa, unknown
  TnpB Polypeptide
MKIREVNENKKGKRSKNYYKTKKKIALCHEKIRNIRKDYLHKVSHEIISENQVIVSENLQIKNMVKNHHLAKAISDVSWYELTRQLEYKAKWNGRKYIKIDTFYASSQLCSVCGYQNPDTKDLSVRTWICPKCGAEHDRDINAAKNILTEALYDENTKLWCNGPAYIAELYREELKKHGNQMH

SEQ ID NO: 52522 - protein, 356 aa, Escherichia sp.
VKRLQAFKFQLRPGGQQECEMRRFAGACRFVFNRALALQNENHEAGNKYIPYGKMASWLVEWKNATETQWLKDSPSQPLQQSLKDLERAYKNFFQNRAAFPRFKKRGQNDAFRYPQGVKLDQENSRIFLPKLGWMRYRNSRQVTGVVKNVTVSQSCGKWYISIQTESEVSTPVHPSASMVGLDAGVAKLATLSDGTVFEPVNSFQKNQKKLARLQRQLSRRVKFSNNWQKQKRKIQRLHSRIANIRRDYLHKVTTTVSKNHAMIVIEDLKVSNMSKSAAGTLSQPGRNVRAKSGLNRSILDQGWYEMRRQLEYKQLWSGGQLLAVPPAYTSQRCACCGHTAKENRLSQSQFRCQVC

SEQ ID NO: 52523 - protein, 225 aa, Bifidobacterium sp.
VERADNAPLVPPKGGAVGIDLGVKTLAVLSDGTMIANPHALGMSERRLKRAQKALSRKTKGSNRRRRARERVARLHARVANQRRDLLDKLTTRLASTYSDISIEDLNVHGMVGNHRLAKAIADASFFEIRRQLEYKTMRTDARLHVIDRWYPSSRTCSNCGRVKAKLSLSERVYHCDGCGLVIDRDLNAAINIKVAGSAPETINAHGADVRPTTLRDGGRTAVKR

SEQ ID NO: 52524 - protein, 378 aa, unknown
  TnpB Polypeptide
MMNLTLQIQLLPDPEQAALLKATMERFNEAANWLAGVAFKHQLSNKFALQRLCYSELRERFGLPADMAIRCISQVCEAFKRDKSIRPKFRKHAAVPYSIGKNISFKGPDKVSVGSLDKRVVVPFIMGAYQAERFGWSKGQCDLVLRDDGKWFLLVTVEVPDGTKTAATQFIGVDLGIVNIAVDDDGEKRTSAAIETKRVQYATRRKRLGKACRGAKRSKRRHCHKAIKRTKAKEARFRKDVNHQISKKLVAKAKGTGRGIAMEDLGGINDRLTVRKPQRAQFNAWAFDQLRAFIAYKAGLAGVMVEPIDPAYTSQTCAECSHCERGNRKNQAEFKCRACGHQAHADQNSARNLSFRASAAVNRRMGPERVEQGTLDLS

SEQ ID NO: 52525 - protein, 453 aa, Oscillatoriales sp.
MSQWIDMLRSHYNWCLNDRLTQYHQQFIQGDYCDIRSKSEASPLTCCVTKSGASGNPWKDSKVDKDGKTRNPRRNAGDIQMTALPELKSARGWYAEIDATVLQQNIKRLDTAYKNFFEGRGFPSFKNRSNFKSFTYAVGVKIQGNKIYLPKLGWMRFHNSRAIPSGFIIKACAVRKKQDGWYISIRIEDSTIPDFTPKTIGDNPKVLGIDLGLTKLAHFSDGYQIDNPKFSTNKKARRTLKIRQRRVSRKVKGSNNRKKSAIKVGKFHKKISDKREAYQWKVANKIASRKVDIIAIEDLNISGMMRRCKVRTDAKTGRFLTNGQSRKKGLNRAISDASWGDLGLKVVHLAAKQGKTVIKINPKYSSQECRNCGHTEKANRENEKFICTQCGYHEHADIGAAKTIRDRALEKVRGDSAKLGVERLNAQKISPRSSSKRGEFGNPSNRDIKSVIS

SEQ ID NO: 52526 - protein, 413 aa, Chloroflexales sp.
VIRTHILECHLPRSEADALNRESGRVYTDTLVWHYRIYRRTGHWLSQGAAEKLNDSLSPTTLHAHSRDAAQQAFYKACKTAKATRAEGGKYPHKRKFYRTTSWKATGIRAKDGRLLLARARGLEPVAVALPSDLTTLPKTAFVEMRLVYDLIAKRHRWHLVVDDGVETPLRSEGRTLAADLGEIHPAAIANEAGDVVIFTARDLRALNQYRNKRLASLQTRQSRHTKKSRRWKKMQRRKTYLLARNNRQRRDIEHKVTRAITNHAKAEGTKRLVVGDIRDIANGKRLNRNAQQKVSGWSHGRQIAFLVYKLAAEGIALERQSEAYSSKTCPVCGRHNKPKGRNYRCARCGFVGHRDAVGAVNQESQAVHGAFGHVQVGSVKYRRAFVRRSSPDTGHVAREAHPADGSREAAGL

SEQ ID NO: 52527 - protein, 433 aa, unknown
  TnpB Polypeptide
MIVRSSSHTLRFANTGKREGVFRLLAEWRRVMQLICDDMWLNGYTWMEDDVFHEFNPGKFKYGLPKYLDYNRFEINTWLSARMMSSLVTQLSGKLRAICTKNAKRIEVFDKEASKGNYLERLWEVIERRRPSKPDLSDAGIEISSKCAVLNLTPDGEFYGFLKIKSTGLPIFNIPICRHKHMERFLDGTWTACNGYLIDEYGVQLRWEKEFVEKEAGVKVGADQGMLTCLSLSDGQTTPDMIIDAPRKGEPTRKLKVNLSTISEKMCRKKKGSKAFRRCQCERKNYTNYAIKRLNFSGIKEIGLESIKNINYGRRTAEKLKHWSNPEIVARLTQVAEEFGVRINPQSNAYRSQRCSGCGHVLKKARKGKLYVCPVCGLVMDADINAARNHEIELPDIPHCSELSRLARSDGFYWLPNGLFRMDGSELRVPDTT

SEQ ID NO: 52528 - protein, 465 aa, unknown
  TnpB Polypeptide
VKITRILHTETNPEVLALCKHVAGIRADLWRRYGALGTHGRSAGDIRKVAVSLYSALPIDGTIRNETCKDILNDIYTYRAASEAKVRQAVFKRTTDATERKRLFTLLKRGEWLSDPFLHRQMRKHFRHGVAKCTNQFVVRSDRVQTMMVDGKLCIQIAIASKYGKPIVLTTNSTGRNVNLSNSNLRIIAKCDAVEIHYCTEKTAGRAAGLQAEIGVDKGYTEALVDSNGNKHGTDYGKVMTAYTDKVHKTGQSRGKLHAIEKKHRAAGRIAKADRIKANNLGTIKLNARRELTQKNVRQIAFKAAHAVVDIAGTVAAEDLTSVIANRSPQWKKFNRRMSAWAKGSLAEALESVTKQRGAKLVLVCAAYTSQIDSQTGLLEGRRVGDQFYHKSGDVGHADINAARNVLARLRDPDIGRFTPFKSVRTILLARSSGATERHGGLVGQPPQQTAEKLSDFTCASLVKL

SEQ ID NO: 52529 - protein, 389 aa, unknown
  TnpB Polypeptide
VILAHRIELDPTEKQKEYFRKACGTARFVWNWALAECHYRYDLGANTDANEIKRYFNSFKYEAFPWLRNIHRDAHAQPFAALGKAWKAYFNGEVKGRPQFKKKGKCRDSFYVACDKFSSGGKTVLLPVIGQAKLREPLRFTGKIQSATVSREADRWFIAIAVEIPQGEVPPPKGEAVGIDLGLTTFAVLSNGEKVAAPKPLGKDLQKLRRLSRAHSRKRPSSHNRQKAALRLARCHRRIGNIRRDFLHKFTTRMSKNHAEIFVEDLNVKGMVQNRRLSRAIHDVGWSELRRQLEYKSHLYGSVLTVRDRFYASSKTCSKCGYVMEVLPLSVREWTCPACQNTHDRNVNAAINLKQNTVGYTGINAWGQEGSGLARTASETGLVEPGTFE

SEQ ID NO: 52530 - protein, 445 aa, Escherichia sp.
  misc_feature (365)..(416): Xaa can be any naturally occurring amino acid
VKRLQAFKFQLRPGGQQEHEMRRFAGACRFVFNRALALQNENHEAGNKYIPYGKMASWLVEWKNATGTQWLKDSPSQPLQQSLKDLERAYKNFFQKRAAFPRFKKRGQNDAFRYPQGVKLDQENSRIFLPKLGWMRYRNSRQVTGVVKNVTVSQSCGKWYISIQTESEVSTPVHPSASMVGLDAGVAKLATLSDGTVFEPVNSFQKNQKTLARLQRQLSRKVEFSNNWQKQKRKIQRLHSRIANIRRDYLHKVTTTVSKNHAMIVIEDLKVSNMSKSAAGTVSQPGRNVRAKSGLNRSVLDQGWYEMRRQLEYKQLWRGGQVLAVPPAYTSQRCTCCGHTAKENRLSQSQFRCQVCGYTANADVXXXXXXXXXXXXXXXXXXXXXXXXXXXXXXXXXXXXXXXXXXXXXXXXXXXXRAVVIQRKKIACHKVNSDARYVDIQRTPM

SEQ ID NO: 52531 - protein, 371 aa, unknown
  TnpB Polypeptide
MLLAYTGRIVENATDALKHTLAVVNEASNWLSEQVCQLKTTNTTKIHHATYYTLREQFALPSVYACIVIRRVANAYKRLPAKRRFTKPIRFRKYAAVELHQMAFCFRRDGSVGITTVHNGRIDCSVLWNRKQWLDFSRAKRTLRLMYRPDLNACFVGVLIETQVPQPYIPSDWLGVDLGITNIAVSSDGTVYGGEELIRKKKHHRTKRKQLQKKLAKRKKQKKSTRSVRRRLNRIRRRERNFTRNTLHTISKRVVAHAKALSHGIALENLKNLRERVTVSAGRQHRIRISGWAYRQLQQYIAYKAMLAGVPVIWIDARNTSRTCPECGYCDKRNRPTQAIFRCRECGYTANADFVAARNLALRAWGANPRP

SEQ ID NO: 52532 - protein, 319 aa, unknown
  TnpB Polypeptide
LHKNIFKIELENSQLIVNYKPREKIFLNLKLSDYHKQQIKNASKIGEVLVNEKSVYIPLIYEVNLIKPEKFVAIDVNENNIAFVSSDGKFGKIVTGVKELKVGYAEKRKKIQKIRNKRRREKLLKKYKEREQNRTKDVLHKISKFIAENFKGYGIIMEDLKCLRRTANRKVKKLNKYNHKIQKIGVNNKFMKFRLNSFPFRKIQFYIQYKSLFNGSPLYFVNPKNTSKICFRCGGLINSSKNCSNCGLDRDINACLNLLKMWGLPPPESLFNANMALPLTKKDEEKVEDLSGRGNGGSYRYGCIFDVHKNYNFYNYSIG

SEQ ID NO: 52533 - protein, 404 aa, unknown
  TnpB Polypeptide
MLIKGVVFRLEGELPHEAKFLFEDFRLAVNSAIRAGLQARVTSRNALARLAYKDFRAEHPRMYAKHLVSAFEVAGSVLKNHRRRVRKGKGNNVPYVRRLFMKAENQAYKLDRENGMIDLPIRAGCHVKIKLVLSNYHRRYLDDTACSLGSLTLLPDRAIIAFRKDAPKPFVPESALSLDTNERSLDGVFVEGDVAKAIKADFPEIAVIQQRHHDRRKMLQKKKAHDRRTSRNLCRREGAREHRRIDYRLHQVANSVLKFAEERKSAIVLEDLKGFKSKRSKELNRRLSMWPRRKLHQIIEYKAQWKGIPVVKVDPRNSSRTCPICGRIQYSRMGAEFKCECGWHLDRHINASINLLQAATSKGVAGGLRFNPGAFQHDVMMILYEPVMAARSEPNGTSDAGAVT

SEQ ID NO: 52534 - protein, 358 aa, unknown
  TnpB Polypeptide
MATTTTATAKTFKYKMYASARNRKIHQQINAAGMVYNHCIALHKRYYSLYHRSLNKFALQKHLTKLKRCKRFSYLKEIGSQAVQDITDRIARAYKLFFEYTGKRKIRPPQFKKVWKYKSFTLKQAGWALDEDTHTIVINGQKYRYFKSRSIEGKIKTVTVKRDHLGDIYIYFVCQIEAKEVKPRLGKSIGFDFGFEGQMLVAPDAAEDIAEPKFIRARLKDLRKLCRARSRCRLHSNHWYALNRACNRLYRKTQNQRRDYQYKLAHQLCKEYAVICLEDLNMKWQASAGHGKKVGDYGFSAFVSILQYIATQYGTTVVKVGKFFPSTQLCHDCGLKDPFVAKLEVREWECPFCQIIDT

SEQ ID NO: 52535 - protein, 503 aa, Azohydromonas sp.
LGGYSTSRCTWSCSPSISTSRASKSSQTLAKITRSCAMASPSKTLRRYLATKTKCTCMAKTQCRPRRIAISCVIGQACYDGLAMSIKAYRFQLRTRPGVERLLRRFTGSCRWAWNAAIAEQRRRREAGEKFSPYAAMCRWLTEWRHAPETAWLAQAPIHPLQQTLRRLEAAYQRFFAGRGGYPKFKRRGQEPGLRFPDPKQFALDQGNARVKLPKLGWLRMRQSQAVVGELRNATVTAERGKWFVSLQVEQPDVLPSAELMPTLGIDLGVALFAALSDGRTVEPLDALKQQQRRLKHAQRAVSRKVKGSRNRRKAVDRLGRLHARIAAQRNDWLHKLTTELADQHPAIAIEELKVAAMSASAAGTADAPGQRVRQKAGLNRAILDQGWAEFRRQLEYKCAARGGAVVAVNPAYTSQTCSRCGCVDAGNRTAQAIFACLACGHAENADVNAAHNILAAGRAVWAARPTACGAEVSRASPARGRRAAAVKQEPTEATPAAAAEAR

SEQ ID NO: 52536 - protein, 348 aa, unknown
  TnpB Polypeptide
MQLTYKLRLRDKYAAELNRQARAVNMVWNFCNETQQKAVQSGRKRLTAVDLMRLTAGAGKLLDIHAHTIQKVCQQYDRSRSAKRKPWLRWRGRKSLGWVPFNTGHVSFDGKTFKFRGQPYETMHLRDLPAGVKIGAGSFNQDSKGRWYINCPVEVATANRAPLTRVGIDLGLKDLATFSDGRPSAEMPRLYRKSEATLATAQRARKTKRTRAIHAKIANRRKDFMHKLSCALSKEYGLIVIGDVSPSKLARTRMAKSVYDAGWSDLKRMLSYKSIRNGGSTLEVSEHMSTQTCSSCGAIPPERPRGIAGLGIRDWQCGDCGAIHDRDVNAALNILRRGQASLVEGARP

SEQ ID NO: 52537 - protein, 359 aa, unknown
  TnpB Polypeptide
LYPNKEQRVYFAKCFGCVRFIYNRMLSDKIEYYKENKQKLNNTPAQYKKEFEWLKDVDSLALANAQMNLQTAYNNFFKRPEVGFPKFKSKKNHNYSYTTNNQGGNIYVSDRYIKLPKIGLVRVKKHRDFEGLIKSVAVSQNPSGKYYVSVLVDQEEKEKLPISNNEIGIDLGIKEFCITSDGEMVKNPKYLGKSEKRLRKLQKDLSRCKKGSNNREKCRIKVAKQHERIVNQRKDFLHKLSTRIIRENQTIILEDLKVKNMMSNHKLAKSIADVSWSEFTRQLEYKANWYGRKIIKVDTWFPSSQICSNCGHKDGKKALSIREWTCPVCGTHHERDINAAINILNKGMKMRTAGTVGIA

SEQ ID NO: 52538 - protein, 285 aa, unknown
  TnpB Polypeptide
VTTASIDNNLYSAIQNQAIREAKSDHNKDGEVRYRESQPFAVNNQNWEIDTTENGTVVVGFPCISQWWYTPIEVYDDIADPVNQLVKGGAKKTRLQVYRRGDDWYCTFNAEYDTDTSGETPIGVDIGERHILAVTAYGEDESMLVSGGEAKYVRRKYRSLRDSLSEAGALRARNRVGDKERRRIKDLNHKLSRRLITFAEQFENPVIRMEDLEGIRENSSWSGVHSWHFHQPNSSSRTKPNALVSVSRRSMRTTRASNARSVVRWEPVMATTFGVRSATVGDTPT

SEQ ID NO: 52539 - protein, 419 aa, Lyngbya sp.
MLTLTHRYRIYPNTTHEQQLIEWMEICRGAFNYALREIKDWCESRKCLVDRCSLEREYILSAEMKFPSEIQQLNNLPKAKKEFPRLGKVPSQVLQQTIKQLHRGWEYFQNRGFGFPRFKKYGQFKSLLFPQFKENPVTNLHIKLPKIGAIPINLHRPIPAGFVVKQVRILRKADRWYASISLQCDVSVPDPTTHGHPIGVDVGLEKFLATSDGVLVKPPKFLKGLQSELKLLQRRLSRKQKRSKNYEKQRLKVARLHHQIDNTRKDFHYKQAHALCDAGDMVFMEDLDYRIMAKGLFKKHTLDAAFGQFRTIVKYVCWKRGKFFAQVDARGTSQECPECGGEVKKNLSVRIHNCPHCGYKTDRDVAAGQNIRNRGIKLISTVGQMGKETACADVLPGTVKNQSRQVSKSRKGKTRKTKL

SEQ ID NO: 52540 - protein, 422 aa, Actinomadura sp.
VFEAEVEMRRTFKFLLRPTARQVGSLSACLEDHRTLYNAALEHRRTAYRSAGAVVRYGDQSAELKDIRAADPDGQGRWSFSSQQATLRRLDLAFAAFFRRLRSGQNPGHPRFRGRGRFDTVTWPKDGDGCRWDSQPRHPTATFVRLLGVGHVRVHRHRPVAGTIKTISVKREGTRWYVVLSCDDVPTEPAASTGTAIGIDMGVASLATTSDGDHVPNPRPLAASARRLSNAQRALDRTSPGSNRRRKAARRVAALHAKVRRQRLDHAHKAAIALVREHDVIVHEDLRIANMTRSARGTAEVPGSKVAQKTGLDRSILDAGWGVFLTVLAHKAESAGRELSAVNPAGTSRSCAACGHSAADNRLSQAVFRCRACGHVAHADVNAAVNILRAGLALREAAQAAQREAASARKRRSHNPPHRTRN

SEQ ID NO: 52541 - protein, 266 aa, Actinomadura sp.
VGMLRFFLHIGGRTSPPARTAGRPSDQGPAQPVRGDVATSRQCATGADLYRTTRAAAAPRRLTPSPGRSPAPLRPAQQRPDPATGRARAGCRTADALHKATTHLAARYETVVVEDLNVTGMLANRRLARAVADQGFGAVRRMLDYKTGWNGGRLIVADRWFPSSKTCSGCGGRKPSLSPSERTYRCDGCGLVLGRDVNAAINLRDLAASGAERQNACGGDVRPGPAGRPPVKQEPGTTPRVDQTGTAAAQATANWTADTHIRSHLR

SEQ ID NO: 52542 - protein, 562 aa, Actinomadura sp.
VSRADPEGFTRARPSALPVPRALWRPVPRAGASGPATTATTAAVPAAAAARTGERGGAARPPPAGLVDRHRDPAGRGAAARRHDVGAAAVLRHRGPAPQGVVRRRRTAAVGREREEGGRRVRRGRVGHVRRHRRAGPAAARPGGAAPPVRGNGLARPDGRQGRDGPARRAQRRPGQARQGARRAPGAGHDRVGHRPVRARLGAPAGGAVLPLRPAVGARGRALRGKQPARPRRPAAPHARRPGRRHGGGAGGRLPARRGGGAAGRRRRVGRRPGRGPGGPAGGPRQRRAARPARPRAAGDRVRAGRAAAGARPGVRREAARGRGERAGAAGAGRGQAARRPFQGRLPGAQGGPGRRATGATRPAASAAGAAATAARHAAAVLRAAACATPVRAAAARLGPGGGGSLKATTHLAARYETVVVEDLNVTGMVANRRLARAVADQGFGAVRRMLSCKTGWNGGCLVAADRWFPSSKTCSGCSERKPSLSLSERTFRCDACGLALNRDVNAAINLRDLAASGAERQNACGGEVRPGPAGRPPVKQEPGTTPPVDETGTVTAQAATA

SEQ ID NO: 52543 - protein, 266 aa, Actinomadura sp.
VMVTQAYRFALDPAPAQEWALRSHATGRCASSSGPARGGVWGFPGSRSADGPGTRFCTGAMRRGGRTVTLPRLGVIATHESTRKLARRIENGTARILSATVSRTAHRRHVSFTVQVDRAVPERHARPGSVVGVDLGVKTLLTAVDEHGGVIEIDGPKALRAGLRKLARLGKAHSRKQRGSSNRAKAAARLARHHARVAALRADALHKATTHLAARYETVVVEDLNVTGMVANRRLARAVADQGFGAVRRMSEYKTGWNGGRLVVAR

SEQ ID NO: 52544 - protein, 313 aa, Verrucosispora sp.
MGLRVTAGQRRRCIGLLRSAGDVWACVLEVNAWRRRRRDFPLVGYQELCRELAASGPGTFGDLDSTGARSVLRRFSDAWFAAAKRRKAGDATARFPRRRRALVPVRWYHGTFTVTGRRVRIPCAKGSRPLWVRLARDLPYPVEHIRSITLGYEGGGLFLDVTAEIPMTVYPPGEEPDPGRVAGVDLGIIHPYAVAAPAGQVLLVSGRGIRAEHRMHLTDTKARRRAVARRAPRPGQKGSRRWRHYRRRARLVEGRHRRRVRQAQHEAAKAVITWAVQQRIGVLHVGDPRGVLDLPAGRRHNLRLRQWQIGRLI

SEQ ID NO: 52545 - protein, 485 aa, unknown
  TnpB Polypeptide
MRHTTFRFALNPTPVQELALARHAGAARFGYNQCLRMVTDALAARKTNPHIIVPWSRYDLINAFNSWKQSEAAGRMFVVAPDGTSTKQVTGLGWRHDVSAQVFEEAAIDLGRNLAAYAQARIGGRNGRPVGFPRHKRKGRCRDSFRLRNKRGRGGSFCIRVGDGHSRSVRLPAIGTVRVHGDTRRLRRLIRPIAYVDPNTGNQELTPRAKILFATISRHGSRWYVSLNVQAPDLHLQRRHRPRSVQDHGGWVGLDRGLDAFAVAATVGGVEVGRWLSPKPLGRRLVGLRQRSRAAARAQLRSHNHAKAVRRLSRHHALIVNIRRSFLHEVSSQLVKTHDRLCLEDLAVANLIRNKHLARAIADAGWAELGRQLAYKQAWHGGQVLVADRWFASTRTCSRCGRVKDRMGLAERWFRCDACGLAMDRDRNAAANLAAWAERQHVQAPDRQAGGRVANAPGGKGAGRRRGDGATGPNEGGTDAHAVVV

SEQ ID NO: 52546 - protein, 460 aa, Mycobacterium sp.
MGRFEVPEGWCVQAFRFTLDPTQDQARSLARHFGARRKAFNWTVVTLKADIGAWHATGARTAKPSLAVLRKRWNTVKDEVCVNPETGQVWWPECSKEAYADGIAGAVDAYWNWQTSRSGKRAGKSVGFPRFKKKGRDADRVSFTTGAMRVEPDRRHLTLPVIGTVRTHENTRRIERLIAKGRARVLAITVRRNGTRLDASVRVLVARPQQPKVAHPGSRVGVDVGVRRLATVADEHGEVLEQVPNPRPLDAALKQQLRHASRARSRCVKGSRRYRERTTEISRLHRRVNDVRTHHLHVLTTRLAKTHGRIVVEGLDAAGMLRQKGLPGARARRRGLSDAALGTPRRHLSYKTRWYGSALVVADRWFPSSKTCHACRHVQDIGWDEKWQCDSCSARHQRDDNAAINLARYEDTVSVVGPVGAAVKRGADRKTRSDRAGGREARKGRSRKAAEQPRDGVQVA

SEQ ID NO: 52547 - protein, 453 aa, unknown
  TnpB Polypeptide
MPGSDRYKECLFEWLTAHAPLWNQITYRRRQQYFDEDGNVWDAEYTDLYDQYAPILGKATCQQVARKNSEAWRSHFRLREKYHSDGSSVTEKPSPPGYWGNRDDGYELHGLVRNDLYTFDWGEDRSTLEFGVGDVLEDRYDFEHNERLTLEVRGNPHWRGDDSRVALIYDEYADQLRVQHPVRIQSDDVQTQRQAAFTHTLNRENTTQSAAIDVGANNTLALVTEDGETAVYHARPEFDRFQTQSDRIATLHSDLPDGQWTSTRIKRIYADRSRKRDHSRDAAVKHAAEWLLARNVDTVYVGDLTDVLETHWSAAVNEKTHAFWSHGELTDRITLTLGDVGITVTEVGEYDTSSECPACGSETVMREGDSFRCHECELDAHSDIVGAWNMLQSEVGPMARPAALSAERGRDASHEEGAYWQWNDHAWIPGSVGEQSWSVDQPSVSKPASSQPG

SEQ ID NO: 52548 - protein, 510 aa, unknown
  TnpB Polypeptide
VKFYDTVTRYRFTTEEGVDVDSVSADLTQMIFSMAEAEREVLASQKFHDLALKVLKGDRPTGSLNSWGRKRLSQYNFSFHKYNMNEILVTNVVSVLEAYAVSVGLFQVMSTHTKETKPERILTHYRDTYPGAPQPTSGMVRAHLRRYHIKGERKASLPGVSAKLNLAVCDTKFSPKSFRDENDPLSIIVQVRTPNHGLTKICLRLPENTERFSEGRACRPTIRLNNKGQVVFDIAIEHEIDTRQTKRIMGVDLGKVEPFVATVIDPKSNHRSAPYHTNYKRRLGLLVKKEQQRSNLSAHLHKRADLCDKYNRTDHADVLRTEAKRVSAKATRIKHEISQCIASQIVSIADQNDAHIAVENLSWLDAKGGRWPHAEIQQRIEKTAKRYGLKVIKVGAKDTSKTCSHCGGKVSNNSKTRVGTCTNCGFSLDRDVSASREIALRATSPSSRTRERMRSLLRQRQEIRSSTATRQSKPVTALSGKQGHTGTSGKDPEATLIMVRENLDSRESPT

SEQ ID NO: 52549 - protein, 362 aa, Escherichia sp.
  misc_feature (85)..(128): Xaa can be any naturally occurring amino acid
  misc_feature (286)..(289): Xaa can be any naturally occurring amino acid
VKRLQAFKFQLRPGGQQECEMRRFAGACRFVFNRALARQNENHEAGNKYIPYGKMASWLVEWKNATETQWLKDSPSQPLQQSLKXXXXXXXXXXXXXXXXXXXXXXXXXXXXXXXXXXXXXXXXXXXXTPVHPSASMIGLDAGVAKLATLSDGTVFGPVNSFQKNQKTLARLQRQLSRKVKFSNNWQKQKRKIQRLHSRIANIRRDYLHKVTTTVSKNHAMIVIEDLKVSNMSKSAAGTVSQPGRNVRAKSGLNRSILDQGWYEMRRQLEYKQLWSGGQVLAVPPXXXXTSQRCACCGHTAKENRLSQSQFRCQVCGYTANADVNGARNILAAGHAVLACGEMVQSGRSLKQEPTEMIQATA

SEQ ID NO: 52550 - protein, 236 aa, unknown
  TnpB Polypeptide
MSSGMRIKCNESVPTINNDSEIYYDGINYYIIIPYEKHISNIDCKSWFCASDPGNRKFQVIYSPDDDEHIMLGERCSSKMYDYLLYLDYLTSKKCNIKNIKKTLLIKKLRIKINNLQKELHYKVANYMCNNYENIYISKLTKNNDIIKKKNRCINKSIVRNMVVLGHCKFIERLKTKAEEFTKTKINIIDEHYTSQECLRCRRKTKTKKELYKCNYCNYMIDRDILGSVNILLKNL

SEQ ID NO: 52551 - protein, 431 aa, Streptomyces sp.
MGRRDVQPGLVERQGGHRARLALTPAQVAVLDRQAHAARTTWNLLHDWWTMLPKAKRSLAAADAVIRQGRAELDWLAVLPAQAAQAVLKTYFRAWKNCREGRAGAPEFKSRIRTRMSIDIPQGRDLHVVRVHRRWGMVNIPKLGKVRFRWTKDLPVGKGAGKKNRITGARLVKDALGWHIAFRVQTMEEAPAGHCGPEVGIDVGITVPLALSDGARAEHRPWLSQREEARLLHFEQRAARRKEQRKKGERTSRRLHATYDQIARIRATAKRRRGDWQHKTTTALADTYGTVVVEALHITNMIHSAKGTVEEPGRKVAQKAGLNRSILGEAWGRTVELLAYKVARRGGALAEVPAPGTSQECSQCHTVTPGSRRSQAEFVCQNPACGWEGNADHNAARNVLHRYRTGHALAPAAGRAVVRRASHGVKPATAR

SEQ ID NO: 52552 - protein, 250 aa, unknown
  TnpB Polypeptide
MLTTRTLSINFSKETVEIEPAGLIGIDRNLDNVSLASSARSTERFDFSTATETKAMYREVKSYFKRNDARVRKEIYSKYGAKQKDKVQQILHHASKQIVMQAKAKKFGIIMENLTGIRKLYRKGNGQGREFRGRMNGWSYYELQRQIEYKARWEGLPVIYVNPSGTSVKCSRCGSRMARIPEENRKLTCAKCGFNVDRDVNAARNILARGLRFRPIASASEAMVWESETDGNPSVDADELTRRLTIEPTS

SEQ ID NO: 52553 - protein, 378 aa, Epulopiscium sp.
MKTIIKGYKYRLYPTDEQKEQINKTFGCCRFIYNHFLAMRIELYKAEQKSLSYSKCSSLLTQLKKEKEWLKEPDKCSLQNSLKDLDTAYQNFFREIKKGNNNQGFPKFKSKRNNNKSYKTNFTNNNIELYFTNNQVKLPKLGWVHCKLHREFTGKILSATISQVPSGKYFVSLNVECKHTQLPKNNNAVGLDLGISDLLITSDDEFIENDKLTYKYEKQLSKLQRQLAKKEKGSKNFHKQKARVARLHEKIANIRKYNLHRISSRIVKENQFIFSEDLNVKGMVKNRNLAKSIHDVSWYELTRQLQYKSDWNGRVYHKVDRYFASSQLCSSCGYKNTETKNLNVRTWICSECGSNHNRDINAAINILNQGLKDLEVIL

SEQ ID NO: 52554 - protein, 279 aa, unknown
  TnpB Polypeptide
MKTLKLRIKDKHTNQLNILAGSVNFVWNYVNELSSKHLKRTGKFFTAYDLAAYTKGAGEYLNLHSQTLQAISEVHAKSRKQFKKAKLNWRTNNPKAKRRNLGWIPFKKTAIKHLATRQSGKKSLKSTIQLSLAKCKRLTIDLWDSYNLALYNINTCELVQDARGHWYACITVKEFPKTACGSGRVGIDLGCKDAAVSSDGDQLQTKVTHQYAEKLATAQRAKNKKRVKAIHAKIKNTRKDLTHKFTHKLVKANNLIVVGKIKSTSFTKGKLAKSVYDAG

SEQ ID NO: 52555 - protein, 437 aa, Chloroflexi sp.
MGMSRKPEKETQQDKKKRKRKKRTQQTLTRAVTQIRLIEANPGKLDALDQLVGEYQALTQQYVTLFTTELEPNRYAEPMGATTLSERWHRVAIQQAAGIAQSWRSNRENAYQAYLEDLTDYAEDQARQTPDPKRKEPFWKEWTTPILRVPCIQANVNVVVLEPSADSTFDYWLRISTLDTGHPLRVPVKLAPYHKKALSGHTINTSTALHKRGGVWWLTLSFDEDVPQKTEPEAPCVGVDVGIANFITTSTGKTYGSFQGNLAKKHKRDREKRRRKAKLRACLEKKGVPKEQLPSPSSASGQRLGRQVRQDINRAVNEMVADHAAARIVYEELIWGISLSNLPGPRPSGAWRRIRSRRPIRRRNVLAAITSIALIDRIRRRFVVSSVAMRTMPITTLLGIWPDAGETRNWQPAKTKPRSKPYCASGMPHGRRNRGHL

SEQ ID NO: 52556 - protein, 587 aa, Chloroflexi sp.
MRDSRTHQPLTYDVRLPNEAQADALRLLDASRAVVNQALAILWPHLDEFATDRVGPAWKQVGKYIGSPSPHGDRQWRCVSEVVGRILRQQAERKKAFDRVLPILSDGFIRPKTEKRPAGKNRPAIKEAITALQKSLEEEETSFVALQNVIEQACNFFFQQDRFPSSYEELQPIPLLQVGMLTYAGDDGGEKGQAYRLALDLDAGVAQFRFRYPDEVGVWQWRQADTIIPLPDAVRERLRDGDLMAPALREEHRVDGERFAVLDFIIEVEKAELPTWESVERVLGAEWGIHTLLTATAVDEHNEQVGRPLFLNTGGFDGRQARTRRQIDELKKKVARYEELRDALPEDHAKRAWFNQKLILFRREIDRCWRKYEQRNRALAHLASNVLVLLCQVHGCSLLSMESLKTLKTTGRGRGVRGRWRNYRNNSTIRGEIWRLLRYKYHLIGLRFHTEQPRGTSHTCPRCGAPAKTYREPSDRKQAVKWGRWMHCDACSYNGDRDYCASVNIARLGIAYLVQMKHTGRAHSYSISDPRGKPVSYTGTGAVLLLPPTGSHARPIVSGKICYYPGWLGSAFLQSSQKKHIFLRLCG

SEQ ID NO: 52557 - protein, 387 aa, Blautia sp.
MWKLLKSFKTEINPSEEQKVKIHKTIGTCRFIYNFYLAHNKELYDNGEKFMSSNRFRVWLNNEYLSEHPEYSWIKEAYSKAVTQSVNNGQTAFTRFFNHESAFPKFKKKGRSDVKMYFVKNNPKDCRCERHRINIPSLGWVRIKEKGYIPTTKDGYVIKSGTVSMKADRYYVSVLVEISNNKIADNSNAGIGIDLGLRDFAIVSNGKTYKNINKSARLKKLEKQLIREQRCLFRKYENLKKGEVTQRANIQKQKLKVQKLHHKIDNIRTDYINKTVAEIVKTKPSYITIEDLNVKGMMKNRHLSKAVASQKFYKFRTKLQIKCNENGIELRVVDRWYPSSKTCHCCGAIKKDLKLSDRIFKCSCGYVEDRDFNAALNLRDAITYEVA

SEQ ID NO: 52558 - protein, 418 aa, Glycomyces sp.
VLLRYRFRLYPTGPQRAALARNFGCARVVFNDAVAARRRAHAEGMPYPATAVLSKSLITEAKQAPERAWLGEVSTVVLQQALADCDRAWKNFFDSVGGKRAGVRMGPPRFKKRTAVQAIRFTRNARFRVLESGRLRLPKIGDVKVAWSRELPSEPTSVTVAKTATGKYYASFVVSLDGDETLGPVEAECGIDLGLNDFAVLSNGRVIENPRFFRKLERKLKKAQRVLARKTKGSANRAKARAKVARVHEKAKHQRDDWVNQQVAKIVAESQGIYIEDLSVKGLARGRGAKSIHDAALGMFSARLESKAARAGRSFVKVDRFFPSTRLCSTCGVLAGPKGLDGLRVREWRCECGAVHDRDRNAAVNILREGRRVAAGQADTVNASGGQVRPGMPGTARNTRVAGQNEEPTRTRLVSTSR

SEQ ID NO: 52559 - protein, 247 aa, Glycomyces sp.
VAKVGDLKVAWSRELPAEPSSVTVVKTVTGKYYASFVVAVDDGAELLEPLGDPDAETGIDLGLKSFAVLRGGKVIESPKFLRTMERRLKKARRSLSRRQRGGKNRQKARPALARLHEKARNQRDDWLNKQVKALVSENRALYVEELHVAGPAKSRMAKSVQDAAFGMFLSRLEAKTRRAGRTFVKIDRYFPSTRLCSACGALTGPKGLDGLGIRRWECGAFHDRDANAEIDIRREGRRLVAAGHADT

SEQ ID NO: 52560 - protein, 768 aa, unknown
  TnpB Polypeptide
MNLTSLRFVEEVTLHKLSHFLPAQNPLKDFVHHNTLHAFQDKDFFTALQESSEIFGYKTFLPLSDFRKKLKSNKINAAILDKIIFEKKGEDNFFTWKENVLHKNYDEAVYPKIGKLRSLWKEKYAINLDKSSHGILFRILCSYLDQGISVWTFPVHKDGFLASIKELESNGVFSIFSTARAKKLLYENTSIYKLLQIIVGEGLYFENYLFDQQFSHPGWSGMIATLENNPTSLLDERKITLKEMITFELLLEIDTLDQKFGENWEPLITKINFDAENLFSQSPYSEYFEVLSIWQEAFEWTFYNQALTGLQDKTGVKISEETTKFQALFCMDDRECSFRRHIEALEPSVKTFGVAAFFNFEFFYQPINGKFFTKLCPAPVTPKFLIKELPRKKKSAKDYHYHKKSHSLIFGWLISQTLGYTSAFKLFLNIFKPSMSPATSASFKHLNKKSQLVIENTNPEDKIDGLQVGFSIEEMANRVEGILKTIGLVKNFAPIVYVVGHGATSVNNTHFAGYDCGACSGRPSSVNAKVLSFAANHLKVRDILAERGIIIPKDTQFLPALHDTTRDEIVFYDETYLSEKNKIFHVKNSKIFTNALANNAKERSRRFDTINSDESISKVHEKIINQRVDFQHKLSTSIVNKYDTICMENLAISNMVKNHSLAGAILDAAWYQFVFMIKYKCDWYGKNFLQIGRFEPSSKMCTCGTINKRLTLDDREWTCDSCGASHDRDILAANNIKNFALRNAGWGSPKADVELPTLVGARKRQVAI

SEQ ID NO: 52561 - protein, 370 aa, unknown
  TnpB Polypeptide
VILLEKGFKYRIYPNKKQQELIQKTFGCCRYVYNYFLDKRITEYKENKKSLSFYDTSKMLTQLKKENEWLKEPDKCSLQKTLKNLDNAYQKFFKEHTGYPKFKSKKNRHQSYTTSCSNNNIRFENKHIKLPKLGCVKIRDKQIPQGRILNATISQEPNGHYYCSLCCTDIEFSQYSKTNKNVGIDLGIVDFAILSDGIKIKNPRFYEKSEKKLAKLQRKLSRKTIGGSNWNKARIKIANLQKHISNQRKDFLQKLTTNIVKQYDIICIEDLDVKPMKETESNVRNKHVIDVSWSEFRRMLTYKSTWYGKILSVIDRYFPSSQICHCCGHKDGKKSVEIRYWICSNCGSKLDRDNNASINILNEGLRILSV

SEQ ID NO: 52562 - protein, 302 aa, unknown
  TnpB Polypeptide
LQDVSNNVAKQAVKDACDAYKKFFKKLANKPRFKSRKRSKPSFYNDNNKLKVKKMLVLIEKVGWVKTSEQLPINTKYVNPRVSFDGKYWYLSVGIQQKHVHNDLTDNIIGIDVGVKELAVCSNGMVFKNINKTKTVKKIEKRLRRLQRKVSRKYEMNKEGNRFVKTCNIIKTEKKIRLLHRRLMNIRTNHIHQTTNAIVKTKPSTVVMEKLNIKGMMKNKHLSKAIQNQKLYEFKRQMKYKCEFNGIKFIEADKWYPSSKTCSKCGQIKKDLKLSERIFRCDCGLEIDRDLNASINLAKLAN

SEQ ID NO: 52563 - protein, 202 aa, Clostridium sp.
  misc_feature (29)..(29): Xaa can be any naturally occurring amino acid
DIEAFENTNNHIGLDLGIKEFCISSCGEXIENPKYLKKSLNQLAKLQRELSRKTIGSLNRNKARLKVARLQEHIANQRNDFLQKLSTKLIKENDIICIEDLQVKNMIRNRKLSRLISDVSWSEFIRQLEYKANWHGRQIVKVGKFFASSQICNKCGYKNEEVKDLNIREWICPSCNETHDRDINASINILKEGLRIITIQNK

SEQ ID NO: 52564 - protein, 445 aa, Hydrocoleum sp.
MVAHYILLCYNYTIITIEKPQMLLAYQYKLLPNNQQKQRMSKWLDMLRYQYNYLLADRFDWWQNNRCPINACPLITSIPEPREQPEYYGQKRSLVQLKKDRPWYQDIHAHVLQEMVKRVDLAFKRFIKGDANGKRSGKPRFKSQNRYRTFAYQEVKPDCIQGNKIQLPKLGLIKFIYHRPIPDGFKIKRASITKKADGYYVTLTLEDKSVPDVPTLDIKPTEKNSIGIDAGLEYFVACSDGAMINPPKFYRQSEEKLVKLQQKQQARPKGSKARRKLNQQLAKLHQKIARQRKQFHFEVADKLVDKADVIFVEDLKVANMMRRNKPKQDENGNYLPNNQSSKSGLNKSFADAGISGFLNEILPYKAAKAGKKVIKVNPAGTSQHCSNCLAKVPKDLSDRWNICSNCGTFLPRDWNSAILIKKVGLDIGLLKNANSRKGRRSSHCS

SEQ ID NO: 52565 - protein, 493 aa, Burkholderia sp.
MRAPRARAGPQPRPARAAHPSCRRETAGRPGGPSRRSAPSPRRRCRRSAAKSARRRRRRTRRRSFRCRARWPRRRRRCRPRPRARRRTSGSSAGAGWAATVRRRGCQGWRDDSSVAPRNPVTDGGKERSALDRQLLPRVRMAGMILVYRYRVKSLNGLLNKQSRAVNYVWNFCNDTQKHALKWSKKWPTGFDLNVLTTGSSKELGIHSGTVNATCEQYAKSRSQRRRPYLRYRGRKSLGWVPLKGRDLKREGDAFRFAGNTFRVFNSRPLPDGKIRDGTNFAQDARGNWFLNIVIERPDVPARPIRSGVGIDLGLKDFATLSTGEKVAHDRFGRRAADKLAKVQRARKHKRHVAKLHAKVANARADFQNKLALDLVRRFDYIAVGNVSAAKLARTRMAKSVYDASWSSFRDKLRYKAMAHGATFEEVDESGSTQSCSSCGSKDSTTRPKGIAGLRIREWACSGCGVVHDRDTNAALNILRCGRASPGVGIASL

SEQ ID NO: 52566 - protein, 338 aa, Escherichia sp.
ATETQWLKDAPSQPLQQSLKDLERAYKNFFRKRAAFPRFKKRGQNDAFRYPQGVKLDQENSRIFLPKLGWMRYRNSRQVTGVVKNVTASQSCGKWYISIQTENEVSTPVHPSALMVGLDAGVAKLATLSDGTVFGPVNSFQKNQKTLARLQRQLSRKVKFSNNWQKQKRKIQRLHSCIANICRDYLHKVTTTVSKNHAMIVIEDLKVSNMSKSAAGTVSQPGRNVRAKSGLNRSILDQGWYEMRRQLEYKQLWRGGQVLAVPPAYTSQRCACCGHTAKENRLSQSKFRCQACGYTANADVNGARNILAAGHAVLACGEMVQSGRPLKQEPTEMIQATA

SEQ ID NO: 52567 - protein, 411 aa, unknown
  TnpB Polypeptide
LIKSYIYIPHKLTKIKEETLDEMCLEFMKVCNDFTKLLPSIQKKRVLKNDRVKWSLPSTTSKDNAYNKWVKNGTIKSNLNSLAIHSAKVEAVGKFKMWLEDKTAEKPLFKTPFIDFNNQSYFIIRKNENTFILDVPSFKNEKGYPRLLIPFNVDSNRSLSKYLKKSIIIGERKRADELKLSESKYANSHIIIPFDDGINEPDEYTPHTFIGIDRGINNIIALSVCDNSGKVLRTKLFGGNELRHYRTKHQHRREKLQAIYGKDKGMIRRTLGKHESKFAKTLNHQISHEVVEISKKYPSPVIVIEDLHRFAKNLRWSFYQLEEFITYKAKINGIVTKKVKAQYTSQTCSRCGHVDKANRYGVKFACDKCGHRDNADINAAINISRSYINEVAGKQVLPVTGGVSLPLSPAR

SEQ ID NO: 52568 - protein, 381 aa, Bacilli sp.
MYKAYKFRLYPTNNQKNTINQTFGNLRFIYNYYVNKITTQGYKSVYNNYNDCEKELLHKYPFLEQTEKNLIKKVLYRLDDNYKKNQYKGISTIKYKSKYEKNSYTIPASYTYNKDLKVKKCNIIPNLPNQTLELPQIGSLKIRGYKNKLKVVGEIKNVTITREQTGKYYIIILCNIPNFPKVNPNTIIGLDIGIKKLVTTSDGLVYTNNKYINQYETKIKREQYKLSKKQKGSKNYYKNINRLNILYAKLRNARKYTTHKITKEITDNYDIIVTETLTTKKMIMNKDSNLSKNIADATFSEIIRELEYKSKEKGKYLYKIKAYYPSSQLCSICENRAKEYKDLTKRVYDCSYCQNTLDRDINASINIMFEGLKIYLKDQFS

SEQ ID NO: 52569 - protein, 385 aa, unknown
  TnpB Polypeptide
MGCENIKIKSKKIRIYPNQTQREILRKWFGTSRYTYNKTVDYLNEPDTIASWGSIKTGIIHSLPDWADKTPYQIRSVAIRDCCKSFSACKLKNKGVNPNDWHKVKYRSRRKTVQSIYVPKTAIKKTGIYPKYLGEMKLSEVIPDNIMDSRLTLENGRYFLVIPFKQETIPCENQTRVVALDPGVRTFQTFYNPEFSGMVGEGDMGRIVRLCSHLDSLISKRDKSTSKRKSRINKAIKRMRNKIKDLIDEIHHKTARFLVDNFDIILLPSFDVSEMIKRAKRKINSKTARSMLTWAHYRFKCFLKSKCEEFNKVLLIVNEAYTSKTVSWNGKINYSLGGSKIVRDKDHCVSRDINGARNIWTKSVSRILETLGDSPSGSNTCALLA

SEQ ID NO: 52570 - protein, 419 aa, unknown
  TnpB Polypeptide
MKKGNVYRIYPTEEQKIMLEKHFGACRFIYNRFLHIRQTMYDKFKISITRTCLDEQLPIYKETYPWLKEVNSQSLQQANKNLDTAYKNFFEGRADYPTKKTKRFNNSFQVTQRYKINLTTSQIYLPNIGWIKVKIHRELLSSEFIEKDFIKTIVNEGVVLEHDQNSNFLRTVTVSRTPTRKYHISILTEDNIECPEPQQYTQATTIGVDVGIKTYASLSNGEKIDNPKFLKSSLQRLKCLQRRVSRKHKGSKNRRKAVQKLAKCHEKVSNQRHDFQHKISNKLISENQAVAVETLNIKGMVKNHKLAQVISDSAWYSFVSKLEYKAKWFGKTVLKIGMFEPSSKNCHVCGYHNAELTLKDREWQCPECSTLHDRDTNAAINIKKFAISAYQITAGTAGRACGVAGAGQGKETGSLTALA

SEQ ID NO: 52571 - protein, 429 aa, Bifidobacterium sp.
LKATYGNVCEELGEDVDRNLFTNVLDHEGHFTVPVVGHTRFCYDQSNDNSCRRGELDADTGVVTYRRMAVADRFVDITLRIAQFTARYPDAVRVSRPDMRKDSTGNIVFDVVVFVLRPLMQDVSKSAHAVGFDLNADWHGGISGTRLSCNGHVSRPLVVSRNTKRQQDKLERIYVQYRRCLDRLDRLMPWQRASDPDNPADVAAHPKWANLYVQSLALRDKMYRIKEILDWRYAHDMLDHAKPGELVAVERLDPFDNAGRYEFRHGSQLDKLDHVAAKRGQRVVKVNPAHTSDTCPWCNTRIGNLGRNREYECPRCHRTVPRDYGSAINIAKRGCAYLGHKHVRPTPKKGRPTPKRPKLIQKRHSGAAHEALSGTGKGPVSFHTERTAPTPSSGMATATVQGKRKRATPGRQLGQCYDAAAAGTATTSS

SEQ ID NO: 52572 - protein, 384 aa, Bacterium sp.
MKAEKGIRNTTIKVRLLPTPAQAELFEKTFGCCRWLWNQMLADQEKFYAETDVHFLPTPAKYKKDAPFLKEVDSGALATVHQNLRKAFRHFFANPQAYRHPTYKKKKSSRPSYTVFCQYYPAGKGSNIYLTKSGIRLPKAGEVKAKLHRRPLHWWTLRTATVSRTPAGRYFCSLTFSYPVKAPRPVLPTAETTLGLNYSLSHFYVDSEGNRADPPHWFRASADKLARLQRQLSRMQRGSKNYQEQVRKIQRLHEHIANQRKDFAHQESRRLADTWDAVCVQDTDLAAMARTLRLGNVLDAGYGLFRLFLQYKLENQGKAYIPVERYFPSAKTCHHCGAIYHDLPAQARRWTCPACGAELDRARNGAENLRDQGLLQFYQTHGAA

SEQ ID NO: 52573 - protein, 286 aa, Pseudomonas sp.
QQGQPDRKLSTNEEHLAFLQGATREYLEEHTMGVDRGVAIPVCAGEQTYDFTHSQKKNMSKADRYIKRLQRKLARQQKGSNRRAKTKHRIAVHHAKKANIRNDFAHKTSRLLVDSSAKIIVFEALRTARMTRRPKAKQDEQGRFISNKAKQKAGLNKSILNVGWHVIETYTYYKAYSSSKAVFKIPAPTTSQECAKCGHTHPDNRKTQALFVCGNCGNTDNADHNASLVIKKRAINLILDTGTVLSGDGVLRTQSDSGRGGNRKTGRAKSSTSSAQRSVKKEKLAA

SEQ ID NO: 52574 - protein, 456 aa, Halapricum sp.
MVEANRTVVIPLKIPEGSRSDFHQTILPYAYCQQEAVDHCWPDTPTRPDDLQTSKRDAESALYDRLREDTDELLNANLVQKAIKDATAAIGSCKTSWENGDRISKPDFYDRELPGYTMTYDKRAATYSRYEATFSTLTGTVTCRYELPAEIEGTPYGEYVLDRRWSFSTSKLVFDGEQFWLHAVMQRRFGDDPVYAPTSDDSGSDTHEDTHRVLGVDLNVDGATAVTSTGQFYGNADALNAYRTEQEQLRGELQQTGTRSAHLRFQQRRGVEWRYYDQYAHHVANSIKQEALRVRATHVAFEELTRIRKRISNLPKFQHWLFNKVQMYTAYKLERYGVTVETINPADTSRACSRTDCDCVDEDNRDGKHFECLACGYTVNADYNAAKNIGFRYLSDNLSNPAGRTRSSGQATSQLALVSGTLSPIGDFAEHEWVSTDKPHPQQASESSDSERSRVG

SEQ ID NO: 52575 - protein, 389 aa, Proteus sp.
MLRATKVRIYPTPEQAEYLNAQFGAVRFAYNKALHIKKHIYKHYSVSLSPRKELKPLLSVAKKSRKYSWLKDYDSIALQQAVINLDVAFPNFYNPKLKARFPAFKSKYGKQSSYHCVGVKVLGNAVKIPKLSPIEACIHREITGKIKSITLSRTASGKYYASILCDDETETPAKPALVTSVTGLDMGLSHYVIESNGDKVANPRHLINASRNLRRKQKALSRKKKGSANRRKARLQLAGVHERVANARADFQHKLSRTIVDENQAVIVETLKAANMMKNLHLARAIGDAGWRGFISKLEYKAAERGVHVVKLDQWFASSKTCHCCGHKMPEMPLNKRIWQCPECGVDHDRDINAAINIRQKGILELQAAGLVVSAHGGQRKSVTQMVAA

SEQ ID NO: 52576 - protein, 361 aa, unknown
  TnpB Polypeptide
MLIYEYKLDGSKHQYAAIDEAIRIVQFIRNKSLRLWMDQRGISKNALQAYCAVLAKAYPFASCLNSQARQASADRAWFAISRFYENCKQHKPGKKGYPTFQHDNRSVEYKTTGWKLEPDGKHLTLTDGCGIGRLRLVGNPNQQVGAFPLKQIKRVRIVHRADGYYVQFAIKTERAISHIPSGKAVGIDVGLKAFYTDSEGNTVDNPRHYRKAEKKLKRLHRQVSRKQKKSSNRKQARKHLARAYLKVHRQREDFARKTASTLVSSHDLIAYEQLQIRHMVKNHHLAKSLHDAGWGTFLSWVKAYGLMHDVPVIAVAPQFTSQQCSVCGTLVKKSLSVRTHSCTSCGVVLDRDHNAARVTRN

SEQ ID NO: 52577 - protein, 340 aa, Erysipelotrichaceae sp.
MKHYYKVRVPKNEYIQNIISSVDLKEDVVYSFLKRIEFNSGFKYYVVITLRGDAPKRITLSEDGGHRTGVDFGTSTIATASNNEVHLEELAPDSVNYEKEIRHKQNLIDASMRKHNPDNYNKNGTVKKGKHKWKTTRRCRRLKRQVRVLYRKQSAYIKTSHHTFINKLLKNTSELILEPMNFKALQKKSKKTECKDEATAVKQKDGSLKMVRKYKRKKRYGHSIKNRSPGLMQADLKTKATQYGIPYYEIDIHQYRASQLHHDTGEYIKPTLSERFKTIEGHKVQRDLYSAFLICHTDDTLTAPDFKACHFDFPHFVKMQETLISNKKKCGHTMKSCFGF

SEQ ID NO: 52578 - protein, 270 aa, Candidate divison MSBL1 archaeon
MKSILTVKVKIRKDDRLIKTLRIYTRAIQFAINTAWRLGLKTRRRIHDECYHEIREKFKLQAQLAVCVISQASEMINNNPKSKPQVGKHATIRYNFPRSATIKGDWRELSLATVDGRVTVNLDIPEYYQKYLNWEVRESNLLFRSGELYFYFTLAKEVDTRPKRDDFKVLGVDLGVNKIATTSDGDFYGKEVKRKRGEKDRFVAELQAKGTHAAHNRLKAKSGEWKRFMTWRNHVISRRIVDKLDEGDVLVMEDLKNIRRTAKYNEWVHK

SEQ ID NO: 52579 - protein, 369 aa, unknown
  TnpB Polypeptide
MWAKHLNCAKLQAHIAKLRKRNPFWQLVGSQAVQDICQRIEKAYQLFFKHHQKGVRTPGFKKVKKYKSFTLKQAGYKFLGGNRLKIGQKVYQYWKSREIEGTVKTLTIKRTTLGELFMAVVVDSVSESQSKFETSRIAGFDFGLKTFLTVSDAAKIESPQFLKQSLNAIQKASRQHSHKQKGSANRERALKHLVRQHEDVVNRRSDWFWKLAHKLTDQFDVLCFETLNLKGMQRLWGRKISDLAFGEFLQILGWVATKKGKQIIFIDRWYPSSKTCFHCSHVLENLDLSVREWRCPSCQLLNGRDENAAKNICAVGASTAKLGDVRRARACNCCLTLESPCLDSRGVCQLHQWIHALLSLHSSVAVIGY

SEQ ID NO: 52580 - protein, 395 aa, Pleurocapsa sp.
MIVLEYKLKGKDKQFRRIDDAIRTAQFVRNKCIRLWRDNRGINKTLMFRHNTELRATYPWCHNLNSHACQASVERATRSIDKFYSDLKDSSVKKKSYPKFKKHSRSVEYKQSGWKITQDRKRLTITDKTGIGSFRLVGSRDLHFYQLEQIKRMRLIRRADGYYAQFSIQVDRNETRKKTGTAVGLDLGLKYLLADSNSNFVLPPKFLRKAEKRLKRLQRRMSKKYDKQRRKDKQSQSNNYHKSRIKLARQHLKISRQRKDFAVKLARCVVISNDIVAFEDLKVKNLVKNRHLSKSISDASWGIFRQWIEYFGKIFGVETIAVPPHYTSTDCSACGARVKKSLSTRTHICKCGCELDRDTNASINILNRGLNTLGRREFKAQGDEASMLPNASLVG

SEQ ID NO: 52581 - protein, 163 aa, Salmonella sp.
VKLEQANSRISLPKPRWIRYRNSREVTGEVKNVTISQSCGKWYVSIQTEYEVADPVHNAGSMVGLDAGVTKLATLSDGTVYQPVNSFKVNQRMLVTLQRQISRKVKFSHNWQKQKRKIQQLYSRIANIRRDYLHKVTSEISKNYAMIVIEDLKVKNMSGQNRA

SEQ ID NO: 52582 - protein, 408 aa, unknown
  TnpB Polypeptide
MEYSHRYPAYPTQQVAARLEHHIDIHRQAYNYTLYEYENVDADDIGSAYKHHYRLPGWKDEFPLFSEANSKALQRTVTRFYQNLDVLSEQKQNGNKVGKLNWKSPREFQSMTYSQSGFELKNTSGRHATLWLSKIGDIKIRYHRTIPVEADIKEVTVKKETTGDWFVSFGLETDDTDLPEEPALDGLDSSTSVGIDLGIRNYIHTSDGLTVDWLDLDDEYERLHREQRKLSRKQKGSNNYEKQRREVAKVKRHIRRKVLDYQHKITTWLVREYDAVFVEDLDVKGMLEQSYNARNKQDAAWRQFITLLEYKAELYGTHVVQVEANGTTKECASCGVETAKPVWVREHSCPSCGSECDRDANAAMNVLQRGFSELGLGWPEDTPVETALPTETTSVSAKRVIEAGSLGA

SEQ ID NO: 52583 - protein, 482 aa, unknown
  TnpB Polypeptide
MRMTKIIRFQIIPAEPAGEKENGLSFKEYYKILSILQKESQQIANRCVQLIWEYSGLESDYLKKYKEDMKEMPGPEKTKLIGNQKRKIAKKYLGYSNITSYCYSRLTKEFNHLQTGSLAGISREVCSKFRSESSSYKRGQKSIMSFRDNFPINVAKKSIKLSYDEKAHTYFASLGILSSSYKKELGIKKPLSFKMLVKDKNQKNTLNKIKKGDYSIAGSSILKKKTKWFLNLSFNFQSIPGKKIEGRTAGVYLGFNNAVIVLINGCSSSLVINGGEIERFREKIEPQRISILKQCANCRDGRIGHGYKKRTEPARNIGNIISNYRKSINHKYSKLIVNYAYKHHCEKIVIENLKGISEKSKYLKKWSYFDLQTKIEQKAKEYDITVEKASQAYLQCRCSHCGNIVFDALSRDEFDCPKCGHKDKFDFNTCRNLTVPNIDNVIKHQIKSQIEEKKAYEKQTEKTAEKYQEIEAKEEARKLDNL

SEQ ID NO: 52584 - protein, 417 aa, unknown
  TnpB Polypeptide
VRTLSSPNTADRGHIIRLDLTYKQTNACARACGVSRFTHNWGLAEWDRQYAAGGKPTANKLKKQFNAIKDDQFPWIGESPRDANSQPFADLGRAFSNFFASIAGTRKGRKVGRPTFRKRGINDSFYVSNDKFKVRQRGKRGVIRLPVIGDVRMMEPLRWQGKILSARVFRKADQWFIAINVETRIAKPHVHAHAIVGVDLGLKTALVPSSHSEPIDAPKPLKKALRKLARANRELHRRKKGSRNRNKSRINVAKVHQRTANVRQDWWHKRTTDLCRENQTVVIEDLAIAFMLKNRRLSRAASDVGLGMFRPMLLYKKAVYGNEVIVADRHYPSTQRCARCGHTKTGEEKIGLGVSEYVCAKCGYREDRDRNAALNLEQYPGLQGNWSRETRTSTDDHASTRQAKRSPSGKRNRRSGN

SEQ ID NO: 52585 - protein, 466 aa, unknown
  TnpB Polypeptide
MTIMRTAVIPISLSGGDYRIAHDAAHTAANLYNQAVDWVHAEWEAGRSPNKYDIRAFLTSIPLKDRPLHAHTTESIAYDLYEAIKTSRTNRKNGMKVRAPWRKKNYRPLSFSKGYGWKVKNDRLNLSLGRGRPGVSLPLPVVHDSDTGDSVPPEMWGEIQLCWNIDARRWSLHIPYDTERQQACGKNVTAVDEGIINPMALATWVDEKTINVTIINGREGRAIKRLRNKSVGALQHKLNKAKVGSKHHRRLMLAKKKIKAKANKALRDFDHQVARKAANHVIAHNSGRLVYGDVRGIEQRTKQRHSANRHQRQNLSQWSRGRQERYTNEKTGLEGEHLDEAGSTKTCPVCEARNRPTGRNYRCKNPDCGFVCHRDAVGVINILQKTIHGTYVPIGPDVNIRVTYLRAVERWSKNQRKAHRKVERRKAKARSSAQNRASSGGIPASKQTQAQSLTSPQGPDSLVVVA

SEQ ID NO: 52586 - protein, 370 aa, unknown
  TnpB Polypeptide
VKTRYRFRLYPTPEQEQALARVFGCVRVVYNLFLRLRTDAYREGHRIGYHESSASLTELKKTEDYTWLNEVSSVPLQQSLRHLQSAFVNFFEKRAAEYTRSAFKYDPTTKTLEVAKLGKLKVRWSRGFTSLPTTITITKRPSGRYFVTLCLDEPVKKLPKTGQAVGVDLGISRLATFSTGERVSNPRYLFRQRRKLARWQRRLSRRQRTSNRYARLKRRIAMLHERIGDCRNDTLHKLTTRLVRDYDLVCIEDLHVRGMVKNHCLARSLGDAAFGTFRRLLEYKCLRYGKTCVAVDRFFPSSKLCSSCGHILTQLGLSSREWDCPECETHHDRDYNAAVNILAVGHTDSQNGRREAVRPVRAAARKGASR

SEQ ID NO: 52587 - protein, 363 aa, Cytophagales sp.
MQSFKIRLELNDKQKTLTLQHAGVARHAYNWGLDTCNEAFKNKEKRPTSIDLHKKLVAEVKKKYSWYYEVSKCAPQQPLRDLDTSFQRFFKKVSKYPTFKKKGRKDSFYLEGNIEIKNNRIKLPIFGWIKLSEKIKDLKGVKNVRISRRADFWFVSFKTEAKKEKIRYAKNSFVGVDLGIKTLATLSNGMTFENKRPYKFYKRKLKIEQRKLSKKYQKNKSKKEQSKNYSKQQKVVAQLHYKIACIREDSLHKLTTYLAKNHVRIAIEDLNVKGMSKNHKLSSAILDGGFYEFRRQLTYKCEWYGSKLVVVDRFFPSSKLCSNCGHKKEKLYLSERIYSCEKCGLRMDRDLNASVNLAKHVVS

SEQ ID NO: 52588 - protein, 375 aa, Streptomyces sp.
LPERREQRRRKGFADSGRTYRLHPSPEQAERLQEWGHTCRAVWNMALEQRIYVHRQRGKTLRSGEQCRFLTQARRDFEWVADLPSQAPQQVLRHLDRAYDNYWNPDHPAEFPRFKKRTSRVAIPLPGQAVRVTKLNRHWASVRVPKLGEVRFRLTRSLGGEIRNVSIRADAAGRWSIAFGVRVPARWAPPNGKPPVGVDFGVKHSAYLSDEEAPRLMDRTLTDGEKRRLVGLERRRERQIKQAKQRNGGKYSNRLKKTLRANRGTEGQASAPPARLHAQAHHRPRQEPRPGRHRGSSRAADDQKRQGHERPAWNPCRPEVRSEPSRSRQHAGGTPTPARLQVPRLRIRPRPGAARRNLADVRRLPCPRRCITRQP

SEQ ID NO: 52589 - protein, 195 aa, Micromonospora sp.
VKLVVQVKLLPTPEQAAALEATLRACNAAASDVAVIAREIDCYRNYDLRRHAYHRRRKETRHTANINHAIAKSIVTEAARTGRGIAVEKLTGIRDRVRLRKPQRVTLHSWAFHQLGAFLIYKARRAGVPLVEVDPRYTSQTCAACGHRDKRNRPNQETFHCRSCGVVAHADHNAARNIASRGVASWGAVNRPHAA

SEQ ID NO: 52590 - protein, 421 aa, Micromonospora sp.
VEEERRVVKINHGYVRRLAPTAEQAAALDIQGHAARTMWNLLHGWWTWGGGRDRRPTLKQADEAIRQARKDIPWLADLPAQAAQQVLKTYVRAWRNCWEGRASVPEFKARLRSRMSVDVPQGRDLAITRLSRRVGQVRIPKAGVVRFRWSGPIPGVGREPGRTTGGRLVRDALGWHIVFRTEVEVGTPARHQGPAVGIDRGVNVALALSDGNDQHHGPWLRPKEAERLLRLERKAARQKRARNPFERTSNRLHRTYAQIAGLRARAKRRRYDWQHKTTTTIAGRYGIVAVEELRVENMTRSARGAIAEPGRNVRQKAGLNRVMLNEAHARTVELLAYKLAERGGQLLKVPAAYTSQTCSTCGHRDPRSRHGVVFTCTSCGHLDHADTNAALNILNAAGLGRVRTWSPAPVGCEASTTRRAA

SEQ ID NO: 52591 - protein, 346 aa, Micromonospora sp.
VEEGRRVVKINHGYVRRLAPTAEQAAALDIQGHAARAMWNLLHEWWTWGGGRDRRPTLKQADEAIRQARKDIPWLADLPAQAAQQVLKTYVRAWRNCWEGRASVPEFKARLRSRMSVDVPQGRDLAITRLSRRVGQVRIPKAGVVRFRWSGPIPGVGREPGRTTGGRLVRDALGWHIVFRTEVEVGTPARHQGPAVGIDRGVNVALALSDGNDQHHGPWLRPKEAERLLRLERKAARQKRARNPFERTSNRLHRTYDQIAGLRARAKRRRYDWQHKTTTTIAGRYGIVAVEELRVENMTRSARGAIAEPGRNVRQKAGLNRVMLNEAHARPLNCWRTSWPSGAGNC

SEQ ID NO: 52592 - protein, 444 aa, unknown
  TnpB Polypeptide
MQKQYNVTWDHCRNAMIHIGKKYSIDAVFALTKAEDIWRGIEKCLYNNGKTIHFSKYGELPCIRAKQINRGISMSVKDNGLKFKLKGNVFGIQVKDRFQTDEVCAVLEYLSRSEIINDKAINKFLDKAYCIDTYRPCYATLVPKFIRGKYRVYLHLTIEGKAKPKYDRFGNPRHKFGKGIIGADIGTQTVAYTSNTEVGLKNLSERGNSIQTSERRERLLYRAMDRSRRATDPQNYNDDGTVKKGRKTWKYSNHYKKLKAKHSELCRINAINRQLAINEDANHLRSLGDVFITEPKNASKLMKRTKDTTVNSKGKFHKKKRFGRSIKNRCPSGFQTTVERKFKTSGGIYIEVPNNYRASQYDHTADDYIKKKLSDRIYKLTDGTLVQRDWYSSFLLYCYDYRTKDIDKNKCISEFDKCYNKEKALIEWIKANKIKILNSGIKIA

SEQ ID NO: 52593 - protein, 486 aa, Bifidobacterium sp.
MSGENKKRRYHTPPGRMLKGIQVRLDPTPRQMGLLASHAGAARFVYNMAYSHIISQLHGLVRVNGDGKADWSMPALRRWWNEWKHELAPWWAENSKEAYTSGLQALSDAFSNYFKSRNGQRKGERVGWPRRKTKHHSIPKFTYTTGSFGLIDGDMCALRLPRIGRVHCFENLHKLVQPADKILALSVRQKHGKWYATLRVETDQPKPVSTLHGSIGIDLNCGDNILTTSDGLVVANPKYYQKTARKLARAQHCLARKKPGSKRRERQVRKVSRLQEKIACQRSNLRHKITHMLATTYKHIGIEDLNVKGMTRRPQPKENPDNPNHYLPNNAKAKSGLNKSILDVGFGEIRRQLEYKCHTSGAILHVIDRWYPSSKTCSGCGMVKTKLSLNQRTFICDSCGLILPRDLNAAININHIGSTPMLNARGETHETGSLTPVSEPVPSKHPTVYREGNAYRATRIRCKTRSHPSKNKTPGVLVSSQQKQTN

SEQ ID NO: 52594 - protein, 416 aa, Nonomuraea sp.
MQCVDHAHSVGGVKLVVQVKLLPTPVQAAALEATLRACNEAASWVAETAFANATYKNFTLRRHCYAEIKNRWGLGAQAAQHVIKKVADAYTVLRASLKAQTSGKRGAKRNLRDVLRPVVFRPDSAQPYDDRMLSWQIDSRTVSVWTTEGRLKGVAFTGSPGQLEALARYRRGESDLVKRNGTWFLLAACEAPEATPNGEPVDFLGVDLGIVNIATTSDGEIMSGRQLNRCRVRDRTLRSKLQRKKTKSAKRRAQRRRGKEARRTRDINHKIAKMIVAEAERTGRGIALEDLKGIRERVRLRKPQRATLHSWAFAQLGRSIAYKARRAGVPVVYVDPAYTSRTCAECGHMDKANRVSQAWFACRSCGFVDHADRWGHLPLERSREWGRLPQHPRSCVGVVATRGPVSGPCRPGTRDC

SEQ ID NO: 52595 - protein, 294 aa, unknown
  TnpB Polypeptide
MPKYKHKEKGRNISVFTSQQCKLKDGYIYFPKKANIEPLRTKVGNVCQVRIIPQCSCHIIEVVYEKECIKTSGLEPDSYLSIDLGLNNLVTSYDSLNHKSFIVNGKTLKSINQYFNKKRAYLMSFIGSRGISNRIGKLTLKRNCKVNDYLHKTSRFIVDYCVDNHIETIVIGNNKDWKQNCNMGKRNNQNFVSIPFEKLISQIQYKAEEVGVKVVITEEGYTSKIDHYAGEEMCHHDTYMGKRIKRGLFRSSTGKVLNADLNGAIGILRKVVGESFQQVVNRGEVVTPSRIYMV

SEQ ID NO: 52596 - protein, 413 aa, unknown
  TnpB Polypeptide
MRLVYKFFIDHTEQLDNLFKISNNLYNQALYQFRQRLDADGTWTWYNDMDKLMKQTLNLDGECNYKLLKAQCSQQILKVFDKNMKAYCKSIKDWKKHPEKYKGMPQMPHYRKRGGMFKLYYTNQSCSIKDGRIRLSKDLFVHIPQWEKYGECIKSFCQVRMLPNNRNVKVEIIYDKEIRQADVDKSKYAAIDLGLDNLATMVTSEGCTIFSGKYLKSYNNHFNKTLSHLQSIKDMQGMKRTTRRINRMYDKRDRYMEDAFHKVSRQIVDTLVQQKIGTLVVGYNAGWKQNADMGKKNNQKFVQMPFARLADYLQYKCEMIGIEFVKHEESYTSKCDALALEPIGKHEEYLGRRVKRGLFRSSVGKVINADQNGALNILRKVVGDSEFSRIVGSGHSLCPIRHRNPFMRNAGSM

SEQ ID NO: 52597 - protein, 398 aa, unknown
  TnpB Polypeptide
MIRCLKTDFKTSCEELDRLFACNRISALIWNKCLDIAREYRLSNGGAWISNSELQKELKNLYPLHSQSVQAVSDRYCDARKATKEARDKGLNTSYPWKYKHAYPTRWKQGIKIQDRQIILPLGTWNRHKLGYIQVEIPKSTVDFLKNKKIKIIDLIWDNRLRLAICFDDGKKAIKSKGDTYAGIDLGEIHSISAASEEGHAVIVTGRKLRSINRFRNKKLAEISKKQSRCVKYSRQWKKLQRAKRYMLRKSDAQVRDCTHKISKAFVDWAVDHKIKHVYVGNVEGVQRNTRRGPKRKRRSRRTSQKLSNWNFGKLLQYLDYKLELKGIELEKISEAYSTQTCPVCGQRHKPSGRNYRCSCGYTAHRDIHGAMNILSLGLYNDIRFITDIKKTKYLRSA

SEQ ID NO: 52598 - protein, 363 aa, Brevibacillus sp.
LHRAYKFRLYPNKEQATLINKTIGCTRFVFNHFLAKRKDAYEQENKTLNYNDCSALLTQLKKEFEWLKEVDSTALQSTLKDLDSSYKKFFKEKKGYPKFKSKKNPKQSYTCKMDIKIERNRIKLPKLGWVSFAKSREVEGRILSATIRCNPSGKYFVSVLCETESQLLPKVEQTVGIDLGIKDFAILSTGEKVANPKYYRKYEKQLAKWQRIQSRRQKGSTNRNKARTKVARLHEKIANTRNDFLHKLSTKLIHESQVICLEDLQVENMVKNHKLAKSIADASWSMFRTMLEYKAEWYGRRISIVGKQFPSSQLCSTPNCGYRNKAVKSLNLRSWICPHCGVQHDRDQNAAINIEQEGLRVLA

SEQ ID NO: 52599 - protein, 296 aa, Escherichia sp.
LRHQQAAFANFFAGRAAYPAFKSKRHKQVAEFTASAFKHRDGELYIAKSKSPLDVRWSRELPSAPSTVTISRDSAGRYFVSCLCEFEPVSMSVTAKTVGIDVGLKDLFVTDTGFKTDNPRHTAKYAKRLTLLQRRLSRKQKGSRNRIKARLKVARFHAKIADCRMDNLHKLSRKLINENQVVCVESLKVKNMIRNPKLSKAIADAGWSELVRQLQYKGKWAGRSVVAIDQYLPSSKCCSCCGFTMQKMPLNVRKWHCPECGADHDRDINAARNIKAAGLAVLAHGEPVNPESQHAA

SEQ ID NO: 52600 - protein, 405 aa, unknown
  TnpB Polypeptide
LKVTRTEQHIIKRSYFAWKLIDDLCFKSKNLYNYANYIIRQEFIKNGKWIRDNELDKMLQSHETYKELGSQASQKTLQLLDKNWKSFFVAIKDWSKHPEKYLGRPKIPKYKNVKNGRFILMLKNIQFKIENEYLYFSWKPLKSLNNKFKTNIKGKLMQVRFIPRGNDYVLEIVYEINVPECNTTSNRIIGIDIGIDNFATISNNIGIKPIIINGKGIKSINQYYNKKKAKLQSDLKIKHNKDWSNKLQQLTSKRNNKVQHFIHVASKKIIDWCVLYNIDTIVVGKNNGWKQESKMSKKTNQSFVQIPHALFIEKLKYKAENNGIKVIETEESYTSGTSFLDNELPEKKYYNKSRRIKGGLFRSNEGKIINADLNGAYQIIKKVFPNVFSEGIEGAGSHPIRLNYI

SEQ ID NO: 52601 - protein, 455 aa, unknown
  TnpB Polypeptide
MTFSGCYYFLADCHRDREHVMKVTQAYRFALDPTPAQERALRSHAGASRFAWNWALAKCIERYGAEGRWYSGAELHRLWNAEKKADPALAWWGENSKCAYQEAFRDLDRALRDFVKSRKGQRKGRRLGFPRFKKRGRCRDSFRFGAGVMRCERGTVTLPRLGTVKTHESTRKLASRIEAGTARILSATVSRTAQRWHVSFTVEAERDIPGHHPRPGSAAGIDLGIKTLLTGVDDTGSVIAADGPKPLKAALRQLRRAGRAHSRKQHGSANCRKSAARLARIHARVANLRADALHKATTDLAARYETVVIEDLNVAGMARNRRLARAICDQGFGQARRMLEYKTGWNGGRVVLAGRFYPSSKTCSACGTVKTTLSLAERTFRCETCGLAIDRDVNAAVNLLKFAASGAENATACGGTVRPRPARHVPVKQEPGTAHPGKTGTVPRQHGTPQCTDHY

SEQ ID NO: 52602 - protein, 452 aa, Niemeyer sp.
  misc_feature (402)..(435): Xaa can be any naturally occurring amino acid
MKEAVKNVKPKVPAKKRIITGSKTKKKVFVKKKPPDKKPLKKPVKKTVKTDKPKSIYVPNKDLKISKWIPTPKKEFTEIETNSWYEHRKFENPNKSPVQTYNKIVPVVPPESIKQQNLANKRKKTNRPIVFISSEKIRIYPTKDQQKILQTWFRLFAYMYNCTIDYINSKKVVLESGRINVAATRKVCNKISVRKAQKTIRDNLIQSTNPSIMTHIIDEAIGLACSNYKTCLTNYIERHIKKFDIKPWNMSKRKKIIIIEANFFKKGTFCPTVFPKMESSKPLTMIDKTVTLQYDSDTRKYILFVPRVTPKYSVNKEKNSCGIDPGLRDFLTVYSENETQSICPIEIVVNTTKNEYKKIDKINEIIKTKPNLNSKRKKKLNRGLRKYHRRVTNKMKDMHYKXXXXXXXXXXXXXXXXXXXXXXXXXXXXXXXXXXQEYPKSRIKALVQTKIV

SEQ ID NO: 52603 - protein, 388 aa, Niemeyer sp.
  misc_feature (344)..(377): Xaa can be any naturally occurring amino acid
MKEAVKTVKPKVPAKKRIVTGSKTKKKVFVKKKPPAKKPPDKKPLKKTTKKTVKKVINRPKSIHIPNKDLKIFKWIPTPKKEFTEIETNSWYEHRKFENPNKSPIQTYNKIVPVVPPESIKQQNLANKRKKTNRPIVFISSEKIRIYPTKEQQKILQTWFRLFACMYNSSIDYINSKKVVLESGRINVAATRKVCNKISVRKALKTIRDNLIKSTNPSIMTHIMDEAIGLACSNYKTCLTNYIEGQIKKFDIKPWSISKRRKIIVIEPGYFKGNSFCPTVFPKMKSSKPLIMIDKTVTLQYDSDTRKYILFVPRVTPKYSVNKEKNSCGIDPGLRDFLTVYSEXXXXXXXXXXXXXXXXXXXXXXXXXXXXXXXXXXPQFKFKFNALS

SEQ ID NO: 52604 - protein, 227 aa, unknown
  TnpB Polypeptide
MRITRSSKTTISFATQKKRDIINEISDEYSRVANIFTEMFFGNNFQKKDLKKDITNIPESWLSARMRQCCAREAPGMVRSAVMSAAAKGTEAVKPVHTGRKMILSSQCVRIEKGRNSFDLWLVIHSVGNKMKLQIPMKRHRHMNLFSGWKMSDSVTVHRKYVMFSFGKETGEKKTEGKLTGIDCGINHLLATSEGNLHGHEVKPLINVIKRKKQASEAYRRAKKTLS

SEQ ID NO: 52605 - protein, 193 aa, Cyanobacteria sp.
IRKPSSLFLVLDVLLIYKKKKGLNNRRKARKRYSKKHLRVSRQRNEHAKRLARCVCKSNDLVAYEDLRIRNMVKCHNRALVISDVSWYQFRLWIEHFAKKFGKTAVAVPPRHTSQECCICGKKVKKELKIRVHSCSCGLVIHRDINAAINILLRAKSTGGHPGSNALGVAASTLVGAILLGQAATLIKESPRF

SEQ ID NO: 52606 - protein, 464 aa, unknown
  TnpB Polypeptide
MYIVYGSKNFGVGKGIIFQKGDCMKIISSYAIEIKHINKLFRQTIKIYHDAISFCVKVLEEHWDVLSTLETGNKERFAYADALIHSTKSNHAIYPEFDIKFYKMPSYLRFAVINTALGYLSSYHSNLDNWEYSISNSKAPSLQTHLNKLPTFYKGNMYLDDCEGDAVRLKLFVNNDWNWVEVQLKHTDVVSIQRHMKNAKMSVPTLEKKNKKYFLRFAFEEKVELNKTPLKQQRILAVDLGINTDAICSVMNLDGAILAREFVNFASDKDQLYHTLNKIKKAQQKYGFHNVSKLWRYAKFHNEELARKIAKEITSIAVKHQCDVIVFEHLDMKGKKHGSKKQKLQMWKKNTIQRIVEHKAHQNSIRISHICAWCTSKLAFDGSGKVLRGKDANLDTYELCKFSNGKIYNCDLSASYNIGARYFIREIQKILPGMVWSDIVAKVPECQKRTQCTYATLLEINKAA

SEQ ID NO: 52607 - protein, 344 aa, unknown
  TnpB Polypeptide
MIQTYKLKHNQNFERELELAKKVALFALETKSRSSADVKHFGLKSAISNQILNKYSKNKKLKRISNVKLTIPNQSIKIKEDKIYIPCLKLWLDIWFNKNFKKINQIELGQEFAYISVSYSEPKTYRPECLIGVDRNSTKHVLACANLQTGKVIKLGKSCSHIHKKYSKIRKSLQKKAKLKKLKKIKNREQRIIKNINHQISRKLVNDIYNVKGGLVLERLEGIRQTAKCRRKQRYSLNSWSFYQLEKMIEYKAKKLGIPIFYVAPEYTSQRCSICGHIEKANRKTTSLFQCKYCGKVENADVNAGFNIANKHHSSIFQSIAERDVMEGNTDIPKEALYFKPIQL

SEQ ID NO: 52608 - protein, 660 aa, Streptomyces sp.
VSRKLPLGEGETARTACARGLLRTGVVEKTGEVLSAAVLAQRVGWAADLVSGMAAELLAEHWNAADVDVLTSGQDAGGRNLPSNAWMALRRLGWTAAPAGGVKVNDRIVRMAQEQAGRALRSACWRAGLTSAVLETWPCDPGKRTPKEWDQIREAVSGGRYLPSSVIRSRTRQITAFVTNNGRLPADVFELEAPPRAARMLLLSACDGQQATIERGEDEPQRALLRLQLPTRPDPRSSRDWTWVACPITLSPTVPPGAILHLPTLRLAGGKARADLAYTHAVPKTPRTGHSVALGVDWGLNTLLSAGAVRLHDDGHITALGYGAQFRAAGILSKQHRLRRLSEHLHTKADHIERLIAGDKQHELSGKRRVLRDEIRFVSDRRSNLNNTLAWAAARWAVDQAIAAHATVIYLEDLRSMEAKGMGRTHNTRMSQTVRGQIADRIRHLASEAGIAVVTVPPRNTSRHCPQCLTPLRHRKAPDRPTVTGWKWAICPDRAGCGWQGDRDHGAWRRIAARGLAHQDKTVTDRATRQMVIRTVVDKLETQAVIAPTAETSRVDRSKTGPTRRRSTRPAPRRRRAPSPTGPSGPAGKRPEGQAPPGRRMLPRAAHRHQGVTTISTPTTGRHRPRGAALGAGFHLHAHATPPRWASPTPNTMSDMGSLN

SEQ ID NO: 52609 - protein, 395 aa, unknown
  TnpB Polypeptide
MKYMLKGFKTEIKVTKQQIIKIHQSIGICRYLYNTYIVKNKELYELYKEGKIDKTQAFMSANDFDKYINNEVKILDDFKWINECGSKARKKAIVNAEVAYKRFFKGQSKFPRFKKKKNQNVKIYFPKNNATDWTIERHKIKIPTIGFVKLKEFGYIPTNAKAINGNVSMKAGKYYVSVLCDVIDRNDYSNYTNEGIGIDLGVKDLAIVSNIDKPYKNINKSKIIRQLKKKLKRIQRQVSRKYEMNKDGKKFIKTKNIIKLESKIRHIYQQLTNIRLNYIHNITNNLVKNKPEYIVIEDLNVKGMMKNKHLAKAVQEQCFYEFRKQLTYKCLWNNIELRIVDRFYPSSKLCSECGRIKKDLKLSDRIYVCNECGIEIDRDKNASINLKNAKEYKIA

SEQ ID NO: 52610 - protein, 380 aa, Ornithinibacillus sp.
VKAMLVKKAYKFRIYPTREQKRQIVKTLGCSRFVFNHFLVKWNDTYKQTGKGLTYNACSAQLPQLKKELSWLKEVDSIAVQTSLQNLSDAFSRFFKKQNKAPRFKSKKHLVQSYTTKQTNGNISMEGNKIKLPKLGLVRFTKSREVHGRIINVTIRRNPSGKYFISILAETDVQPLVKTESAIGIDLGITDFAILSDGHKIDNNKFTSNMEKKLKREQRKLSRRALHAKNNGINLLGAKNYQKQKRKVARLYDKVLNQRADFLNKLSTAIIKNHDVICIEDLNTKGMLRNHKLAKSISDVSWSSFVTKLQYKADWYGKTLVKISRGFPSSQLCSVCGHHTGKKSLEVREWTCPACHMHHDRDINASNNILAEGLRIVASA

SEQ ID NO: 52611 - protein, 486 aa, Streptomyces sp.
VSGKFRLRPGCLVQAYKFALDPNGGQQHALRSHCGAARAAYNWAVSWVTASWWQRKAETSYGIGEEQLTPWRSWSLPALRKEFNQIKTTDPRFADWWQENSKEAYNTGLTNAAAAFDNYAKSKQGKRKGARVGVPRRKPKRKARLACRFTTGAIRIEPSGRHITLPRLGTIRTHEPTVKLLARIKAGTARILSATVRHERGRWFVSLQVETAREITRVDRPDTSVGIDLGVKYLAVMADSSGKVHYVPNPGHLDGALKLLRLHSRRVTRRQGPDRKTGQKPSKRWEKANRQRNKIHHRVANLRTDALHKLTTRVRTEYGTVVVEDLNVAGMLRNRRLARRVSDAGFGEIRRQLTYKGRWNACRTIVANRWYPSSKTCSNCGAAKAKLPLHARVFDCDECPLVMDRDENAARNLVALAAACTTGTGVAGDQDTPRVSKPRGADRKTRRQRLNRNTGRGGRAGGASLPHQRQEEARDRRQDAEALKLW

SEQ ID NO: 52612 - protein, 276 aa, Streptomyces sp.
VNRAVAYRIHEDTSRGRWYLTASWTIPAVKTVPLAAARAGGLVGVDTNADHLAAWRLDAHGNPVGEPLRFGYDLSGTAAHRDAQVRHALIRLLHWAQRRGLAIAIEDLDFQAEKTREKHGRRRKFRKLISGMPVARLRARLVSMAAELGMTIVAVDPAYTSRWGAQHWQKPLTSNNRTTTRHDAAAVAIGRRALGHPIRRRTAPPPHDRSDRVGHRTVQAAPVAPGREGPRPRIPGPRTRSVSPGAERTRATSTSKTVRDVRSDQEWVQDSLLVTD

SEQ ID NO: 52613 - protein, 345 aa, unknown
  TnpB Polypeptide
MANKAYKFRIYPNREQKTLFAKTFGCVRFIYNKMLDDKIKYYEKTKKKRNNTPAQYKKEFPWLKEVDSLALANAQMNLQKAYNNFFRDPKVGFPKFKSRHKTRASYTTNNQKGTVALENGHLKLPKAGYVKVKQHRAIPEDYRIKSVTISQNPGGDYYASVLFEYENQVQKQPMHQFLGLDFSMQELYRDSEGREPEYPGYYRKAEQKLKREQRKLSKMQKGSKNRGKQRIRVARMHEKVAAQRRDFLHKQSRKIADAYDCVCIEDLDMKAMSQMLNFGKSVSDNGWGMFTGFLKYKLEEQGKKLVEGGQIFRQQSDLFSLWLQERRDKKTCGQRVGLSAVRNPS

SEQ ID NO: 52614 - protein, 417 aa, unknown
  TnpB Polypeptide
MSLGESKAWEPITSFRLSNGFFRGTSGRPRTKKIQGSDRQLTLTRNFFSLEQISNKYWRLNFGLPARPGGSIRFRAHRKFEMPAVVYVRSTNRSLTVSFSFEDDIPDYSETDDEIVARLRMKDPAELAERTVGNDWGVVRNVQRSDGPTHHLLPQQIERIKRFEQGRKHLQHQLSRKEKDSKNSKKLKGRICKKFQYEQNVHIDFAHKTSHELATLENVDLIVFEKLQIANMTKRPRVKYDENGNVLPNGRTAKAGLHRSLLRSQYGRITEFTKYKCRQNGKLFVEVDPKGTSQECHTCHHTARENRPDQATFRCTNPNCPDFGVEMNADLQASLVIKQRGVNLVLSGGLRKKTSKKFLSVPRAKKNTKNVGVGRPETMPVKPSKGRGLRCSTKGGCQASQGETSQLPTRGGCEAGS

SEQ ID NO: 52615 - protein, 391 aa, unknown
  TnpB Polypeptide
MTQRAYKYRFSPTPEQAHTLACTFGCCRFVYNWGLKLRTTSYFEHGQRLSHNDLSAALTALKQAQGTAWLQEVSSVPLQQSLRHLDKAMGNFFAKRAKYPKYHKKHKKQSATYAATAFVWNGLTLTLAKQKDPLAIIWSRPLPEGCNPSSITVTKDAAGRYFVSILVEETIATLPITDKTIGIDLGLKSFLVTSEGETIDNPKYYARAEKQLAKLERKDAKKKKGSKNRNKARQKVARLHARIANMRRDFQHKLSTRLIRENQVVCLETLAVKNMLKNHCLAKAIQDVGWSEFVRQVEYKAAWYGRTVVKIDRWTPSSKTCHCCGWVKEDLTLSDRVFVCEDCGNVTDRDYNAACNIVSVGLTAINACGGVVRRGTRKRGHADTGEAGNSL

SEQ ID NO: 52616 - protein, 460 aa, unknown
  TnpB Polypeptide
VKLQVVKTVRIPVHYGITKRKLSILDSLTARTTYSVWLWSKLFKENGLKGSYTDRARFYERVKRDAKLGSLTQCCFDTAAWMWWGYREAHKAWRRNIAIARKERDKQWLRKLLRREPHEPFTNGMNGKVPIWFDSRFGSIEKTRRMKLCQYVARVSTLRKGMKLTIPLSPAKYHLDLLEKGVMKSFQIVKRDGKYYVHVKVEYAVPDQSVNAVRGVDLGVKRSMASVMLKPNQPLRSSDFTTIRDGLKRQHLNRLNKRVAELQRAKKWAPLKRIRHKQLHVGEYYDRLAAKQLAATSQNCLVAVGYPKGIKHKNNHGNGKPKLRRALAHWSYGRAIRYIQEECVEQGIRAEAPDELWSSRTCHRCGSRHTERLTQSLFHCWNCELVYNADYNAAINIGSRFLPTATTRRATDDLAHARSEQAREIVACEPRSPHPFMGDSKSPYIQLSTRHAFRWACRSS

SEQ ID NO: 52617 - protein, 250 aa, Frankia sp.
VKLPRIGRVKVREPMGALTGRLANGRARLLGATVSRTACRWFVSFTVEVEREVPTGPSRRQRAAVTVGVDLGVRHLAVLSTGETVANPKPLARSLRKLRRDGPHKLTTRLATSHETIVVEDLPVAGMVRNRRLARAVSDTGMAEVRRQLAYKTLWYGSTLVVADRWYPSSKTCSGCGGRNPNLTLPDRIFTCPSCGLVADRDANAAVNLRHLVAASTSETINARGADRKTHPGGRVAVKREPGTAMAGKS

SEQ ID NO: 52618 - protein, 310 aa, unknown
  TnpB Polypeptide
MCEITVEYRRTAVIKLDTPEGIGDSLRETVEQFKHCANTASEWCWHGDDGYHVTSKAKAEQALYDRLRDETTSQPYFSSDSAVYDKRSATFHRDHVSLSTVDGRVECDYILPDDSETPPTKYVSDEDFEFRMAHLQYRDGDWYLYASMRKAEADEESPESESKHRTVLDVDLGVNNLAVASTGRFWSADEFNHWRREYEKRRTSLQQCGSRHAHENVESVGQKEYGRFEIHLHTVANELIGEAVEHDCSHVVFEELTHIRENVSKATWQHIWAFRRLSEYVEYKAKDHGVEVVQVDPRNTSKRCSTCGFT

SEQ ID NO: 52619 - protein, 610 aa, Streptomyces sp.
LETRQFGHRARLALSPALALKADNQAHAARTMWNLLHAWWQMMPKEKRTLANADAAIRQARQDIDFLAVLPAQAAQAVLKTYFQAWKNCWAGRADAPNFKARFRSTLTVDVPQGRDLNIVRVHRRWGMANLPKIGRVRFRWTKDLPVGKQAGKENRITGARLVKDTLGWHIAFRVQTLEKAPKTHQGPEVGIDVGITVPLALSDGETYEHGQWLTSREQARLLGLEQRAAQRKKHRKPGERTSRRLHHTYDQIAGLRAKAKRRALDWQHKTTTDIARTYSVAVVEALQITSMVKSAKGTIEEPGKNVAQKSGLNRSISGQAWGRTVTMLTYKLARQGGTLAKVPAPGTSRRCSACGLTTPGSRETQALFVCKNSDCGWSGNADHNAARNVLHLYRMGHALIPAAGRAVAGAHRASSPPPKGRWESPCFSWESTSRSGGMTMTDTTRDTDDTTPPCFACGKEARFDELPPRERIAFDQYWRVAHSFNTAVPGWLVLLPRRHVTAVHDLTDAEAGALGVWQVGLSRALRGVTGCLKTYVVQFAESEGFAHVHFHIVPRMADLPAAHRGPGIFGLLDRPGSEGVTAEGADRMARALRARLHGLPHSWGPPDGP

SEQ ID NO: 52620 - protein, 546 aa, Streptomyces sp.
VKWVGGLRTLAEPFVASGPSGVAVRARLKHLTPGDEEVLRLVGAHLGALVSKDLKARCRDGLEHSADTWAARKRELTPLSSSRWAGSITKASHDQWALARRGQLAHIQDLEAGIRTIGHRLSMPIGEKGSKKVPGGYRSRQEWHAKTRRLHVLEDRLAAGRADRDAGRVRVVRGGKQLARTRHHLEAAQLTEAGWRQRWEAERWFCQADGESGKRYGNETIRVSPEGEVSIKLPAPLSYLANAPHGRYVLACRVRFAHRGAEWADRVEANRAVAYRIRLDVGRDRWYLTASWQIPPSQTIPLAAALAQGVIGIDMNADHLAAWRLDACGNPTGTPRRFFYDLSGSADHRDAQVRHALSRLLNWAKTCGVKAIAIEDLDFGAEKTREKHGRKKRFRRLISGIPTSRLRARLTSMADHTGIAVIAVDPAYTSRWGAQHWQKPLTSKTRKTTRHDAAAVAIGRRAQGYPIRRRTTPPHDDRSDRRGHRTVQARPGIPGREGTRPRVPGPRTRSVHAGRGANAGDQNTQHRSGRSAEHESWQQDSLPLSL

SEQ ID NO: 52621 - protein, 402 aa, Streptomyces sp.
MKLVVRVKLLPTPVQAAALEATLTACNEAATWAASVAFEEGARKNLALRKLAYQDIKTRWGLGAQAAQHAIKKTCDAYTTLRANLRAGRYGKPGSKRHTRASGKPVAFRPEAAQPYDDRMLSWQHEARTVSIWTTAGRMKNLAFTGQAEQLEVLARHRQGESDLLYHGGKWYLIATCEMPEAALNTHPVAFLGVDLGIVNIAATSDDERHCGRRINRKRENDRKLRRKLQQKQTKSAKRRARKYAGKEARRNKDINRKISKRIVAEAERTGRGIALEDLKGIRERARLRKPQRTTLHSWTFAQLGAFIVYKAKRAGVPVVYVDPAYTSQECFRCHHIERGNRPSQARFACRSCGFVDHADRNSSHNIAHRGWTAWVCGVRSAAPELTLIAWILDAAGTHHRQ

SEQ ID NO: 52622 - protein, 317 aa, Streptomyces sp.
VSERGLETRQFGHRARLALSPALALKADNQAHAARTMWNLLHAWWQMMPKEKRTLANADAAIRQARQDIDFLAVLPAQAAQAVLKTYFQAWKNCWDGRADTPNFKGRFRTVMSVDIPQGRDLNITRVHRRWGMARLPKIGRVRFRWTKELPVGKQAGEENRITGARLVKDTLGWHIAFRVQTLERAPDAHQGPQIGIDVGITVPLALSDGQTYKHGPWLTSQEQARLLGLEQRAAQRKKRRKPGERTSRRLHHTYDRSQDCARKPSAGHWTGSTRPPPTSPARTASRWWRHCRSRAWSSPPEGPSRSRGRTSPRNPG

SEQ ID NO: 52623 - protein, 360 aa, unknown
  TnpB Polypeptide
VYNWALETKTKAYYQDEESLSFTDLSSRLTEQKREEETEWLSEVSAVTLQQSLRNLNKAFTNFFEDRAEYPSFKSKHGDQTARYVGTAFDLREENGRRKLFLSKMPGLINIRWSRELPSEPSSCTVTKNAAGQYYICFVCTEEVETLPRTRGGPNFVGVDLGIESLVTLSTGEKIGNPRWFENEYERLRREQQKLSRKEKGSNNWVRQKKRVARIHQRIQDRRKDFIEKLTTRLVENWDVIVVEDLSVKNMQQNGNLARHIGQVGWGQIVRRLRNKCERYGRTLVVADKWFPSSQRCSECGHVDDKKPLDVRDWTCPECEEHHDRDINAAKNLSRVGQTRLQAPGDLGNPDAFEVVGSGR

SEQ ID NO: 52624 - protein, 417 aa, unknown
  TnpB Polypeptide
MERANTFIVEGCPAIWGLADNCAKLYNEVNFERRQAYVHFKKFSWYPKHLYAKYAPLVGSATAQQIINKNDEAWKSFLALKRFEAEGKLPKHIAKVSMPRYWKNNGRRELRIIVRNDCYRIDDESLYLPKGLRLKYKGKLKWKGKLGRLEIIYDEVDKVWRGFMTVKVEGPPLKGGNKPLYIDLGVINLATVWYEGLRQPIAFSGRSVLADWWYWTRRMAGEQSRLARVNKAKTSERLRKLYRIRRRRFRHAVNAMIRQIVEDAHKLGISKIVLGRLKGIRGNSHNGKANAMINNFWSFNYIVKRFKEKAEEYGIKVEEKSEYKTSSECPFCHFKGTRRYRGIFYCEKCDMAMNADAVGALNMARKDGTIIPSPSWGRDNGVVAHPLLLGWDGVRWEPKRAVNNRPMNALEARISRL

SEQ ID NO: 52625 - protein, 462 aa, unknown
  TnpB Polypeptide
MYKTLRVEIKDTHPLYTYCSDVCHATNNLYNAVLFRMRQTMTGLQKLECLPQSITLNEQEVLNELKDFTNCNPSYRMPTAKKWFLPYGMLNRLLYDNKNVDYFAQHLPRHTAQQTIKQAVQDMKGYCKSCKAYAKNKQAFTGAPRLPGYKKPGGMCTASLSNQECVVKKQDDICFVKLPRTKEVCQITTPVGRLKFVTIKPYFNVFYISFVFEIPNAFEPIERDDYNERIIFDKPERCIAIDFGVDDLAAISNNFGHKGLLIKGGVVKSKNQWFNKLNAQMQSAKDQGVLLDLYRKNWVNRNNFMRDVMHKYADYIIKYALDHHVDTIILGSTKGWKQSSKMDKKNNQSFVGVPFDLLKKFIAYRAVQHGINILYQEESFTSQASFKYKDDIPVYGELSEEEYDALKFSGRRIKRGLYRNQDGSIINADLNAAANIGRKALPDLFAQVNFERPDILTNIFNM

SEQ ID NO: 52626 - protein, 585 aa, Mycobacterium sp.
MVIQSAVPLRIAAAVEDATGEVVDIDARVGWLLDLIHQMSVELMQSCWRPEAFAALHAGVDGLGRKLPLSAAVVAARLGWVPTQLAGVYVPSRVVRLAQANVVPVLKSLTFRDALIPAALAALDDGGRLDRRGLGQGQARHVSSAFLRNLCRQLRRVGAGSVTSITEIQGPPAVARIARLGAADVQLVELDDSDPAGVSLRIKLPNSPQPEGRGDWSWYRLWCPTPPHLKQRDIARWHLPVVCIQRGKPLLRFTITEMVPEPATATATAALGIDWSPASLGAATMVVERGGQLVTDARTHMYDDRGLGVRLTRLQTEGQALTRKIARLTNLAANAPEPTQARLATKIAVMRENRRAVGAKRARINRGMAFDFAASMTTMATASGAEVIAVEDLRDLETRKHGRTNNNRAAQSARRRAVAALEHTAAKAGLEVVMCPPRGTSANCPGCDQQLTRPGGYHTATCQACGIRAANRDQVAGQNIAKRVLLAKTKVKRPKGKPKRVTAVEHQPVRKTRHKTTATPKQRRHKRARHTPTTLARSQRHPIIPARTASVWDRDQPAAIPAGSTSAQPIPDTRDTQVSASARDR

SEQ ID NO: 52627 - protein, 372 aa, Enterococcus sp.
MKKAHKIRIYPNKKQAIQFQKTFGCVRFYWNFLLNQRITNYKMKKENENDKEDKTTYATLKKQEEFAWLKEVEAQPLSQVAMDLNKAYNNTFKSNFGFPKFKSKKYSKKSYRTAMGMKVNGNYFYVSKVGWVKMAETLRFNGKLMNVTISQSKSGKYFATFLVDTENFVKRPVKETIGLDLGLTHFCITSAGEKIDNKKFYRSLEKRLVMEQRKLSKRFEVAKSHKRKLDESRNYQKQKVKVARIHEKIQNQRLDFLHKLSSRLTDENQIICIEDLNVKGLVKNHKLAKSISDASWSEFVRQLEYKSAWKGRILVKIDRFFPSSQLCSSCGHNDGKKELHIREWTCTNCDITHDRDVNASINIRTEGLSGIA

SEQ ID NO: 52628 - protein, 537 aa, Streptomyces sp.
MAAPFVVSGPSGVAVRTRLKDLTPDDDQVLRLVGAHLGSLASKDLNARCRNGLEHSGEAWAVRKRELTPFSSSRWAGSITKGTHDQWALARRSQLAHLQTLEAGVRIIGHRLSLPIGQKGMKHAPGGYRSRREWHAKSRRLRVLEDRLAAARADREAGVVHVVRGGKRLARSRHHLDTAQLAEEEWRTDWEAERWFCQADGESGKRYGNETIHISPDGEVSIKLPAPLAHLANAPRGRYVLACRVTFAHRGGEWADRVAANRAIAYRIHLDTGRDRWYLTASWQIPPTPTVPMEAALAHGVIGVDMNADHLAAWRLDTHGNPTGSPRRFFYDLSGTAEHRDAQVRHALTGLLYWARTCGVKAIAVEDLDFTAEKTREKHGRRKRFRQLISGMPTGKLRARLASMADQTGIAVIAVDPAYTSRWGAQHWQKPLTTTTRKTTRHDAAAVAIGRRAQGHPILRRTTPPPQHRSDAVGHRTVQAGPGVPGREGTRPRIPGPRTRSVPPGRGANAGNQNAQHRPGRSAEHEIWQQDSLPLSL

SEQ ID NO: 52629 - protein, 371 aa, unknown
  TnpB Polypeptide
MKLIRSSKCSLKFATASKLSELRKVLAEYGRVCNTFINYFWKNGTPSKSELLKEIVDIPHGTWLTARLRKVAAREAIDMITAVKERWKDKPWKISMPIHKGKRAYVSCTIADLQEKEDSKEFDAWLHLQSIGEDTILDIPIKFHKHYNKLALQGKRLNSYILTDNYVQFSFEIDAGKKKEGVNAIGIDTGIKALASINNGQQFGLDTEACIERIKRCTHGSNGQKQARRAFKQRIDEVVQEIVKEFKHIDLVVVEALKNMNFKSKLKRRLSKNMRRSIGTWAYRYWLKRLEQACETNRVSFRTVAPYYTSQTCPSCGHVNRGNRVGQVFRCLKCGHIGNADVIGAVNILTRFLTGLYGARYKPYEVGFIQV

SEQ ID NO: 52630 - protein, 370 aa, Intestinibacillus sp.
MEYSYKFRLYPTRAQEHQIQRTFGCCRFVWNHYLAQRKAVYELDGHTMNYYACARDMTSLKKALPWLKEIDATALQSSIRDLDTGFQNFFRRVKKGEKPGYPKFKSKKNRRNSYKSKCVGANIKIVEKCIQLPKLGLVKCRISKEVKGRILSATVSQNPSGKYFVAICCTDVEMEPLPSTGAVVGLDMGLKSFAITSDGVEHPKHRYLRKSQKKLARLQRQLSRKTKGSDRWEKARVKVARLHEKIFNQRNDTMHKLSTKLVRNYDLIAIEDLAPKNMLRNHNLARSISDASWGEFRRQLEYKAKWYGKVVVTVDRFYPSSQICSACGAQWSGTKDLSIREWTCPVCGTVHDRDRNAAVNILKEGLRLLA

SEQ ID NO: 52631 - protein, 362 aa, unknown
  TnpB Polypeptide
MRNRVIGSKEALENFQFVTINGRVLFNEKERVVRIARAYSQVVKSAIRPLFDGKSIDELTKEFYNILPNYVYLETALKQAKTIVDGLLDREDEKGEIIHAKVKRFWFASRGNKSDKGNRNIKFHVLEDHVLIKVKDPWGKWIYGKAYFGKEYLPLLKELEELSRRKEEGYGAVISFKDHPMIHLQIPLWSYLKHFSSPKPKGYGLIAGFDLNSDRLNVVVINKESSIVTAKTWWYSEVVSHGFPKDKAKALRLNALSQALNFLSRIGVDYVVFEDLFLIKNRRFTRSKSGNRKVSRFAKKQLLIHGVVKSLRLGFSVVLVNPKGTTNSEDHNRIMRKKGFDRHTASAYLIALKGLGMLNDIK

SEQ ID NO: 52632 - protein, 430 aa, unknown
  TnpB Polypeptide
MQLVQRHVINRSHPDWAECDRLCAGANTVRNQGLYLQRQSWFYGHGVIKFGKTEQYKNVDNFMQQTAAYRMLPAFLSQQVMRSVNAEWTSFFEAIKAYKLEQDLFTGMPKPPKYKPRDGRYLVNFPSTRAYKKPKNEGIIHLSTTGIKIQSEYSHNMNCVRIVPACGCYIIEVVYEVVEPEIDNSEYVAGIDLGVNNLATVTSNKPGFTPILVNGRPLKSINQGFNKFKAALTSRVKKQSGLNFSRRLENLTRRRNHKIDDYLHRVTAMIADLLKSSNISSLVIGLNPDWKNEVKLGKRNNQNFVGIPFRKFISMLEYKLLLLGIEVRVREESYTSQSSFLDLDEIPTYGKKPEGWKSSGRRIHRGLFKSSRGRIINADVNASYNILIKEFPNAFSKGIESAVVVPRKVNVVGFVRFCRIASTLPYPSPT

SEQ ID NO: 52633 - protein, 363 aa, unknown
  TnpB Polypeptide
MAITTKTLKLRIKDKHVKLLRQMAREVNQVWNHINAISAKAARPFHGKPKFLSGYDLQKFTAGFSKCDGVSMGSGTVQLVCVEFATRRRQFKKTRLNWRVSNPKSAKYSLGWIPFKGGHAKYKAGQIHFAGQKLSLWDSYGLADYELRAGSFSEDSRGRWYFNVAVQVQSKPSPGTAAVGIDLGLKECATVSTGDKIEGRWYRSHEQALGIAQRAKKKNRTRAIHAKIKNQRKDELHQFSSALVRNNAAIFVGDVASAKLVKTKMAKSTLDAGWSSLRTMLEYKSHQAGIVFEVVNENYTTQTCSCCGSIPASSPKGRAGLRIREWVCSECGTAHDRDINAAKNILAAGHRRLAAGITISSGR

SEQ ID NO: 52634 - protein, 408 aa, unknown
  TnpB Polypeptide
LQPPAPGPNWKGVETVTRYRVYPSRMQHDGLLLHCVSARFVWNLAVEQQSYYSRTRPWAPNSLARYRQLTEARAAFDWLRTGSAVVQQQALRDFDQAMSNFFGGSHRRPSFRKRGLSDGFRIVGTGPDHVRKLNRRWSEVKVPKIGWVRFRRTCAVGKFKSYRVTRDRAGRWHVAFTQIPSPIPSPGTGEIAGIDRGVIHAATASDGTFYDYSRSDLDAKVKRAQRILSRAKRGSNRRARVKFRAARASARRMDSRKDFIEKSTTDIARRFDVIRLEDLKVRNMTRSARGTLDTPGKNVQQKAGLNRAILDKGWAQFATRLEQKALGRVEYVPAAYTSQRCSECGVINSDSRKSQATFECVSCNFSANADVNAAINIAAGHAVTARGGDRKVSVPVNREPQRRLLRVS

SEQ ID NO: 52635 - protein, 377 aa, Meiothermus sp.
MTRKAFKYRLYPTQPQHKDLERTLALCRQLYNAALQERREAYQKAGKTVGFYEQKRWLPEIRTELPEYKGVHSQVLQNVIERVDKAFQGFFRRVRAGQKAGYPRFKGRERYDSFTFPQAGQTGVKLQEGGKRVLIYGIGSVKVKLHRPLEGRLKAATVKREGEHWYLVFTCEVEPRPLPSNDQAIGIDLGTNPHFLVTSEGEMVEAPRYYQKTQAKLARAQHSLSRRKRGSSRRKQAQRQVAKLHRKIANQRKDFHHKIARRLVNEYGTIVHEDLNILGLARTRLAKGVLDAGWGRFLQILAYKAEEAGRRVIKVDPKYTSQDCPVCGHRERKPLWVREFRCSGCGGHFHRDVAAAINILAKARTEPSGMGTAWAVP

SEQ ID NO: 52636 - protein, 416 aa, Natronorubrum sp.
MVVQVTRTYVSSIQNHRQVCDSLDSLGDSASKIWNVARWTADRIWNAIGKIPDVGTLKAYMKNQACWKDLNAQSSQKVIEELSDAFQSWFDLRQKNPKANPPGYRKHGNTRPRSTITFKADGFKHDPKNNRVRLSKGSNLKAYWSDFLLCEYQTRPDVDLSEVNKVQNVRAVWNGDEWELHFVCKVDLETSDSAGDEVAGIDLGIKNLATVAFPDEYVLYPGNSLKQDKHYFTRAEYDTEGENGPSEKSRWARRKLAERETHFYHVLADTIITECVERGVGTLAVSWPENVRKSDWGKTGNKKLHTWAFDRIYQYLTYKAEICGVEVLKENEWNTSKTCSKCGEDTKSNRVERGLYVCSSCGLVANADCNGAENMRQKITPSPHGEDRSNGCVAQPSVHLFDRESGTFRTKGQVVS

SEQ ID NO: 52637 - protein, 326 aa, unknown
  TnpB Polypeptide
  misc_feature (255)..(281): Xaa can be any naturally occurring amino acid
MLLSKRTSIKVSREYANLIGHMCYAASKLWNVCNYERQHYKETGMEQYPDWYYQKKAHKEDLWYKQLPSQTAQEVCKLLDKAWKSFYALKRSGGIETPRPPRFKQESIPITYMQMGIVHERDTDRVRLSLPKALKKYMEETYQIHENFLYLENKIFRGMDQIKQLRIYPPEKGNCKIIVVYEVPDQEELPQNGHELSVDLGLHNLMTCYDSENGKTFILGRKYLELERYFHKEIARVQAQWYGQQSGKGVKHPVXXXXXXXXXXXXXXXXXXXXXXXXXXXQDHKISCRILPGTGDHLCRYRGYPEHSERKRPGTQDKPEASQPAV

SEQ ID NO: 52638 - protein, 613 aa, unknown
  TnpB Polypeptide
MIKKKKKKSIEIIKKEIILLENNTNKNIEEKQSYLNLIKQILEYQIHNKLNIQKLLKLLKPNNQTIIYWIYKYSKNNNVYKKIIKNYHNYFTKSDINDIKYEIFIYYIKNQTAKLYWNDDIKKISDKIFLPIKENFKESKIPKLLKNTWFKCSVIKSTQLNTKKIECIKNRIHKPLVKKSIKIKLFLNKDQQKCIKDFFNCYRYFYNRAISYINNYNKKNQNTFIFTEPFNETTKINIDLQNVKNKFSYITMRKYIKNNKPKWMFSNMPSHMIDLAFKEASDNYSKCIKMYNTKNKKFKLHFKSNKKIQTMFIEKTAFSIKNNNVSIYKNYKNPYKIYTKNEKHKNFVFRDLKISEKIHKYDICDSTISYNKYTNEYYLNLTYNYNINKEKNKIKIEEKTKKILKTKKVVSNDPGDRTFATLYSDNKVIEIGKETKNIIYKLCKEIDILTSIISKKYYTKKMKDKTITKYTLTNKRKKRLKRALHLKYKKLKNKKVELHNKTVNYLITNYSRIIHPPFETSKMVSNLHAKVARSMNTLSFYEFKIKLRRKCEEYNIELIEEDEHYTSKTCCNCGKLNNKLGSKKIFECLNCKMIMKRDIVGSRGIMLKNNIWN

SEQ ID NO: 52639 - protein, 192 aa, Scytonema sp.
VTTEQHQHDGKQLGIDVGLEFFYTDSDGKTVKNPKLLRKGEKSLKRKQRQVSKCKKRSSNRRKAVKKLAKKHLKVSRQRKDFALKTARALVQSNDLVVYEDLQVKNMVKNHRLAKSISDASWSLFTDWVDYYTKVFGTWAIAVSPHYTSQDCSVCGTRVKKSLSTRTHKCPECGTVMHRDHNAAIMIRKHWT

SEQ ID NO: 52640 - protein, 432 aa, Streptomyces sp.
  misc_feature (20)..(24): Xaa can be any naturally occurring amino acid
VRIEGEGKVEDAGRQEVSAXXXXXATVEEYAAVCRAVWNVGLEQRREYRRRGALIGYAQQTREMAEAKAEHPWLRAAPSHTLQQTLRDLDRACRRHGAFAVRWRAKRRWRPSFRFPDPRHLSVERTGRKRARAHLPKLGWVAFRWSRPLGGTLRSATVSCDGKHWYISFLVEIGTPAPAISLERGRVGVDRGVAVLAATSDGRFFDRGFITKGEAARYRRLQQQHARTRRGSNRRKACQAKMRAIMCRVRDRRRDFHAQTACRIVDRNALVVLEELNIKGMTASAKGTMVRPGTHVRQKAGLNRAILDKGWHSFELAVRNRARHRGVEVRTVDPAYTSVTCPACGCVHPDNRKSQASFVCAACGHREHADTVGAKNTLARGHAGHRAWRPRHQPVCEAPTSVNPQGISAPATAVGIPSAQPLGGSPSPSFET

SEQ ID NO: 52641 - protein, 503 aa, Sulfobacillus sp.
LQTRFEAARQCYNALLGEALRRMRLMKQSQAYQAACKIPHGVAHLVERRAAFKQVRQSMEFTESALSRYATEIHHSWIGDHVDAVLGQTLAHRAFDAVDKMVLGRAKKVRFKGRRGIHQIGSLEGKSNQAGLRWRTDHLEWGALSLPMIQGAAQDPVIAYGLAHPIKYVRLVRRNLRGRDRYYAQLVCEGIPLRKLDPQNGCFQHPLGSDVVGLDIGPSTIAVAGEIQASLQRFAEDIVRDHATLRREQRHADRQRRANNPNCYDAQGRAIKGKHPHNKSRRQRHTEARIRDLHRKEAAHRKTLHGQLAHRILAQGATILTEKLSYKAFQKRWGRSISIRAPRLFLTILTRKAESAGGQVIEFNTRTTALSQTCLCGQKHKKRLSERVHTCECGVIMQRDLFSAYLARFVEDDALQVAKAHESWPGAEPLLRTAWQQATQNQPASGQRQPPSFGHFVRGPSQSRSPEKESLPEHKTPDVVILAQVGVRADESVKVEVFRTPRL

SEQ ID NO: 52642 - protein, 286 aa, Archaeon sp.
LHVTVTNETAEVGTQTAAETVVGVDINEDCVALAALTEHGIEDSIVLDYPEIKEQRHRYFTMRKRMQEAGQTAFNGVFRDKEQRFVHDQLHTVSRRVVEWIQRFDSPVIVFEDLKDMRDDIEYGTRMNRRLHSLPFAKLRDFITYKAAWKCIPSDDVNPEYTSQRCPVCGHTERANRHKKRFKCCECKHQDHADRGAGISVAQKWLRKQADRNVPALNTLPQVRKWELRRQASGPVDGPTVTHHTVEGHQTEGVSGVSDQSTGRSSGVVRKTQSSVMTRDEVSRTT

SEQ ID NO: 52643 - protein, 421 aa, Archaeon sp.
MSNQVVTRTFKASICNHSQVREDLDSHGFAASKLWNVGRWTIQRVWDAIGQIPSGDDLCSYLKHHDCYGDLHSQSSQRVLQELGEAFDSWYGQDDPDANPPGYRKHGDDHPRSTVTWKNHGFKLDTEHSRVRLSKGTNMKASRYAADYILCEYRLQTDDGRTLAAVDSVQTVRAVWTGEQWELHFVCKLRSETAESPGEKTAGVDLGICNTAAVSVGDETLLYPGNALKEDAHYFRQEEYDTQGETGPSHHAQWAREKNSRRKDHFLHAVSKDIVEQCGDRDVGTIAVGDPKTVREDQDWGRHGNKRLHDWAFETLLSYIEYKAEDRGIEVERVDEAGLKTSKTCCVCGREADSNRVERGLYVCDECGLVANSDLNGAENMRATVTPNPARDRSNGCLAQPSVRLFDKSTGQVAPQEQVVS

SEQ ID NO: 52644 - protein, 362 aa, Paenibacillus sp.
MLKAYKYRLYPNRDQRNFFEKTFGCVRFVYNKMLADKISSFKKSQKSMDKSIKYPTPAQYKTEFPFLKEVDSLALANAQLNLQKAYSHFFRDKSVGFPKFKRKKDNHRSYTTNNQKGTVYIENGYIKLPKLKTLVRIKQHRPFFGLIKSVTIAKTPTKKYFVSILAEENEQLFSKLDSKVGIDVGLKDFAVLSNGTKYENPKWLRKSEKRLAFLQRSLSCKKKGSKNRDKARLQVARLHEKITNQRNDFLHKISHEITIENQVIVIEDLKVKTMQKNRKLSKAIGEVSWFKFREYLEYKAVWKGRDLIIAPKNYASSQLCSNCGYQNKEVKNLNLREWVCSECNSHHDRDLNASINLLKLAI

SEQ ID NO: 52645 - protein, 507 aa, Peptococcaceae sp.
MKSINKKSESFVCEVPLRVSETHAKILNARFEAARQMYNALLGEGLRRLNLMRQSIAYNRARAIPPADSLRQNERSNLFKQARDTYGFSEYALSRYATQVRDSWLGEHLDAHTVRKLTKRAFSAVSRVAYGKAKKVRFKGKRGLHSVEGKSQGSAIKWKEDQVAWSGISLLLVKDALKDPVIAYGLSHRVKYVRLVRRLINGKDRFYAQLVLEGKPYQKPEHILGTEIVGLDIGTSTIAHVGETQAALTMFCEPIVRNHREIRRQQRHIDRQRRANNPECYDEKGRAIKGKHPTKKSRHMKVSLGKLSEMFRKEAAYRKSLHGQLANQILSVGININTEKLSYRAFQKTFGKSVGVRAPGMFVDILQRKAESAGGGVYTFNTRTTALSQMCHCGEKHKKPLKQRVHECSCGVVMQRDLYSAYLARFVKDDILCATEAGLSWSGAESLLRAAWGDSQQLASGRAVPASFGVFRSQSESSEKEDLVERKSLDVVAFEREPIRAQSIVGS

SEQ ID NO: 52646 - protein, 411 aa, Gammaproteobacteria sp.
MKTNIIRLFPSDEQIKQLEELSFVRNSLWNYLIDMEHLEYETKKKIIHNYELDKHLTSLRKNTIYSKLNSKACQRITKEIYSSYQSFFNLIKKDKSARPPKKIKNENLNEFHTLIFNQSGWVVNSENEIMINRINFKFKSNLDITNLKIKEIRIKFVNNKWLCDISHEENVNYSDTITQENKILAIDLGLKNLGTCVDNMGDVIVIENKSKKISKYYLKQIGKVQNKLSKKQKGSNRYKKLKNKISELYHKKNKQVKQTLHTQSKQLLSMNYKSIVVGDLSVKKLMSSGDGKYNGINKSFHQSNISMFIDMLKYKSHTYKTDIIKINEAYTTQTNSLTGKQFKIKITLKDRSVKLNDNIEIDRDLNSAINILDRYFNNHLAVMTQPLFKTNVIHKFNLMNKPSQCGKPTNL

SEQ ID NO: 52647 - protein, 500 aa, unknown
  TnpB Polypeptide
LTLPLVTNEHDEVMLYGNFKHYCDAYNWLLEKTIKMWHQVRKMRTYKKLLADIVAVQKDSDERKALYAQRTDFLTKHGFSNTSFEKLIKPFAKYHHLHSAIAQKVATRVWYAWEKFLYKNGKTVHYKRLDDFVSFAAKSNVTGIVFVNNAVPNIKFCGHCIPVSIRKGNTGWYQREALKSKVKYCTIKRDIVRGRWRYFVQLALAGEPPVKCDSNGVMKHPVNDGKVGLDIGTQTLAISGKDICDLRVLAPSAVAELRNGLVKEIARIQRAMDRSRRAFNPQYFNADGTVKRLKRKNGHKQIRKWQYSKHYLKLRYKLKDLYRKLAAIRKTEHSILANELLAHGNVFYVEDMNYKALQKRSKETKVNAKTGRIHSKKRFGKSLGCCAPAAFLTILEQKAKRYDGQVIKVSTFKTKASQFDHTNESYTKKKLSQRFAELSNGTVVQRDLYSAFLLAHLDKNLETYNKCSIKKDFQQFLKLHEQTKERLQSSRDWLPASVGF

SEQ ID NO: 52648 - protein, 334 aa, unknown
  TnpB Polypeptide
MLRCQYNYQLAQRFNWYEQNRCSIDRCSLFVCHIPELKEQPNRFSQQESLVQLKKERPWYKEIHSQVLQEVSKRVDITFDKWLAGDSNGNKSGRPRFKAVGRYKTFTYAQFKQHHFVGNKITLSKIGEVKVIVHRQIPDGFEIKTVSVTKKSNGYYVTLSLDDKTVPTTKPDFNPENIVGIDIGLIDFYVASDNTKIVAPKFLRKAERKLKSAQRKVSRRKKGSNRRKKAITKLGKQHKKVADTRRDFHFKTANNLLKVYDVVAVEKLNVKGMVRSLHLGKSINDAGWSQFVTILTNKAVNAESESYCCESKRYISRVLKLRTQGKETAFSTDS

SEQ ID NO: 52649 - protein, 437 aa, Thermomonas sp.
MQRLQAFKYELMPTGEQQRQMRRFAGSCRFVFNRALALQKERYERGEKKLGYAGLCKLLTEWRNGPETPWLADAPVHPLQQTLKDLERAYANFFAKRADFPRFKKKGQHDSFRYPDPKQIKLDQANSRIFLPKLGWVRYRNSREVLGTVRNVTVSQSCGRWFVSIQTEREVEQPVPQATTAVGIDMGVIRFATLSDGTFYVPLNSFKRHEDRLRRAQQAMSRKTKFSNNWKKAKARVQKIHARIGNARRDFLHKATTTISQNHAMVCIEDLQVRNMSRSAAGTTEQPGKHVRAKSGLNKAILDQGWFEFRRQLDYKLAWAGGHLIVVPPQNTSRTCPACGHVSADNRQTQARFLCVECGFGENADLVGAINILSRGMQLLRDEGQDTPHACGGMEALASVSPDGLWIEPHRRSEAGTHRSDSFRLDAGVSAVGIPRL

SEQ ID NO: 52650 - protein, 307 aa, unknown
  TnpB Polypeptide
MMYLTVKQQIKHLSKTDYLTLRELCHIAKNLMNEAIYAVRQHFFEEQTYLNYYKVYDLLKHSENYKLLNSNMSQQILKEVDGSFASFFGLLKLAKEGKYNTRDCKLPKYLPKDGFTTLVIGFVRLKDNTLLLPFSRAFRKTHQAITIHVPPILADKKIKEIRIIPKAHARFFEIQYTYEAECVQRNRNKNHALAIDLGVDNLITAVTNSGRAFIIDGKRLKSINQWFNKRNARLQRIKDKQSFGKAPTNAQRALARRRNNKVNDYLSKAAKMVINYCVEHDIGTLVVGYHKEFQRKYYNGPVNSDQY

SEQ ID NO: 52651 - protein, 275 aa, Microcoleus sp.
MKQFLTLVVKLQVDINQQQMLIDTASAFASACNWINQNVNPGLTNRNSVQAVCYKEVKEQFQLTANHVVRACARIAANRLTAKHKGKKVKSIQPTSFDCDARTFRFIESNWTVSISTIGKRLTAPIRASSYHRDKLHGQQPTSAQICLHRDGDWYVHLQLKSQTPTPLASASVIGVDLGRRDIAVTSTGKSWSGKEIQKTRDKYSRVRTSLQKKASQGTRSTRRRARQILKRLSGLDVKIPSMAHPQHLESDYSRGKTNSILCFYRRFNRDSRTN

SEQ ID NO: 52652 - protein, 417 aa, unknown
  TnpB Polypeptide
MDRTVRVQLYPTPEQAHSLKTTLEQYTACFNTVAQVGFTTDCSNGVELHKRTYYPLRAQYPDLPAQLVCSARVKATEAVKSALTWKIKKAKAYSKRVEQARKQGKPIPVFKPVRCPHSEIVCIRYDQRSYWVKWETFTCSLATVNGRVALPFTVPAHLTQYVGSKVCSADLCYRQGRFTLHIVVSLPEPIVVPAQEVIGVDLGLNRPAVTSHRQFLGEKRWKEQERRLFRLRRKLQAKGTRSARRHLQKLSKKQFRLHRDHDHVLAKRIVQTSPNGATIVLENLTNIRETSQIGRGKQNKHIENKRRLHSWSFAQLYAFIAYKAQARGIAVVRIDPRHTSQTCSKCGYQHRANRRSQSLFLCRCCGYQLHADLNAAKNIREKYLTSLAQDGTPVLSGPTCQAGYRIGSSEPDASPRL

SEQ ID NO: 52653 - protein, 414 aa, unknown
  TnpB Polypeptide
MQLVEQHVIGRTDPRFAVIDATAFKAKNLYNAALYIVRQSFIFEKKYLNYKKMDKRMQQHEAYQALPRKVSQQVLKKLHANWTSFFKALKAYKENPSKFLERPRLPKYKHKTEGRYLLVYTLQALSKTALRQGVIQPSQLPIQVQTKQHPDSICEVRIVPRNSYYTVEIIYEKEPVQANVDPTFCVGIDLGVTNLAAIASNRAGFVPRLVNGRPLKAWNQWYNKRMKELVNALPKKERGRVTRQMERITTKRNRRVNHYLHTASKRIIDFLVEQGIGTIIIGKNPLWKQEVNMGRRNNQNFVGVPHARFIEMLTYKAALVGIQVEVQEESYTSQASFLDLDPIPMYDPKREDKPTFSGKRIGKRGRLYRTKDGHIFGADVNGAYNTLRKRKPDAFNAEGIAAYVVQPLRLAIAV

SEQ ID NO: 52654 - protein, 399 aa, unknown
  TnpB Polypeptide
MYRTSRYRLYPSKAQARVLADTLDTCRDLYNSLLHWRIHDCGRLGRAPTRFQQQAARPGWKKTHPELKRVHSQALQDVVHRADRAFQDFFRRIKAGEPAGHPKRRDKGYDSLTDTQSGFHLEDDRLCLSKIGAIKARLYRPLVGAVRTCTVRRVCGQWFACIACQAEPVPLPPSEEEVGLDVGLTHFAALSTGEFIENPRFFRRAERSLAQTQRRVSRARRGTRRQRTAKRAASRLNARVRDRRHDFAHQTARRLVTRYGLIAVESLVIRNMVRNRCLAKSISDAAWSLFRLVLTWKTEKVGRSMVHVNPANTSRRCSGCGLVAPKTLSDRRHQCACGLTLNRDTNAALNILQDARRIVFSPLAPTALKGATAHAPSSPSFALLPGLLLCCAPVRGCPA

SEQ ID NO: 52655 - protein, 542 aa, Actinomadura sp.
MSRSAFALPFVVEGPSGVAVRDRLKGLSVEDERVLRLVGAHLGVLAGRDLKIRCADALDHDTDRWAARKRQLTAESSARWAGSITKATHDQWALARRNRRAHMQCLEAGVRMLEHRLSLPIGHKGAKRVPGGYRSKREWFAKSRRLGVLRDRLAAERADWEAGRVHVVRGGRRLLNTRHHLEAAGLAEAEWRKQWEAGRWFLRADGESGKRYGNETIRVAPCGEVSIRLPAPLVHLANAGHGRYVLSSNVAFKHRGVEWADRVEANRAVAYRIHLDAGRGRWYLTASWQRATVPAIALEDARAGGMIGVDTNAGHLAAWWLDRHGNPVGEPRRFGYELSGTAGHRDAQIRQAITRLLHWAGRCGVAAIAIEDLDFSREKTREKYGRRKKFRQLISGMPIGRLRARLVSMAAEVGLAVVAVDPAYTSKWGVQHWREPMSAPHRKISRHDAASIAIGRRALGHPIRRRTAPPRHHQSDDAGHRTFQAASAARGREGPRRPVPDRAHEARRRTQATRSRGTSAPSTVRDARGVRDLGTRPIPGSC

SEQ ID NO: 52656 - protein, 262 aa, unknown
  TnpB Polypeptide
MMDGNPIEPLIKNGKIRIENNKIKLPKVGWVNVRQTIPVGQIHNATVKQSPSGKYYVVLNVDFVPKKITNHGGAIGLDVGLKDFYTDSNGNKVHNPKYFEKSQKKLSREQRCLSRKKKGSRNYEKQKRKVALIHERVTNQRNDFLQKETTRLIHENQVICLEDLNVKGMLKNHKLAKSISSVSWFEFKKMLKYKAEWYGNQVVEVPTFFPSSQLCSSCGYQNREVKDLKVREWTCPACGAHHDRDKNAAGNILSKGLEMLTA

SEQ ID NO: 52657 - protein, 425 aa, unknown
  TnpB Polypeptide
MMQLVEKHTISKTDARFELIDRAAFASKNLYNAALYEIRQHFIFCGKYLNYNQMDKLMQKHEAYRALPRKVSQQVLKLLDKNWQSFFAAKRAYEEDPSKFLGCPKLPGYKDKKEGRNILVYTLQAISKPALRSGIIKPSQLGIEIRTRQRNVDQVRIVPKKSGCYVVEVVYTQGEKQELLDHALVAAVDIGVNNLVALTSNKRGFVPRLVNGRPIKSVNQCYNKQVAKLQKKMSSNHHTSCELERVAAKRTRRIDHYMHTASRRVIDLLVGEGIATLVIGKNPGWKQECKMSRRNNQHFVQISHARFIDMLSYKAKLVGIRVMVQEESYTSKASFLDLDPILVYGEEDETSVKFSGKRVTRGMYQSKSGQEINADVNGSGNIMRKALPNAFAAHGIGDVKKALASFVVHPERIVVPLRTRKSRKR

SEQ ID NO: 52658 - protein, 372 aa, unknown
  TnpB Polypeptide
MLKSFKYRLYPNKEQEIQIQKTFGCCRFVYNQTLAHRKELYETKKKSMSKIDCNNFVNQNLKKEHEWLKEVDKFALTNSVYNMDSAYQKFFKEHACYPKFKSKKNNGKSYKTNCTYNSRPTIEVDFDNNKIKLPKLKWIKAKVHRQFIGTIKSATISQTPTGKYFVSILVDCENFQMKSTGSMVGIDLGIKDLLITSDGDKFENPKTLYKYEKKLAKEQRKLAKKKIGSNNRNKQRIKVARLYEKISNIRKDNLHKISHKFIQENQLIVSENLKVSNMVKNHNLAKSISDCSWYELTRQLEYKAEWNGREYVKIDTYFPSSQLCSKCDYQNTETKDLSVREWTCPCCGTKHDRDVNAAVNILNEGLRLTKSA

SEQ ID NO: 52659 - protein, 368 aa, Aneurinibacillus sp.
MANKAYKFRLYPTKKQEQLLAKTFGCVRFVYNKMLAERKEMYEQFKDDKEMLKKQKFPTPAKYKKEFAWLKEVDSLALANAQLHLQKAYKSFFSGRAEFPKFKSRKARQSYTTNVVNGNIMLLDGYIKLPKLKLVKIKQHREIPPHHIIKSCTVSRTKTGQYYISVLTEYEHQPIQKEVQAVVGLDFSMNGLFVDSEEGKKTNYPRFYRQALEKLAKEQRILSRRNKGSNRWHKQRLKVAKLHEKIANQRKDFLHKESHKLPKRYDCVVIEDLNMKGMSQALNFGKSVADNAWGMFTTFLQYKLEGQGKKLIKINKWFPSSKTCSSCGQVKEKLSLSERVFQCECGLVIDRDWNASINIKNEGLRLLA

SEQ ID NO: 52660 - protein, 264 aa, unknown
  TnpB Polypeptide
VACTTAAGDQYCYSGQEPFRQFRETTERIADAKAKLPDGQQTSTRIQRLYRKRSRRRDHAVNALLRDLVQRLYDDGVETIYHGDLTGVLGEYWSVEANLKARTFWAHRQCLDQLANVCEECGIDVAATSEAWTSQTCPECGEREQTRRHRETLTCPCGFEGHADLVASRTLLEQATNTAVRPTARPVRFQWDDHQWYSVEGGRGGSQRIAHRPARCRRGVDGTPVSGRSGVPGGCRSAGRSLFQADCAFSTALLGRCVAAYIRS

SEQ ID NO: 52661 - protein, 368 aa, unknown
  TnpB Polypeptide
MILSLKIRLKLTKEQEILCKKSVGVARFVYNLMISENKKIYEEYLLNGKQGTYPFVSRYDFSKRITVLKKTEEYSWLSEVSSKVAVHSCIDCDNAFKRFFKGLSNYPKFKKKGIFNSFYVRYDSIKATQRGFKCEKLGEIKTSKAMPKVDKYHNPRIIYDGKYWYITFGIDVPEKVNENNSGKTLGIDLGIKTFATVSDGTVISNINKSRKPKSVYRKIKYFQRKLARCKKGSNNRMKVVKKLKLLHRRLRNIRNNHIHQATTMLVKTKPAKIVIECLNVLGMLKNRILSRVISEAGFYEFARQLEYKCKLWGIEFLKADRFFPSSKLCSNCGCKKDNLKLSERTYHCEHCGNVIDRDLNAAINLSYL

SEQ ID NO: 52662 - protein, 262 aa, Frankia sp.
LRDFAAARANFFGGSHRRPTWRRRGRGEGFRIVAVRSGDVRQVNRRWSQVRIPKVGWVRFRRSRTVPDARSYRITRDRAGRWHVAFAAVPDPIGAPGTGGVVGVDRGVAVSAALSTGELLRCPGLRPGEAARLVRLQRRLARARRGSKRRARLVGQIARVQAREVDRRKDWVEKINPAWTSQTCNTCGTRDRAARESQAVCRCRCRCRGCGQQAHADVNAARNSVLGHQWATTWVTARGGDANRRPANREPQHCTPPLLADG

SEQ ID NO: 52663 - protein, 543 aa, unknown
  TnpB Polypeptide
MDMITLQSRLIKKSSLQKPALIDVTRDMGAFEHHVRAMVGDILHRQETPEDADSLHVQYKKLGLSDYIVGSMEQVAKGAISAAKEALALDIKTKVQRIPKIEAQIKKKTDQLNRAMNAKAQLAARSRARKDKELPPPFQNPFGNWVQPKHYQDGSLWFLVGGIHKKRPPQKYSSEYLFEVQYLDLRIRRLKQEIANMHARLHDLKGRLERLRREQKAGIVHICFGGKAHLRRRNEAKTPKEIEAWRKEWHDLRRRELTLVGRKDSKCGNWMARYDIATHQLSYKSIRGRQVVIDGVHFPHGQQLVEAAVAAHDIAIRNKKLPLDQQVEGWKPGPVTWSIRDCGNAFLVKCMISVPADPHLNSCFDEGCVAFDMNYDHLAVAELDGKGCLLNHRVVRFRMAGRTSDQVNNAISEALEQVFRQAAVANKPIAMEDLDNPDKCLLYGNKKANRKISEFAHGRMTYLAGRKSQKYHLVVRAVNPAYYLPDRETQVYAPDGTVCPRGCGLCHWPPGYGLPGGCAGRADAPDPQACHPRLPSEQLGGPV

SEQ ID NO: 52664 - protein, 481 aa, unknown
  TnpB Polypeptide
MLQTPEWKAACAMPKGKERTVAFSSVSKAFGIASTYDFQKILQAHANASGRTKLLHSDIKQVLADNLWKAWSAWLFDGKGKPRFKGVSRGLHSLRGKKNTTGILWKPELQSVRYAGNLYRVHIPQKDTYAREAIRDGNGWRQAKYCAIVRRTIHGKLRYFVQITFEGNPPTKIIPATTDLKVGIDPSMQNMTLAFSNGVVEKVKTAPSVENRQKDIRRLQRAMDRSKRATNPDNFNADGTAKKGAKTWVYSKAYQRLRFAVADLQRRKADARKNEHGQLINRILQSAGDIRIEKNDWKALQQDARFSRLVANGAPGEFVQRLLGKAKRAGLKAVCVDPERIKPTERDLLTGNTQKHDLWERRIWIEGTDLFIDRDANAALNLLFHSPETEQRDTEGLKQILETSKPNWLDAGVLVEITAANRLSKRELRCVLRNGMKPVSVERLHPKTFLNGVCDAESKKVPAGASCGSESLPNSETPSLQ

SEQ ID NO: 52665 - protein, 412 aa, unknown
  TnpB Polypeptide
VVRTAYKCRAYPAADQATVLNRTFGCVRVVWNRTLAWRHQRYHAEQVKTGFTQANAYLTAMKRDPDLAWLNEVSSVPLQQAIRHQQVAYTNFFAKRARYPRFKSRTGRQSAEYTRSGFRYRDGALFLAKMDTPLAFTWSWPDIDPAAINPATVTVSRDPCGRWYVSFAIEVADPEQLPATDAVAGIDLGIKDFAVTSDGVKIPNPRKLARREQALARYQRRLARCQRGSANRAKARAKVARAHRKVRASRADFLHRTSTALVRDHDVIVIEDLAVQNMVRNRSLAKVISDCGWGTFRQMIEYKAARAGRHLIVIGRWYPSSKTCSACGYLLAELSLNTRTWRCPSCRTRHDRDINAAKNILAAGLAVAGGNPGDACGADVRHSGCSRVRSAVKQEPQPAKAGIPVLQLQGGE

SEQ ID NO: 52666 - protein, 632 aa, Streptomyces sp.
VDEKTGELLTVSVLAERVGWTVDLVSGMSAALLAARWNAADVGVLASGVDGGGKRLPSNAWMALRRLGWAVVPPEGVRVNDRIVRMAQEQAGRLLRAVRWRADLTAGVLATWPAAPGKRTSEEWDAVRVAVPGGQHQPSSVINSRTRQIAAFVKEHDRMPVDLFEVESKPRAARVLLLSACDGQQATIERADAPGRALLRLQLPTRPDPQSYRDWTWVSCPIKLPPVIPAGAVLHLPTLRPHQGRVRADLAYTHPVPKTARSGHVVALGVDWGLNTLLSAGAARLHGDGGITELGAGGMFRAAGVLAKQHRLRRLSERLQAKADHYQRLTAGDEQHVLAAKHTVLSEEISRVCARRSNLNGALAWAAARWAVDQAIAAGASVIYVEDLRSMEARGMGRTLNTRMSQQVRGKIVDRMRHLGAETGIAVVTVPARNTSRHCPRCLTPLRHRKAPDRPTLPGWKWAVCPSYSWQGDRDQGAWRRIASRGLTHQSKTVCDRITGDLAIRTVVDTLEAGAVITPTTPKNGRDRSKTGSTRRKATRPTPRRRRTPSPAGPQSPAGKRPEGHAHPDRPRLPRAAHRHQDVTTISTPTTSRHRPQGAALGAGFHLHAHATPPRWVRVLGPDTRSGSGLLS

SEQ ID NO: 52667 - protein, 394 aa, Actinopolymorpha sp.
MLARIFGCARTVFNDAIRCRDDAHKAGEKVSNTEVQRRVITLAKRTAEREWLAQVPSVALVQSVQDSHRAYRNWFDSMAKRRKGGLVGRPRLKSRKDNRQSFRLTRNGFSLHPNGTLFLAKVGEVRVRWSRDLPCAASSVTIIREPDGHYYASFVVERSAEPLSALDQESGVDVGLTRLATTADTNGGRIDIVNPKHLRRKQRKLARLEREKSRRVKGSANRDKTRRKVAVQHAKVARARRDYHHKRALDLVRENQVIHVEDLNITGMVANRRLARAIHDAGWAQFLRLITEKANHYGRSVQKVSRWLPSSKTCSQCGHLMESMPLQIREWTCPACGVLHDRDYNAALNILAAGRAERENACGTDVRPPTPKVAVGDEAGSSGKPRGTTAPQAA

SEQ ID NO: 52668 - protein, 397 aa, unknown
  TnpB Polypeptide
MCVYANNLYNVGLYQIRQYFFETHQYLQYSENYHLCKGNENYKLLQAGISQQILRICDRNFKSFFALLRKKKSGIYSKKVSIPHYRPKGEKYLLVLSTNAINIKNGYLTVPMSRAFAKQHTDLDAIRIPVPERIVDKKICEIKILPVLNGKALKIQYCYEQEAEPKNLNTDNVLAIDVGLDNLASCVTTTGTSFIIDGRKLKSINQWYNKKLAHYASIKDHQNINGFTTCMNGIVDKRNRQVTDYMHKAARYIINYCISNDIGTLIIGHNVDQKQSVNIGKTNNQNSVQIPFDKLRTYLKCLCERYSITYIETEESYTSKASFLDDDDIPVYDTEHSYVGTFSGKRVKRGLYRTKENTLVNADINGACNIAKKGKQNLSVEGLCRGLLASPLRIRIA

SEQ ID NO: 52669 - protein, 407 aa, Oscillatoriales sp.
MVTAINILVLKAVKVRIYPSIEQQSHLAQAFGCVRWVWNQSLATMSQTYKDTGKGISALTMKKQLPIWKTEHEWLKECYSQCLQSSVLNLSQAFINFFDGRGGYPTFKKPQGRQSIQYPQNVKVLNDAKIKFPGNLGIVKAKIHRDCIGILKTVTVSRMPDGCYYASLLMDDGIETPESHEDGKAIGIDLGLLDFVVTSDGSKYQNPRHLKKYERNLKRKQRKLSRKKDKTTNKRRKARLAVARVHAKIARVRVDFRHKLSRKIVNQNQVIVVENLAVKNMVKNHNLAKSISDAGWSMFCTMLKYKAEAEGKVYLEVGRFFPSSHLCSNTLLSLPKMDLSVREFNCVHCGKRHDRDINAAINIKNEGLRILALGTSVTTLGGNVRPKQYGRKSTNVEAVALELGSPH

SEQ ID NO: 52670 - protein, 422 aa, unknown
  TnpB Polypeptide
MNLTFKYPVYPTKTQQATLLGWLDHLCELQNSARNNRKYAYETEGRFVSRYDQQTLLTAAREKYEDFRAVPQDFQVSVLKRVDEAFDAFRKRCKEGAEKKGYPRYKTRVRSLTWCLRKHKLKTGERVRQNPIIETDFRHNRLKVPKLGEVKIRMHRPLQGDPKEVTIVKKASGWYAHISCEIPDTPKVEPTDAVAIDVGTTHYLTTSEGEKEENPRWYRQAEGLLRKHSKDLSRKKKGSQRWQKQHHKLALHHERTTNKRKDFIGKLVYKLYHQKEKEVLVAEDLNVSNMVKNKHLSKSISDASWGKFFEWCGNIAERDGFHFHQVNPKDTSQTCSTCGKKSPKQLSLAIRTFDCSFCGTSLDRDHNAAINILLRAACALRGERWVTNLDEARNTNKARDAGFEDAEQLLLFDGLLTGSRSL

SEQ ID NO: 52671 - protein, 404 aa, Streptomyces sp.
MIRAYKFLMRPTVGQTAALGEMLRDHCSLYNGALQERRDAYRHASKTSIKYGQQSAQLKDIRAFDPERQGRWSFSSQQATLRRLDKAFAAFFRRVKSGEKPGYPRFRGVNWFDTVDFPKDGDGCRWDSTPHDPVIRVRLQGVGHVKVNQHRAVTGKVKTVSVKREGRRWYVILTAEQEQPEPLPATDSVVGIDMGIVNFLADSGGGFVPNPRHGRHAAAKLEAAQQDLARFPRVRRDKRTANHQRAVQRVADLHRKVRRQRLDHAHKTALNLVREHDCIAHEDLKIRNMLKSPAPKPDPEQPGSFLPNGAAAKAGLNHSISDAGWGVFLTILHAKAASAGREVIAVDPRNTSRTCPECGHISAENRPTQEKFHCQSCGHQAHADIVGALNVLRAGLVRRDANPA

SEQ ID NO: 52672 - protein, 386 aa, unknown
  TnpB Polypeptide
MFLTKTVILKIENPDNNLVNTMQKYSDGMNHVSKILFDIGKSMGAMKLQKLVYSHLRENLGLKSQMSCNIPRQVAGTYKTLKEQIKMGQAKWQQIKFNPTSMTFSYKRDFIIDENAVKLTTINGRKTYSILNYDHAKQYFDGSWKYQASKVVKHNDGNYFFHLSIEKEISGKNITEASSFMGIDVGINYLAVASTTDKKCKFFAGGEIKDLRNHYKSMRTRLQSKGTLSAKRILKHISGKEKRLMRDVNHKISKEIVKFALENDVSVIGLEDLTGVRNATMKKVSRKRRHTHSSWAYRQLHTFIEYKAKEAGILTHYVDPSFTSQTCIRCNHISKNNRKRLNFECEICGYQNNADLNGAMNIEHRTRDFRYILESQGCLSATQTIA

SEQ ID NO: 52673 - protein, 192 aa, Photorhabdus sp.
MLRATKVRIYPTPEQAEYLNGQFGAVRFAYNKALHIKKHTYKHHGVSLNPRKDLKPLLAVAKKSRKYAWIVETLKSANMMKNHRLARAIGDAGWHGFIKKLEYKAAAAGVHLVKLDQWFASSKTCHGCGHKMPEMPLHKRIWQCACCGVEHDRDINAALNIQRKGIQELQAAGLVVSAHGGQRQSVIKTVAA

SEQ ID NO: 52674 - protein, 166 aa, unknown
  TnpB Polypeptide
VIVIEDLNVAGMVRNRSLAKAISDCGWGEFRRMTEYKAVRAGRHLIVIDRWYPSSKTCSACGHLLAALRLSTRTWQCPSCGTRHDRDINAAKNILAAGLAVSACGADVRHPGSPRMAVSLTQAMLNEKPPDDGHRKNILSSSFTHIGIAVFRDSSGTVWLTQDFSN

SEQ ID NO: 52675 - protein, 548 aa, Streptomyces sp.
MSEPKKKVLRPIEAPFVVLGPSGVAIRDCLKHLADEDDKVLRLVGEHLGRLASADLKDRCVDGLEHDRDSWAARKQGLTSQSSPRWAGSITRATHDQWALSRRCQLARIQGLEAGVRTLKHRLSQKIGAKGTKRAPGGYRSKSEWFHKSRRLATLEHRLDSVLGERDAGVVHVVRGGRRLLGNRHHLDKAQLTEAQWRQQWEAARWFLAADGESGKRFGNETIRVAPDGEVSIKLPAPLARLANSKHGRYVLASQVAFTHRGAEWRDRVEDNRAVAYRIHLDVERGRWYLTASWTRPVVQMIPLATARAQGMIGVDTNADHFAAYHLDVHGNPVGDPRRFFYDLSGTADHRDAQVRHAISQLLHWAIRCGVNAIGIENLDFTAEKTREKHGRKKWFRQLLSGMPTGKLKARLVSMASERGLSLVAVDPAYTSMWGDQHWRKPLNSTKRKMSRHDAAGIAIGRRALGHPIRRRTAPPHDDQSDRRGHRTAQAGPGDRGREGTRPPVTERAHDARTRTGRQRTRATSASNTVRDARSSRSWQQMSLLNTV

SEQ ID NO: 52676 - protein, 376 aa, unknown
  TnpB Polypeptide
MANSNRKKARKLQAVKKAKATEKEKTVKKVKPAEEKPIKYTVTTKQQPDGTFEFCGGKGGFNIIKQKNKALEPYGKCIHNYGVLLELIPGDKQAAINQQIGNARVVHNDYLSKREEYYKETKKALTVSQYKKEYLPALKKEKEYLNDTDKFVYENACRNVDDAYNRFFKGLSGFPKYASRTKPNGNSFTTNFTNNNIELKMIDGIPYVKLPKIGNIRFILPKGKLLADIQPHGVSIKAATVSKESDGSYRISLRMESVIDKPVFPTVINAREIISVDLGLKDFGVFGNLEESIPVPNPRWIQVHAKRLRRFQQSLSRKQYDQKTHTGSKNWEKARLRLPKSSVRLLTREGISTTSSQERLRITALHSYAKTLLLRI

SEQ ID NO: 52677 - protein, 443 aa, unknown
  TnpB Polypeptide
MKINSTYKVKIKHYNHIFKDTVTVYRDATDYIINVCLDNWDNIVLCKYKTEQYNYVESLIHKTKDNPNVSYNFDKKFYKLPSYIRRSAIAEALGKVSSYKSNLSNWEDSLIEKVGKKPSLPVAGHIFPALYRDNMYKQTGTYEAKVKVYIRNTWDWLTVKLRKSDVNYINRHCQNRKHCVPALRKRGKEWFLDFPFEENVKLNDTNVKDRTIVAVDLGINTAATVSVMRSDGTILERGFCSLNKEIDSLTHSLNRIKKAQQHGNRKMPRLWAKVKGINHDISSKTAHYIIGIALKHQADVIVFELLDIKCKKKGSQKQKLHMWRKAEVQEIVSNQAHRYGMRISHICAKNTSRLAYDGSGKILRGKDAGFKTNEICKFTTGKIYNCDLSASYNIGARYFIRELTKSLDVNSKLHIEAKVPQCCKRSTCTLSTLISLNAELVSL

SEQ ID NO: 52678 - protein, 413 aa, unknown
  TnpB Polypeptide
MEYSHRYHAYPTQEVAAELEQHIDVHRQLYNHVRWDYTNSPEDDKPSEYDQNNKLPEWKRTWSVFSEMHSKAAQATVARFHRNLSNLRKKKEKGYNVGRLKRQAPTEYRSVTYNQSGFDLDEKRGHDKYAYVRFSKIGWVKIRYSRPLPDRANIKEVTFKKETTGEWFVSFGLETDDANLPEKPNVDSLDTSNSVGIDLGIQNYIHTTDGKTVDWLDLEDDYERLRREQRKLSSKEKGSNNYEKQRVEVANVKRHIRRKVLDYQHKITTWLVREYDAVFVEDLNVQSMLQGDGNACNKQDAAWRQFITLLEYKGDLYGCHVKQVEARGTTKECASCGVETPKPIWVREHLCPSCGFKTDRDANAAMNVLQRGFSELGLGWPESTPVETVTATDTAGFQRVSASHVLETGSLPS

SEQ ID NO: 52679 - protein, 295 aa, unknown
  TnpB Polypeptide
LGLDDRVKTRFGKETNLKQVRVIPKGIGYVVEVVYEKEEDLDDLDKDRIAGIDLGVRNLVAIANNIEEQPIVVKGGICKSINQFYNKEMGRIQRIYERQKIKMGKKSKKLFDRRNRKVKDHLHKVSRFIVDYCVKKDIGTLVIGQNEDWKQNVNIGKKNNQNFVQIPFCMLINQIKYKAEEKGINVILQEESHTSKCSFLDGESVEHHDHYLGKRFKRGLFRSAKGIIINADVHGAYNIIKKAIPKVVGNLRFLRTFINVQVDGIEGVGLHPLRCYIQKSKGFLICRKSPIFEHV

SEQ ID NO: 52680 - protein, 386 aa, Mycobacterium sp.
VSCPAVVGVVAYGAWCVAKPGVKPGYPRFKGKARFDSVEWPKDGDGARWLPDTKRVYLQGIGQVKVELHRKVVGRVKTIQIKRQGRRWMLVLSCDDVPSNALPASDRQVGIDVGIVGFATTGDGEHVDNPCWGRQSAQQLAAAQQRLERAQRGSKNRQRRREKVAAWHRKIANQRKDFHHKQARKLVEAYDLLVVEDLKIANVMRRAKPVADEDNPGQYLPNGARAKSGLSPSIGDAGWGGFVSILRAKAEDAGRIWIEVDPRHTPPKREVPPRMAARNVAMQPPKTVSPKRCSSASDARIAPKQTRWPHATSSGPDWPFTLKRREKKPAASSRRRRHALAASGDDSFRSGEAEVHRTFLAGGLAAGLAAGAGNFGDGVRRHAQPA

SEQ ID NO: 52681 - protein, 459 aa, Mycobacterium sp.
MAKFEVPEGWTVQAFRFTLDPTEEQVKSLARHFGARRKAYNWTVATLKADIHAWRETGAEMAKPSLRVLRKRWNTVKNDVCVNAETGAVWWPECSKEAYADGITGAVDAYWNWQTSRAGKRAGKRVGFPRFKKKGRDADRVCFTTEAMRVEPDRRHLTLPVIGTVRTHENTRRLERLIGAGRARVLAISVRRNGTRLDASVRVVVQRRQQAGIALPDSRVGVDIGVRRLATVGTAEGMVIDQLPNPRPLDAALRELRQLCRARSRCTKGSRRYRERTTQISRLHRRVNDVRTHHLHVLTTRLAKTHGHIVVEGLDASGMLRHKGLSGARARRRGLADAALGTPRRHLSYKAGWYGCQLVVADRWFPSSKTCHACGHVQDIGWSEHWQCQTCSATHQRDDCAAINLARYEDTVSVVGPVGAAVKRGADRKTRPRRAGGCEARKGTGHLAGEQPRDGVRVA

SEQ ID NO: 52682 - protein, 367 aa, Deinococcus sp.
MFNVTYNLVVRRESTPLIRNLIHDGLLSRTQGEYRQGASGPLYAPSSALLRGGNLHALSDSEFRFGPAILSCQAYTLPPEEYRGLMLASPAFSQFDVQPLHAELCTGWPEEHLFHQTHPDWNQRLIEAVRRGPRLNLDPVLVSPTVQAATWLPEETRLSEKKTGWMLSLGFAVPDPVQLNGVTRSAAGIDLGLRRLTVAVHESGLIHAAPGIPRTGLTSTEAGCQLPNPADQQQAQWLNLGLQYAAARTQLHDFLTVLLSSASSVGYEDLDYDQMSPHFQQRSRELGLRDFSYVWLPKRLKQAGIQYEKLPARHTSQICSLTHLRGTRGTRQRDFLNGNNEWVDADENAARNIMRLHLASQIWGKPK

SEQ ID NO: 52683 - protein, 527 aa, Okeania sp.
MQMKAKSKSSKTRQGKDCITHNLTSGVQLELPLFATAESHQQNKKMTSIDLLSCKASTQRPKSSKTLAVDSTSSEKGLEPYWTDYCEAISSQLLLPVGTDLPDLDSSLYSIWSNKTVGKSWFKGKLYIVQNQKWSPMFSRSFTYSPVESTDLESTNKKSKKIRIYLNCEQKQLLRQWIGVARFTYNRTVEYLQQPDTKANWKAIKGGILKNLPEWSKPVPYQIKSIAVRDACIAVREAKVKYSQTGQVQQVKFKSRKNPIQSCYIPKSAVSTKGIYHTKLGLLKFSELLPETFGDCRIVVARGQYYLCLPVDAPKHPAENQGRVVALDPGVRNFLTLFSENSFGWIGSGDIGKIQRLCYHLDDLISRLTQAKSKTKQRMKKAANRMRSKIRNLIDELHHKTALFLVQNFDVILLPTFEVSQMTTKSSRKLRSKSVRQMLNWAHYRFELFLKHKAVEYNKVVVDVSEAYTSKTVSWTGEILNNLGGKKVVTGNDGFRLDRDLNGARGILIKSVVEKFSTALGDTPSAG

SEQ ID NO: 52684 - protein, 610 aa, Streptomyces sp.
MAAGLLAERWNAADVEALASGVDAGGRRLPSNAWMALRRLGWTVTPPEGVRVNDRIVRMVQEQAGRMLRSAAWRAALTAGVLATWPADPARRTAAEWDAVRDAVPGGRSLPSSVITSRTRQIQAFARKTGRLPADVFDLEPPPRTPRMLLLSACDGQQAGIERADEPGRALLRLQLPTRPDPVSYRDWTWVACPILLPPTVPAGAVLHLPTLRVHQSRVRADLAYTHTVPKTARTGHTVALGVDWGLNTLLSAGAVRLNADGTIAELGAGAQFRAAGVLAKQHRLRRLSEHLHAKAGHYQRLTGGEERHPLASRHRVLADEIRYVSARRSNLNEALAWSAARWTVDQAVAAGASVIYVEDLRSMEARGMGRTMNARLSQQVRGRIVDRMRHVAVEAGIAVVTVPARDTSRLCPRCLTPLRHRKAPDKPTTPGWKWALCPDRAGCGWQGDRDHGAWRRIAARGLTHQTRTVADRTSGALAIRSVVDSLETLAVVTPATPATSRWDRSKTGPTRHQTTRPAPRRRGAPSPTAPPGPAGKRPEGHAPTDRTRLPRAAHRHQDVTTISTPTTGRHRPRGAALGAGFHLHAHASPPRWETIQPIPHLTDHTRSPS

SEQ ID NO: 52685 - protein, 310 aa, unknown
  TnpB Polypeptide
MNLMKQVIVLKLEATPEQHQALLETVEAFNRGCDYVAEVAFAKRLPNKIALQPLVYGTLRAEFGLSSQMAVRCISKAVEAYKRDRNIQPTFAPHGAMVYDERIMSFQGVSHVSLLTLTGRVLVPLRFGDYQADRLGRRKGQADLILKGSVFYLYVTIDLPSAPPVEPTGVIGVDLGIAEIATDSEGNQYSGSVVKAVRQRVKEHRRHLQKKNSRSAYKRLQKTRRRQSRFVRDTNHKISKELVQCASSLSKALALEDLSGIRERANGLRTSFGRQMRWLLGNWAFDQLRQFVSECGIMYVCQRKRYCLKP

SEQ ID NO: 52686 - protein, 422 aa, Megamonas sp.
MKSELTFLTQSNFLRHLTKSEYKMLLEMCRYSNNLYNCAVYEVRQHFFKTNKYIPYKKYYHICKLNENYKLIQAGVAQQTLKVVERSFKSFFALLKLKREGKYTEKVCIPKYRKKGDMFNLILSTNAITIHNGILTFPISRTFSKQHNNAKIKIVVPDRLKDKEFREIRIIPLYKGKHFKIQYSYKAELEPKNLNKDNSISIDVGVDNLASCVTNTGTSFIMDGRKIKSINRHWNKRKAKLQSIASRQGLYTTEQIYNLTRKRNNRIDDYMKKTARYIINHCIAKDIGTVVCGYNKDFKRNINLGAQNNQQFTQISFNKLFSAIKNLCERYGMTYIEQEESYTSKASFLDFDEIPVFDKNKKIDYQFSGKRIHRGLYRTKNGTLVNADINGACNILRKSKQNFKYEELCRGLLASPLRIKIN

SEQ ID NO: 52687 - protein, 296 aa, Bacillus sp.
MSQTLTVKVKLIPTKGQIRLLEQSSQEYIKVINTLISEMVEAKESTKKSTKDIEANIPSAVKNQAIKDAKSLFATKVKKSHYKIIPILKRLVCIWNNQNYSFDCTHISIPFMVNGKSTRLKVRALLTDKNNINLNLLKHKLGTLRITKKSNKWMAQIAVTLPKNETAGTKILGVDLGLKVPAVAITDDDKVRFFGNGRQNKCKKRKFRCIRKKLGKAKKVNAIRRLDDKEQRWMQDKDHKISREIIDFAIDNHISVIRLEQLTNIRQTARTSRKNEKIYTLGHSIVCHNLFRIKQC

SEQ ID NO: 52688 - protein, 283 aa, Bacillus sp.
VKKSKYKVIPILKRPVCVWNNQNYSFDFTHISVPLMVNGKSTRLKVRALLTDKYNRNFNLLTHKLGTLRITKKSNKWIAQISVTIPTNEKTGTKILGVDLGLKVPAVAITDDDKVRFFGNGRQNKYMKRKFRSVRKKLGENKKLNAIRQLDDKEQRWMQDQDHKVSREIIDFATDNNISVIRLEQLTNIRQTARTSRKNEKNLHTWSFYRLAQFIEYKANLVGIKVEYVNPAYTSQTCPKCSEKNKAPDRKYKCRCGFEKHRDIVGAMNIRYATVIDGNSQSA

SEQ ID NO: 52689 - protein, 187 aa, unknown
  TnpB Polypeptide
MATSEQELLGTDLGKYFSEIADKRGKNSEGRNRMHALFRSLLKKTGKDNLAKAERIRRHNLGRKKQRARYIRDIGVIKTIVNRELHLLFTRKTNPVKAIVVEDLSARMKAHFGKKWNRRLSDWMRGYLQERIRYKAKKYGIELNEVNPAHSSRECPGVTARTKRTDMGMPLSARIADTTDMLTWLLR

SEQ ID NO: 52690 - protein, 395 aa, unknown
  TnpB Polypeptide
MIISYRYPIFPSKEVERKLVEALDTCRWLYNRLLEELNKARDSGKKLRAYDTQNLIPFLKSENPNLGTVYSKVLQTVNYTLHSNIASLAALKRNGREVGHVRFKGKRWYNTLNYNQSGFKLDQDHGILKLSKIGEIKIKLYRKIEGRIKAVLIKRVGDRWFAVVQAEQEPEPLSETGNAVGLDVGLKSFVVDSDGNSVENPRFAEKAAVKVKNIQRRLSRAQKGSNNLRKLRDKLDKAHERINNQRSDFLHKLSRMYVNEYDIICVEDLDVKGLKEKGHDKEKHRNIHDASWSKFMFMLSYKAQSAGRKLIAVDPRNTSQRCSYCGSIVKKELSDRIHNCPYCGFSSDRDYNAAVNILSAGMEQPVAPIESKPLHHISVMQVLAMMWEALPFRVG

SEQ ID NO: 52691 - protein, 465 aa, Bacillales sp.
VIAFYMDFFATHLNVLDEPVQVPKKDGSIKERTRTNQELLTFAEFHTLATKAHPNPGWPLGEHVPAAEGMPTELRRAAINQAIGKVRSWWSRLKTWEKTAPDQRGREPRLGEPNEPVTFYAGMVGHPAYDLNPQKKKRHTFISLKLHTGLKWEKVPLPVVVHAQAESLLAGSALEKERIDRERKRSKTGQAGSGREERGSGVGTWVAKSLTVYGKRDKRYPGGVRYEIHIPMEKWVNAPPKAEKQRQANPQMPVVTVDLGVGRLAVMGAFVEGRLTATRFVDGRALNHRRHRLLVAIYRKRAQSGRIQRGVQDNVALWNKIRNLDEHAAKQTAVVIVRFAKEHGAKVIVFEYLRRYRPPKEKMSRSGRKNHKRAYWLRGQIMEWVRDLAFREGILTVERNPAYTSQVCPHCKVLGKRQGSRFTCKNPNHRYSADADFVGMMNLYRKWTKTFVYPQRGDESKPEVA

SEQ ID NO: 52692 - protein, 370 aa, unknown
  TnpB Polypeptide
MSGDDLTKDELLSRFLQMEDRIDEVEEKLDQKDERIEELETRLRKYENPHTPPSKRRSGTDESPTSQDDEDDDLRTDGGTPGRKDGHDPEWRSPPDPDEEVDVTCDCCPECGQHFDESVGVSPRLVEEIPDPQPPEVTQYNHHRYQCDSCGTETVATHPDCPDEGQFGVNVIAQSALSRYDHRLPYRKIADRFEQLHELGWEKQRRRVAKAKRSIRRKVLDFQHKLTTWLVKEYDLVAVEDLNVKPMLETHQSAKSKQDAAWSRFLRLLEYKGDLYGTHVIRVNPAGTSKECSQCGVETPKPVWVREHSCPACGHEEDRDLNAAKNILSRGKAKVGVGCSESTPVETALPTSTSLEVDAKRVIEAGSPEA

SEQ ID NO: 52693 - protein, 441 aa, unknown
  TnpB Polypeptide
LKKAYEFRIYPTKEQKDQFLKANGLCRLYWNTCLAEKNEAFSKGENYSIKTFKGTFEKTRPEVLEWGKEVDSTIFAAEWKIITGAWNNFFKSTKKQSLGNFGKPQFKSKKKDKISITFTSQNKPRILKTGYLFLTRKLGPIKGVFHRWVEGEMLHATISQTKTGKWFVKICVDKKDEKKNENGKSVGIDWNCDDEDFISMSNGTKVKCPRLLRQSQKQLKHQQRILNRKMYFPFFQKYGRMPELKNPSDAKKFNECFVESNNYLRQKYKVAKLHEKIANQRKDWLHKLSRQLCNEYETIVVEDIDLTKMASSLHHGKVVGDQGFGMLRTMIAYKGHLKKVKPNNTSKMCHCCGFVNPRVVLGVKKWKCPNCGANHDRDINAALNILHKWNVASQGVVGRELTENTNASGALKNCAMKEETLFTGVYNNRQQGGEALESLTQ

SEQ ID NO: 52694 - protein, 557 aa, unknown
  TnpB Polypeptide
MKIKSKDIVFRMYKTKGPDLLLPLYNILQGELNRILSTPTYVEALSKIELKYKDENGKEQSKLNGMLWREIHEIIGDSLKGKVPDAWYIRILYHNIISLLKSRQEQIKIYEILKSNQYKIDSTLRDKLVQEKLYPTNSYLETLANAKDMPVLPKRKTFILDFSVSDKQMFRVGKNSNAYEIKIHSRKEVKAYNLETGWLSFEMYLPTYIREGFTGKTAKPQFYWDNNKGEFVCAIPCEIKKPPHEYENIMGVDLGKIKVYSATVVRKDSSISDEYVPTEELQNLVDKLKRMNQHIKSVYEKKKRSSKYGNSTERQARRKLDYKRSRNKRTKLQFVIARLVAVEVVNIAIKEQCKEIHLENLSWIKNSGGKWNFSQVQDCIEEVAELFSIKVVKVSAYNSSKTNPVTLEVGTISNRDVTFKNGQKVNRDQLAGLNLALRGPKKQKQRKIKTLNIRKSVVIQRQSRRFKNYLMKKSFVEFESVKLKSKRKIHKEYLRAKQVSSKPDLIKKENKKIVMFSHDKAKSNFAIVSVYKSSNFKLKFYFTNNLQFKHIYTDLLQ

SEQ ID NO: 52695 - protein, 390 aa, unknown
  TnpB Polypeptide
MSHRYRLYPTPEQEAGLLDYCAHARFVWNLGNEQRLMYRPGRGPTPNYYEQSRQLTEAREAELWLASGSRTVQQQALRDLDQAWRNFFAGKHGRPGWRKRGEHEGFRIGNANEWRVEKINRRWSRVLVPKIGWVRFRRSRDVPEAKSYRVTMDQAGRWHIAFATVPQPIPGPGTGMVVGIDRGVAVSLALSTGETYQAPARAHRASLLARRRSRTKRGSNRRERARNCRARLLARDADRRKDWAQKTSTDIARRFDVIRIEDLNIRNMTRSAKGTIEQPGRNVRQKGGLNRAILGSGWGLFAECLEYKAVGRVKKVNPAFTSQRCSACGHVDAKSRKSQARFVCTACGFTLNADVNAARNIAAGCAVTARGGLPLGGPVNREPQLSLLAS

SEQ ID NO: 52696 - protein, 403 aa, Cyanobacteria sp.
MKLLKSFKFKLIFKTEQSRKAAQFAGCKRYVFNQALEMQIQRSESGQKIWSYAELCRQLTDWRHDEETAFLAKAPTHPLQQGLKDLDRAFRNCFEKRSGFPRFKRKGNRDSFRYPDQKQFKIDQPNSRFYLPKLGWVRYYNSREITGTAKQITITRETDGWYVSVQTEEDRNPSPQVIENSVGIDVGVAVFATMSDGVKFNSPLDLKIVSKKIANSQRNLAKKVRGSSNWRKSVSKIQKIYKKIFNVRKDFLHKVSTTICKNHAVVIVEDLKVKNMSASAKGTIEKPGKRVKAKSGLNKAILSQGWSEFFRQLEYKLAWNGGRLIKIAPHNTSMRCANCNHVCKENRKTQSSFECIECKNLENADVNAAKNIQAAGLAVLACGENQLSISSKQEPTVMASCLA

SEQ ID NO: 52697 - protein, 228 aa, Campylobacter sp.
MNTFFKMRYHRDLPNTYKFNQITIIKNHNKYYLAFSIIYDESNVSLISSKDFDIKKAVDIDLNINEITLSSGELIATNSKLLSRAEYDLAFKRLQRKQSRRILKTKKEKTKLSHNFKKIQLKLNKIYEKSSNIKKDSYHKIISKLIQEFDLLAVEDLQIKNMSKRAKLKNIKAKSGLNKSILNTSFYQFSQYLEYKAKHNGKFFIKVNPQYTSKTCSVCGNIKKKSYV

SEQ ID NO: 52698 - protein, 379 aa, unknown
  TnpB Polypeptide
MISYKYNIYKSKNTKHLDKMLRECAFVWNHALNLQKRYYRRFGKYISLNRLQKHFAKRIKRIFLHSQTVQEILGRLDNSYKRFFKKLCKRPPKFKKAEKFNSFVFKQGGFALNGNVFTINKINKRFKFSYSRPYDGNVKQVRVLRETCNRYSIVIVTDSKSNKTYEKSRNGASVGIDFGLKTYMTLSDGKSIQSPLFFNRYQKKIKKCNRNLSRSEKGSNNRKRRLFELHQTNRKIMNLRSDFQWKLAHQLCKQYDYIFIEDLNIEGMKRLWGKKISDLSHSSFINKLTYIASKYGVIVHKIDKWYPSSKTCECGCINKGLLLCDRTWVCPGCGSINDRDLLASKNILRKGISELESTGNSNGCKTGVPYTCIQESQSL

SEQ ID NO: 52699 - protein, 414 aa, unknown
  TnpB Polypeptide
MTRVEQHVIEQSHPQFRALDEMALASKNLWNLANYQVRQSFIFEHTYLDTTAIFHLIKHTDAYQALPTKVANQVLVQVHEAWKAFFEAMEVYRAHPERFRGRPGLPKYLHKTRGRNLLVFELGCVWKAELRVREIAVSQLGRIVETKQQPQSVRQVRIVPKSDHYVVEVVYQSAGKCVEGLEPDLFVALDPGVSVLAALTSNKPGFVPRLVSGTSVKAVNQLYNKQREHRQKQLAKGKAPQFSSHRLDRITTKRNRRVMHYLHTASRRIVELLVAEGIGTLVLGKNPFWKTQVELGKKHNQEFVQIPHAKFLDLLAYKAEAVGIQVMITEESYTSQASFLDLDVLPSYDPMQGVDQEDKPQFSGRRDGRWYRVKGRAPIHSDVNGSYNIGRKVFPTAFGPGIEATAVRPRRLAV

SEQ ID NO: 52700 - protein, 409 aa, unknown
  TnpB Polypeptide
MRKALKTKIRGLTALEYDRLKHLCQVSKNLYNQALYAVRQTYIAAGGYLNYGAVDRMMKETVNLEGGINYRMLKAGVSQQILRRLDRNFRSFFALKKKRPEMRPRPPRYIKGMLYNLIFDSQRFRIRDGQAILEKDLSVKIPVCISGKKIVQIEIIPKFGYFNLCFVYEDDTEYQQVKDAGKTMGIDLGLNNLAACATSAGDLLLINGRPMKSINQFYNKKIAGVKSELKKRNNRDWSGKAQKLTDKRNSKIADYQHKASRAVVNFCLDKNVSEVVIGNVSESVNGVSLGKQTNQNFVNIALGQFVSKLEYKLEAHGIKVVKADESYTSKASFFDNDPLPEKYEPGEKHHFSGRRIRRGLYRTAEGILINADLNGAFNIIRKAVPEFDFQKLKDGIEGLFIPHCRLLTC

SEQ ID NO: 52701 - protein, 418 aa, unknown
  TnpB Polypeptide
MRRKKKETENPIPTIIRTHKIRIYPNKHNQGVFQKYYDYQRSVWNRAIDERKAQYKIYKEMKATGLFTQKELNKNYYPNTRNLRKMEKFDWENNFHCRVREGQFDNLCQAWNNYFNPNMPNQQKPKYKKKKEVETHKTLSLRGIRTKDKWLFLPKSQKAKPEYRFTKIKMAESLRFNGRIVDDFSVSVKNNKWYVNISVETPLEEKSAISKQSTGIDVNVGSIDYLKKDGQEAEYGRFYLLPKSLLRQYDKIKFYSRLISKKRNKNPYYIHSKSYHEAITKLNNAYTKAYNIQEANLNNIVKYFFTNYNRIVIEDLDVNSMKMNKRLCKSLHRNAFGRFKQKMINKSKEYNVEFILADRFFPSTQTCSECGHVKTGDEKLFLWGDKYGNDHNTYVCYNCGTIQDRTENAILNLANYGE

SEQ ID NO: 52702 - protein, 301 aa, unknown
  TnpB Polypeptide
MLRAYKYRIYPTDEQKVLFAKTFGCCRFVYNWALNLKIEAYKQDKKYVTYKEVQDRMVNELKKGNQWLTEVNSQALLNPIRNLDTAYKNFFRDTHAVGFPKFKSRKSKQSFQCPQHCNVDFVNGTISIPKAKDIPAVLHRKFKGTIKTVTISMTSSGKYFASVLVDTAIHELSASAIQGDTALGIDLGIKSLAVCSDGRTFDNPKNFKRSLDRLKFLQKRLSRKQKGSSNRNREHIKVAKLQEHIANRRRDNLHKITHALTHDSQVRTICMEDLNVKGMMGNHNLAQAIGGCIFWNVYDLS

SEQ ID NO: 52703 - protein, 356 aa, unknown
  TnpB Polypeptide
VKLSFNISSEKAKKILSTVWLFKIACHRILSKSKEIKDMLVSSKVAWIKMFKNHAYEIIPNKRYSYGVVYLVYGIWESARRLRINYDDVELSDWLFIQHYEREVNGNVIRVYEDGSVLVTTYGYDGSKDRILVKAKPNKGQAELLNSIVESKEKYMPKLIIRDYGVRDDKLYVRGEVHISISYDFYLKHVKRYNEPKGSLIGGVDVNTDRINLAIIDEDGKLRDVKTFWFREVTARGYPRRRAWSIIGMRVHELLKYAYHHGVSTIVLENPEVIGRMRLAWIRNGKRLHRNYNWRVTIFRNRIIEMITMKAPIYGLRVNYVNPKGTTHSREHDDIMMRYGLDRHTASAYLIALKSI

SEQ ID NO: 52704 - protein, 236 aa, Hassallia sp.
MTEKKCLKPPLHRKAIGIDLGLTHFCITSNGNKFDNPRHTKKHSINLKKKQQSLARKQKDSNARKKARKLVAKIHSKVSRVREDFLHKLSRKIVNENQVIAVENLNVKGMVRNHNFAKAVLDCGWGQFCTMLKYKAQWEGKTYIEVDRFFASSKTCSVCLNKVDSLALDVRSWTCTKCKTQHDRDINAALNIRNEALRILSLGTSDTANGGNVSQPGKTSVLLDAVPREVGNPIPL

SEQ ID NO: 52705 - protein, 179 aa, Hassallia sp.
MYKAYKFRIYPTNEQQKALAKSFGCCRWFWNYSLNLCQETYKVSGKSLSRGAIQGLLPNLKKDYLWLSDAYSQCLQYVALNLSTAYKNFFEKRAGFPRFKSKHDRQSISYPSNVKQDGDYLKLPGKIGKVYCKQDRKFDGQLKTVTISLNPDGKYFASVLVDDGKKMPEASTSPKSYRY

SEQ ID NO: 52706 - protein, 421 aa, Hydrogenophaga sp.
MSGAKITRAAVLRLYPNQQQASSLRRWQGGLRYVWNAALDCVFTARDINGRWPSKAEIHALIVGMKKMAGTEWISDMPAHALLTLSDDLHKALVNWFNGLSGKRKGPKIARPRFRGKVAKQLSVYMVNQNTSFGDGLVKLPKLGKVKFRGCDLPAGRLLSSRVYREADKWYMASIFECAVPQMNAAPVECVGIDMGLKTLATIYDGLNIREVPKLGALRKHEQRLKRYQRRMSRRVKGSRRRNQAKQAVARLHQRIANIRKDYAHKATGEIVASAQTIKVETLNVKSWAKNRSISKSTADASVGMFLSMLRYKADWAGRSLVEVGQWEPTSKTCSDCGAREPGVVLGISRWVCRGCGAIHDRDHNAAKNIYAYGEERRNVTGNTVESAWTGGDQAGAIPLVPQDETRILKRIGRESSRALV

SEQ ID NO: 52707 - protein, 390 aa, Streptacidiphilus sp.
MVACVKIVVQVKLLPEAGQVAVLRSTLRTVNEAACWVSAVAFERGVPREYELRKHTYAELKARGLGAQAAQHVIKKTRDAYTTLAANIRAGNLGKPGSKRRVKAESKPIVFRPQAAQPYDDRCLSWQLDQQTVSIWTIAGRLKDVRFVGSADALIMLREHRRGETDLIERDGVFYLIAVCEIPEKPRNENPASFVGVDLGIVNIATTSTGYRAAGRGLDRHRKRQLDLRKKLQSKGTKAAKRLLKKRNRREARHAANINHIVSKTIVSTAERTGQGIALEELTGLRDRVRLRKDQRQQLHSWGFHQLAAFIEYKARRAGVPLVYVDPAYTSQRCSQCGHLERGNRVDQATFVCRACGVTLHADDNASHNIARKGETVWTTGRQSRVPAPV

SEQ ID NO: 52708 - protein, 387 aa, unknown
  TnpB Polypeptide
MLKAYKYRLYPEGKAKRQIMCNLGCARWVYNWALQRKIETYKQTKKAVSGFALMRELTVLRKMDDTKWLADVDRHSLNKAVQNVESAFTRFFREKKGFPRFHSRKGRQSYKVDTTIHPDFDNNRIKLPKTGWLKCVFSRKFDGEIKHAVVSMEPTSKFFVSILVEDGKQIPVKPKLNREKAIGVDLGLHDFAVLSTGEKIPHPKTLRKHEAKLKHLQRMVSKKVKGSSNRRKAVLKVARAHEKVRNTRKDFLHKLSTRLVRENQAVCMESLSVHNMLKNHKLAKSISDSGWSQFGGFVRYKCEWQGKHFIQIGRFEPSSKMCNKCGHINDALTISDREWVCPKCSEKHDRDTNAARNILSFALQEQNLITPVGYGEEPVERAVVTCL

SEQ ID NO: 52709 - protein, 351 aa, unknown
  TnpB Polypeptide
MIVRTLKLKLTKTQETQLNQWLWNLTGVYNWAIKKIEHDAQDKIYHSAFDFVNLTANHSKQMEIPSHTLQGISSQAYNAWQRCFKRVAKKPHLKGFRNKLKSIPFPDPLKQPKDNKIGIQGIGKVRYYKQELPEAKIKCGRIVKRASGWYLCLWLDTNHSFPVRQTDKAVGIDPGFDTLITLSDGTKIENPRELRKGTKRLAQAQRSCKKKLVARIQERQANRRRDRNHKISRWLVENYKTIYYSDDNFKAMAKRFGKSISEAALGNLIGMMNYKCRIGGRKIVPINSFRTTMTCSNCGALTGPTGLSGLAVRYWICSACGAHHDRDVNSAKVVFNIGLGISHEGGLGNVA

SEQ ID NO: 52710 - protein, 217 aa, Parasutterella sp.
MGVKRFVTMSNGDFVEPLNLFKQELEKLAKLQRKLARQKKGSRNSRKTKRKIARLHHYIADSRRDFLHKTSTKIAKNHGIVYVEDLKVLNMSASASGTKESPGKNVKQKSGLNRSILDQGWYGFFRMLSYKLERRGGRLIKVDPRNTSRTCPRCGLVSAENRKSQAIFACIGCGFRSNADEVGAINVLRAGRARLACGMSGAVRPLSAGTQRDRLQH

SEQ ID NO: 52711 - protein, 382 aa, unknown
  TnpB Polypeptide
MANKAIKYRLYPTTEQRVMFAKTFGCCRKVYNLMLKDKIESYKITGKFVLTTPAKYKTDYPFLKEVDSLALANVQLNLQAAFRNCFDKSHKIKTGFPKFKSAKHSRKSYTTNNQNGTIFITDNSIKLPKVGKIKAVIHRKPDSNWILKSATISQDNDGKYYASILFEYDNTSINNYKTDINNAIGLDYASEGLYIDNNGNKGNNHKYYRESHKKLAKAQRKLSRMKGSKKNEIKSNNYIKQLNKVNKIHKHIANQRLDNLHKISTEIANQYDVVCVESLNMRAMSNKGFGNGKATLDNGYGMFLNMLEYKLEDRGKYFVKVDKWFSSSQLCHCCGTVHPEMKNLTIRTMKCNCGMIIGRDQNAAINILKEGLRILNNSYKIA

SEQ ID NO: 52712 - protein, 557 aa, unknown
  TnpB Polypeptide
VPRPGRGCRRWPRPPRAAAAARSAGRFAGTRPAPCRSRPAAGSRTSTRPARRAVRSTGGTAPAESPVPRPPGRPGRRGRPAVRPVPSSDSFRGYSGLQAGEETEPLRSRAGKADPPPGRIGVHPTRDPTAHDRIVRLWTVSRTVKRAFRYRFHPTPGQAAELARTFGCVRLVYNMALAARTEAWTLRRERVTYNATSAMLTGWKKTDDLAFLNDVSCVPLQQALRHLQTAFANFFARRARYPTFKSRKRSRRSAEYTASAFRWRDGRLTLAKMSEPLDIVWSRPLPQGAAPSTVTVSQDPAGRWFVSLLCDDRIEPAPATTAVVGVDAGLDSLFTLSTGEKIPNPRHERRDRDRLARAQRNLARKAKGSANRAKARLAVARVHARIADRRRDHLHKLTTRLVRETQTIVIEDLTVGNMTANHRLARAVSDAGWRQFRSMLEYKTRWYGRDLVVVDRWFPSTRLCSACGVLAERMPLAVRSWACRCGQAHDRDVNAARNILAEGLSVIACGGGVRPHRESSSRTGRSSVKQEPPGATQGIPAPSRRGGLSNRAVHSRP

SEQ ID NO: 52713 - protein, 301 aa, unknown
  TnpB Polypeptide
MQKWHIKDSLRGQAKFPRFKKKKNQDVNIYFPKNGKGDWTVKRHKIQIPTLGFVELKEKGYIPTNAKVVSGTVSMKAGRYYVSVLCDIVDNNNYSNVSNEGIGIDLGVKDLAIISNIDKPFKNINKTIAVKKLKRKLRRLQRQVSKKYEMNKDGKKFIKTKNIIKLEAQIRTIYQKLSNIRLNYAHQITNILVKNKPEYIVIEDLNVKGMMKNRHLSKAVAEQSFHEFRRQLTYKCSWNNIELRIVDRYFPSSKMCSECGAIDRDLKLSDREYICKECGMILDRDKNASVNLKNAKVFKVA

SEQ ID NO: 52714 - protein, 396 aa, unknown
  TnpB Polypeptide
MTILSHKMRLYPNDRQSTLLYKTCGCNRYAYNWMLNRANENHKNGIKYNKLALKNEFNAFKLSLPFMHEVNAHAVSNGAVDKLDSAFKRFFNKLAKYPKFKSKKNGVGSFMLTGSEIKYDSANRRVYIGRIGWIRLSETLRFECTKLYRITVSNRAGKWFISFALEVDDRKLCENQATAIGIDLGVEKSATCSDGTVKDNPRISTTYAIRLRKLNKELSRRKKGGKNWWKTVFKLRKLHARIADVRQDYTHKMTTEVSKQYGIICLEDLNVKGMVRNHRLARHILDVSFGEIRRQFEYKAANEVRYVPRFFPSSKRCSKCGYEHDMPLNQRRFICPQCGLDIDRDLNAAINIRTFAVSSTGSKKPVAKKSMTKSQDRVKTSHEQEENDISAVCRNV

SEQ ID NO: 52715 - protein, 424 aa, unknown
  TnpB Polypeptide
MSIKETLKLTREKRTHQVCKVFELKVDVSHLSKKTKNDLNLLFVEAKSIYNHFLAQLDSGTKTRDIDTKIKEVLVKVKEDFETRELTILSSQMKQGLLTRMENSLKALSALKKKGYKVGKLKFKSFLKFNAIPLKQYGNTYRIINGNYIHIQNIDSQIKIEGLKQIEQNFEIANANLTKNGNDFFIKVTCYINEEDMQQMENKIYETLGIDFGCQHQLVLSNGIVIDYLISNAKRLRVLNKEMHRRKKHSKNYNKTIRKRQKTYRKENNQKKDIKKKIIHVLNENVEHIIIQDENVKFFQKKHGKKIQKTGIGGITGNLKKLPTTIVVDQFFPSTKQCFCGAKQEIPLWQRTYSCPECGLKMDRDLKAARIIEIEGCKQFLIPSGRRKSTPVERAPLLSGLKEISHLKARVLVETGSSDALAEE

SEQ ID NO: 52716 - protein, 583 aa, Microcystis sp.
MAKKKSLKAKLTRISRSKKKTDRPSYQRLIGIESKIEYHPFLEDWGKDYQSLLRRALNDRQKGLSEDEIEKNYQTQFDIQWAWADSLATNASSVFDQLTTAKANHIELLETDLKAGFRKVREKLEVLEKAYQNPTTANGRNFNKRLLGVKSKLERLQRKKQELSDLKETDRLHICWGSKKLFKAQYHLEINGYANHEEWLEDWRLHRGGNFYSIGKGSVDGNNPVTKIHHQAERTVPREPRNQHAHQEEDDIFTVTITAPRCYQEIYGTKITLDFVVNGRRKHDLLYALESNKPVTVQIFRREHKENKWYIHLSTYVPAISYISHQINGCLGIDLNAQSIDLVYVKRDGNLHSQEGKKTLFSWEIPTGTTGQVEASLRNIVAEIVRIAETFQCPIACEDLDFSQKKATLRHSPKKYNRMLSGFVYDKFRAFLVARAEKYGIEVIFKNPFATSVIGMVKYMAKYGLNSAFSAAMVIARRALGFCERIPRSYWPIIGICTESPEDGLVQSWGQWGKLCKLLSEQNISRHQMFEPAKVLEALQLAVSRTRRGESPPSKGRKVKSASLPVVFSNSQTHGESPMPQNC

SEQ ID NO: 52717 - protein, 424 aa, Okeania sp.
MYLTQKNKIRNLSSTEFKALKALCRLSKNMYNVGLYSVRQFYFSEGGYLRYESNYHYCKENENYQLLQTDIAQQTLKVVDRSFKSFFNLIQKAKESLYRFEQIRMPRYLKKEGYFPLIIPRIRVKDGYFNIPMSQKFKAEYGAVKIPFPERLADKNLKEVRIIPRFDAQFFEVEFITEEEAKPAVQTDNVVAIDLGLDNLATCVSNTGSSFILDGRKIKSINQWYNKENSRLQSIKDKQGIKGLTKKQISITVNRNNKVRDYLNKAARYLINWCSKNQISTIVVGVNPGMKQNINLGKKTNQKFVQIPHHSLRLKLKAMCDRYGLAYKEQEESYTSKASFLDGDSIPIYNADNPTEYSFSGKRIKRGLYKTREGKLINADCNGAANIGLKSNLNGFIPDRLEASLAMPLRVKFDRTSVRQICSA

SEQ ID NO: 52718 - protein, 384 aa, Microcoleus sp.
MYALKLELKLNNAERTLMARHAGYARFCYNLARTLYVGVMDIPISRTRKIAAIKKTFTNFIKKQPEYQWTNTLSSRVYQNAFIAFNNSLERFFKGLSGFPNFKRKKSGDSFTVDSSKGPVFQMAGNRIKIPTLGTFRLQESVGYNCCSQTFTISRTADKWYVSFTIKADKIPPLYHEVSQPTGIDLGVSTFATLSDGTVYQLPDSLKKAKIKLGKLQYRNRNKQLGNRKLGIKASKNARKFARKLAKKHADIANRRRDFLQKTTTEISQKYARVCIEDLNISGLAANHKLAAAILDSGFYEFRRELTYKSPIYGTVVEVVDRWYPSSKTCSKCGNVQPMSLSDRLFVCEACDNSCHRDLNAAINLASVSRDRVRMANPEFTPVE

SEQ ID NO: 52719 - protein, 524 aa, Leptospirillum sp.
LTQSRGKPRPSGRGRIARTAWPSLSWLLVGRLLLFDVLANHPNGGSPTTSGKVAGGPERSFPQFFLNPRVFFPPDQSTGDTLQAVDQGRNRNLRRIMDQQVNMVVFPVELDQSRFKVMTDRGEDPLQILQDFLREHATPVFCDKDQMNVQKLVWEQRKLSRKYRKGPKSRNYRKQKIHVARAHERVSNMRLDFLHKASTSIGETQAIVYVEDLKIRNMTRSAQGTRENPGKNVRQKAGLNRSILSQGWGTFLSLLEYKLLRRGGRLVRVDPRNTSRTCFACKHVAAENRPDQATFRCVLCGYEDHADTNAANNKEKNDVPEVQPMWRNPDSGRTGRREKGENMTHETWILTYCGHHLDLHRPDPEKIEIEDIAVGLSRECRFSGQTRAFYSVAQHSVLASRIVPEAFALEALLHDATEAFIRDLPYPLKTLLPEYRRIERGLDLAIRLRFGLPETPSREVHLADRILLATEKRDLMPVDPTPWNILEGIEPLSDPIDPWSSVRSMGLFLHRFLELSVNEVVRVV

SEQ ID NO: 52720 - protein, 276 aa, Thermus sp.
IENTTHKKAFVYRLYPTRAQEEALVRILDLTRELYNAALQERRDAWRKAGKSVTVYEQMRLLGEVKAVRPEYQGVYAQVLQETLKRLDLGLTHFVATSEGEIVEAPRHFQKAEEKLAKAQRELSRKKKGSNRRKKARLKVAKLHRKIANQRKDFHHKVARKLVNRYGTIVHEDLNALGLARTRLSKGVLDAGWAQFIAILSAKAASAGRRVVAVKPHYTSQICPECGSVRRKELSERVHACECGCVLDRDVAAAKVILALGLDGALGDGQRVAAPA

SEQ ID NO: 52721 - protein, 386 aa, unknown
  TnpB Polypeptide
MREHCSHARFVWNLACEQQSWWRRGRDSPPGLAEQCRQLSDARSAFAWLAAGSVIVQQQALRDFSHAMANFFNRTHGRPSWRKAGRHEGFRIVAVKPEHLRRHNRKAGAVWIPKVGWIRFRLSRAIPTGVKSYRVTRDRAGRWHVAFAVVPRPIPGPGTGEAVGVDRGVAASAALSTGKLLRVPRLSPARQRRMRLLQRKLRRAVRGSNRRAHTRVQIARLFARQSDLRKDWSEKTSTSLAREFDWIYVENLQIKIMTRSAKGSTQKPGKNVRQKSGLNREILAAGWGRLVRRLEDKAPGRVQRINPAYTSQRCSACGHIAAESRKSQALFSCVACAYTENADVNAARNIAAGHAVTARGGDGAARPVNREPQFPHVAERLKSLPK

SEQ ID NO: 52722 - protein, 321 aa, unknown
  TnpB Polypeptide
MGVAAGQQPAAGPAWAAAGRRLSGAVPRTHRTRTHRRAVDGRGPLRLAKGHPVSWVRLAHPIPYPVEQVRAVTLLADGGRLWLAVTAAVPIQPQHLDPGRVAGVDLGIIHPYAAVADEAALLVSGRAIRAESYLHLRDQQARHARAARRAPKPGQRGSRRWRRHRLRVRREEARHRRRVHQAQHEAAKQVIAFAVRQGVGTLLVGDPKHITSQNVGRVQNLRLRQWRRTHLVHALRDKADRAGMIVRMVDERGSSSTCPVCRRKVPKPKGRRFSCPHCRFQGAPGSGRCRKHRRHPRRRTHEYSSACARRAPPGRYRAGTT

SEQ ID NO: 52723 - protein, 146 aa, Desulfosporosinus sp.
VKGSKNRAKQRQKVAELHEKVANQRKDFLHKLSRQIANAYTAVAIEDLNMRAMAQCLTLAKSTNDNGFGMLKTFLAYKLAEQGKQLVTIDKWYPSSKRCRYCQAINEELTLADRIWSCKCCGAELDRDINAAINIKNEGCRILGIA

SEQ ID NO: 52724 - protein, 404 aa, Streptomyces sp.
MIRAYKFLLRPTVRQAQALAEMLRDHCSLYNAALQERRDAWRHPSKTTVKYGGQSAQLKDIRAFDPERQGRWSFSSQQATLRRLDKAFAAFFRRVKSGETPGYPRFRGVNWFDTVDFPKDGDGCRWNSTPHDPATRVRLQGVGHVKVNQHRPVAGRVKTVSVKREGRKWFVVLTAEQDQPEPLPATGSAAGIDLGIANFLADSGGGFVPNPRHGRRAADKLQAAQQALARFPRRKAKDRTANHRRAVGKVAQLHGKVRRQRLDHAHKTALGLVRAHDFIAHEDLRIRNMSKAPAPKPDPDKPGTFLPNGAAAKAGLNKSINDAGWGVFLTILHAKAESAGREVIAVDPRDTSRTCPECGHTAKENRPTQEKFHCVACGHHAHADTVAATNVLRAGLVRRNANPA

SEQ ID NO: 52725 - protein, 565 aa, Prochloron sp.
MQPPDLEYQLKVLDDGQSSAKSKLSEPQAVKEDSASKSTIRKISPLSSMQSALLTPKKMTKLRKLNFYCEHTQKGSWLKKLDRDSILNGENLSIFWNEFIKVMSDSLSAPTPIGSSDFASHWLNGCAKYQDVNSWFNMNAISLANKNSLRISCPSPTAFLLGYTDCENTKNKSKKSYKKNPRNQTKKQPPNALRKIRVYPSKELHRIWKQWLAAYRWIYNWTIAKISKDGLSSAYDLQNQARAATRPNWVKELPGHQLQEAVADAVDAVKQAKANQGTAKFKSCRAYSQVIKFKAGNFKNGTWYCRVTKGLSFVSFQPLPSECIYGTQLVYQRGKWFACFPEYRPVTNTDCSRVIALDPGNRTFLTGYDGETILEIGKKDIGRINRLCSHLDQLMSKIACSKAKRQRFKMRQAANRIRERIQNLVKDLHNKAASFLVRHYKLIFLPIFEISKMVLRSARRINSKTARNMLTWSYYKFTRNLEQMADRNGVIVVKCNESYTSKTCPNCGHIHDRLGGSKVFRCPECGFTADRDANGARNIMLRAMRATAFTISGDAILISDFSSNG

SEQ ID NO: 52726 - protein, 423 aa, unknown
  TnpB Polypeptide
VDSIAQHKGYKFRIYPTKDQETLLGKMFGCNRFVWNHFLNKQQESYLKNKESTEETRLKGYLSYYENCENLTKLKKESETSFLKETNSQSLQSTLKELDNSYKRFFNKTSGFPNFKKKSNKQSFKVPQNIKIKDNKFLIIPKFLEGIEMVYHRPIPKEGKILYVTISKTPSGKYFASFCVEEPIKESIKKPNKTVGIDLGITTFATLSDGTKIKNPRNYKKLENQLKKQQQNLSRKQKGSRNREKQRVRVARIHEKISKKRTDFLHKTSKKIIDENQIICLETLNVDGMLKNHKLAKHIQDSGWRTFINQLEYKGLWHGRTIIKINRWFPSSKVCFGCGFKKDDLSLETREWVCQGCGATVDRDLNASKNILRQGINIMIDSNKNSLGTNENRCGGVVRLGETLADSDEASKVPEKEAHSFIL

SEQ ID NO: 52727 - protein, 356 aa, Desulfotomaculum sp.
VIIVHRFHIEPTKEQEQKLFLTLTLCRRLYNAALEQREICYRQRGKSPTCTSQKNELPMLKRELPEYKQVNAQVLQDCLQRLDNAFGRFFNSLAGYPHYKDHHHYRSFTYPQADKQDHFKKSGCIYLPKIGHVKMKAHFEFDPTTVSRINVKYQNGKWYVNLTSEIQEADTVEIVNKVGIDVGLLTFAALSDGTKIDNPKYFRESEKKLARLQRRLSRKKKGSNNRGKAKAKVTRLHDKIANQRKDFLHKTTCGIVKKYDLIAVENLSVKNMVKNRRLSKSIADAGWGKFLDYLEYKCLKYGKTFVKIPPGGTSQTCVCGAHVPKDLGIRVHKCPECGLIADRDLVSAMVLLQRAS

SEQ ID NO: 52728 - protein, 720 aa, Actinomadura sp.
MSGTTAASAVDAAEVSVGGRRFRGKGKGPVWRRPSDGALTVVRLRLTPDPAARHRLEALFEASWKLKKALKRDARSRALAYRAGHRRRRDREAAKQWRARLGLSRDALERTAYRHLDASGHLKHHLSKAVAMHLANEVWTGVERHLFPDASGRRHGPPRVGPWWEFTRIPGRARSHTRARKWETFRLHGTLAGHLTQYAAPGLPDEPGELTPQRAAALSAGVSVLAQPRTLPVPSPPRSGGRGRGSWWEYDGPLTLVYAGGPDGRRGELVVPVRLPQGAGQWPHLLHTLADPQAWHKVDLVRRRDPAEPGGWAYEAHLMVLAPAYVPASTAARRAAAPSMRRGGVDGNVSNLAVVSVPAEPDAAAASREAAVVSSKVSMSQDERARLARRERKRRGRQRALERSRRASNAAQYELSRRQRERHQRRQAAGLTARQVPVPGGPRVARADGRPRRSHRRDTLSTSYLRLRARQTAADQRTAQSRTSRARDIAGQIVAVHGPHLVIEDCDITTWFRLWGPACGRFTPGMLISALEQECRAAGGRLLRASTRTTALSQHCPCGRRVPKHLGVRTHHCRIEDGGCGLTGDRDLVAAALAAFTHLHDPGDPSTARVDYTTSRRVLCAGGPGLPGALTESTAPIPINGASNAEVGNAAATHHPRPRHKLQRGRKRAASARRTRTSTVPTPDEPPPPTTGGAPVTPDRHRPRTRLSNKTPPQDLLNRP

SEQ ID NO: 52729 - protein, 430 aa, unknown
  TnpB Polypeptide
MRQVERHWIKEGHYLYPICDDLTFKAKNLYNAGLYQIRQSIFERNKCQEEEKPSVLSWTELVSQFRKEKQGDMLALPSKVSTNILKILGFSINSYYQLLKGFHDKSNPSVTNKPRLPRYLHKTEGRYVVEFTNQTFSKKRGSNGELILCPKDLKLPIPTKVEDPQCVRIVPKLNAFVIEVIYDVEVSLLKHTGTYAAIDLGVDNLASITFSDGVNPLLVKGTKIKSINQGYNRLIAKAKSKLPANQKTSQGIHRLWRNRELKLQSELHKVTSFLSLYFDEMSIEKVFIGKNQGWKQEVTLGKKINQTFTQIPFTTFISQLIYKCLARGIEVVEQEESYTSKASFVDQDEIPTYGEIDKKATFSGRRVSRGLYRTKNGFLLNADVNGSYNILVKGLLTLGKSLDREKVSFHTRSLNDWQSMANKDLLLKYM

SEQ ID NO: 52730 - protein, 402 aa, Mimivirus sp.
  misc_feature (144)..(145): Xaa can be any naturally occurring amino acid
  misc_feature (158)..(158): Xaa can be any naturally occurring amino acid
  misc_feature (161)..(163): Xaa can be any naturally occurring amino acid
  misc_feature (168)..(168): Xaa can be any naturally occurring amino acid
  misc_feature (197)..(197): Xaa can be any naturally occurring amino acid
  misc_feature (203)..(203): Xaa can be any naturally occurring amino acid
  misc_feature (206)..(206): Xaa can be any naturally occurring amino acid
VKEAVKNVKPKVPAKKRIITGSKTKKKVFVKKKPPDKKPLKKPVKKTVKTDKPKSIYVPNKDLKISKWIPTPKKEFTEIETNSWYEHRKFENPNKSPVQTYNKIVPVVPPESIKQQNLANKRKKTNRPIVFISSEKIRIYPTKXXQKILQTWFRLFAXMYXXXIDYIXSKKVVLESGRINVAATRKVCNKISVRKAXKTIRDXLIXSTNPSIMTHIIDEAIGLACSNYKTCLTNYIERHIKKFDIKPWNMSKRKKIIIIEANFFKKGTFCPTVFPKMESSKPLTMIDKTVTLQYDSDTRKYILFVPRVTPKYSVNKEKNSCGIDPGLRDFLTVYSENETQSICPIEIVVNRKRQLKMSNQKFPLKRGLLLEVKLRKRFLSRRNHLIRNLLRNPSKKLLKHIN

SEQ ID NO: 52731 - protein, 169 aa, Mimivirus sp.
LHVCIIILFVPRVTPKYSVNKEKNSCGIDPGLRDFLTVYSENETQSICPIEIVVNTTKNEYKKIDKINEIIKTKPNLNSKRKKKLNRGLRKYHRRVTNKMKDMHYKVSHELVNTFDKICIGKLNVKSILSKANTVLKSALKRKLATLSFYRFTQRLTHMGYKYGTEGRS

SEQ ID NO: 52732 - protein, 436 aa, unknown
  TnpB Polypeptide
MCYKVLKMRIEPNSKQRDIIDYTMDYNRYIFNFLITANKLTYAREGRLLSEFEMNNLCTGLRGKWPCFRRMYSMTHSDVSRRVHQSCAKCRENSVRRRNKAVSKGLLPEGSPVHMSWPRYRKQGRYDSYAHLYSRDFRLEDTVNENGKKARKLKLGKVKGLIRCYNQSTPISGEPKTCIVSRKDMGTHTEYYASICYEFPDAQIEEPSEPKAIGIDMGIRHIAATSDGDLYDHCNDMQKDLRRLKKLSRRLSKDRCDPAKERKARSKLKHHHKRMVNKRKENIERISKEIVDSNDVIVMERLNVKRLWGKSLSRSMTRGFINSSLGSLRYRIQSKAEWAGKRIIEVNPKGTSQICSQCGAEVKKKLDVRIHSCPCCGYTADRDINAAINILHRGWTGHPVPAKDESPTACIGGEARTETVADRFSIIVMCQSQVTG

SEQ ID NO: 52733 - protein, 449 aa, unknown
  TnpB Polypeptide
MAMVMQAYRFALDPTPTQRRALASHCGAARVAHNWGLMLVKTRLDQLRVDEDVEVPWTLPELRREWNRAKQEVAPWWAENSKEAYSSGLDGLARALKNWADSRAGRRKGRPVRFPQRKRKGRCRDACRFTTGPIKVVPDRKHIQLPRIGILKTHESTRKLARRLEHGTARILAATITRTADRWFVCFTVEVQRPIPASNGHYRVVGVDVGICHLATLSTGATIPNPRALEHSLRKLRRMNRQLARRKPGSKRRNVTRRRLARVHVRAANLRRDALHKLTTTLATQHGTVVIEQLNMAGMVRNRHLARVLSDTGIGELRRQLAYKPTWYGSRLVVADRFYPSSKTCSFCGWVKAKLTLAERTFRCEGCGLRIDRDLNAARNLAELAQHVAQSGWETQNARGADQKTQLAGQVATKREAGTERRSGKAGTAAPQGAAAWTGEHSFRRSPIR

SEQ ID NO: 52734 - protein, 400 aa, unknown
  TnpB Polypeptide
MMQLTYRFRLYPSRAQEEKMLAALDECRWIYNHFLERLNRKENGKTPSRYELQATLPKLKQERPELKQVHSKVLQMVLHQLYLNLRVLAQLKRNGRRVGRLRFKGRGWFKSFTYNQSGFKVIEGHGKRRELWLSKIGAVPIVLHRELDGEVKQVHIKRERSGKWFACFSVDVEEAPKIERATKLVGIDLGIEHYIADTDGKFVKHPHSIIKSERRLKWKQRRLSRKQKDSKNRAKQRIRLARAHERVRNQRLDFLHKLSRHYMNNYDLIAVEDLDVKELIEMAHNGKNRADAAWATFIRMLTYKAERAGRWAVKVEPRGTTDRCSRCGEVVEKPLWVRTHKCPRCGLELDRDLNAARNILRDGLKRVGWEPAEFAPVEIGPLSLPQAGTSSVVEAGSPAL

SEQ ID NO: 52735 - protein, 278 aa, Methanocaldococcus sp.
MLFKFEGDKIKIITAPRKFITINLVVSDYQKKFIEEWKNGNFKIGEVIIKKDSIIIPFKKVVNPKNFEHIMTIDINEKNITYSIFDKDGNVIKTTRLDVYKLKRIHENFSKKREKIQKKLSNKPMKLKTLMEKYSGREKRKVEDYLHKISKFLISEALKYNVKILMEDLTNIREAVNKKSKNFRRRLNRWNFSKLQFFIEYKAKWDGLDVEYVNPSRTSKLCPICGCKLDPNGQRLLKCNNCNLVFDRDVVATFNLFKKSQDVGSFRSPERSLMKSSY

SEQ ID NO: 52736 - protein, 529 aa, Streptomyces sp.
LREVAAPFVVPGPSGVAIRSSLKGLTEQDETVLRQAGSLLGSLASRDLKVRCAAGLGHDSELWAWRKRALTGQSSSRWAGSITKATHDQWALARRGQLAHMQSLRAGVETITYRLSQPIGANGCKGAPGGYGSRKEWFAKSRRLHVLEDRLDGERADWEAGRVRVVRGGKKLLNSRHHLEAAGLTEAQWRSRWQAQRWFLQADGESGKPCGNETIRITPEGEVSIRLPAALAGLANAPHGRYVLACRVRFHHRGEQWADRVTAGRAVAYRIHYDPDRNRWYVTASWQNPPVQTVPLETARAGGLVGLDMNADHLAAWRLDAHGNPVGAPRRFDYTLTGTAQHRDAQLRHALIRLLHWTVRHGMALAIEGLDFADEKTRERHGRRKRFRKLISGLPTARLRARLVSMAAELGITIVAVDPAYTSRWGAQHWQKPLTTKNRKPTRHDAAAVAIGRRALGCAIRRRTAPPPHDRSDRVGHRTVQAASDAPGREGPRPRIPGPRTRSVPPGRGAKAGDQCAHNRSGHTAEHEP

SEQ ID NO: 52737 - protein, 470 aa, Deltaproteobacteria sp.
VVSTDAQVIQQAFRFALDPTAEQEQFLGACVGASRFWFNQGLALVKQRLDKRAAGAEVDVPWSYKSLCVVFRGDHIKDRLAPWRGEVVTGSYQAGLEGLGMALQNYSAARKAGRRVGFPRFRAKGGGHEAVIFQRPRLADSRHVVLDRRLGSLRTKESMRKLARLLDCDPNARVMRSTVQRVNGGWVISFTVQRSAKRRRARRPAAAVGVDVGLARLATLSTGHVAANSRPLQASLRSLRRLQRQLDRQRRANNPGNYHPDGRAKKGCATWVKSQRMVRTERRIATLHQRVANLRREQAHQLTTSLVGEFGVIGVETLAVKNLMGNRRLARHIADVGWGAVLAQLRYKTSWSDGSLLVAADRFYPSSKTCSACGAVKAKLRLTERVFTCDDDACARVQDRDLNAALNLARMAHRHAHAEGISSYVARTGRFTPTARGGQVSLVGLDQHSPVKREASSDASQRGDPLAPAA

SEQ ID NO: 52738 - protein, 404 aa, unknown
  TnpB Polypeptide
MQRLQAFKYELMPTGDQQRDMRRFAGSCRFVFNKALALQKERYEQGEKRLGYAELCKLLTEWRNGPETPWLKDAPTHPLQQTLKDLARAYTNFFAKRAEFPRFKKKGQSDSFRYPDPKQIKLDQVNSRLFLPKLGWLRYRNSREVLGEAKNITVSQWCGKWFVSIQTEREVAQPIPNGGAVGIDMGIARFATLSDGSYLVPLNSFKRHESALRKTQQAMSRKTKFSNNWKKAKARVQRIHARIGNARRDYLHKATTTISQNHAIVCIEDLKVRNMSRSAAGSTEKPGKNVRAKSGLNKAILDQGWFEFRRQLDYKLAWRGGHLIAVPPRNTSRTCPCCGHVSADNRQTQAQFECVECGYENNADIVGAINVLRAGHSRLACADTSPEVRASGQEPTEATIQTSV

SEQ ID NO: 52739 - protein, 390 aa, Endozoicomonas sp.
MLKATKVRIYPTPEQTDFLNRQFGAVRMVWNKALAIKTHYYKVREQNLSPRKDLKPLLVTAKKSRKYSWLKEADSIALQQSVINLDKAFQNFFNPKLEARFPRFKSKHGKQSSYHCMSVAVGENWVKVPKCKPIKARIHREITGTVKSITLTKTPTGKFYASVLAEDDMSEARQITELQSSRIVGVDVGLTDIAITSTGVKTGNPRFIKNAQRNLKRKQKALSRCKKGSKGRVKARLLVAKAHERVAFARNDFQHKLSRQLIDENQAVIVETLKVKNMLKNHCLARSIADAGWHSLVIKLDYKAKQAGKHLVKIDQWFASSKTCSCCDRKQEEMPLNIRSWTCECGYVADRDINAAINVKKQGILKLKAEGLSVSADGGKRKSSTVLVAA

SEQ ID NO: 52740 - protein, 151 aa, Endozoicomonas sp.
MPPCHFLLSLKYQKLQHRVKVARVHAKIADCRMEATHKASRKLINENQVVCVESLNVKGMIRNPKLAKHIADANWGEFVRQLQYKAEWAGRQVVQIDRFFPSSKRCPGCGFVHESMPLSIREWDCPECKTHWDRDIAAAMNIKTAGLAGLA

SEQ ID NO: 52741 - protein, 403 aa, unknown
  TnpB Polypeptide
MLVHRAYRYELDPNNRQRSFLHRHAGVARFAFNWGLEQRISLFKQNHGKARFTDAMKQHKLLNSLKRSHFPWMYECSKCAPQEALRNLHLAFQNFHRDRKKGKRVGFPRFKRKGVRDSFRLTGTIRFDERMIQLPRIGKVRIKEKRERYHDGRILSATVRRRADRWFVSVTVEEDIPDPTPKSGNAVGVDLGLRTLATLSDGTQFANPRALGRRLKRLRNLSKNLSRKKKGSRNRERAKLRLAKMYLKTFNIRQDTLHKLTTYLAKSHSRIVIEDLGVKGMMKNRRLARAILDVGWYEFRRQLEYKCRWYGSQLVIAPRAFPSSKTCSSCGHKKRELSLSEREYHCEKCGLDIDRDLNAALNLVAASWSETLNACGEDVRLCDSYGFAKQISVKQELNISPEH

SEQ ID NO: 52742 - protein, 437 aa, Thermococcus sp.
LKRSVTVKLHPSKEQEKILFELAHATAVVWNKINYERLRQFKEFGKIDFATTEKEVYYAFRDWIGGSTVQQLARKNAEAWRSFFTLNQKKKRRELPGLFKPKPPRFIREENGRKLFVIPLRNDQYRIEGNTLELRRLGKFGRLRLQFKGRIHLKGKQGRLEVIYDEVKQKWYAHISFTVKEKLTRKGWTKVPREPKGNLVAGIDLGVNNLMAVYVENGDAFLVKGRPLKSIAFYWQKRIAEYQSKLNKSGAKKSRKLKKMHEKAKLQAKHYINTAVRQIVEKLYSLGVSRIVVGYPKEIARNSDKGRKQNFILSHVWRFNYVIQRLKEVAEEYGIVVEVVNEAFTSQTCPLCGQRHANGRIFRGLFECRREGVVMNADLVGAFNILKKAVKTITPSLPALTGGRGNGGKTLPEGFEELSLRVTLMRTPQTSLPLARG

SEQ ID NO: 52743 - protein, 399 aa, Candidate divison MSBL1 archaeon
MQTYKFRLYPDEKGREKLGQTLELCRQIYNHFLEELDGRDDVPPRTELQSQLPNLKEEWDELDSVHSKVLQMVLYRLYSNLKSLSEKKKNGYKVGRLRFKGKGWFKTFTYNQSGFRIVKTENRLDILKLSKIGEIPIRIHREVKGKVKQITVKKAQSGKWFACIQTDHEENRESGEGIVGIDLNTENYLTDSDGNVVENPRFLEEKEEKLKKEHRNLSRKEKGSKNREKQRVKLGKAYEKLVNCRRDFIHKLTTAYVESYDTIILEDLNIDEMCEGSRYAKSNLSASWGLFKELLLYKAESAGVEVVLVDPKDTTQECNQCGSVVPKRIWNREHKCPECGFETTRDHNSALNIKKRGLNKLGRGQAESTPVDTGASTLTHVRASSVVESGSSFLTSKAS

SEQ ID NO: 52744 - protein, 371 aa, Actinomadura sp.
VQLRYVFRLYPTAVQCQALARAFGCARVVYNDALRARQIAHEAGLSFPKAAELSAALTEAKKTPARAWLGEVSAVVLQQSLRDLESAYRNFFDGLAGKRPRMGAPRFKSRKDKRQSVRFTSNARWSITGGGKLALPKIGQVKVKWSRRLPSIPSTVTVIQDAAGRYFCSFVVEVADVPDPPATTADVGVDLGLGCFAVTSDGRKIASPRFLRRAEKRLRRTQQALSRKQKGSANRDKARVKVARAYAEVADARREFHHRLSTMLVRENQAVYVETLNVKGLARTRLAKSVHDAGWSNFTGMLEYKARRYGRTFARVDRAFPSSQICSACGRCDGPKPLHVRQWICGQCGTEHDRDVNAARNILTEGRRITT

SEQ ID NO: 52745 - protein, 147 aa, Paenibacillus sp.
MNKEGSRFVKTSNIVKVEKSIRLLHRRLTNIRTNHIHQATSAVAKTKPRAVVMETLNVSGMMKNRHLSQAIANQKLNEFIRQMKYKCEKRGATFMQADRWFPSSKCCSGCGQVKTHLKLSDRIYECDCGLKIDRDLNAAINLAQLAV

SEQ ID NO: 52746 - protein, 219 aa, unknown
  TnpB Polypeptide
MGIDLGLNNLVTVVNNAGLEPFIIKGGIVKSINQYYNKQLAKLRSIKSKQGYKFETKRIQQLTLKRNNKIMDVFHKISRKIIQYCIENDFGRIIIGYNQGWKQKIKMGRRTNQNFVQVPFLNLVKMIQYKALLVGMNVELVDESHTSKCSFLDGESIEHHEHYAGRRVKRGLFKTRSAKLINADVNGAYNIIKKAVPKAFDKVDGIEAFGVTPVSVRVE

SEQ ID NO: 52747 - protein, 593 aa, unknown
  TnpB Polypeptide
MPCCESTPIPLDNGAFISQSWSDTSEILKKNSDVSKKKQRKTKRKSSTVESQVQSKRKISNDKSQHSRQNIQTISYTKTSDKDSTTTDRVFRPFWTESSSNLSKRLSYPTEIDYVGTDLNSSNSSVNNTGRKSWSRTMYKENHTIKENLPKISLPFVTSSLQEKTQQEVIRARKIKLNPNKWWKKTLINWMGTSRWVYNQCLDKINNKKCKISKKELRNMIVGAHNHGEVKKRTGKPKKKRGKKRGNWNRVVNITPPPSKTSWVLETPYDVRDSAMCSLVKAFDDNFKIKKKNPKHMFEIGFRSKKGVQTIVISGKYVYPGCILFPKYTNRIPLGCYEDFSLYGGELKIQLDTCGDFWAIVQESRPKQVKEINHEDLKVCALDPGIRTFQTIVDNIGNVSEIAPGDIGKIYRYCHHMDKLQSKAFDKRIKSKRRYRLRMAWHRMIRRLNNLVEDLHHKTCKFICDRYDVVFIPIFNTKDMVKRSHRRINSKTARAMMTWSHYKFRQMLIAKAEETGTFIKEVTEEYTSKTCTMCGNIHRSLGSSKEYKCKNCNVKLDRDENGGRNILIKSLLENEVILRYSARMEIDALGPNP

SEQ ID NO: 52748 - protein, 466 aa, Streptomyces sp.
MTDAVDQPVRVTGEEAKRIKRDALGIADRKKHHARAPTAMKSRAKQPGTQQRVYRYRFYPNPSQAEQLQKTFGACRWVYNEGLALRVGAWEQHRVSVGFAESCRALTGWRQASETGWLREVSSTVLQQSLRHLDGAFTRFFKQSAKYPQRKRRHRSRDSATYVRTGFRWVEDPELPGTGRLTLAKQSEPLDVRWSRPLPVGGDPVKLSVTRDRAGRYFVSVLVEERIEPLPTVFLPGGREPRAVGIDLGLAALVTLNDGTKVDHPRLLRKYEKELAKVQRGLHRKKKGSANRGKARERIARLYALISDVRRDMLDQLTTRLVRENQVLVVEDLAIMNLLRPAVGRGRRRKAALSRSIMDAAWGELLRQLRYKCGWYGRTLVIVDRFFPSTRRCSDCHTKGSSLDVSVREWTCAECGAVHDRDVNAARNLRDEGMRLYWLVASALPPGRRPPSVIKASELADVLLAA

SEQ ID NO: 52749 - protein, 592 aa, unknown
  TnpB Polypeptide
LRLLQSTLQTRISDPSGVLDALSDLMNRAERRLHAELMKGRKWTGDLAVSLYKEFGISAKLMESAYAARQAKVQSAQELAKLHAGELADRIEAKKRQIAKKTNKLAAQRKAMTKAAADIVKIEARLEKLRKTLDAASNAKRPQALQRYKSMLGVLHRERQKLADAWCGIRRLKRDLHQHRRRAGILDPKHARAMSRSTSSSVCFGSRKFFKAQHHLKENGFRSHDEWRDAWHSARNATFMIEGEASAPSGNRYARLIMGDDGLFNLELRLPEALSHLSHETAKMGGTTVYIGRFAGLQFKHRADELAAALTRGVPIAIRFHRDGTGWRIMPGFKAEVPEAVADFSCGSVGVDLNAGFVSVARVDRHGNVIDASDLPMVTCGKSQGQSQDIVRKVALQVVRYAAEHRLPVVSEKLDFSRKKRSLKDDGEARRARMLSSFAYSSFDAALASAAARHGINHRRVNPAYTSIIGRVKFARRYGLSTHQSAALAIARRAMQLDEKPPLSLKESRSVSVSLNDAHHVALELPARKDAGVQDAGARHVWSDWNEVGKAFRGALAALRPARRRKKPRSFMGRNDLHSMVCRAGRTVSARP

SEQ ID NO: 52750 - protein, 443 aa, unknown
  TnpB Polypeptide
MILACRVRLRPSRAQRQALAKASGAARVAWNWGLARKRAAWKVRKDAIAGGALPPDAPKVPTAIDLHRELNARKKIPKEDGGFPWMYESSKCAPQEALRDLDAAYAAFFRRVASGETPGFPRFKAKRLGEGHFRLTGAVHVMSTHLQLPCIGEVRVAPGDRGYAPVGSYKSVSVVQEHGEWFASVRIEVPEAAPVAADVLPEVGIDLGVRKLAVLATPDGAIEVIPNHRALLRSKRKLRAAQKVLSRRQKGSGRRRRAVQRVGRIHRRIANVRRDMTHKATTSIARRFRVVAVEDLNVSGMTRSAAGTAEKPGKNVRQKAGLNRVVLDANPAEFRRQLVYKLQLRGGRLQADDPAFTSQRDSACGAFNDCGSSETYTCAACGAVIDRDANAARNILALARGEIDAASWTESQNARGEVVGRRSLRTTARTSVKRERVGGSQLV

SEQ ID NO: 52751 - protein, 427 aa, unknown
  TnpB Polypeptide
MLSYEYKLQITPAQQAAIDEAIRVAQFIRNKCLRLWMDGQGITANDLQIACSRLAHEFAFVARLNSQARQAAADRAWAAISRFYANCTAQRPGKKGYPRFRHDCRSVEYKGTGWALDADGKHLTFTDDCGIGRVKLIGTRDLATFSSDHFKRVRLLRRADGYYAQVVIAAERRVTHVPTGKVVGIDMGLNVYYRDSTGHAVDNPRFIQAAERRLRRRSRRLSRKSVQHKQGKKARHNHTARQRAKHNKYPSTTASALPSAVSQLSAAPPATRLRRKRQSANWHKARQQLGRAHLTLQRQREDFARKQASALVSSHDLIALEVLQVRNLVRNRHLAKSISDASWARFRQWVEYYGQVQGIPVVAVPPHYTSEACSRCGRRVHKSLSVRTHVCPRCGLVLDRDHNAARNILARALEQRARSGTVGHTGT

SEQ ID NO: 52752 - protein, 310 aa, unknown
  TnpB Polypeptide
LRRLDRAFQGFFRRCRTGQTPGFPRFRGRGQFDSLQWEDRDGWTLKEDTGRLRLHGIGPVRVHLHRPTRGTPKTITVRREGRRFWVSVHCVDVPAQPLPSTGCAVGIDLGVGALVATSDGRLVEHARFVKRGQAALAKAQRDLATKQPGSHNLQRARERVGAHHRKIANQRRDLAHQLSRQLVNDYDLIIHEDLKIKNMTRRPKPRPNEEGGYEPNGARAKAALSRSIHDAGWGQLLAMITYKAESAGRQVIAVDPRYTSQRCSACGHVSEGNRRGAVFRCLGCGHQTHADVNAAVNILRAGRARQLVAA

SEQ ID NO: 52753 - protein, 433 aa, unknown
  TnpB Polypeptide
MGDVIRTVKVKLDVPDQRRADLQQTKDQFLHCANTTAAWAWRHPNDYCITSKQTAENALYDRLRNETELTANLVQKGIRRAIEATKSGVARLENGDNTSQPHFDAWSVVYDKRSATFHRDHVSLSTIKGRVECDYVIPDDAEGTPIGEYLLNEDYEFRTSTLQYDRPTESFYLHARMRRRTDDQERSTPLSEDAEHRTVLGVDLNVDGSLAVTSTGAFIGNADEMNHRRREFEKTRGSMQQAGTRSAHLSIQSMDDREHRWIQDELHCASNQILEEARDHDCTHIAFEDLTDIRERLPGAKRFHAWAFRRLFEYVAYKAEMVGIGVEQASPAYTSQRCSSCGFTHESNRRSKHQFVCQQCGYELNADYNASKNIARKLLEKLHSGQTSSGGGAPCQCALTSGTLNLNGEFHASVDSTAEGESTDKPTTSVVGH

SEQ ID NO: 52754 - protein, 417 aa, Scytonema sp.
LFGCQQVLIKSNKDTEAILEYLCSESNDLYNCAVYYARQIWFKTGKIVSGFDLTAEMKTNRHLNAGYASSMQQTCINVGEAFKSFKQLLAKSKKGELEQKPKPPKYRKSGGLFTVTYPKRWLKLVDNKIRFPLGNQVKAWFGISEFFLSMPSNLDWKVVKEIRILPRNGAFYAEFVYSMQAKPYQLDPSKALGLDPGLNNWLTCVSNIGTSFIVDGKELKALNQWYNKQVSTMKDAKPQGFWSRTLAQITEKRNRQMRDAVNKAARIVVNHCLENGIGLIVFGWNKGQKDSANMGAKTNQKFVSVPTAKLKDRIEQLCQQHGILFEETEESYTSKASFLDNDELPKYGEKPNEWKSSGKRVKRGLFRTATFGYINADCNGAANILRKLNVKGKFNLDLSGLTRGVLTAPIRVRLWST

SEQ ID NO: 52755 - protein, 328 aa, Scytonema sp.
ILKSCPDWVSECPYSPKEESVFDAKIAFLKTATKNKSAPRFQSCRSPVKSLRIGAKYWGAVSAGRGKSKQVVGFTHYTTNQSVVNNESIAIKDLQLNPVEPLCEEMPSEFTILLDKGKWFICFAVPFEIQVNLRKNCIGLDPGVRTFLTGFDGEKILEIGNGSISNVAILCQRLDQLQSQITKAKGRDNKRLRWKLRRQSEAIRTRIRNLTNEVQNKASVFLTKNYKHIFLPTFETSQMVVKKKRKLHSKTARNMLTWSHYRFKQTLKFHALKRNCVVHDITEEYTSKTCSRCGHVHEKLGGNKKFKCPKCNHEIARDWNGAINIFIK

SEQ ID NO: 52756 - protein, 420 aa, Scytonema sp.
MNTKMLTYIYRQQVEAMLVLEAKLKGKQSQYNSIDEAVRTALFIRNKALRHWMDNGRCFKSGDPDARYLCRETLIKYWLPNALPHKDVGKNDLQKLCAVLAKEFDFANNLNSMARQASADKAWLAIARFYDNCKKQKPSKKGFPRLKKRGHSVEYKTSGWKLSADRKYIIFSDGFNIGKLKLIGTRDLSFYSVKQIKRVRIVKRADGYYCQFCVDIERKEQYQHSGNQVGIDVGLEFFYTDSEGRTVENPRLFRKSEKALKRKQRQVSKSKKGSLNRRKAVKKLAKKHLKVSRQRKDFAVKTARTLVQSNDLVVYEDLQVKNMVKNHHLAKSISDASWSMFTDWVDYYAKVFDTWAIAVAPHYTSQDCSVCGTRVKKSLSTRTHKCHSCGTIMHRDHNAAKQILAKGLKSEPVRWTGSPA

SEQ ID NO: 52757 - protein, 337 aa, Bacillus sp.
  misc_feature (333)..(336): Xaa can be any naturally occurring amino acid
MVNDYRRTLQSLWTRSYFVSTAKNVANENMLKIKKQGVKRMSQTLTVKVKLIPTKEQSRLLEESSREYIKVMNMLVSEMVEAKKSTKKSTKDIEANIPSAVKNQAIKDAKSLFATKVKKSNYKIIPILKKPVCVWNNQNYSFDSTHISIPFKVNGKSTRLKVRALLINKKNRNLDLLKHKLGTLRIIKKSNKWMAQISVTLPTNERAGTKILGVDLGLKVPAVAITDDDKVRFFGNGRQNKYRKRKFRSVRKKLGKDKKVNAIRRFDDKEQRWMQEKDHKISREIIDFAIANQISVIRLEQLTNIRQTARTSRKNEKNLHTWSFYRLAQFIAXXXXQ

SEQ ID NO: 52758 - protein, 274 aa, unknown
  TnpB Polypeptide
MTEELVEAKILDYGKIKELHKSILFAREYSRVVKGGPPPIDIPKELYYQMLSTGDIKYGPLDIIPLGDKKYKIKGLNAIISTDKEGTPLYAIINFSDSIRVYLAYEKPKSVIGIDIGVRHVITLVALRNGKLWKVRFWGNEELVEEMVKILGDPQGISEIKNLRLRIRRIVSDVIKFINELNPKIVAIEDLRVFETKAGKALKVIEDELEENLYKAGVKYKRLMPYNTSKICSNCGFKKGEVMGPLFVCPACGYKADRDFNAAYNLALQCYYTC

SEQ ID NO: 52759 - protein, 420 aa, unknown
  TnpB Polypeptide
MTRTYTYRVARIRKPQRERLNAMFRHLSWLRNQAVQRCRDQYAAEKTTPSFYDLCKWLTALRKDARDAQWNVAFQRSALKRVALGYQKFFRERKGLPRFKRVRSCESGATKPRPSGQYWTIQVKGVGKLRFKDRRRVLEADGIVRLVRILQTPLGTGYEVQLVMDLPDAVEQPDMRAPIGIDLGVKTNCTLSGGTQYAPIVLDDVKRKRAQRRLSRAKRGSLCRRKKKVALAKESRRIAVRRTNAAHRITTSIINQHSANLVLEDLKLKNMTAHGGSRKRGLNRAILSQCLGEITNQLAYKAESAGGQLVKVSPHHTTQTCSQCGGHPADKITLAVRTYRCALCGLVLDRDVNAARNIRAKGIALFGWPGMQPACRAEAAPAAHGRPLGPASAAPKPSCDTGTRGRELRPRKRATMHGAT

SEQ ID NO: 52760 - protein, 399 aa, unknown
  TnpB Polypeptide
MGLLMYRYRIYPSRKQKARIINSLKNCKAIYNELLDISKKTYKESGKTLRKFDYNKHLTGKHPNIHSQVKQNVSDRVHKAFSNFFRRVKDKSCKEKGFPRFKSRVNSITFPQSGFKILSDKKLKLSKVGSVPIVLHRAPKGKIKTLTIKQNKAGQWFATFACELLTTKSTHASTDMSTHVGIDVGLESYAVLSNGEFIDNPRHIIKAEKRLKRLQKRLSKKKKGSANRRKARFRLAKQHIKVANQRTDFLHKISHRIAKSYSFIAVENLNVKSMLNNHWLAKSISDASWNSFVQMLSYKAVTCGGQLVKVNPRNTSKTCSKCGIIIEMPLNKREFLCPKCGFACHRDLNASINILKVGTDCAELNACGPSLVKAVVDEAGTIMTEPSTSSVIGSSTLRV

SEQ ID NO: 52761 - protein, 396 aa, Spirulina sp.
MLTLEFKAYGKPKQLAHIDEAIRTAQFIQNKCLRFWLDNPGVTKYDLNKYTAILAKEFPFAANLNSTARQSAAERCGSAITRFFKNCKQKIPGKKGFPKFKKTTRSVEFKQSGWKLSENRKRITFTDKNRIGSLKLKGTRDLHFYSLDQIKRVRLLKKADGYYVQFCIKVNREESVEATGKSIGLDVGLKEFYTDSNGISEKNPRFFRQGEQDIKRLQRRVSRRVKGSNNRRKARQRLGRRHLKISRQRQDFVVKLARCVIQSNDCVVYEDLRIKNMVRNHCLAKSINDASWYQFRLWLEYFAQVFGKITIAVAPNGTSQDCSRCGTIVKKSLSTRTHVCRCGCELDRDHNAAINILQKGMGTVGHTGTNGEKPLNASGEMTSTLVGAILSEQVAS

SEQ ID NO: 52762 - protein, 331 aa, Spirulina sp.
MKTLKFKLYQHKRNRYLKRTINAAGRIYNHCVALHKRYYRIWGKHLNCARLQKHIAKLRKRNPWWLQVGSQAVQDICQRIEKAYQLFFKHNQKGVRPPNFKKTRKYKSFTLKQAGYKFLGGNRVRIGNKVYQYWHSRPIEGKVKTVTIKRTPLGELWMIVTVDTLSEPQVKTETGNIAGFDFGLKTFLTCSEGFKIDAPLFFKQSLNAVRKLTNQFDVLCFETLNLKAMQRLWGRKVSDLAFREFLQILEWVATKKGKRVVYVDRWFPSSKTCSSCGHILEHLDLETRHWRCPSCSTENDRDENAAMNIKVAGASAIGLGDVRQALPAIAV

SEQ ID NO: 52763 - protein, 175 aa, Spirulina sp.
LFFKQSLNAVRKASRELSRKQKGSANRERARLNLARKHEDIAHRRRDWFWKLAHRLTNQFDVLCFETLNLKAMQRLWGRKVSDLAFREFLQILEWVATKKGKRVVYVDRWFPSSKTCSSCGHILEHLDLETRHWRCPSCSTENDRDENAAMNIKVAGASAIGLGDVRQALPAIAV

SEQ ID NO: 52764 - protein, 374 aa, Spirulina sp.
MKTLKFKLYQHKRNRYLKRTINAAGRIYNHCVALHKRYYRMWGKHLNCARLQKHIAKLRKRNPWWLQVGSQAVQDICQRIEKAYQLFFKHNKKGVRLPNFKKTRKYKSFTLKQAGYKFLGGNRVRIGNKVYQYWHSRPIEGKVKTVTIKRTPLGELFMIVTVDTLSEPQVKTETGNIAGFDFGLKTFLTCSEGFKIDAPLFFKQSLNSVRKASRELSRKQKGSAHRERARLNLARKHEDIAHRRRDWFWKLAHRLTNQFDVLCFETLNLKAMQRLWGRKVSDLAFREFLQILEWVATKKGKRVVYVDRWFPSSKTCSSCGHILEHLDLETRHWRCPSCSTENDRDENAAMNIKVAGASAIGLGDVRQALPAIAV

SEQ ID NO: 52765 - protein, 292 aa, Spirulina sp.
VEYKTSGWKLLGPKRIKFTDGFGIGELRLIGTYDLARYDESLIKRVRLVRRADGYYVQFCIQVNVQVQSEPSQKAVGLDLGLRYFIAASDGTVVETPQFYRKSEKRLNRANRQKSRKYRKGAKPQSRNYHKARNRYARKHLRVSRQRNEWAKSIAYCVIQSNDLVAYVGEACTKCIDLNIKGLVRNRHLAKSISDAGWSTFRRWLEYFGRKYGKATVAVPPHYTSQDCSNCGKRVHKALSVRTHHCPHCGYEADRDVNAAINILRLGLTTVGHTGSYTLGEIGPLAELEQSC

SEQ ID NO: 52766 - protein, 423 aa, Spirulina sp.
MLTLTYEYKLIPDRQQTEVIEHTLTVCRSVWNYALRERKDWLASRKSPVNACSLKQEYIVPPDVPYPNYHNQAKALTKAKHTNEILKSVNAQVLQQVLRTLDRAFAEMQSKKLGFPRFKNKYRMRSYVYPQMLKNCVKGNQIKLPQLGWVKFRKSRAIPDGFALKQARIVRRASGYFVMLSLQFDVSIPDVPFHGHPLGIDLGLDKFLATSDGELVDRPRFLNPLQRKRKLLQRRLRNKQKGSNNRHKLNQKIARLNQRISDTRKDWHFKLAHHLCDQSQSIFIEDIDFRAWGRGMLSKHCLDAGFGQFVTILKWVAWKRDVFLCEVDKNFTSQICPNCGFHTGKKTLDVRDHHCPDCGYQTHRDVAAAQVIRNRGVEAYALGHSVSENACGDGLTGVVTPSPESVKQEILNVNLRIPRYSDV

SEQ ID NO: 52767 - protein, 414 aa, unknown
  TnpB Polypeptide
MAEVAAKRKVSYQLYPSQQQETLLLALLRSHQQLYNAALEERISAWQKQRLGISYADQCKSLTTIRQSMPEWAIPNCSSQQMTLRRLDKAFKAFFQRAKGGKTPGFPRFKSLTRFPGFSFKSHGDGWGFTPGKDWKHGRLRIGGVGHIKCRGQARQGGRICASDLLYRNGQWWLSLTVEPEVIVRERTGHAAIGIDWGVEHLLTIASDDGQYRHVENPRWHRQAADEIARLQQAVSRKKRGSNRRKRAIQKLASARSKQARQRLEHQHQLSARLARENALIVMEELTISNMTRSAKGTVEEPGKNVRQKAGLNREILDTAPAQLIQLTRYKVKETGGEFVDAPTRKLKPSQTCPACGQVARKGLDERVHVCPCGHREPRDSASARVVLNWALYGSPTAPIRSGTGRDRAAHAAL

SEQ ID NO: 52768 - protein, 324 aa, Streptomyces sp.
MIRAYKFLLRPTVSQVQALTGMLRDHCSLYNSALQERRGAFRHVSKTSIKYGMQSAQLKEIRAFDPERQGRWSFSSQQATLRRLDKAFAAFFRRAKSGDTPGYPRFRGVNWFDTVDFPKDGDGCRWDSTPHDPTTRVRFQGVGHVKVNQHRAVAGQVKTISVKREGKRWYVVLTAEQAAPEPLPATGSVVGIDLGVANFLADSHGGFVPNPRHGRTAAARLATAQQALSRFPCARRDRRTGNHQRAVDKVAGLHGKVRRQRLDHAHKTALGLVRSHDLIAHEDLKIRNMTRAPAPKSDPTRPGNFLPNGATAKAGLARRDANPA

SEQ ID NO: 52769 - protein, 429 aa, Cyanobacteria sp.
MRTSYQYRLKPTYLQRCRMSRWLDMLRSQYNGFLADRFDWWEMNRTCVNACPLVASIAEPREQPEYYAQKRRLVQLKRERSWYKEVHSQVLQDMVKRVKLAFDRFIKGDSNGKRNGKPRFKGKPRYRTFTYTQAKNDWINGDFINLPKIGSIKFIKHRPLPEGFLVKTASISLKADGWYITLSLEDKSVPCCSQIDREPTESNSIGVDAGLEYFVACSDGEIKEAPKFYRPSEQKLKKLQSKRDLKKKGSKPRRKLNHRIAKLHQKIARQRRQWHFETANQLIDKAEIIFVEDLKIANMSRKNKPKKAENGAYLPNGQSAKSGLNKSFADAGIGGFLNDILPYKAAKAGRKVVKVNPSGTSQHCAICFNRVPKKLSDRWHNCPHCGASMPRDINSAILIKKVGLGKASLKNAKPSSKKLGGEARTLPAG

SEQ ID NO: 52770 - protein, 326 aa, unknown
  TnpB Polypeptide
LVKRKRINPNKRNILSIIHKALYNTLKSYNLSSKIAEDCYRNALSIYKGWYNNPNKGRFPRIFKPTIWLTPRLSYIVNFNEMFVKISKIGEFKILGYPRNYKEYLSWKMKEARLVFNNGKAFLKITFEKFIQKIEPKGSIAVDINMQNITVGKDDKNYVKINTRINEIHHYKSLAEMLQIKYPKRWKENKKIKRRIMVFHLKAKNIAEDFARKVSKRVIDEAIKMNANVIKLENLKNMIKHVKKLHKKFRNKLYLMQYRKIQYWINWQAKKHGLLINYVYAAYSSTKCPKCNNKMNEVSYRWFKCSCGYENNRDIIAIMNLNGRVL

SEQ ID NO: 52771 - protein, 859 aa, unknown
  TnpB Polypeptide
MKHQYKPKKCKFIEHRAVKFDRETGNPKLDANGAEIPFTENRTAVCKINPKSVDPRLLETFDASKETINDILANMSEHWFDVYTVESGVKNDMKKFTIMDLYAGAVPGDILKGEFTLVHGRKRVLVKKTITGYVTRELMAPQEDDGFILCDRGQFINSLNRKTDKIFGEETSIPAKWWGDTICGDIDTMLKGYAQCVLGMSDTDDGKWRTAVHEVSESIYDNEFSRKHAERTIINLGPQHLRHVNGLMPDTSVIQWPISCKICGENATITEPDFAKEPKLKRLYLATMKAFERIVKESFPKKNVFKPNIPMLPRDSVKKLDGYYNYSAELLYIPGPKKASRFRVEFRAKSDRTGNDYYPKDLFKFTSECVIPRFSMLKSTGAMTLNIPYTVPCQKPFMSQDAEINWDAGLGIDLGYARFAMVLSKPASKYPGMVNWHEALDWFSKKYGLDVLNAHCSKVTQKEIEDMIAEERDGKSTMGAIFLLGVRDGNPPDIQHDWRPSHDPMATLFTRMERRTNKDGSPFYSGQQLAIIGHTKTFRIQMRQIFANRIEYYHRQSEWDLNHSEEQVFARESEVAKALAARYDFLNESIRCITQRFISDILTSDGAFRPAFIAMEDLNLNELGKDKSFKSLYMTITEDWGLDPRQDYKVSVRKGRTVAEITYPEGKKPPRPAQFPKVFPATEHWNTPERISAKGQTIVIACTPTSKGTVAMARDSIECYTKKALHIALIKHDVERLCTHMGILFREVSAKFTSQTCDCCGNAKTVAYDPSERGTDLYTAMVGALKEGKNFRFKRTFICGNPACPMCQVAVNADSNAASVICHMVRNGKSDYFKDKRAKFKAPKVKKETKKSSKSKKDK

SEQ ID NO: 52772 - protein, 542 aa, Hamadaea sp.
VVDQKRLLRDVARPFVVEGPSGVSVRDRLKGLTPQDEQVLRLVGAHLGSLAAKDLAVRVRDGLGHSNQAWAARKRELTSASSSRWAGSITKATHDQWALARRGQAAHVKSLEAAIATLEHRLSLPIGHKGTKRAPGGYRSTGEWFVKSRRLAILQTRLERARAERDAGRVSVVRGGRRLLHQRHDLAAAGKTEDQWRQQWQVSRWFLTADGESGKRYGNETIRVTPDGQISIRLPAPLAGHANGPHGRYTLSARVAFPHRGEEWADRIHSNRAVAYRIHYDVNSGRWYVDASWQRKDLPAVPMEALQARGVIGVDTNADHLAAWRLDRHGNPVGHPRRFGYDLSGTAQHRDAQLRHALTHLLHWAKRTGVQAIAVEDLDFTDSTTREKHGRRKKFRQLIAGIPTSKLRARLVAMCAEHDLAVIAVDPAYTSRWGVQHWAKPMTTATRKTSRHEAASIAIGRRALGHPIRRRTPPPRQHQSDAGGHRSAQARPGDQGREGNRPTRTGTRTRSAPPTRPRTRQPSPSNTVRDGRSDRTHRHDHS

SEQ ID NO: 52773 - protein, 468 aa, Streptomyces sp.
VVKATEEDGRNRVTGAEAKRVKREALGVPDRVKHQQRVALPMQRRTPEADTRQRVYRYRCYPTPTQAEQLVKTFGACRWTYNEGLALRDRAWREHRVSLGFAESCRALTGWRNAEGTRWLQDVSSTVLQQALRHLDAAFGRFLKGTTKHPRRKKKNRSRDSATYVRTGFRWAEDPERPGTGLISLAKQSGPLHIRWSRPLPARTRPVKLTVSRDRAGRFFVSVLVEERIEPLPPVFLRDGGAPTAVGLDLGLAALVTLDDGEKVDHPRLLKKYGAKLAQLQRSLHRKQKGSKNREKARQEIARLYALIGDVRRDALDQLTTRLVRENQVLVVEDLAIASLVRSPKGKGRRRKAGLNRAILDASWGALLKQLLYKCAWYGRTLIIVDRFFPSTRRCSACGVTGPKLDLAVRSWSCGGCGAVHDRDVNAARNLREEGMRVYALVASTLPPGRAVPSMIRASEMPDVVLTS

SEQ ID NO: 52774 - protein, 435 aa, unknown
  TnpB Polypeptide
VDILGSQKKKKSVFALNVSLHGGIQKKRIKREKMLITHKFRMYPSKEEEVRLLETKELCRQMYNKLLFELNEQKVIDKSMIQGTIPEIKICEPRFKKVYSKTLQYENYRLFSNLSALAKTKGKRKVGRLRYKGKGWFKSFTYNQTGFKLIKDNTKLHLSKIGDIKIKCHRHILGKIKQIIIKREASGKWYANLCEERKVTIPKKTKISKVVGIDVGLIDLTFDSDNINIPNPRILKSQEAKLKKLHRQLSKKKKGSLNRYKSKQKLAVAYEKLERCRIDRDHKISRYYVNNYDAIGMEDLVVSNMVKNKHLSKSISDVSWGRLRQMIIYKAENAGKYALTVNSKGTSQRCSNCGTIVQKDLSQRQHQCSNCGLDINRDYNSALEIRKLTINKLRQELPEVTLVETPISGDQTDFDSRYVSVKQEATSLNFGETKC

SEQ ID NO: 52775 - protein, 437 aa, Actinopolyspora sp.
  misc_feature (437)..(437): Xaa can be any naturally occurring amino acid
MTTVLQAYQFALDPTGQQQAMLSSHCGAARFAHNWGLAQVRAVLNQREAERSYGVPESALTPSLNWSAYSLRKAWNAAKDEVAPWWGENSKEAYASGLANLADALGNWHKSRTGKRAGKRIGFPRFKSKRHRLSCRFSTGSFGLSESDRRHVQLPRIGLVRTHESTRKLARHVERGTARIRSATVSFQRGRWHVSFSVEITKTEPEPAVKGGTVGVDLGVKHLAVLSTGENIANPKHLDAAQRELRRLQRRAARQQGPDKRTPSNRWRKTQARIAKLHTAVANARRDGLHKLSTRLVAEFDTVVVEDLHVAGMVRNRRLARAISGVGMGELRRQLDYKTSWSGRQLVVADRWYPSSKTCNDCGAVKAKLRLSERTFTCDHCGYRTDRDLNAARTLAGLASSPSCGATKNEPAGNPRKTSHAGSGYRHGKTPTQRAGX

SEQ ID NO: 52776 - protein, 424 aa, unknown
  TnpB Polypeptide
MMSEARNLRKTTYRLYPTPKQTVALDALLRSHQELYNAALEERISAWSRAGKSISYADQCKSLTVLRRDLPEWADAANCSSQQMTLRRLDKAFGAFFRRVKAGQTPGFPRFKSLGRFSGFSFKSHGDGWRFTPKDGWKHGSLRLSGVGQIRARGQARQGGEIRASDILHRDGRWYLSLTVAVASPERSRQADGAMAYDWGVERFLSGVSHTGELENIDNPRWWQQDKEQTIRLQQAVSSKPNRRSNRRKKAVRRLAAARAKVARKRLDWAHQQTAALAGKYALVATEELTLKNMTCSAAGTVEEPGKQVAQKAGLNREILDTAPGLFTSLFRYKVLETGGEWVDAPTRKLKPSQRCPRCWHVAKKQLSQRVHCCEQCGHEENRDTASARVVLRWALESISGQELAETGVHSPRETPSFATHRVE

SEQ ID NO: 52777 - protein, 563 aa, unknown
  TnpB Polypeptide
MSHREKRLKFSKSRKKHLGTGTETTKYEQLELLRVIDGTISIPSSIQKAIQESEFSTPELAHTSKNQTWSDKPTTCNHCLQTENSSKKLAQDLTTSAKGFYPFWDKSCQEMSKKLWSVTKIDSSGLVLTSSNGFVNKKIVNSWFSTEVTYLQSEKWLKISLPSSTSSVADCTDSGSTNLLSRKIRVYPETALAETWLHWISAARWCFNQAIAILKAQKIGKYDLRKTVMGLAPSWVNKTPYNPRQLAVFQAFEAHKSAKKSGGDAKFRSVREPVKSIRFQKDNWKKGTFYPTQTKGLSFKASEPIASQMQKVPTLVLDRGRWFICYAQDVPKLEPLESQLAIALDPGVRTFLTGFDGSEIWEIGKYDMGRIYRLACHLDKLMSRIGLSKGRQFKRLRYRLRKAAQKIRIKIRNLVDELHKKAANYLCTKYKVIFLPTFEVKNMVKRGKRRLSTKTARKLVTWSHYRFKISLKHQAAKYGCVVVDVTEEYTSKTCSKCGHIHTKLGGNKHFVCPSCGHAIGRDINGAFNILLKALRDTSTSGVIASFQIVPYTETSGNCQIFPG

SEQ ID NO: 52778 - protein, 298 aa, unknown
  TnpB Polypeptide
MLTTCYGFKIQNGHLRLPVKPRCYIDLKLNNHTLQALSGFNVHSVTLTPNSLSIACSKEIVEREPIGYVGIDRNLDNVTVASTDGTVQRLDLTKAIRIKADYRCVKSRFKRNDTRIRTRVFSKYGEKQRNRTQPLLHNVSKRMVEDAKTRQYGIALERLTGMRRLYRKGNGQSRNYRARMNGWSYGELQRQIMYKARWEGVKVIYIPARNTSKRCSICGYNTLEGTRRKLWCPHCGTILDTDENAARNIAAGGLRFSHNGPPGEAMVEEREPENATLILKVDGGKLSQQATIIDPTKT

SEQ ID NO: 52779 - protein, 371 aa, unknown
  TnpB Polypeptide
LKQTLFVRLDTSKEQFEMLLETIVRFNRACNFIATKAYASRTANKMRLQKEAYREVRERFGLSAQMAIRAIAKVCEAYKRDKSTKPLFKPHGAMVYDQRILSWKHLEHASILTLKGRILVPIRIGEYQKARMDRIRGQVDLILRERRFYLATTLDAPEVSQYDPVGVLGVDLGIVNLAVDSDGATYKGESVQKLMLRSEKIKAGLQQCGSKSAKRHLKRLSGKEARYRRDTNHVISKCLVAKAKDTGRAIALENLKGIRGQTTVRKAQRRRHNSWSFNQLRQFIEYKAKLSGVPFVLVPPRGTSHTCPRCGLEAKQCRPTRNRFECVRCGLAGPADYIAARNIAARAAVNLPIVAPTLTGSYKPMTLVIGS

SEQ ID NO: 52780 - protein, 445 aa, unknown
  TnpB Polypeptide
VQVEAKTSFVGVRRFLIKASGKTHTLQGWDESEPAIVKRAADVSMQEQSLLSAYKYRLYPSGVQEMRFKRSLHALCELYNTLRAEKIQKYQQHRNSLSRTGLRELALRVRQNSPKLQDVYSQVSQNVADRVVYAFKNYFEGRARFPRSKKFEDYRSLTYPQSGFKLADGRLHLSKIGKVRIFQHRPLEGTVRRLTIKYAVGEWYAIFLTEKAALAKPKINRIPGQKIRGADLGLEKFATLDNAESAEYPKFLRVAEEKIKHLQRQLARKRKGSKRRRALALQLARLHMHVARQREDWQNKLVNTIFKHADMLVLEKLNVASMLRNHPLAKAISDASWSRFTVKCIRKAEMLGKHVLFVDPWGTSQFCYRCLTWVPKSLTEREHRCPNCEADLPRDSNSALLIRKLGILSCSPSDGGLSPAEPKPLPLRTLRHGQAAALKREAHNL

SEQ ID NO: 52781 - protein, 410 aa, Thermococcus sp.
MKRSVTVKLQPSKGQETTLFELASVGAKIWNHVNYLRRQQFFQEQIVDFNKTEKIVYEEYKKEIGSATVQQIARKNAEAWRSFFSLLRKKRNKELPNWFKPRPPNYLKEDGKRKPLIVLRNDQYKIEGNKLILKGLGKFGKLEIQFKGRIHLKGKQGRLEITYDEVKRKWYAHISFTVEEKLEGEEWVALPRQPKGNLSAGIKSIDFYWRKGMADYQSKLNKSGAKTSRKLKRMHEKAKLQAKHYINTAVRQTVRKLYELGVSRIVVGYPKGIARNSDKGKKQNFLLSHIWRFNYVIKRLTEVAEEYCIQVELVDEAYTSKICPVCGRPHEGARFVRGLFKCPETGFVFNADLVGAFNILKKKVKTITPNLGGLYAQGRGNWPKARPGGFERTTLTGSLMKTPQTFPPVG

SEQ ID NO: 52782 - protein, 565 aa, Nocardioides sp.
MPKSRPQLPTRVVAPGNGVSVRTRLRLDSDERVLLEAIGAHLTRARNSDLAAARRGEKANHRYKALVEQFGIHSRYAGTICLDNDAATKAAKEHLRRHLAGLRRAVATLEHRISAPTRSSCGCGERRGCSSCRGGYATANERWQKLRRLDARRAELARVETRLAAKDYPVVYGGRRLAGTRHHLGKAGLTETQWRRAWSEARHWFGCAGNAGKSGGNPCLTLTRGDGGRWHLTVSVPKPIAEQFGTSTRVQLRHPIALHHRSRELEERLNARSAVRVDLQPDTDTKGRARTYLRLSWVRPAPEAVDLAAARAGGVVGVDLNADHLAATHVDGSGNPVGRPVRIPLDLADASTRTRDGRLRAAVTAVLEHAKTTGATAVAVEDLDFTDSKTREKFGRRRTFRHLIAGFPTAQFKDRVVAMAATQGLAVIAVDPRYTSRYGGASWQRALSTPTVVATRHEGASVAIGRRALGHGLTTRAGRKTGPGKPRQRPVPHQCDGSDARPSAGQERATTDTTEATIRTGAHTPPVHTRQPSRHPPQASGVATPGGLTEQVHAGHRFPGSPHTG

SEQ ID NO: 52783 - protein, 470 aa, Lactobacillus sp.
VSNEEKYGFTRQYHVLLTDKQKIQHEKALKTQNALFQYALKYLFKTYGVKHIGRPMPFSQKPIQYVLNKIKTGFIKDKYGLARWKKSVLFLSSHSADEFLKTVYTNFSQYRKRLVKADKSMDEKARYNFKMNVTKDKYGKHKNQLHKSWYRKGSINFLRNSASFRTITSQKLPEDSKGGIRIEDKHTDNHTFLTVADFGTVEVIEDLSELNLKDIALTKIKKLPDGSHRLQLTFSLPRKKQKSKTIQGFDWNMAGNEAFCSSDGKRIKVSDAAIKRADEYEQKINAIKSARDLEGNAHGQSKLYRKLDRRQQKLNAKRSNMLTNEYRHLVHEVVDDCDTIVVEKLDAYEMRKRGKGSAQRKGINRRLAVLKPYELMTILESLVKKQNKRFVKVDSFWTSKACHDCGYINKDLKVGQKEWQCPSCKKTVDRDLNAARNILDWGIHPEHHAKLKKTAEEGKNLSPSSLVTEV

SEQ ID NO: 52784 - protein, 337 aa, unknown
  TnpB Polypeptide
LVREQTSWRHESESARYRKRNHKHPRSTVTFKAAGFKLDTQYNRVRLSKGSNLKEYWSDFILCKFQTRPDVNFSAVENVQQVRAVWTGNEWKLHFVCKVEVDISESPGDQSVGIDLGIPNFAALAYEDGHSELYPLNCLKQDDYYFSKRLAQCDDSCSEQATRLNHRKSERRSHYFHTLSKQIVQRCVEGSVGTIVIGDLSGIREEDEDTESKNWGSHGNLDLHSWAFDRFTELLSYKAEMEGITVEDVPERDTSKSCSCCGRKRDENRVERGLYVCDECGTAANADVNGAENIRHKVSPSSPNLSVNRSHGWLAQPSTFLFNKETGAFAPQEQVTS

SEQ ID NO: 52785 - protein, 412 aa, Crocosphaera sp.
MIVLEMKAVIKPYQANAIDDAIRTVQFIRNKALRLWMDASREDKIDKYALNKYCRILAKEYKFADELNSTARQASSERAWSAISRFYDNCKKGIKGKKGYPKFQKNNRSVEYKQSGWKLSEDKKKITFTDKKGIGTVKLKRTRDLNFYPIDQIKRVRLVRRADGYYVQFCIRVDIRDYAKPLEPTKHCTGIDVGLKVFFADSDGKTIEIPQYYRKAEKRLNRLNRRKSKKFIRGKKQSNNYQKARKRYALKHLRVSRQRKGFVEREALRVIQSNDLVAYEDLNVKGMVKNQRLAKSINDAAWATFRQWLEYFGFKYGKVTIAVPPHNTSQNCSNCGEKVQKTLSTRTHICSHCGYIEDRDINAAINILKKGLSTLGHSGSKAWGDLPSSLVGEILPGYGESVNQESPVTASA

SEQ ID NO: 52786 - protein, 344 aa, unknown
  TnpB Polypeptide
MQVAAAPLQQSLRDLEKAYKAFFDSVTGKRKGKQKARLPRFKKRSHKQSARFTRQFFRVRETTHGVGFVRLSRIGEIRFVSSRPLPSEPSSVTLIREPDGSYYVSFVVETVPRAVVEPSAYAIGVDMGLNHLAIGVSSTGERLIVENPRVLRRAEKHLAHLQRQLSRKQKGSRRREKQRMRVAKAYAKVRNTRSHYAHQVANKIVDENQVIALEDLNVKALARTRLAKSVMDASWGLLRRLIEEKAAERGRSVVYADRFAPTSQTCSVCGAPGGRKPLSVREWSCDTCGARLDRDLNAAVNIMLAAGLAESLNAQERNVRHVLARAVTVDTVNPLKTALFMPRG

SEQ ID NO: 52787 - protein, 481 aa, unknown
  TnpB Polypeptide
MVGFSRKFKNPNFESIQDTMQNLLYSIKYGLGDSLSSVGYNQHQMDVDIVGAVSTVTKISLKMPQRVERIVVKPGHTHYDACHRLCSVARKLGNQAVYIQRQKIFAKEPWLNRVKLDQAVRLTSAELYKSMPSAASAQRQTQIIHEQFVSWHEAKKAFLADPSKFKAMPRLPGYSKKYRTFVVGRNGYKIVDGELILTDKKKVGFPALKIRSCDNQLFNAKTNETVIGDVRIVPHGNAFFIELTYKVNCSTTVLLDGSRACLVDIGLRNIVTLASTASGIRPVVVKGGKLKSINAMYNKDVASLQSHDKKAHRLTKIMKRTCRINDVMHKVSHYVVQFCLRNDLGTIIIGHNEGWKQNINLGKVNNQNFVYVPFNRLIQMIRYKAEAYGIKVIVREESYTSRQSALDFDLLPNYGDKNADQVQSSGKRIRGLFIRSNGQKINADVNACLNIGRKELGDDWLKKLVETDEGCLMQPVTVQIG

SEQ ID NO: 52788 - protein, 400 aa, unknown
  TnpB Polypeptide
MSKREKPTTAKKPTKTYLLRLYPTRQQTRTLEEWLGLCCEVYNAALDERKSAFRMAGVSLSYEDQCSELPSCKQARPELRDVPSQVLQDAVKRVELAFDAFFRRVQVGQKPGYPRFKSRFRYDSLTFKQYQNSFDVIPGTKRHRGTLVLAKLGHVKMVLHRPITGKPKTAIVKRTPTGKWYVSISVEIAEEEIENLRLPACSEAVGIDVGLHSFAYLSTGEEIANPRFFRREEAALARASRKLSKAPKGSKQREQKRKVVARVHERIRNRRKNFIEREVASLLKRFGLLAVEALVVRNMVKSPKLAKSIADASWSVFFTRLLDKAEEAGRDVVRVNPAYTSHTCSACGHRQPMPLSVRLYECPDCGLVLHRDHNASYNILAEAFHAVGRHSRVIPEAPAS

SEQ ID NO: 52789 - protein, 412 aa, unknown
  TnpB Polypeptide
MKQQVKQLTKEDYKNLRELSHIAKNLANEAIYNVRQYYFQEREYLNYEKNYSLLKNSINYKMLNSNMAQQILKEVDSSFKSFFGLIKLAKKGKYNFKDVKLPKYLHKDGFTTLVIGFVRIKGNKLLIPYSNMFKKEHKKIEINIPPKLVDKKIKEIRIIPKSNARFFEIQYIYEAREIQSNLDKNNALAIDFGVDNLATCITSSGKSFIVDGRRLKSINQWSNKENARLQSIKDKQGYKNKYTNRQLKNTRKRNNKVNDYMNKTARIIINYCLDNNIGTIVCGYNETFQRKTNIGKINNQTFTNIPFGILREKIEYLCKLHGITFVKQEESYTSKASFFDRDIIPVYNDDNPKEYKFSGKRVKRGLYQTKEGKLINADINGALNILSKSKVVDLEVLYNRGELDTPIRIRVA

SEQ ID NO: 52790 - protein, 459 aa, unknown
  TnpB Polypeptide
MLSGVRFRAYPTASMQAALRVWIGHQRFIYNAKVREQEYFNGFARSSLSLVGQKPLPDQAYSQFVTEDSAFLRQVPSQLLRNGAYRFATANARMLKGLGGAPNIKKKHGRQSVMVTSELFRFEDYTDPKTGEIRPHLVLGTKAKPLGRLPFKAHRAYELPKMLCISVEPDGRWFVSFCFEPATPAEGTEPLILRTPEELAYEFGLRGDLEAITVGIDRGVALPLATSDAQTFRIAEINARRIAKKEVRVQRHQRRMARQTLGSKNRHKTRRRIARLKGYAANVRQDFAHKASHALVASGAEVFVLEDLKLKNMTAAPAPRRDERGRYTANGAAAKAGLNKALLASALGLVKELITYKAAQRNKLVLKVSPYNSSNECAACGHTAPENRRSQAQFCCAKCGHADNADVNAAKVLKKRGVALLRGQKVVFRKKKPTRVRGKDKVGPVRPEPGASPTPVENS

SEQ ID NO: 52791 - protein, 232 aa, Synechococcales sp.
VGINTLATIAIVGPDGTVTARKFIHLAADIDHRDKLGLRIRRKARLTKKLHKGFCKPLYRKAQNINKNIAHQVSREIVNFAIDNGADTIVFENLKGWKPKGGRKRSGLKQRFHGWLHRRLFDFTSMKFEEIGGSVVEVYARGTSSWAFDGSGKLKRSKKNYALATFQTGKQYNCDLSAAQNIGARFWAWKLKLTHRKDGRSLSGKSSGSESRMPITLSSLWDWEAAHVCVAS

SEQ ID NO: 52792 - protein, 421 aa, unknown
  TnpB Polypeptide
LLATKCVTQSYSGGLDDLLAECLTNTYNAIQYAEEHGIVNRKGMKGFYQTLKSVNLPSCYKLASITRACAIIQSRKKSEKRGIKAVHLKPLRPMTCLISGFFVTMKGRLFIPLRRDKYFDVQLNQYTLKTLADKKVRSLTITLDSLSFCYSQEVEPAPVRRVYGVDRNEKNITFGDVETVVQVDLTKVVRTRQTTREVISSFKRNDARTRRKIARKYWKRANQRTDQILHAATNFIVEKAANNRAALAVEDLKGIRKMYRRGNGRGADYRFRLNSWPHWRAKRMIEYKAAWSGVTFVQLTKSETNGSSSMCSACGEKLHSPVKDDVAHTRMLWCQRCKAWMDRDVNASLNLSMRGRSRFDRSLSSRSGEAESRSEHDDSSYPPIEREKGLAGEAVTGNGTTTLILRVDASKLTHRLPEPKS

SEQ ID NO: 52793 - protein, 407 aa, Okeania sp.
MKLAERHIIKRGHRFWTEIDDLSWYSKNLYNSANYIIRQNWLYGHGYLSYNQMASVMKETEQYQAMPAKVAQQVLRGLDRNWKSFFQAMSGWKNHPEKFLVRPKIPQYKDTKKGRNLLVYTIQAISKVALRRGRIKLSGTAIEFATQVAETVAEVRIVPKCDFYVIEVIYEKSEQFLTPTEKIAAVDLGVDNLMAVTSNQPEFIPLLINGRPLKSINQFYNKRVAQLKSLLKGTSKSSRRISRLTRCRLHKIDNYLHRASRYLVNLLVELEITTLVIGKNQGWKQRVNLGKVNNQSFVTIPHSRLIDMITYKCQLVGIKVILQEESYTSAANFLNEDPIPVYGKTSEKPQFSGKRIRRGLYRTDGGILCQSDVNGSYNILRKAFPNAFNRYGIERCVVHPRRINLSK

SEQ ID NO: 52794 - protein, 334 aa, Okeania sp.
MYAIKLELKLNNKEKTLMSQCAGYARFVYNYGLNMVNGTKGMTKVNKRGQKVNLSYNQRINEAKKVFTNYVKKQPEYAWKNNYSSRIYQSAFQHLAEAFKRYKEDTSKYPRFKRKKDQQSFNVYDGNGKTIIKAGNCIKIPTLGTFRLRLPVPYTIASQTFTISKTAERWFVSFAIEAEKLPVHPLLDQRHQEVFGIDVGIKQFGTVASLKENSVIALPDSIKKDQLKLAMFQWRNRNKQLGGKGKKPSKNAIKYYKKLAKYHARIANIRSDFIEKTTTDLANNIKHVCLEDLNVKGMMHSRKLAANNRRPGILSIQGTIDNQNRYQWGNCCIS

SEQ ID NO: 52795 - protein, 429 aa, Okeania sp.
MKLVEKHIINSSHSSYQEIDKLCFLSKNLFNTVNYIVRQEFIFNQKYLNSAQIYHLIKDSVDYKAIPSKVSCQIIRLVDRCWSSFFASIKDYSKNPHKYLGKPKLPRYKDKLKGRCVTIYPAQAISKKGLKKGFLEPSGTKISIPTKIQGKVNEIRLVPRNGYYIFEAVYEVESGKPLNNNRVAAIDLGLSNLATVSSNLKEFQPFIVNGKPLKSINQFYNQKKAELQRKSQKQAVECFNSNKIQKLTTKRNFKVETYLHQASRIIINNLRENQIGTLVIGNNKQWKQEINIGKINNQNFVQIPHHKFIEQLKYKAELEGIKVIINEESYTSKASFLDLDNIPNYSQGVKHKFSGQRIKRGLYKSKNGLLINADLNGSYNILRKAVPNAIADGIEGPLSNSIQDNTWKSELSHKYLSINLQTLIVNCQL

SEQ ID NO: 52796 - protein, 353 aa, Acinetobacter sp.
MKTLKLRIKDKHCEVLDQLASEVNFVWNYVNDLSFKHLKRKGEFLTAYDIAKYTKGTSKECGLHSQTIQAITEELVTRRKQFKKTKLKWRVSNKKSARRSLGWIPFKKVAIKYADGYVQYGKHQFKVWDSYGLSQYSIKTGSFIEDSRGRWYVCLVVNSPKQVKPTATKAIGIDLGLKAIATCSDGTIISNPKFYRQYEHKLGIAQRAKNKKRVRALHAKIANSRKDHLHKASTMLVRENALIVVGNLSANKLVKTKMAKFVLDTGFSALKIMLKYKCENAGVLFEEVNEAYTTQICSSCGEISHSSPKGRADLRIREWNCMVCGTHHDRDLNSALNILALGHKRLAVGIPLL

SEQ ID NO: 52797 - protein, 332 aa, unknown
  TnpB Polypeptide
MDVRVVQVCAPGGPARPGPGVPELLRGSGEGRARYPRFHSRHSGRSSFRLTGAVKVENGHVTLPRIGRVRLKERGYLPTTVPLRSVTVSERSGRWYVSLSVEEERPSPVPPMGETVGVDLGVNALATVSDGTVIPNPGALLARQRKLQHLQREVSRKRKGSQNREKAKRRLSRCHGKVADLRKDALHKATTMLARTKPVIVVESLLPANMLRNHHLARSLSDASFGEFVRQLEYKCRWYGSRLVQADPFYPSTKRCSSCGNVKAEMPLWERTYSCPSCGLVLDRDLNASRNLAMLAASSAESLNACGGERFMPNGRCSPVNQEPSIIGVTNV

SEQ ID NO: 52798 - protein, 466 aa, unknown
  TnpB Polypeptide
MQKEFSRTIKIPVHYSITKSKLNKLSKITSKLTYAVKLFSDKIKETNKLSRKELSEYEKEIQKTTKLNSAYVQQAKDKAVWMWKSYNKLHKKWEYKLKRAANEKYCSKLLKREPSEPFSKSNNKISARLDYRTISIITNLNLRGKPVKQIKKQTNLTNLWASLSTLKKHNKIMIPLNPAEYHLNKLNQSSKITDAELTRKNNKLYLNITCSYKVYKQEINKIRAIDLGISRSITAVLLEPGKELNKNSFLIIKEGKKKQKIDYYDNLIGKLQDQRNYKLLKRTREKRKNCIENSERKLAKYISSISDNSIVGIGYPKGIKYKNYKGNGNKQQRKRLNKWSYSRLISYTMQKLQENGIEAVKLNESYTSRICSSCRSRNTERPYNNNWSLFHCNDCRITLNSDINASINMAIRTINYYHGSMLDERQVSFNQLASDEHALTADDNLKKGLSAETHKALALDAQGFLA

SEQ ID NO: 52799 - protein, 388 aa, Ursidibacter sp.
MTAIRGHVIELKPNNKQATYFAKACGVARLAYNWALAEWQRQYEADKNYRDDCLAKDIPIDETKLNKPSQGKLRKQLNSIKRQQFPFMLEVTKCSPQLAIIQLGDAFKRFFKGESKYPQFRKKGVNDRFSLSNDQFKLKTINNKPHIQIPNLGLVRMCENLRHQGKMLSAKVFKQGEKWFVSIAVELSEVVKPKPKTGKHVGLDLGITDLATLSDGTKIKAPKPLKHKLKKLQRLSRQLSRKQKGSSNRTKAKTKLSRLHYQIGCMRKDFLHKLTTHLIKAYDTIAIEDLNVKGMVKNRKLSRSINDLGFYELKRQLIYKANQFGKTIKSVDRFYPSSKTCSCCGHKVESLPLSMRKWTCQSCNTVHDRDINASINILNNATKVLTIT

SEQ ID NO: 52800 - protein, 376 aa, unknown
  TnpB Polypeptide
MLKAYRYCLLPNDAQKEQLQKFFGVCRFAYNIGLETKIASYTSAKVNLSCFDLIKQIGELKKDYEWITECPAQAVQMALRNLDNAYTKFFKGGGFPKFKNKHNRQSVQFPQNTDVDFENGKIRLPKLKWVDCVFDRKFKGIVKTVTVSKTTTDKYFVSILVDNGQDLPIKKPIIENTTVGIDMGIKTFATLSDGTSFENIKRLRNNLKRLRVEQRTLARRLKKGAKEQSKGYKKQKLVVAKLHEKIKNQREDYLHKVSTSIIKKYDTVCLEDLNIKGMMKNHKLALAVGEVGWNSFEAKLTYKAEWNGKNIIYIGRFEPSSKICSTCGTINKELKLQHREWVCEKCNTQHDRDKNAAINIKNFGLRYKPVQSNVVH

SEQ ID NO: 52801 - protein, 284 aa, Bacillus sp.
LKKQGKSTLIEYKRPNQQYSYGHDYSFSKNDLVSVGTLQGRIKIPFITKGLEHYFDGSWKFGSAKLVYKKGKFFLHFAVKKTFDSGSTIKNIVGVDFGMRFLATAIDSNDKHFFKSGKLIKETKARYVRLRKGLQACGTKSAKRKLQKVSGKENRFMTNANHVLSKALIQFAGEHALIAIEDLTGINLTTSVWKRNKYYRLSWSFYQLRQMLEYKGVMNNIKVIAFNPAYTSQRCPKCGNINKNNRNKKAHVFCCTICQYQSNDDRIGAINLRQMGIEYHHKMT

SEQ ID NO: 52802 - protein, 372 aa, unknown
  TnpB Polypeptide
MKTYKYKFGSQSNTIRIGNLLDDMWQVHDYFHRWQDERYRDELPYADYHEMSAHVKDLKRTTHPHWNALSSQAIQEELRRIHMAYDRFFKKLGGKPKRKPRHKFKSITYPGHAGWFLKNNRITLTFRQWNPDTGKWQFDRVPYTFHKHRQWHGTLSRITIKRDSCGDYWLYLITTYTDFKPLPATGQSVGADFGMKDAYLTLSTGEKKQHPQPLKHSLNKLRNLNKSLSRKQKGSNGWWRCVRQIARLYRKISNQRKDFHWQLASELCKKFDTIVIETLNLSGMKRLWGRKVSDLAFYQLVEILKYKCQKHKRELRQVGQWTATTKPCSSCGFRNENLTLSDRQWICPDCGSHHDRDVNAAINILRAGIAIT

SEQ ID NO: 52803 - protein, 233 aa, Microcystis sp.
FYTDAQGNTVENPRYLRKSEKRLKKAQRRLSKQFCKGNKQSKNYHKQRIKVARLHLKVSRQRKDKAIKDALALVQSNDLVVYEALKVRNLVKNRKLAKSISDASWYQFTEWLNYFAKIYRIVCVAVPPHFTTQDCSVCGTRVQKSLSTRTHQCPNCKTVLDRDHNAAINILKKGLQYLGNHLNGTVGQTETDPNALGESGLWILNGDIENLSCLVEQGISNSDVERVPRHSVA

SEQ ID NO: 52804 - protein, 442 aa, unknown
  TnpB Polypeptide
MLLHLRNQQSYQHREVPVGYGCQQNLISPDNELRGILEFLCGEASKLINCGVYYSRQIFFKTGKIPNRAELHKVLGTDNQNIHYKAFYSDTAQQILTTVAESFKSYIGLLKGIKKGTVTQRPKLPSYRQGGLALVTYTGRSVKLKDGLLKFPLGSKVKAWFGLDAFYMPMPTNLDYKAIREYRILPRNGCFYLELVYKTEDVQTDVDPSKALMIDHGMNNWLTCVSNAGTSFIIDGLHLKSINQGYNKRVAFLMKDKANGYWSKRLERLTENRNRTMRDAINKAARKVLDHCLDNKLGTVVFGWNIGMKNGALRLNRAAANMGAKTNQKFVQIPTGRLKDRIAQLCEQHGIRFVETEESYSSKASFVDLDLLPNFGGKPEGWRPSGKRIKRGLYRTAQGWLLNADCNGGANIGRKVAAILGLDLSGVSRGSLSAPLRVPLWS

SEQ ID NO: 52805 - protein, 221 aa, Lachnospiraceae sp.
WWVTVGTEYKNTSVIPSNGDIGIDLGIKDLAVCSDRKKYQNINKTQKVKKLEKRKRKLQRCISRKYEKNKKGGSYCKTGNIIKGEKELLKLNHRLTDIRQDYLHQTTTGIINRKPKFIVLEDLNVKGMMKNRHLSKAIQQQYFGEFRRQMEYKCRCNTIPLIIANRFFPSSKLCSCCGAIKKDLKLSDRIYRCECGNVIDRDYQAALNLKRYGENALQSVS

SEQ ID NO: 52806 - protein, 444 aa, Halobacteriales sp.
MVEAARTVQIPLIVPADRRDDLHQTRPKYRHCQNRTVEYCWPTTPTQPDDLITEKGTAEAALYDDLRRETDGLHANLVQKAIKDATSAVGAAKSNWENGDRVSKPEFADEDDPSWSMTYDKRAATYHRYKVSLATVNGRVEARYVLPQELEGTPYSRYVLDRRWSFSTSKLVYDGDRFWLHAVMKRHYTAAEAVDESGSNTHNGDSTRVLGVDVNIDGYSAVTSAGGFHGNADYLNHRREQFESLRAELQQTGTQSAHRRMKQRQGCEWRWFDQYAHDVANAVVADAVQVGATHVAFERLTHIRQRISKLPKFQQWFFRRVQEYAEYKLEEYGIECRQVNPRNTSRACSRTDCDCISNANREGKTFRCTKCGYEVNADYNAAKNVGFALLDDLDSADVPASHTCSSGRARSQLALMSGTLTPAGSFASIEWASTDKPTASAVGS

SEQ ID NO: 52807 - protein, 428 aa, Okeania sp.
MLRVVKVRLYPNTQQKQLLEQSFGNCRWLWNYSLNLMNETYKNTGKGLSGYEVKKLIPSLKKEHEWLKLTYSQCLQQVCLNLGVAFNNFFEKRTKYPRFKSKHGKQSIQYPQNVTILKQGLKLPKIGEVKAIVHRLVEGKIKTVTVSKNQCHQYFASILFEDSQEKPAERTDGKAIGIDVGLTHFCITSDGSKFDNPKFLTKYENNLKWKQQQLCRKKKGSNNCNKAKKKVAIVYRKIANCREDFLHKLSRRIVDENQVIVTENLNVKRMMKNHCLAKAIGQVGWGMFMTMLKYKAENEGKVYQEVDRFFPSSKTGHICLNQVGSLPLDVRQWTCENCQTTHDRDINAAINLREEGLRILTCGTRDKAYRQTVSRINRGRKKSTTTLVSGLWPMLYACVSAGTVHPVAFDLNKKCHKVPIPDTLSQYQ

SEQ ID NO: 52808 - protein, 402 aa, Escherichia sp.
VKRLQAFKFQLRPGGQQEREMRRFAGACRFVFNRALARQNENHEAGNKYIPYGKMASWLVEWKNATETQWLKDAPSQPLQQSLKDLEWAYKNFFQKRAAFPRFKKRGQNDAFRYPQGVKLDQENSRIFLPKLGWMRYRNSRQVTGVVKNVTVSQSCGKWHISIQTESEVSTPVHPSASMIGLDAGVAKLATLSDGTVFDPVNSFQKNQKKLARLQRQFSRKVKFSNNWQKQKRKIQRLHSRIANIRRDYLHKVTTTVSKNHAMIVIEDLKVSNMSKSAAGTVSQPGRNVRAKSGLNRSILDQGWYKMRRQLEYKQLWCGGQVLAVPPAYTSQRCACCGHTAKENRVSQSKFRCQVCGYTANADVNGARNILAAGHAVLACGGMVQSGRPLKQEPTEMIQATA

SEQ ID NO: 52809 - protein, 441 aa, unknown
  TnpB Polypeptide
MCYNIGMKSMNELTYNRGLLVRAYLSDRQKICVKKNGGVARFVYNRLVAVEREKHKLVKTLPYSPADRARMSYLKDAYATTTSLRNAVPFLNDPLVDGYAIANAKKDYSRAWQQFKKVKGTSIPTFHKKDNNYSYGTNCHYDKKLNNDPTVIGLYEGSVRFIDKSHVILPILGRVRIKGSDREITSVLNRKDFTRIGTVRITLNSCGNAYLSFSLASDTPFHTVYPQTKKAVGMDMNLTNFLYDSDGEEIPSPKFLRKAEAKLKKEQRKLSRKLEAAKRDGRDYRTCKNYQEQRLKVAEIHRHVANQRLDFIRRVANREVKNHDYLFAEDLKVRNLIKNHKLAQAISDSGWRKFLTECVWCSSKRGKIFLLIDPKNTTQTCSNCGYVSHGDTRITLGQEEWDCPQCGTHHIRDYNAAMNIKNIGLALLKEVGVPVTIDDNL

SEQ ID NO: 52810 - protein, 450 aa, unknown
  TnpB Polypeptide
MAYLTTSCIIKPDNDIYGYFDQLSRRSKLLYNAALFRIRNIFTGYDKEHRTENEKTVFDEVDLLCQKDPSVKVRRVISYYHLEKMLRVTDNPDYRHGGLPAHVAQHIVKQAVADFNNWLAALKGFKKHPENYTGKPCMPHYKKGELATFETTNQEAVLYSNGYKTELKMPLTKKRISFLNLPNDGILKTVKVKPFYGMFKLLLTFEVPKNNISHKDMPNICSIDFGVDNFAAIVCNDGSAAIYKGNAVLSECQWFHKQKAKYVSILTTGKEYSRYAPTKALKRLSYHHSNFINDQCHKISRNIVNYCISHNAGTLVLGVNKFWKQDSSMGKRSNQNFVSMPITILRKMITYKAERAGIKVIEQEESYTSKADIVAQDYIPVYGKDDYNACFSGSRIKRGLYRCSNKLIINADCNGAANIMRKAIPEAWKGITDFAFLADPTVYGYKKVNS

SEQ ID NO: 52811 - protein, 409 aa, Mycobacterium sp.
MAHRYRMYPTARQAVFMLERHCADARYMWNLAVEQFNWGRSGRSAPGPAARQKQLAEARRACEWLAAGSSAVQQQALRDFDRAVSGFFDGVYRRPTWRRKHVDEGFCIRDSRVETVNRKWAQVFVPKLGLVKFRLSRPVPDGRLGMARVTYKAGRWHVSFPAPQPEVPATPGREERLVGIDRGVKTTLALSDATMLRAPVMRRGEQKMLARLQRQLARCRRGSVRRGKVKARIAKLHARVADRRRDWVEKTTTRITATYGVIAVEKLPTRNMVRAPKPKPDPDNEDGYLPNGKAAKAGLNKGIYANCWGVIAQRLQHKTSALGTTLIEVPAAYSSLECRNCGHSVKENRKSQAEFRCVKCGHQDHADIQAASTILARATWPAHTSGPEATPATTGVLAQARRPDDAQAA

SEQ ID NO: 52812 - protein, 463 aa, Holophagaceae sp.
MKACFCLCRVSFFLRYNKDAMIVSRIYPLTDLRPSTRRAIREGQMEAGRVWNTCCAIHREARKAETKWPNRGDLQVATKGGFAIHSQSVQMVAHALLASVDTARQLRKTHPQMGVRYPWKEKRFYPLMWPAQAVHVEATRIVLPMGRGRKSLVIPRPEGFPDDPGGVKICWNGAGYDLHVAIEAPDEVRSQATNGVHATVDLGEIHQAAIATNTGKALVVSGRGIRSVKRYRNVALGQILRLRSRCEKGSRRYRRLNWTISRIMHRTLRQVRDLRHKGTRKAIDFCVANAVSSIYVGDPDGVRKRPSGRKHNQRMSQWEYGKDMLYLDYKSRKSGMECFSGTERGTSSHCPSCGHRHRPKGREWACKKCGFRGHRDVVGAVNMHPLAYGEQIEFPSQITYRRAGITQGTKQPLRVARRSRPDPGLGTSGSVLSRCATGPTTQIAGAPQGVGQAEGLRLEAHPL

SEQ ID NO: 52813 - protein, 415 aa, Streptomyces sp.
MTCLRGQIAALDARLARPLGAKANKREGLPRGYGSRVEWHAKSRRLYALKARLDRLEADWAAGGVRVVRGGKKLVHLRHHLDEAGLDERGWRERWQASRMFLAADGESGKRLGNETIRITENGQVSIKLPAALTHLANAPHGRYLLDATAAFKHRGEEWLDRISDNRAVAYRIHHDPLRGRWYVTASWQRRPAAVLSLEAALATGVVAVDMNDGHLVAWHLDIHGNPVGEPRRIFYDLSGSTAHRDAQLRHALTRLLHHTRRCGATAIAIEDLDFSDGKTREKHGRNKRFRRLISRFPTAKLKARLVATAAEQNIALVAVDPAYTSWWGAQHWTAPLTTPTRRVSRHDAAGIAIGRRALGYPIRRRTAPPPHDRSDRAGHRTDQARSETPRREETRPPSRTTIASRAARQRSESG

SEQ ID NO: 52814 - protein, 378 aa, unknown
  TnpB Polypeptide
MKAYKFKLKSNKKFAEAAERVLNTCRELYNAGLQERRDAYQFGCISLNYHSQAIQLPDIKETRPDVKEIYSQVLQDVLRRLDKAFDNFFRRVKTGEKPGYPRFKSKDRYDSFTYPQSGFRVEGDKLHLSKLGSCRFRLSRPIEGTIKTCTIKRECDGWYVIFTVEPNQCRHIPKTGKKVGVDVGLTHFATLSTGEKIENPRFFRKTADDLAKAQRKLQTKERGSNKRKAAKKVVRQLHCKIANQRKDFAHKTANGLLKRFDEIHIEDLNIKGMVKNSHLSKSISDVGWGIFFSVATYKAADAGKKVVRKIPSGTSQTCCECGHRLEVKLKLSERVFVCPQCDNIKDRDHNSGINILNGRASRRERNLSESPSIAGLPV

SEQ ID NO: 52815 - protein, 382 aa, unknown
  TnpB Polypeptide
MDPNGAQREALSRMVGGRRFVWNWALAQRRAHYLDTGKSLPAAELSARLTALKHQPETTWLREVDSQAMQQVLADLQRAYVNFFEKRARFPRFKSRKRDQARFRIPQRVKAADGWVYVPKVGSVAIRQSQAVDGITKSATFKRDVADNWDVALVTEFTMPDTALPAADPAHVVGVDLGLKDFAVLSDGERTVVPQFFRKAERKLRKAQRVFSRREKASKRRLRAKRDVSLIHRKVANRRKDFVHKFTTALVAKYDGVCIEDLSVKGLAKTKLAKSILDAAFGETRRQLEYKSVWNRKHLAVIDRWYPSSKTCHVCGTVNGALTLANRSWTCVCGTVHDRDSNASLNIKAEGLIILVAGHAKSLNAQGPSVRLPQLGAVGVEL

SEQ ID NO: 52816 - protein, 382 aa, unknown; identical to SEQ ID NO: 52815
  TnpB Polypeptide

SEQ ID NO: 52817 - protein, 416 aa, Halovenus sp.
VRRTVPVKLDVDSDGAALLEDTVDTFLWCAQYVTDHAFEGEYVTTSKTTLDDETYDEVREATDGFNGGLVQAARNKAAEACKSVVARWKNGKKASKPHFTSPHVVYDHRTATLHDDHVGLATTDGRIEADYVLPDKASDTPHADYLFSDEYETTGSELHYSNGNWMLHIHCKTDVEPDTSKQATTENRTVLGVDLGVNNLAVASTGTFWTGNEFNHWRREYEKRRGDLQEHGTRWAHENIQSVGRKEEGRFTMTLHRISNELVAEARDHGCSVIAFEELTNIRDRTGASWGHKWAFTRLYEYAEYKAVEYGIDVAQVDPENTSRRCSHCGFTHPDNRESESFACLKCGYLNHADYDAAKNIGLRYLRRNQTGDDGGAPLGVRLNSGTLNVNGEYESPASTEARTGVHAESHLFTGG

SEQ ID NO: 52818 - protein, 456 aa, unknown
  TnpB Polypeptide
MLETHRTHQAKICNHSQVADSLDRHGWSASKLWNVANYHARNVWDETGEIPDHEELKRELKDHTKYKGLHSQSSQRVLEELAESFHSWYQKRKSDDRANPPGYRKRNYYDQDGNRVHEEHPRSTVTWKQNGFKHDQKHNKIRLSKGANHKEHPKAWEYMLVEYETRPDATVENVQQVRAVYNRAKGQWELHIVCKDEIETPDPPGTETAGIDLGICNFAAVAYSTDEADLYPGNRLKQDGYYFPKEIAKCDDAGSERATQLHAKWSERRTHFFHSLATHIVERCVEKQVGQINIGDLEGVREDDDGEAKNWGRHGNLDLHSWAFDRFTSILTYKAKVEGIEVNEVDERDTSKTCCVCGKTDENQRVERGLYVCDEHNDAFNADVNGAENIRLDINSDDESNSESNDGSGATTGRNQPTGRNRPEDRSTGWLAQPSVYLYDLSCGFQPQTEVVDCKP

SEQ ID NO: 52819 - protein, 444 aa, unknown
  TnpB Polypeptide
MTDKIVNRALKVKLYPSQEQKTFLDKSLGCSRFFYNHLLNERIEFYKNEIEPIKNNIELKNQKYKSFKPTSRKQFKEKFEFAKECSDDCLCSSERNLKLSFDNFFKSLNKTRKGKMGFPKFRSKKEHKDSYTDFHFPKNSFDFHHRLISISKCKNIKFKHREKLPKWYNEEICTLKSITISKNSCGEYYASLLFELPSFYADSKLIDENQAIGLDWSPSEFYIDSECHSAKDYGYEPQKQKHHRQLTKLQRRLTKKTKGSKNYEKARIKVARLEKHIADSRKWWIENESLRLTKNYSTIGIEDLNLQGIAKFLRNAKNVNDCGYGNFVNRLIQKGEELGTSVIKVDRYFPSSQLCHCCGHQNHNLKLSDREWTCPSCGEHHIRDYNASINLKNEALNIRMRRAEFKPMESEEGIHLLVMQVLNIGAFDEVGSGVCENLQKAYGL

SEQ ID NO: 52820 - protein, 433 aa, unknown
  TnpB Polypeptide
MERRKVTFKIYPNAHQRQTLEDWLRLHAELYNAALQERIGAYRKAGISISYYDQQNALPAIKQNRPELVPLGSHALQETLRRLDRAFQSFFRRIKTGDKPGFPRFKSSARFPGFCYPDPAGWKLMQHGKRGATLRLGSGKKALMIRARGKHRFADLTPNDCTLMHRRHPRTGHSEWQVSVTLRVPTMTCARERTGHESVGLDFGVEHWANFDDGRQENNPRWVREQAPKLAALQKERARKRKGSHRYRQLSERIRSLHGTIANKRRDFIHKKTTELARTCKLIATEKLQTANMSRSARGSIEKPGKKVRQKSGLNREILSAGLAMAHQMLGYKVTETGTHLHLANTRQLKPSQRCSGCWSIVRKTLAMRTHLCPECGLSLPRDQNSALVVLYDAWVHHPLPGTGEAARAKPLAATAAKSNSMTRETPTTANLA

SEQ ID NO: 52821 - protein, 247 aa, Proteobacteria sp.
LLLVTVDVPDGTRIPVRDLLGVDLGVVNLVTTSDGDTHSGERIEACRTSYARRRQRLQRAAHAAQRDGMRPKNIRRALPRTAMRAARFRRDVNHCISKARVAEATGTGRGLALENLTPIRARTQFRQPQRAKMSGWSFAQLRSFVEYKAQLAGVPVVLVDPRNTSKGCSACGHVAKANRPSQARFSCKQCGYTANADFNAALNIKYRAPVNASQVAGRVPQQLWLLAGVGASDKLSRDRFPAISESR

SEQ ID NO: 52822 - protein, 378 aa, unknown
  TnpB Polypeptide
MRVENSEWYAALKRKKINGGRVPGFKSCKRDPQYFVCWRNQTKTGNAVYHQVSRKRGVVIITGTVKKEFRKPGETECRWRLSIYVRVSQPVRDYTSVSVNWTERTLVFTNKPSPIQRNATGRQTGIDRGCVHTLALSDGTMLDMSQPSEQEKRAYLRLQRKLARQDTVNSRRGGKTAKFQSKRRKLTLKRMGSIRRRVNNRKDDWIAKTTTRLVEDYDLIALEALNPRQMTRKPKPKPDPNHKGRYLRNGSTAKAGLNRSILNNRWTDIQNKLEYKTRLAGTRLILVNPAYTSQTCNRCGHVAKENRESQAVFQCVNCGNKANADINAAKNILSRAIHTTGMDDAEGVEGHASRETNVSWESPVETPTPAPRMGRPLH

SEQ ID NO: 52823 - protein, 263 aa, unknown
  TnpB Polypeptide
MLEKKNKKWFLRFAFEGQVKLNDTKLEKRRILAVDLGVNTDAVCSVMTKDGTIHARKFINFAGDKDLLYHTLNKIRKVQKNSGSQNTKKLWRYARFHNDESARKVASEITKTALEYQCDVIVFEHLDTKGKKKGSKKQKLQMWKKNTIQKTVKQKAHKNGIRISHICAWWTSKLAYDGSGYVLRGTESGNRSYSICQFQNGKTYNCDLSATYNIGARYFIREIKQNQSVKNWSDITAKVPECQKRTQCTYNTLLKINALDMVS

SEQ ID NO: 52824 - protein, 376 aa, unknown
  TnpB Polypeptide
MKQTLFVRLDTDQAQFKILLDTMESFNEACNHIASVAYKLRTANKMRLQREVYRQVRDRFGLSAQMAIRAIAKVCEAYKRDRSKKPTFKPHGAMVYDQRILSWKRLEQASILTLKGRIRVPIRIGEYQRVRMDRIRGQADLILRNRRFYLAAVVDAPEASQYDPVGALGVDLGIVNLAVDSDGTTYKGKDIDKIMHRNERIKAKLQACGSKSAKQHLKRISGHEARYRRNMNHNISKKLVAKALDTGRAIVLENLKGIRAQTTVRKAQRRRHNSWSFNQLQQFVEYKAKLAGVPVVYVNPRGTSHTCPRCGVQARKSRLTRDTFRCVGCGLAGPADYIAALNIAARGQVSRPIVPRNFLEPQALLRDKPTTLVVGS

SEQ ID NO: 52825 - protein, 381 aa, unknown
  TnpB Polypeptide
MLIIRIYKYKLYNSKKNKNLHNQINIAGIIYNHCIALHRRYYRLTGKHLNQYQLMKHITKLKKQPKYSYWNNVGSQAIQDIVQRIDKAYQLFFRNLKTGIRTSPPSFKKVKKYKSLTLKQAGWKLLDGNKIRIGNKTYKYSKSRELPETIKTVTVKRDSLRDFWICFSVQEEINIPDRTGNIAVGFDFGLKTFLVGSDGASYDSPLYYQQEVNTLRKAQRKLSSKKKGSNNCNKAKMNVARIHQRITNLRKDYFFKLAHELTDKYDYICLEDLNIKAMQRLWGRKVSDLSHSSFINILKHVALIKGKEVIFIDRLYPSSKTCHVCGEVNHGLTLADRIWTCPTCKTTYDRDRNAAINILMEGASSIGLGSVSLAIKEAASA

SEQ ID NO: 52826 - protein, 396 aa, unknown
  TnpB Polypeptide
MRLVERHIIKDNRFEDICLKSGLLYNYVLYLVRQGIFNKEYLEEYDLSTKLCRENQVDFRNIPNHVSQQVIKQVFQNIKSWIKIKKDFDKNPGKYNNHSPRLPKYKKGKKQNMVIFTASSCRIKNDGYIHFVKKVIEPIKTNVKNDELKQVRIVPQATCYVVEVIYERDENDLCLNKDNFLSIDLGLNNLCSCISNVGVKPFIINGRVMKSLNRWYNKKKARLMSYIGDNGTSMRIRRITLYRNCWIDDKIHKISRYIVNFCVSNNIGRVIIGLNKDWKQKINIGKRNNQHFVSIPHSKLIDKIIYKAKLLGIEVVTHEESYTSKIDHLAFEEMKHQDNYLGKRKRRGLFQSSIGKLLNADINGTIGIARKVIGDSCINTIVGSGFAFNPIRLNIL

SEQ ID NO: 52827 - protein, 249 aa, Shigella sp.
  misc_feature (109)..(184): Xaa can be any naturally occurring amino acid
MRYRNSRQVTGVVKNVTVSQSCGKWYISIQAESEVSTPVHPSASMVGLDAGVAKLASLSDGTVFEPVNSFQKNQKKLARLQRQLSRKVKFSNNWQKQKRKIQRLHSCIXXXXXXXXXXXXXXXXXXXXXXXXXXXXXXXXXXXXXXXXXXXXXXXXXXXXXXXXXXXXXXXXXXXXXXXXXXXXYWIRAGMKCAASLSTSSSGVAVRCLLFRQRTQASVARAVVIQRKKIACHKVNSDARYVDIQRTPM

SEQ ID NO: 52828 - protein, 439 aa, unknown
  TnpB Polypeptide
MPVIVKGQMLVRGVFFHLDSDLPTEAKFLLEDFRLAVNNAIRAGVQARATSRNALCKIAYKDFREQHPRMYAQHLVSAFGVAGGVLKNHRRRFRKGVTSRIPYVKRLMMKAENQAYKLDRKSGVIDLPIRAGCHVELKLIVSQYHRKYLDDMTLSLGSLTVLPDRVVVAFRKDAPKPYAPDSVISLDTNERSLDGIFVEEEVTKAVKAEFPEVAIIQQRHHDRRKGLQKKKAHDRRTSRNLCRREGAREHHRIEYRLHQVANSVLKFAEERRSAIVLEDLKGFKSKRSKELNRRLSMWPRRKLHQIIEYKAQWKGIPVVKVDPRDSSRTCPICGRIQDSRMGTEFICECGWHLDRHINASINLLQTAISKGMAGGLRFDPGAFQHDAMMILYEPAMAARSEPNGTSGIAGVTSRSPPDDATEPRAVGETPLERTNDLSS

SEQ ID NO: 52829 - protein, 420 aa, unknown
  TnpB Polypeptide
MKGGFFMLYGSTKIQLNDLTDTQRSDLRQLAELSRALYNCCTRQIIQHYEDTGRVLAYRELKPLVCTSPEYKAIGGFYFQILLTAIADFKKYISTDSYALRKSDDTLVVKNLDNFVPPHPKGGLRPIEIKAPPREGEYLILPATRQTAAVRLRLPACYQDRNICHIIVRPLHHVRYWEMTIEYTVQEIAHADLDRSKALGIDLGVGNLATCVTTEGDSFILDGRRLKCICQGYAKYQAKLRRVNHGSTDSRRLCSLYNRTKHRSLDYIRKSAAYIAGYCIQHRIGTVVLGWGVHFQHADLGMNNQLFSLFGFAQLKRRLTWQCSKHGIDLKVVDESYTSQASALDLDPIPDYVANTRYAFSGKRIKRGLYMSGDGITINADLNGAINILRKGSFTPRFLREEGRGIASPRRIDPLVCSAK

SEQ ID NO: 52830 - protein, 259 aa, Microcystis sp.
MFVLEFKVKAKTQQYQAIDDAIRTAQFIRHKCVRLWMDTKGTGKNDLYRYSQELAQDFKFADELNSTARQASAERAWSSISRFYDNCKRKVSGKKGYPQFKKSRSVEYKQSGWKLLSPKTVKFTDKKNIGVLKLVGTWDLGYFQESDIKRVRLIRRADGYYCQFVLSCDVKEDVKPSGKCIGLDVGLASFYTDHNGDKVDNPQFLRKSEKRLKRLQRRLSKKKKGSKNRQKARQRLAKAHLKVSRQRKDFAVKLARLRP

SEQ ID NO: 52831 - protein, 408 aa, unknown
  TnpB Polypeptide
MIVTKSYKLRLYPTKEQKVFFNKTMGCSRVIYNEMLYNLSENYKNGIKKDKFELFKEIRTKYEWMKKIDSIALYSSFMDLDSAYQKFFKKQSKFPKFKKKKDKNTYRNTTPRKIKNVIKGNFIKLSVIGLVKFRQDYNFEELNIVKYRNYTIERSKTNKYYCSICVDVDIPEYKHTGEVLGIDLGIKDLVIDSNGNKYSNPKYQAKAEKKIKHLQRLYSKKQKGSKNQEKARLKFAIAHEKLSNKRKDYLHKITTKLIKENDIICIENLNVKGMAKNHHLAKAIQNASFGTLISMLKYKAKWHNRQIIEIGRFYPSSKICNCCGNKMNYMGLEVREWSCPVCGEHHDRDINAAINIKNEGLRILDNVKQSTDEVSETNMLVENPTMDDKSAMTLKSSDSMKQETKNKR

SEQ ID NO: 52832 - protein, 411 aa, unknown
  TnpB Polypeptide
LDLTSKKSDILDNINREYLRVLDFNLMQLPLAVSSTDLHHLTYSGIRKTSFLPSDIVQEARKDVWKSRKSIISNGFNGSFKINNNSIRLNKRWFRFVKTKRGNPCFKITFSPRKSFVIPIKIDKQFQRFNYFIDDNWTFDNISLLNDGRISIVLEKKFEKPEINQRYIVGVDIGSSTLACASIFDTKSSKVIKQLYFGRDVAKRQRRYLERRAKLKSFADKGSHIARQHLERLKSNQSDFVKTRSGQIAKEIVNIAKQHNAYISIEKLKDLRGRRGQYNKKANRKINRIPYGKFKQFLKSNCEMFQVPIYEVDAYHTSKWCSKCGALNNGHHSGNYALYKCKCGLIVNSDRKASLAVAVKSVLERNKIHELTILSSIQISKIRVPVNGLLRSDDVDSKVAVQHNYQHMESH

SEQ ID NO: 52833 - protein, 410 aa, Streptomycetaceae sp.
VQLRYSFRLYPGAGQRALSARAFGCARVVFNDGLRAREDARAQGMPFPKSGELSKWLITEAKRTPERAWLGEVSAVVLQPSLRDLDAAYKNFFDGLAGRRAPAGPPRFKSRKDNRQSVRFTANARWSVTSGGKLRLPKIGDVKVAWSRELPSTPSSVTVVKDSADRYFASFVVETGGGEELPEVTGAVGIDLGLGHFAVLSDGRKFASPRFLRRAEKQLKKAQRILSRKEKGSRNRAKTRTKLARSHARVADARREFHHQLSTKLIRENQAVAVEDLAVKGLARTRLAKSVHDAGWSAFVCMLEYKAARYGRMFVKIGRFEPTSQVCSLCGVNDGRKPLHVREWLCGACGAILDRDVNAAVNIGLAAGLAVSACGAQVRRAVLPAQRGETGTHPKRRTQPVRGQAGFPDC

SEQ ID NO: 52834 - protein, 349 aa, unknown
  TnpB Polypeptide
MDFKTACKNMYEDIAKAKSGILNWDKVRITKFHSKKSEKQSYKTCMMKQNCLDWNEHTITIPKIKKVRFKNNQAPKWYKYRTKTRSITISRNASMEYFASILFEVRLPDTKRYNQWDKDESKVIGLDFDCNDMYIDSNGKSALKDFGFKKQKQNSKQLKHRQRQLARKCKNSKRREKARIKLAQSEAHVANARKDWSLKHSIYLARNYEVIAVEDLNIKEMMKGSRNAKNYQDISWSTFIGNLQQQSRKYNCQVIKTNKWYASSQICHICGFKNVMVQKRHLEEYFCPNCMTRHQRDENAAINIKNKSIRVLREAEEKREKGSVKRRITCQKDHASSLSTKKLTNLPLT

SEQ ID NO: 52835 - protein, 410 aa, unknown
  TnpB Polypeptide
VQVIKAVRQSYQPTPEILTLLEDFRLMVNDCIRAGLKFEEENHTTPSMKLLSVLCYSQLKRYEVYSAYRLTAISKAAGILSARRKSIRRGFFTKTPYVSKPLLVSCYQLKIQDGNLRVQLGERRCEYIPLNTHTLRVLSDITLRIKSFALTGTSMSISVSKETEAETREPTSTVGIDRNLRNLTVGNEERVTYYDMTRIVEIAENTRSIVASFKRNDARVLQSISSKFGRRRSQRTKQIIHGVTKQIVKEAKAKKQAIVFEEIRGIRNLYRKGNGQGRSFRGRMNSWPFHEVKRQVEYKAAWEGVPVVTLSRRDTRGTTMDCARCGERLQSPVRGDVGHNRQLWCENCGRWMDRDLVAVLNISRRGRVRFARSSTEGEAGEAVKGNAEHDGEPLILRVDASKLHDARQTQ

SEQ ID NO: 52836 - protein, 413 aa, Mycobacterium sp.
MRYRYRIEPTPAQAWMLARVFGCVRVVFNDALRVRDQAYQAGVKLSDSEIQRRVVTLAKKTTERGWLAEVPSLALVQSVNDSRRAWRHFFDSATGKRRGRRLGRPRMKSKKDHRQSFRLTRNGFSVRANGRLFVTKVGEVRVRWSRELPSEPSSVTIIREPDGHYYASFVADVATTPLPVVDQEAGVDVGICRLATVATSDQTRTDIENPKLLGRKLRKLRRLEREKFRRQKGSANRDKTRRKLALAHGKVARARREDHHKQALALVRDNQVIYVEDLNIVGMVKNRRLARAISDAGWGQFVRIIGEKAQRYGRTLHSVSRWLASSKTCSECGHRLDALALQVRQWMCPACRTVHDRDYNAAKVILAAGRAERINASHERGRDRAGGPCGVLVSPSTTRKARGDEAGSTPTAA

SEQ ID NO: 52837 - protein, 455 aa, Mycobacterium sp.
MARFEVPDGWCVQAFRFTLDPTEDQARSLARHFGARRKAYNWTVASLKADIQAWRADGIASAKPSLRVLRKRWNAVKDKVCVNAETGQVWWQECSKEAYADGIRGAVDAYWNWQTSRAGKRVGFPRFKRKGRDADRVCFTTGAMRVEPDGRHLTLPVIGTVRTHENTRRIERLIAKDRARVLAISVRRNGTRLDASVRVLIQRPQQPRVACPDSRVGVDVGVRRLATVADECGAVIEQVENPRPLDVALRELRQVCRARSRCTKGSRQYRERTTQMSRLHRRINDVRTHHLHVLTTRLAKTHGQIVVEGLDAAGMLRQKGLPGSRARRRGLSDAALGTPRRHLPYKTGWYGSALVVADRWFPSSKTCHVCRHVQDIGWDEKWQCGGCLVTHQRDDNAAINLARYEETSSVVGPVGAAVKRGADRKPRPGRAGGREARKGRSHKAAEQPRDGVQVA

SEQ ID NO: 52838 - protein, 575 aa, Mycobacterium sp.
VRTRLHLTEEEAAALGAIGEFLGSVYRRELAHRITLGRMDRKQHGRWRAERKQAITVVASSRWAGAITRAVEDQYQLGMRALTAEVTNVRAAIGVLESRCALRPGEVAAPADVVGGPRRQSRRPVRGYASAAQRFSKTRRLATLRTRLAVAEADLAAGRPSITVGGNRLWHTRQHLDAAEMSEQQWRDRWTAARMFLTADGETGKAAGNETIRVDESGQLRIKVPAALVDRFGTHLHIAAPVAFGHRCQEWADRVAGRRAVRYDITFNPAKGRWYLDASWTTTPGPAPTLEELRAGPVLGVDLNADHLAACVLDCSGNPVGAPVTIPVDTAGLPATRRDGRVRAAITALLDLAVHHNCSAVAVENLDFTDARATGRETLGRGQRGKRLRRAVAGIPTRRFRDRLTSMATRRGIAVIGVDPAYTSLWGRQHWRKPLQQQTSNPAAVTVHHGAAAAIGRRGLGNPIRRRPAGPRTQQRMRAGTPPARPDQPPGTTRRCRSSGSPPRPQRRRGMPVHQRTPTISGQHRSGRTGLLLLTNQERFDWFAWKNASYDLRHAKGKRGRWTLRLNTTGSRRVC

SEQ ID NO: 52839 - protein, 230 aa, Mycobacterium sp.
MLVLSCDEVPTRPLPATGAQAGIDVGVVTYATLSDGTEVANPRWARQEAGRVQVAQQRLQRAQRGSNNRVARRETVAARHRKIANRRKDFHHKQASELAARYDLLVVEDLKIANMLRRAKPKPDPDNPQQLLPNGARAKSGVNRSISDAGWGQFVSILRAKAEDAGRTWIEVDPRHTSDGCECCGHAAPENRVSQAEFVCQRCGHAAPADQHAARNILRAGLALHAATAA

SEQ ID NO: 52840 - protein, 594 aa, unknown
  TnpB Polypeptide
MFVKGKNMRTRRTHQPLTYDVRLPDEAQADALRLLDASKAVVNAALALLWPYLDEFGEREASPAWKQVGKYMGSPQYHGDRQWRCESEVVGRVLRAQAERKKAFALVLPILSDGFIRPKTEKRPAGKNRPAIKEAITTLQKSLEEDETSFVALQNVVEQCCNYFFAHDCFPSTYEELQPLPLLKVSMLTYAGDDGGEKGQAYRLALDLDAGVARFRFRYPDEAGIWHWRKVDTIIPLPDAVKERLTHGDLMAPTLREEQRADGERFVVLDFIVEVEKAELPAWERVERVLGADWGVHSLLTATAVDEHSQQVGRPFFLNTGGFDGRQARTRRQIDELKKKVARYEQQREAFPADDPKRAWYHQRLATYRREIDRCWRKYERRNRALAHLASNVLVLLCQVHGCSLLSMESLKTLKTTGRGKGVRGRWRNYRNNSTIRGEIWRLLRYKCHLIGLRFHTEQPRGTSHTCSQCGQPAKTYRSPSDRNEAVKWGRWMYCDTCHYNGDRDYCASVNIARLGVAYLEQMKQTSKERSCSITDPQVKPVSYTGAGAVLLLPPTGSHARPNVSGKICYYPGWLGSAFLQSSQHKAVFLRLYG

SEQ ID NO: 52841 - protein, 370 aa, unknown
  TnpB Polypeptide
MELIIMMKEVSKMSQVVTVEVRIYATRRQDAILKRMGKTYIQTANRVVANMVASEDGKRWSSKDIDTPLPSAVKNQLAGDAVGIYKKARKEDFKRIPVLKKPVCVWNNQNYSFDFESISFPVWMDGKSVKMRFRATMVDKDNRNTRLLANKLGTLRVTKKGRKWIAQISVHVPTVPRTGVRVMGVDLGLKVPAVAVTDDDTTRFFGNGRKNKYMKRKFRAERKALGKKKKPKAIKRRNQKEQRWMRDKDHKVSRAIVDFARQKKISVIRLELLANIRQTARTSRKNNQNLHSWSFYRLASFIEYKAALSGIKVEYVNPAYTSQTCPSCSVRNKVRDRVYTCACGFKGHRDAVGAMNIRYAPVMDGNSPSA

SEQ ID NO: 52842 - protein, 498 aa, Xenococcus sp.
MIYNYQYRLNPTTEQKLIFNDWLRVCRYWYNRQLGERFDWWERNRSYIDRCPLVCHLPELKDKPEFYGQKKQLPILKQDLVAVGWSGELLDFSSVPANTLQEVGKRVQLAFKRFIAGDKNGKRSGKPRFKNQARFRSMVFEGVKLHSCSVGGKFLYISLPKMGLIKLRHHRPLPDGVTLKSAQVIKKTDGWYINLRLQDDIIPDFKADIIPTWENSMGMDAVLHESDYLATSEGAKLPSLKSFRKAKTRLAKVSQRKSQKTKGSKSRRKLAKKEARLHQRIARSRKDHAYNTAQALLDTGKQVFFHEKLNLKGLSRRNKPKTDDNGKYIPNGQSAKSGLNLSWADAGFGQFFKILEYKAGKAGAIVKEVNPAYTSQLLSYRDDFIFTDCSIREYWDEELKLLIDRDINAGINIKRVGLDVFPTIKRRRGNPVVTNSATDSTSKEVLLAHQLWATGKPTPSYRYGVGASPWRSKRRKNCKSLFMKTTVAENVLIPEQSV

SEQ ID NO: 52843 - protein, 428 aa, Xenococcus sp.
MLTRRITFRLYPSNSQEQKLFWARRMHAYLYNAAVCNRKTQYQRLGHSVDYFEQQASLPKFKEVWTEYKELNAGSLQATLKRVDFAFVRFFQGLGGYPKYRSIRKYSGWTYPDGRQGFKAHTEGKNGYLELRDLGFKVQMRGQARTWGKPTTCTIVYRSGKWYASITVRCFPTRKLGKGAIGLDFGCKTAIADSNGKQVKPPKFLANAQNEINQLSKQLRRKRRPEKRKHKGSRRWKKVQSKISKLKKKIANQRQNWVHHQAVEIVSCNSLIATEKLNIKNMTRKAKKGSKRKRQKAGLNRSMLDVGIGMLKKAIAYKAKEAGAIYLEAPTKSLKPTQRCAICWKLTKKDLSDRLHVCSNKDCNHTEDRDVNAAQVCLAWARGQELSSLKTADESSSTRSSKVKSCGGFQQLAQVKRQKLMAQRSSHE

SEQ ID NO: 52844 - protein, 322 aa, Xenococcus sp.
MKHIAKLRRRIKYWQQVGSQAVQDICQRIDKAYKLFFKQCKSGTRPPNFKKTRKYKSFTLKQAGYRFLEDNKIRIGNKIYKFSKSREIKGKIKTLTVKRNHLGELFILVVTGYKDESFGVVTGKIAGFDFGLKTFLTASDLTTIKSPLFFNEFRHLLKAASRNLSKKKKGSNNWYKAKDNLNRVFERISNKRRDWFWKLAHKLTNDYDVLIFEDLNLRGMKKLWGRKVSDLSFSTFLEILETVARNKGKTIHFIDRFYPSSKTCFDCGYHNKELTLKDRVWDCPGCGSKLDRDLNAAKNIKREGASSLGLGDVRRSLGAIAA

SEQ ID NO: 52845 - protein, 715 aa, Streptomyces sp.
MKMLPRQQPASAPGEGRRFRGPNKAEPWRREKDAAASVIRLPLVADDPGTRRRVELLFGAMWQVKRALQRDARAVVDAYWAGDVRRERDAKAWRAELGLSRTGLEHRAYAHVGRSRWLGDHVSKALAMHQADEVWIGVARHLHPDASGRRAGRPRTGSWWEYTRIPGRARSHTVERKWETFRLHGTLTGHLNAFRHPALPGHITTPAQAAALPPGTSVLAQPRNLPALSRPTGCIPTGAVDDRERARTRVASWFDHTGPLSVVFASGPNSGDGDLVLPVRLPQGAGRWSYLAHYLSDPAGWHKVDLVRRRDATAPGGWTYEAHLMVLTPGYASPATRARRIQAAALGRVGGVDGNVSNLAVVSFPASGDPDHGPVGVDTITLTEAEQHALMVRRRKAKGRQRALDRSRRSANPAQYRPSRRQQQRDERRHTAGLPPRTTATPAGPRRTTTGKPTQPYCRDQLSNSYRTLRARHAMAAAREAEAKHHRAKKTAAALVAVHGPNLTIEDCDIRTGFRLWGRACSATTPGRLITALAAECTATGGRLLRASTFTTALSQHCLCGRRVPKSLRDRVHHCDPAGGGCGLRGDRDPVSAALAAFTTLANPHDPATARLDHARARAAQILFTPGLQEALSESTAPKSAPSGRTRAAARTPETSIPGQRASARRNAGSAPWQPRMRPDPRPSGPRPTPERHDRTPHYPERHHGYGIALRRHGP

SEQ ID NO: 52846 - protein, 489 aa, Clostridiales sp.
MEVSMKTIELKLYRPSLSKRNIMNEALENYSRAYAYLINKAIKEFDDIKDSYKSSAGYYKTNDIVKWISKETLKELNKFGVEPFKDSIKIDFSASLAGVLNNKISRGIEGLQTNFRERPIYFCRYSKNRNYCLLYDEENNKYYAKIYLMNVKNEKRKKAVLNLGKTLRYITGDKELYKECDGKRSFIIVPLAFGKWQEEHLKEALKNPQILKTARLIKRKNEYYLAINIVREVEEAAEPVNFMGISRGINKAINYTIVDKMGSIIFEGCEIEENFTKDKLNSIANKLIKKAGEYKCQAIFERLIDKGDNLTFKDKQGKLYIPIMNCSSYNSLYDIIKSKLRANGMRSPIRVSAVSIFNTCPFCVRHSKANRFSSELLICTSCGKSIAVEKAGSINLARKLIHYSNEKIPIIVKNIDKRIAFINEEIGLEYYPANPFDCQAEFMKEIDNVIARFYENIALEKQKENYKKKLSLIKRLEANKNILKLIESN

SEQ ID NO: 52847 - protein, 386 aa, Thermocrinis sp.
MFVSLQFKLELKREDREKLIKLMRKQSSAIRVAYNMLRKLEKEKTKNPFPYTVELKLRDGEVYGNVSFELPTPEVRYTKEKGVIAIDTNASPIHLAMAEVSKTGELLSYQTISLHHLIGLSQNSKDHQEWILAHQIVDLAIQKGKAIAIENLKKLKKGMRGDEKAELRKRLHQWNAKKFLQKLKRVAMLKGVEVVEVHPAYTSVIGMLKYAPQLSVDKDVAGAYVIGRRALGFKEDMPENYEKLLKDKAYLEFALKRYEEREKKLRELLEKEGNEYKRNTLKSELRSVENARKLLANLIQSLQSEPSSCEGANGRNPEQGRVAKTTLQSAWQVLKVALLFPILGKVLPRDLSPLKPVLVKGVWGRVRRSNGLVPLEAGRTVPIRDF

SEQ ID NO: 52848 - protein, 391 aa, Peptoclostridium sp.
MIRCHKTSFYATKSDIDRLFACNRLSAEIWNACLAVSKSYSLANGGKWIGKSLLQAEMKGRFPLHSQSIQAVCHKYLFARDSAYAARLKGYKNKYPYKTKRNFNTKWIDKAFKILPSGKIELSMGIANGKRQKPITIWCKEIPLGDIKEIELVYDRWLMVSISYDDCADETETSGTKKVGVDLGEIHSIAAFCDNGESLIITGRKLRSVHRLRNKKLAELQRLMSKCKKGSRQWKRYNHAKQFVLSKSEKQLKDALHKSSSNFAIWCVENAVSEVAVGKIEGVQRKTKGKKSKNTNQKLSNWAFGRLQKYMEYKLKSCGIAMYKIDESYTTQTCPVCGRKKKSSGRNYKCKCGYSCHRDIHGARNILSKHLSGGRITHVADIENQKYLRIA

SEQ ID NO: 52849 - protein, 391 aa, Peptoclostridium sp.
MIRCHKTDFYSTKSDLDRLFACNRISAEIWNACLAVSKDYSLENGGKWIGKSQLQAEMKGKFPLHSQSVQAVCHKYLFARDAARAANLKGYKNKYPYKSKKHYNTKWIDKAFKVFPNGKIELSMGIAHGKRQKPITIWCKYVPVGDIKEIELVYDMGLMVSMSYDDYAGEAENAGTLKVGVDLGEIHSIAAFCESGESLIITGRKLRSIHRLRNKKLAELQRLMSRCKKGSRQWRRYNQAKQYILSKSEKQLKDALHKSSRKFADWCLTNAVGEVAVGKVEGVQRNTKGKLRKKESQKLSNWAFGRLQAYMEYKLNACGIAMSKIDESYTTQTCPVCGKRKKTSGRSYKCKCGYSCHRDIHGARNILSKHIHGGWITYVADIANITYLRIA

SEQ ID NO: 52850 - protein, 356 aa, Peptoclostridium sp.
MLRAYKYRIYPNAEQREYFAKCFGCVRFVYNRMLADRIEYYKQTGKSLNNTPAEYKKEFEWLKEVDSLALANAQLNLNKAYKNFFRDKSVGFPRFKSKKSNRHAYTTNNQKGTVTIEDGYIKLPKLKSKVRVKQHRDFDGLIKSCTVSKTSSGKHFISVLVDTELAPLPKAENKVGIDVGLKDFAICSNGKVFPNPKWLRNSEKRLAKLQKNLSRKAKGSSNRAKARLKVAKLHEKIANQRKDFLHKASSKIVSENQAIAIEDLKVKNMLKNHCLAKAISEVSWSMFRTMLEYKSKWNGRDLVIAPSNYASSQLCSDCGYKNPEVKNLGLRKWTCPECRAVHERDINAAKNLLKLI

SEQ ID NO: 52851 - protein, 375 aa, Peptoclostridium sp.
MIKGLKIRLYPTPDQEHLMWQHIGSMRFVYNWALSRRSDEYRASGKMLSVADLGKELTQLKQTDEFSWLYEISNATLKESIRDLEKAYKGFFNGGGFPRFKSRKRSRTGFYSRYDKLYFKESMVNLEKIGKVRCRHDYGIDLTQVQKFSNPRVSYNGRCWVLAVGIEIEQEKPELTEVSLGIDLGIKQLAITNVDELDANNINKTARVRKLEKRLKRYQRQCSRKYENNRKGRSYRKTKNIAKIEKKIKKLHGRLANIRLNHIHQTTLAMVKTKPYRVVMEDLNVSGMMKNKHLSKAIMQQGFAAFIAQMKYKCEALGIEFVQVPRFYPSSKKCSHCGNIKKDLKLSDRTYKCECGFTCDRDKNAAYNLAGYGLA

SEQ ID NO: 52852 - protein, 445 aa, Clostridiales sp.
METVMYSVKIKEHSKVFAQTVALYRAAVDFFTNVIYREWEQFVSVMTSKQAVNLTENLTVSTASHPSVPYSFSTRFYKFPSYLRRAAIAEAYGKVSSYYSHFASWKMSDPKTRGGRPVLGKTGFIYPAMYRYNCFVRTGTYTAKLKVFVRNTWDWISVKLRKSDVDYIRRHCASFKECVPTLQKRGKQWYLDFAFQYKTDLHKIPVSDQTILAVDLGINNCCTCAVMRSDGAVIGRYFLKLPKEYDCLKRKINRIRYAQCHGSHNVHNLWRLADGVNKDIASKTAAFIVDTAVQYNADTVVFEYLDLTGKKRGSKKQRLSLWRAKDIQSIVENRCHRFGMRISRICAWGTSKYAVDGSGKVLRGKDSTKTNGSYSVCEFSTGKVYNCDLNASYNIGARYFIREILKSLSVTEEQRILANVPACAKRSTCTLSDLISLHAALYAEA

SEQ ID NO: 52853 - protein, 299 aa, Escherichia sp.
  misc_feature (232)..(265): Xaa can be any naturally occurring amino acid
MASWLVEWKNATETQWLKDSPSQPLQQSLKDLERAYKNFFQNRAAFPRFKKRGQNDAFRYPQGVKLDQENSRIFLPKLGWMRYRNSRQVTGVVKNVTVSQSCGKWYISIQTESEVSTPVHPSASMVGLDAGVAKLATLSDGTVFEPVNSFQKNQKKLARLQRQLSRKVKFSNNWQKQERKIQRLHSRIANIRRDYLHKVTTTVSKNHAMIVIEDLKVSNMSKSAAGTVSQPXXXXXXXXXXXXXXXXXXXXXXXXXXXXXXXXXXGYWRTSAATGKIARTPQNAFVVIPDCNIWSISSQ

SEQ ID NO: 52854 - protein, 220 aa, Microcystis sp.
MEKAYSFRFYPTPEQESLLRRTLGCVRLVYNKALHLRTKAWYKRQERVGYAETSSMLTDWKKQEELEFLNEVSCVPLQQGLRHLQTAFTNFFAGRTKYPNFKKKHQGGSAEFTKSAFKFKDKQIYLAKCTEPLPIRWSRQIPESCEPSTVTVRLHPSGRWHISIRFDDPTIKPLPVTDKAIGIDLGISSLVITSDGDKVSNPKHFKKHYRRLRRASKKPF

SEQ ID NO: 52855 - protein, 460 aa, Lachnospiraceae sp.
MSNENNKCVNAVRIYMDDIISPTNDWKIFNDIYKQLQSELTKASTKAISICNIYTSLLLNGGKEKADQWVSNTYNMNKLASAMYHPVRSECIDLLSGVTASFSREIHSKYFSGKNSYLNAIKSGSGNPPMTYTDKLPIPLIKQGGKVERSKDKSARFYDLTFGLLSKEGVKNFSHQLCGDDTQSKVTGQLKFQTNTRDDNTYRVLENIVEGNYELCGSKLIRVKKKRKTSAEKSAGRIYDYILILSYSHPVQSHDLDPEKIMGIDVGMQIPAMCAVNYNDKYRRSLGGRKILEENMRQQRLNKIHQQSITYNCRDGHGRKAKLDGWDGKGHKINNRNSTYNHMLSKQIVDQAIRWKCGTIHMEDLSGITGGKQNKFLKSWPYFDLQTKIENKAKENGIAVKKIKPYGTSQTCSVCGYRDKDNRPKGDMGQAYFHCVKCGFETNADFNAARNIAMSSNYRR

SEQ ID NO: 52856 - protein, 352 aa, Shimazuella sp.
MPTITLRLQLHNPTGAKQQMYQRMTEINTDFANWFLLHPEANKATSTIFKEFSDENFPSAVVNQTIREVKSQKKNQNAKTFRKIWCSFNNQNLKVERKSECYTVSFPALEKRVGVPVVAEPFQVAWLEKILNGNVKQGAGKLYQKKKKWYLAIPISWNVESSQDEKVMGIDLGLRYLAVASIGTNSLFFKGSQVANSRRRYSSRRRKLGQAKKLQAIKKSKDKESRWMKDQNHKISRQIINHALANGVGVIRMEDLTDIRNTAKSKRMDQGRNLHSWSFYQLKEFIKYKAEMVGIGFELVNPEYTSQTCKCGHQAKSNRSGLKFRCKECGHTCHADLNGAINIAKAISGLAA

SEQ ID NO: 52857 - protein, 389 aa, Gemmataceae sp.
MRRAYKYRLFTNANQDRELGIMLETHRRLYNACLDQRKTAYEATKKSVKYTEQSAWFRAERHTNPYFARLNFSSAQATMRRLDKAFSNFFRRVKEKAAKVGYPRFKSRDRHDSIEFPSHGDGIRLTGNRLRVQHVGTIRVKLHTPVEGEIKTITLKREAGKWYVVASCDLGEVKVSPSTLPPVGIDVGLESFLTTSDGRHEPNPHYLKTELPELRVTGRAVVRKKKGGANRRKALRRLQKVHVRVKNLRKEHHYQVACRLILAYGLFAVEGLNIRGMLRNHRFSRAISDAGWAGFLSVLRHKAESAGASFVEVDPRGTSQECSGCGEEARKDLSVRQHNCLHCGLSVHRDINAARNILARGQGRTGPAEVNVDHGVKRPPRNRRVHAMA

SEQ ID NO: 52858 - protein, 167 aa, Helicobacter sp.
LPLIKRLSKNLSKKVKGSNNFKKAKKKLAKLHQKIKHLRTDFFYKLALKLSRKYQSIFIEDLNMKAMQKLWGKKVSDIAFSEFVKILENKAHVVKIDRFYPSSKTCSNCLSVDENFNKDIKKLGKTDKEREYHCKYCGLELDRDLNASINIHRVGASILGVEFVRPT

SEQ ID NO: 52859 - protein, 525 aa, unknown
  TnpB Polypeptide
MLSWAAEGKQMPRVKTPSFITEIPLIVTSQDEAELRSRFNAGMRLYNALLNESMVRMNLVRGSDSFQAAKKLPKGKEKSPEAKIRSDAFDAARKAYRYSEFDLHTYATVVAKGSDWIAQKIDAQAQQTLASRAFKASEKVLFGRAKGVRFKVPNRFKSMEGKTNKQGIRWAENEFVWGKLRLKAIIDPGNKVIAHGLKSRIKYVRIIKKEIRGTWRWFAQLICEGVPFKKDKNVTPPGLVGIDLNVSNVAFVGNDKAGLLPFAEKVPTFEQEIKAAQRQMQRSQRVANPDNYEPDFAGRKGRKAITKKGKVKKGKRKWHKSQTYLKVAAKKRELERRKAAYSKSHNRRLVNDILRNGNQIRTENVSVKGWQKRYGKAILAKSPGFFQAELKRKAEGAGGSFTKFSTQKTALSQTHLTGERVKKSLSERVHYDQTGIVMHRDLFSAFLARYVDEDQLALQDACEAYLGMETSLIEAWRRYKINCEQVGIAESRKAHPPSERFSICSEKANQIDNLGFDPRFGRKVS

SEQ ID NO: 52860 - protein, 198 aa, Burkholderia sp.
MILVYRYRVKSLNGLLNKQSRAVNYVWNFCNDTLNSRALPEGKIKDGTNFAQDARGNWFLNIVIEMPDVQARPIRSGVGIDLGLKDFATLSTGEKLPNDQFGRRETEKLAKAQRARKHKRHIAKLHAKVANARADFQHKLALACGSKDSTTRPKGIAGLRMREWACDGCGVVHDRDINAALNILRCGRASPGVGITCL

SEQ ID NO: 52861 - protein, 363 aa, Cyanothece sp.
MLSFKTELKLNNKQRSLMAQHAGCARFAYNWGLALTKEILNHNQANPDNKLKFPTGIDLHKRFVAEVKSANSWLYQSSKCAPQQALRDLRVAWDRAFKKIAKPPKFKKKGVKDGFYLEGSIKVEPLHIKLPRIGWVKTYEILPSTQVKNVRITRKADRWFIAFKVDATPSILPKMGKIIGVDLGIKSLAVCSNGTVFENPRAYKKLKRKLAHLQRAVSRKVKGSNNRKKAIKALARLHYRISCIRKNVIHKLTSWLTKNHSVVVIEDLNVSGMLRNHRLANAIADSSLYECRRQLEYKAKLYDTQIIIADRFYPSSQLCFNCGHRQKMPLHKRVFDCEKCKTIIDRDLNASINLASLAVSSTV

SEQ ID NO: 52862 - protein, 200 aa, Clostridioides sp.
  misc_feature (175)..(196): Xaa can be any naturally occurring amino acid
MYPNKKQQELINKTFGCCRFVYNKYLAKRIEVYKNDKETFTYKQCSSDLTNLKKELNWLKEPDKFSLQNALKDLDNAYKKFFKEKAGFPKFKSKKINRFSYKTNFTNGNIMYCGQHIKLPKLGMVKIRDKQVPQGRILNATISKEPSGRYYVSLCCTDVDIEAFENTNNHIGLDXXXXXXXXXXXXXXXXXXXXXXQSVV

SEQ ID NO: 52863 - protein, 370 aa, unknown
  TnpB Polypeptide
MEYSYKFRLYPTPKQESLIRRTFGCCRFVFNHFLAERMEQYKGTGKSQTRFQQDKSLTALKKELDWLREVDATALQATLQSLDSAYQNFFRRVKNGEKPGYPRFKSKHNCRQSYKSKCVGANIKVLDKAVQLPKLGLVKCRISKEVKGRILSATVSRNPSGKYFVALCCTDVEIEPLPSTGTIVGLDMGLKSFVISSDGEQYPNHKYIAKSARKLARLQRQLSRKQKGSKRREKARVKVTRLHEKVANQRNDSLHQLSTELIQRYDLIAIEDLSPKNMVKNHKLAQSIADASWGEFRRQLQYKTAWYGKQVVTVDRFFPSSQLCSACGARWDGTKDLGVRGWTCPSCGTAHDRDVNAAKNILKEGLRLLA

SEQ ID NO: 52864 - protein, 419 aa, unknown
  TnpB Polypeptide
MNYNYRYRIEPSGGVEAELERHIDTCRQLYNHFLYELRNTDEYLSYTALQNMLPDMKDWWGELNNVYSKVLQMVARRVSDNLNRLKSQKDNGRKVGVLTWRSPREYRSLTYNQSGFELKNKSDQTLLFLSKIGKMPIHLHRDIPDDARVKQVTVKQEKTGEWYAIFGIETETDVPEKPALDEVDRKNMVGIDVGIIKYIHDTDSTMVGSLDLAAEYERLEREQRALNRKEQGSQNWHEQRRRVACNHARIVRKRRDFLHKLSNYYAKEYDLVAVEDLDVHGLMQLPSNSRNRASASWRTFIDFLEYKCDREGTHFVKVEPEGTTQECAECGVEVEKEVWVREHSCPTCGFETDRDENAAYNVLQRGLSELGVGHAEVTPAETALPTSMAGGSSTIVDAKCVVETGSPTLKKRTAQVVSE

SEQ ID NO: 52865 - protein, 432 aa, Bifidobacterium sp.
MTAYEAVKVRLDPTPRQARLLASHAGAARFAYNLMLSHVRRQLSLGEHPDWTMYAMRRWWNEWKDEIAPWWRENSKEAYNSAFEWLSQALKNWSDSRKGRRGGRRVGWPKYKSKRTSIPRFAYTTGSFGLIDGDPKALRLPRIGRVHCMENAARLVHGRRIVRMTVSRRAGAWYAALTVEQQPDTRPMAKTRRRDYPVGVDLGVKTLATLSDGTIFPNPRGYVRAQRRLRRAQQTLSRRDKDTNHGRGSNRRRKALDHVQHIYARIAAQRADRIGKLTTWLTATYPDISIEDLNVQGVTRNHRLAKHVLDADFGEFRRQLECKTARAGTRLHVIDRWFPSSKTCHRCGTVKAKLPLSERVYRCDECGLTMDRDLNAAINIMVAGSAPETLNARGGDVRRPGLAEATQTSVKREPSWHANAVRLGAAPGNRDM

SEQ ID NO: 52866 - protein, 424 aa, unknown
  TnpB Polypeptide
MPETTCSYVTRITNHEQVRDDLSDCRFSVSKLWDVGRYDIQQQWDEDDEIPGEAERKSESKHHECDSDQHFQSSQRVLKELAEAFNGWHDFDDNANPSDYRRHGEDHPRSTVTWKQKGIKHDTKHGQGRLSEGWNLNLKDRRSDFILVEYETPPDVEDENIQQVRAVWNGDEWELHLVCQKEIPDAPDDKTAGIDLGISNYLVINDEDGAYELYPEYVPKQNKHYFTREEYQTEGENGSWKRGRKARRKLSRRKDHFFHTLSKHVVQRYVKEGVAQIAVSDPSNIHEDENGDLRNWGQSRNKKSRGWDFARFTRMLEYNVKKHGIVIDQVDEENPSKTCSCCRQIRESNRVECGLYVCELCETTMNAGVNVCRQIAQNPSTGHMSNGWLAQPGVFLFDRESGQFTPREREDCKPLYPNARESHP

SEQ ID NO: 52867 - protein, 415 aa, Candidate division WPS-2 bacterium
  misc_feature (344)..(344): Xaa can be any naturally occurring amino acid
MNVDTVTRRQGYRFRLKPTAAEAALLRRFIGSSRFVWNEVLALNELRHERGERRLGFAAMCDYLVYLKREYDCLREVHSQPLQQTLRDLATAYQHAFDPNLAVRFPRFKKRHRPQGIRFPQGFKVDSSAVYVAKVGWIGFRRSREIEGMPKNVTVSCNGTHWYVSIQTEREVAEPVHASASAVGIDLGVARFAALSDGTFLDSPNAFKEYEQRLAFFQRRVARKKKFSANWRKAKAKVARLHRKIASLRSDLLHKASTTISKNHALVVMEDLRVVNMTASAKGTRENPGTNVHAKSGLNRRILDQGCGEFRRQLTYKLAWAGGALVLVDPRDTSRTCAACGHAXASALPLHRVPSCGQRRHERGEEHSRKGRAGPDRLWRCGVGRVWEAGSPPCRLSAMQWRILGLQAGERVKVL

SEQ ID NO: 52868 - protein, 393 aa, unknown
  TnpB Polypeptide
MDCTKTLKLRIKDKHANVLRQMAREVNQVWNHINAISAKAARPFHGKPQFLSGYDLQKFTAGFSKCDDVSVGSGTVQLVCVEYATRRKQFKKTRLNWRVSNPKSAKYSLGWIPFKGGHAKYKAGQIHFAGQKLSLWDSYGLADYELRAGSFSEDSRGRWYLNVVVKVQAKASAATASVGIDLGLKEAAVASDAQRIQGRFYRKLEARLGIAQRAGKKCRVKAIHAKIKNQRKDMLHKFSTATNAPPRGSTTVMRLLGRALFVPALIKNIRRNWYLLVVTLSIREIQTMAPLLWTAVRETGSVLHMERQDRLRWFCGIRGFSEFWFDKTQQAHRLQDLPGRHAVWCAAVIAHSARVPSQRGLWLLRACQRGEWRTQYPVRCYWWSRETWSRLID

SEQ ID NO: 52869 - protein, 394 aa, unknown
  TnpB Polypeptide
MMIKTIRVMLLPNNKQQTKLFQYANTARFAYNWALGREQENYKNNGKFISDKDLRKEFTQLKKTSEYAWLNNISNNVTKQAIKDACEAYRNFFKGITKFPRFKSKKYSAPKFYQDNVKIQFTDTYVKVEGFATSKKKNKQKLNWIRLAEHERIPSENIKYINPRIKYDGFNWYITVGIEYEDYIDFPTNEGIGVDLGIKDLAICSDRNKYQNINKTQRVKKLEKRKRRLQRSISRRYEKNKKGVSYCKTRNIIKRKKELLKVTKRLTNIRQNYLHQTTSEIVKRKPSFICMEDLNVSDMMKNRHLSKAVQKQGFYEFRRLIKYKSEWNNIPVIIADRFFPSSKLCSCCGNIKKDLKLSDRIYKCECGNIIDRDFQASLNLKMYGENVLKQQSVA

SEQ ID NO: 52870 - protein, 354 aa, unknown
  TnpB Polypeptide
LYLEKNKEQYEKDKTFITAYAFSKWMNNEFSVQEEYTWIKEVSSKAVKQAMVGAEKAFKRFFKGLSKYPRFKKKKNQDVKAYFPKNNKTDWKVERHRVKIPTLGWIRLKEKGYIPVNGKVRSGTISQKAGRYFVSVLVETQETYEQVETGNGIGIDVGVKDFVISSDGQVFGNINKTSAIRHTEKRLKRAQRALSRKYKQRKRGEGPVTYVGSNIRKAVLRVQKLQMRLANMRLAYRSYVVSMLVKTKPAFITLEKLNIKGMVRNRHVAKAVSSQGFYDFKQKLLSACKKYGIEVREVSTFYPSSKLCSCCGYKKVQLSLNERIFICENCGLEIERDLNASLNLKRAKEYTFLT

SEQ ID NO: 52871 - protein, 393 aa, unknown
  TnpB Polypeptide
VPIQTLTLKLPFLHLNKVKAAEWSRLERVNTDLANRILGMPEAERRRLTTASFADVELGSAWVNQTIRTVNKSQKVKAFKRLPLETNNQNWTLHKVGNTYSIGFGLLRGVKKRVPLEVHQANHKAILEGILAGTHKPGSLKLVQSKKGVWYACVSVSWEVPRPTETPRLVGVDRGQNHLAVAVTPEGRSLFLSFGWVRHIRRRYAAKRRRLQQKGKHKTLKRLEQKESRTIRHINHIISKKLVAFAKEHGCGIRMEDLSGIRQSKQRQSTKAKADLNRDFWPYYDLESKTAYKALGAGVAFEKVPAAYTSKTCRRCGAIGVRHRHSFRCKRCGYQGHADHNAGSNLANWLGLSCCSAGRGAWHTPKLGKRTQPERAGLVRTRIPWIYPWECQL

SEQ ID NO: 52872 - protein, 436 aa, unknown
  TnpB Polypeptide
MITLKIPYQTSVESALLVQELRRQYSCIVRYAYNRAKEGKKQKEIRSLVKLLSNINLSSWFVQCAILEGLAIQKRNKDKKVVFGGKLSFKQRNEGKVSNKELKEKRLCNLVLQGEAVQKGNRQFDFRRLNDNKLIFKVNSKNHIELSFPALNKNYIKKLNFITKASQLKEQPITVSLSNKYIYFTYEEPKNYSSTSLLQNRYIGIDLNPNYIGVVVKSDDTILHKQCFNLEKLTQLIRNEANSSDSIRFKQLNNKLNHETLEISKAIEKIALQFRCKFVFIEDLKSISKPNIGKGHALNRLTKNLWKRTYFTVNLEKRCKLNNIKLYKVNPMYSSVVGNLQHYYIDPINAALEVARRGYHIIILKDKAFYPEFTIKASLLNQWKEEGSEEVKDWKSCFKLIKNSKMRYRISLNEVEKPFKVLKMKSIKSKVTIYDF

SEQ ID NO: 52873 - protein, 379 aa, unknown
  TnpB Polypeptide
MLRAIKIRLYPNKTQEQEFNKILGCYRFVYNHMLARKQEVYKTDKINLGLTELSKYFHHELLKDEQYAWLKEQNTKVMKQSIRQMLTAYDNFFKHQKGFPKFKSKRDKQSALFPIDAISRCNDFETRRITLIKQLKNIKFRCSDLYFNRLRKYKDDVKSATLSKTKSGNFFLSILIDIPQNEFVKFKKTNKEVGIDLGVKDFVITSDGKKFENKHFFKNDEQKLKKLQRQLSKKRKGSNNFHKQCKRIAKTFEHITNKKENYIHYVVNELLGNYDTIYMENLSINGMLRNHHLAKAISEVGFFKFKEILKNKAIVNDKKVVLIDKFYPSSKTCSCCGYKNKGLKLSDRNWQCPECGANHDRDFNAARNIFREGQRISVA

SEQ ID NO: 52874 - protein, 242 aa, unknown
  TnpB Polypeptide
MITSYKYRAYPDAAVEARLHEALDTCRWLYNKLLEERNTARERGSPLTMQETQARIITLKDENPALAGVYSKVLQMVNYTLWSNIRALSETKKNGRKIGKPRFKSASRYRTLNYNQSGFKIDCESKLITLSKIGTIPFRMHRPYSGEVKGVLITRSGDEWYVIIQAEQEVSEPGREGRSVGIDVGLNAFAVDSDGVVIENPRFSERSRARMKKLQQSVARKCRDEGSLRKSPRMSLLWWVYC

SEQ ID NO: 52875 - protein, 289 aa, unknown
  TnpB Polypeptide
MRRTSRIFLSDLNAGKAAIVRDFLHQCRDVTQYFVDLFWQRQDFSADLADLATVHRGRDRFGITTRLAQSLAKQAKEICRAAHANGHHKPRMQRWTTTLYSHFVILEAFAGEHFDYALRLIGSGAPRLTLPLHSTTHCNRFLAAGWTVAKTVRLGWRKGRLFVECLLEKARPALKTAGAVVGMDSNYKHGLVFSDGQTTGDTAYDTIQGFAKRQRHTHAHIKSLVGKALKQIDFSAIRVLCIEDLKHVKAFKRGTFPRRLNRRLSHWLYNFLVSGGKAGELLPGTWGTF

SEQ ID NO: 52876 - protein, 441 aa, unknown
  TnpB Polypeptide
MRVTTSYRTKIVGYSNIFSETISIYRKALAYLIDVVDAEWDFVKNLKSAKSKMSYIEKMVHNTARNIAKYDFDKQFYKLPSYYRRAVINKAVGIVSSFRSNYENWEANGKKGMPPKLQTKHFSFPTMYKDNMFLRDSDYTARVKIYHNNDWVWLNISLRKSDVDYIQRHKLNIKESAPTLEKRGKCWFLRFAYEEKRELYKNIDIITAVDLGINNAATCSALLSDGTVIGRKIFNFPIEKDRIDNILEQIKEAQRKGAKKTPRLWSFANNYNRTLSEKTANAIIEFALRHGSKAIVFENLSGMKGKKRGSKKQKLHLWRKQSVIALVTTKAHLHCMRISTVCAWKTSRLAFDGTGAVVRGKYIQNGKECTNYSISVFSTGKIYHADLNASYNIGARYFIREHFKKLTEQKILAVQAKVPALAKRTTCTLNDLISLVVELAA

SEQ ID NO: 52877 - protein, 285 aa, Bacillus sp.
MIKGMTYNVCFSQLTPLKKELVALKELDSIAIQASLKNLSDPYSRFFKKQNQAPRFESKKNNVQSYTTKHTNGNIATVDNKVKLPKLGFVTFAKSREVYGRIINATVRRNSNGKYFVAILAKVEIQPLEKADSTIGIDLGMTEFAILSDGHKIDNNTFTSKMEKKLKREQRKLSKRTLIAKNKGIHLLDAKNYQKQKLKIARLHERVIIQQDDFLNELRTEIIKNHDIICTEGSNTKGMLRNHKLEYKAIWYGKKIVNISRWFPSSQICSNCGHHDGKKSLEIRD

SEQ ID NO: 52878 - protein, 131 aa, Bacillus sp.
MLCQVSPLVETEVQELPKTQSSIGMDVGLKDFAILSDGTTYKNPKFFRSLEDKLAKAQRVLSRRMKGSSRWNRQRVKVARIHEYISNARKDYLDKISTEIIKSHDVIGIEDLQVSNMLKNRKLAKAISEVS

SEQ ID NO: 52879 - protein, 415 aa, Halobacteriales sp.
MEVRRTAPVKLVVPDEYHDDLHKTADQFLHCANEASDYCWDNISHEDCVISNSKARNALYDRLREETDLTANLVQEAIRRAVHAVDSGVDRWKNGKRTNKPEFTSWSIVYDKRSATFYRNNISLSTVNGRIECDFELPADSPTPYEQYVLSDDYEFRTSTLQYDQASDEFYFHITTRKIDDEGEAVDVAGSDDTGHQTVLGIDLGVNSLAVSSTGTFWSGDEYDHWIQEFENRRAEMQQRRTQSAHNALLRLGNRERAWRKQYIHTVANEIVDEAATHECDVIVFEELTDIRDRLPHADWHHVWAFRRLLEYVEYKAPEQGIAVAQVDPDHTSHRCSHTDCGFTHEDNRDGEQFMCLKCGYEINADYNGAKNVALRYLRKRQHSLRSSPTSGSADAPVDVRINGGTLNGDGYQAV

SEQ ID NO: 52880 - protein, 427 aa, unknown
  TnpB Polypeptide
MLNPKNLKIKESMAATRKRRTGMVCRVFEIKVVHGKLSHEKKEHLDALCREAKWLRNSELAKNDISLLDRNAKTASVKVGEDFEIRELTHLGSQMRQDIVDQLKSDVRGLAEAKKKGRKVGRLKFKSYCNSIPLRQFGVTYRIDFEKNTVFIQGFRKPFKVRGLKQIPKDCEFANAKLIRKPSGYYFHITTYSVPETKSLAGSVCGIDFGIENNLTFDNGDVVNILIPEIHTVKVASKRLNKAYHRNGKVKSKNHRKRQQVLQRAYERQTNKKNDLANKTVHDILENYDFVAIQDEMIANWHRGLFGKQVQHSAMGKIKSKLKNSSKTHIVPRSFPSTQKCPFCGKNTKHPVSKRDYTCGYCGYYHPSRDVKSAQMILSEALASDVSLEQRTKSPVELKSTDDYAHSPFAVGMVIKTPAVKQEAQVL

SEQ ID NO: 52881 - protein, 275 aa, unknown
  TnpB Polypeptide
MSEQLVEVKIVDYGMLKQIHSDILYYINYRNAIRKTGGQDPPVPNRLKEFGIAPNNLRIGPLKISEINGKVKVSKINAIVEKPKEGIPEYAIISFESGVKVYLAYKEQSPIVGIDLGIRHLFTIVAIVEEGKVYKTKYIGDRKMVDTFTKYLGDSQGLVYLNDIKSQVRQPISEALSFLEAIKPKVIAIEDLRIYNAKVGKGLRAIEQILEKELFSHGFKVRRLDPRNTTKICSRCGYRSGEVMGSIFVCPSCGYKADRDFNAAYNLALKCYFTC

SEQ ID NO: 52882 - protein, 398 aa, unknown
  TnpB Polypeptide
MSRYRLLPTPAQEAVLRDHCGHARYVWNLAVEQHTHWHPGRGGGPGYLEQCRQLTQARAEHDWLAAGSQMVQQQALRDFARAMAAFFDPGNPIGRPSWRKAGRHEGFRIVGRRGRQWDVRRLSRKTGEVWVPKVGWVRFRWSRAVPPGVKSYRVTKDRAGRWHVAFAAVPDPVPAVGNGEAVGIDRGVAVSAALSTGELLRAPGLSARERKRLLHLERRLARAKRGSNRRGRVRHAIARLRARETDRRKDWAEKASTDIARRFDKIRVEDLKIKNMTRSARGTQSYPGRNVGAKAGLNREILRSGWGLLVRRLADKAPGRVEKINPAYTSQTCSGCGHRAPESRESQSRFRCRACGLQLHADVNAARNIAAGHAVTARGGYGVARPVNREPQLLLRSA

SEQ ID NO: 52883 - protein, 449 aa, Deinococcus sp.
MPQPPLRLTTRIHPSPAQHARLQLMWDTLLAAQSALTTWLYHHAGGGTHSLLTTASRQAGSLPVTTPRPLRSLPTLTQIEDEVRYARDALGWAQVLPASALRWMAAETAREWRGCPHGPLPGPWPQDRAPELHLGNAVQLRDAVTLQVAPLSPNELVTADLYLPGPYWTALLRRQRRRQDHEHARHDVLERAWLDDRDRGAAKELLARRARGGPWAEWSWPDLPEPLPGEPISRERTVLRWVAGNGLPGRWVAEWAFSAGDGVAPRWVIDDVLGVDIGYHHPFACASGTLNTLTPRPFQGSFAPPGLSGHAFFHGAWARARHRRAMFLRLLPLFETQLDLALQHRAVATEQVAWGGFAQRGFPFTSYALDVGLVAWLTWLDALAPQHGVRILRVPPAYTTRTCSACMRLGPRPASGQPFCCVGCGHTSQADLNAARVIRRRGLALLGRP

SEQ ID NO: 52884 - protein, 371 aa, unknown
  TnpB Polypeptide
MKSLKIRLYPTKEQEILFKKHIGAERYIYNWGLSLNNELYKTEKIKYSSVDLSKMLTQYKKECLWLNEVSNATLKESIRNLDKAYTNFYKKRAELPKFKSKKHCKLSFYSRYDKIYFKDNVVNLEKIGKVKYKSSYDIDLTRISKFSNPHVSYNGRCWVLALGIETKIEEIKLTNEVIGIDLGIKDLAICSNNMVFKNINKTRVIKNLEKRLRRLQRKVSRKYDMNKKGGSYNKTSNIIKLEERIKKLHRKLNNIRQDYIHKSTTSIVKTKPCRVVMEDLNVKGMMKNKHLSKAIQQQNLYEFIRQMKYKCEWLGIEFVQVGRFYPSSKTCSCCGNIKKDLKLSDRTYICQECGLVIDRDLNASINLANYR

SEQ ID NO: 52885 - protein, 386 aa, unknown
  TnpB Polypeptide
MRTYKYKIQKHKRNRYLQKDLHIISHVHNHFVALWQRHYKIYGHCEGYKRPSAFRMIKHLTKLKRLEKYQHWRIPYSWCLQECVQRIDSGWQNFFEGRAKRAPKFRSRHKYKSMTFDGSQVKIEDIDKANGCPVAKIRINRRWYRFWYSRPIEGNIKRATVKKDFVGDWYITITTDAQGLETVPKTGKTAGFDFGIKDFLTCSDGTKYQSPEFYKSASTQTKRASQALSRKQKGSNNRNRARKDLARVHRKINRQREDHHWKLALELVRKFDTCFFEDLNLDGMKRLWGRKVSDYAFGDFMLKTKWQAQKRGKRIETIDRWTPTSKVCHTCGQIQMFFDLSIRNWYCHHCKIHHDRDINAAINIHKVGASTFGGEDVRLASASNPR

SEQ ID NO: 52886 - protein, 165 aa, Firmicutes sp.
MNTYKAYKLRIYPTDSQRELIEKTFGCTRYIYNNFLAERKNKYEESKTKVHVYEQLKELTDLKREKEWLREIDSCALQACVYNLDDAFQKFFRGNGYPKFRAKGVHDSFRTNNTLNTYKNKKYETIRVDFNKRIITLPKLKEVKFRGYRTTKEVLIKIKSMKLSE

SEQ ID NO: 52887 - protein, 165 aa, Firmicutes sp.
VGLDLGIKDFIVTSNGEKLKNEVKINEKRLKGLQKWLSRCKPGSKNRYKVKLKIQRLYLKIRNARKHMIYKLANNILKENDIVAVESLDVKNMYLVHKIAKHLKNIPISEFIRVLKYKSNWLGKKVIEINKYYPSSQCCNRCDYKNEEVKDLSVRKWTEVRIDIK

SEQ ID NO: 52888 - protein, 511 aa, Oscillatoriales sp.
MLASNEGVDDEMNKSLFASIVTRHNLLNHYLTLYSISWYFYYKQMRKGRNAMKVTYQYQFYPDTSQKSTLNHWLRICRYWYNRQLGDRFDWWEMNRTAINACPLIASISTPREKPNYYTQKQQLPILKKDLIKVFHSGELLDFKQVDSTILQDVSKRVDKAFERLIVGDSKGGRSGKPRFKTEADYRTMTFSTANNDWIKLVRKNWLYIRLPKLGVIKVRMHRPIPDGFTVKQISVTRKTDGWFTQIMLEDTSVPHFIPDKVTPNWDNSIGLDAVLHEDVYLATSSGTKLPSLKPLRKNQAKLYQISRKRNKRKRGSKSRRFLAKKEARQHQKIARSRQDFHYKTAHRLVKSGAKFFFHEDLNLKGLTKRNKVKQDDEGNYLPNGQSAKSGLNKSWLDAAFGQFFKTLEYIAEKAGSAVVPQKPAYTSMVLCYRNEIVFTDCGMRNYWDEQHSLMVDRDVNAAINLKKLGLGIFPRIKRRSGNLSVVGNIDDSTAKEILYTLHRAAKMPTS

SEQ ID NO: 52889 - protein, 397 aa, Richelia sp.
MKTSYQYKIKPNKQQAEKIDKTLEMLRHQYNYMLAQRFNWYEQNRCPIDRCPISICHLPELKEQPLYYNQKASLVQLKFDRPWYKDIHSQVLQEVPKRVELAFDRWLKGDTNGKKSGKPRFKGAGQYKTLTYTQFKQHNFANNKITLSKIGDVKVIVHRQIPDGFDIKTVSVTKKANGYYVTLSLDDKTVPTIKPDFNPDNIVGIDMGLIDFYVASDNSRSPAPKYLRKAERQLKSAQRKVSRRKKGSNRRKKAVQQLSKQHKKVADTRKDFHFKTANSLLRNYDVVAVEKLNIKGLARTRLAKSINDAGWEQFLSILSNKAENAGLKVIAVNPNGTSQECSNCGHKVKKPLSQRMHNCPVCHTSLCRDLNAAINIRNRGKHDLYKQAQIMSSKKSL

SEQ ID NO: 52890 - protein, 491 aa, Mycolicibacterium sp.
MGIRKYTDATGLEQTAVDEPKGTVLVTKGRRDQQFKVWVSDSLDEPERPGSTQCGKANTARRYRLYPTVDQSDRLVSWSHTCRAVWNTALTQRQWAYRSAHRITLHAANQCKDLTELRGEYDWVRELPAQCGQQVLRQLDQAYANFWNPSHPARFPQPKRKRDHTISVPFPGQAVKVQRRSRRIAQVWLPKLGWVRFRLSRPLGGTVRNATVSRDGLGWHIAFGVHQPEPQHMPVNDGGAVGVDVGIACSVFVSDEDTPRQRPDTLTPGEKKRLVGLQRRKARQLTYAKKHYGGRYSNRLRRTIAEIAALKARQARRRLDWNHKLTTDLANNHGTVAVEDLKVANMSKSAKGSVSQPGQRVAQKRGLNRSIADQGWFEIRRQLGYKTTRHGGQLVAVPAAGTSQTCNQCGIRDPESRQGCGRLFACVHCGHTEHADRNAALAILTKALSTAGQAGLTTSGRGESQSTRSPKGQGTQRGSRMREPTIPGTAA

SEQ ID NO: 52891 - protein, 377 aa, unknown
  TnpB Polypeptide
VLAVKAVRQRNDASSELPHLLDQFRRIVNVCVSTGIEQNVSSLKTLSSGCYHRLSREILGYYRLCAIITATGILHNYRKAKRNNPHTAVPHARRLMLTTCYGFKIQDGVLRLPVKPRTYVYIPLNSHTRRSLSGVTVRSVTVTPHTVSISYSKEVVEYKPEGYLGVDRNLDNVTVASTEGKARRFDLSEATRIKSTYRLVTSRFHRNDARIEHVVYAKYGLRQRNRVQAKTRRYGIVMERLTGIRRLYRKGNGQTRKYRARMNSWSFGELQRQIEYKARWEGVKVTYVPARNTSKRCSVCGYKTLENTMRQVWCPGCGTMLDRDVNAAVNIATGGVRFTPYGPPVEAMVEEREPNKAALIPKVDGDKLSHLRMANQY

SEQ ID NO: 52892 - protein, 265 aa, Synechococcus sp.
MIVREAKLLNGTAQQYQALDEAIRTAQFIRNKCLRHWIDNQGVNKATLYSLCKDLAREFPFAQKLNSSARQTSAERAWSAISTFYCRCKNKEAQKGYPVALAVRSTKFQKRCRSVEYKVSGWKLAGDGKSITFTDGFQAGTFALYCNGEARRDILTLKINRVRVIRRADGYYAQFCLDVERREEVEYTGRVVGLDVGLMHFYTDSNGNKVECPKFLRRAERRLKQQQRRLKIKSQVSQGGQTPIQELPQAEATARQSASQSPTPA

SEQ ID NO: 52893 - protein, 424 aa, Crocosphaera sp.
MLTTRRVTFRLYPTKKQERTLHDWRKLHQYLYNACLSHRITEYRHFGKSISYFDQQNCLPEFKECWTEYKQLGSQALQATCKRVDYAFQRFFQGLAKFPRFKSFQRYRGWTYPAKSGWKAHTTGVHGALELSNLGQIRMRGKARTWGQPTTCTIVWKNHKWYCSITIKCEVSRETGTGACGVDFGTLRALTFDDSTGIENPRFLAKSKDKITKASRQLRRKRSPNRKKRIRASKRWKKARKKVSKLQNKVANQRQDWQHKVSTQIVSSNSLVATEKLNIKAMTRKAKKGSKRKKQKTGLNRNLLDVGISNITKLIKYKVKESGGVFVEVPIKIAPSQTCPNCGKKKKKELSERVHSCECGCSMDRDAAAATVMLNYARGLGTNLLNRGSQSSEQKHTSKRCGGFAKDWELKRQKPQSKRSDDCG

SEQ ID NO: 52894 - protein, 385 aa, Streptomyces sp.
VKIVVRVKLLPEADQAAALCSTLRTVNEAACWVSGVAFERGVPREHELRRHTYTELKARGLGAQVAQHVIKKTRDAYTALKANIRAGNLGRPGSKRRVKAESKPITFRPEAAQPYDDRCLSWQYDAGTVSIWTTAGRLRSVRFVCSPDALKMLREHRKGESDLVERDGVFYLAAVCDIPEADQYEPSGFIGVDLGIVNIATTSTGYRVAGRGLNRYRKRQLALRKKLQAKGTKSAKRLLKKRSRKEARHTADVNHVVSKTIVTTAERTGSGIALEDLTGIRSRVRLRKDQRTSLHSWGFHQLAAFVEYKARRAGVPLVYVDPAYTSQQCSECGYIDRKNRVDQATFACRSCGALTHADDNASHNIRRKGETAWTAGRESRAPAIP

SEQ ID NO: 52895 - protein, 415 aa, unknown
  TnpB Polypeptide
MKRAHVIRLNPTPEQAVYFRKACGVARHAYNWALAGWKEARAQGKRVKILELKAEYNRIKGEQFPWVYEITKCAPEQEFTHLGQAFDNYWRMKKEGTLPKLKHPRKDGEEGGFPHFKSKKRDKLSFYLNNDKFRVEGYWLHVPKLGKVNMTEHLRWSGEILSATISSQAGWWFVSISVEAEHETPTHQGGTVGIDLGVKTLATLSDGEKFENQKHYQKSLGRIQGLSKGLSRKEEGSQNWWKNSRKLAKAHYRVACQRQDALHKMTTHVTRSYALIGLEDLNTKGMLANHRLAQAVSDASFFEVKRQLLYKAEQYGGSVQLVDRWYASSKACSRCGWIHADLTLAERVFLCQDCGLVIDRDLNAAINIHKEALRLITDVSVVASSERKFACGAGSAGSRCVEGETSCDEAGTKVS

SEQ ID NO: 52896 - protein, 250 aa, unknown
  TnpB Polypeptide
MCTVVSTLTGKFFISIVVDDGNPPPPKPQATNQTSIGIDVGLTTYVTMSTGEKVENPRHLQNTLKRLQCLHRRLSKKVKRSRNREKARLRLARCYERVTNQRADFQQKLSTRLIRENQAIIVESLNVKGLMRNQRLSRAIADVAWSRFLAMLRYKTEWYGVTLIEVGQFAPTSKRCHACGYLNEGLTLSDREWTCPSCLLPLDRDVNAARNIKMIGLGSIITPREPREEPVELSALAEASKQETPTIRAE

SEQ ID NO: 52897 - protein, 514 aa, unknown
  TnpB Polypeptide
MSSVTRTISLRPFACREKKTGTGLDLHDILDELRNDATLCASEVSKHITVNNLKKVSGYDKLKPAEAGRQMGIKLSSNERGTGRSRFEKMVQEYAVSQLRAWRERSKAHTRQTDKYLSSGFKQTANPNKPDYLKPRLALSATDKNYHAIRIKGSTVELDMVVNQRWVTFKFKTPARFTEPGIRVIAPTVSVDIWNRVMFNWPFEIPVERTPFSEKYVVGVDVGLTNHATTVVRNIETGQVAEASFMNRRVRSLENKIKRTKTQIAALHRKGQVNEVEHHRRALSNRRKELAILIGQEIADLSWKYDNALVAIEDLSHIANTMKYGRWVRGMIVDRITDMVESNGGRVMTVNPAYTSKKCHQCGTMLDMTDYHTPICSSCRVAWDRDENAAANIAGKLKDKHKKSCQTRKRHSSKTRRRNSKNTTRPLKHPLKKTGPTPKAPQNRPKPKNSHCVYHKHTVIKKREEVYPILCAAGWSLRDRNVRVPAVASSNGCSDNRPHDYPTGRYRSDDLCLS

SEQ ID NO: 52898 - protein, 443 aa, Oscillatoriales sp.
VTKTKKAIGVQQVLLSPNQELQALLEYLCQQSGKLYNSGVYLARQTFFKTGKLLAGKFDLSFESSVAKSMVAKSLPSTPMQQTLMSVTEAFKSFKELRDLYLKGQLHFKPKPPGYLKGSKLFKVAYPNSGGLRPKLVGNQLRFSLGLTVRRWFGVDEFFLPMPSNLNFSKVKELTILPKNGAFYLETSYEVEKEQHNLDINQALSIDLGTADNLAACVDTLGNSFLIDARAMKAMNQLWNKKVATRKEGKPEGYWNNWLDRVTRKRNHQMRDGINKAAKLIVSHCLKYRVGNIICGWNQGFKSHVNMGKKNNQKFVQMPLGKLKDRLNQLCDLHGIKFTETEEAYTSKASFLDGDSLPKYGEKPEGWKASGKRIKRGLYQSVDGTVVNADLNGSANILRKVASKLGVSLDQLGRRVLTTVARVRLWALPKPTLSAESQWLQPA

SEQ ID NO: 52899 - protein, 355 aa, unknown
  TnpB Polypeptide
MKAFKTKIYPNAEQAVLIEKTFGCCRFVYNNGLECKIDAYKKDKINLSDYDLIKRITILKKEFEWLKEPETFVLQQSLLDLGKAYKNFFREHKGFPNFKKKGDKDSFRTSNMRFVSRHFIYLPKIGAVKTAENIKKKWNIHNATISKKAGKYFISLLIDYEPPKIQKTGEVVGIDLGIKTFATLSDGTKYENPKTLRKYEDKIARYSRQLSRTQKGSNNRKKVKEKLARLHLKVSNIRQDYLHKMSHEIANRYSFVAIEDLNIAGMVKNHNLAKSISDCSWGEFVRMLEYKCSWYDCELRKIGRFEPSSKLCSNCGYKMSEMPLNIRKWTCPNCGTHHDRDINAAINILNIAQEK

SEQ ID NO: 52900 - protein, 511 aa, unknown
  TnpB Polypeptide
MQDKKTYPLAGQNYIYKTLVCQLDNDDVSRNKLAIDALFEQFETALDVFTHLMPVRAPYREAFRKEDLLAAKVAASGLTPDMRSAALDKAIEMWRSFEKKGGYSSDSDVGLPGSRTEKAERQGRNMWPATVRVSRKDYILTIDGPHGTPENNFHGPASLSLQVTIHTPKGNITLGIMGEAHQVPILKDIIKREGGLVRCMGELVWRPSGLSMDIHYGRPIIEDVRNFPLSFGRDANFIPIGVDLGIYKLLVAVALGKGGRGVLFVKGGRWREGIRRFHKVQERLDAQGRKKEWSNSRRNEGNFVKDMAHKAARELIELAENIIDKTQNEVPILVLEDLVFEDITRKDGDPDNIQLSKAVSSELRSWPYSLLKDLIIEKAAWDGVPVMVVPPAGTGLTCPKCGSTDAVRRRDVHRLVCPDCTYRADDDYCAATNIAKRGLARLLRDRDTVLAPLQRHPMPAPQYHAHVICGVRSLADGDVAGASRGPQRADAGTCLDQGRAGDPAYIGEGQG

SEQ ID NO: 52901 - protein, 414 aa, Moorea sp.
MTASYRVYPVKELEKIWKKWVAASRKVYNISIDYLNREQGYVKTTKKGGKHGFRTFLKSSGLIPQWCIDLGISKLLDNGSMEAYTAWKETKKQPQYIGIGKKRKLNPDRGRKLARFRSIRDQTATLQFDPTAYKNGHWMVSSTKHLPLPEFKGHNYCVLTKGSTELTFNKGRWFAHFPVPLRTEPTITEKIIALDPGVRTFVTGFDGSDFLEFGNGDFSFIAKLCSHLDQIKSKHDKVKGRKFKRLRYKLRKAMERQRTRIKNLRSEIHKQVASYLARNYDIIVMPTFETSQMVAKKRRKLRSKTARAMMSWAFYQFSQTLGHLCNRYGSKLVRITEEYTSKTCTKCGHIHRKLGGSKNFKCPKCGYEIHRDFNGAVGIFLKAMWDTTFTDHVGDVVLDVLNVEDVAVKSIRYD

SEQ ID NO: 52902 - protein, 390 aa, Planktothricoides sp.
MVKATKYRLYPTPEQALHFRRSFGCCRFAWNYALNQVKETYKNTGKGLSRFAIQKAITDLKKEHEWLLEPYSQCLQVVALNLSRAFINFFERRAKYPKFKSKRGHQSISYPQNVKVLDRSIKFPKIGEVPAVIHRDLEGTVKTVTVSMNSKGQYFASVLVDDGKESPELSTEGKAIGIDLGMNHFAVTSDGSKFANPRWLEKHERNLKRKQKRLSRRQKESNNREKTRRQVAAIHNKIARCREDFHHKLSRRIVDENQVILVENLAVQNLRQNHCLAKSIGQVGWGQFCTMLKYKPEWEGKVYLEVDRFFPSSKTCNVCLNRVDSLPLDVRFWQCHSCGTKHDRDINAAINIRDEGLRILTSGTGDSAYCQTVRRGSKGRKSSTVSQVSG

SEQ ID NO: 52903 - protein, 426 aa, unknown
  TnpB Polypeptide
MATVIQAYRFALDPTSQQRRSLASHTGAARFAYNWGLELVITGLAQRRGGEDVEVPWTLQELRREWNRAKDHVAPWWAENSKESYSSGLDGLARALRNWCDSRKGRRKGRPVGFPRFKRKGRARDACRFTTGTIRVLPDRKHIQLPRIGRLKTHESTRKLARRVEQGTAHILAATISRTADRWFVSFTVEVDRRLPTGNSRSSVVGVDVGVRHLAILSNGEPPVPNPRALEMSLRKLRRLNRRLARCNPDSRRRRVTRRQLSRVHARVANLRRDALHKLTTTLAAEHGTIVVEHLNVAGMVRNRHLARALSDTGMAEFRRQLAYKTTWYGSRLVVADRFYPSSKTCSTCGWVRAKLTLAERAFICEACGSRLDRDLNAARNLAKLAQHVAQSGWETRNARGADHRTQPAGQVAMKRVPSSPVLQRA

SEQ ID NO: 52904 - protein, 519 aa, unknown
  TnpB Polypeptide
VDVVLIEYPARLVRIGFGYLEQAVWPSSQRCVQAGTNRAEAKVNRKSKPMGQASRTTKLLLDLSNRGGGGANTSKRAYLEETVKILNAARAFYVAFFLAHPDKLTERVRYFSEKHQEERERLISPNELLTWAEALTVDTRDHPHPLPSYNFSEQFPDFPFIYRRSVIKDAIGKVRSYLSNLANWTASGAKKGQPGLPSSSNYPTLYDEAFSLDLDVVDVRPTPRTCFTRLKVYTGARWEWHPYPVRLSRYFEARWRDPAWELQSPKLILQKKSAALHFPQVKHVAAKKVKESREDSHLVTVAVDLNVKNLAVISVRQDDRIIETVFVTDQGLDQHRYRHMKRIAKKQWQSGKIVKGEHSNQQIWGHVRRMNEDAAHHVAYRIATVCAKYPGCVLLFERLRKIPTKRSSKSRRMNRKQANQLRGKINQYTKDKAYAACSTVTVEVNPHGTSQYCSRCSAKGERFSYRGGKHIGEKWGKLFFCPVCHYEANADFNASVNLHRSFYREWHWQPRKKPPPKDV

SEQ ID NO: 52905 - protein, 429 aa, unknown
  TnpB Polypeptide
MRNYRVRRVYIGTSEQLDELAQECGRLYSQVLASFWRTVRHKGIWLKPKHLMRWHSSNKLHAHTSDACVQVFFASLQSWRERRRAGDPDVKPPHKRKRYFRIEYKRSAMNLSHGQLRLSNGKGNAPLVLPWLWELPNTVVIHWTGTQYEAIATYEEGIQAQPHGEKIAGIDLGEVHMAVSHDGTDTHILNGRLLRSKVQYRNKLQAQLNSRIDGRMKQGSKRRKRVIHSKKKQLKKIEHQIREIEHKQTTRLITTLHAAGVRTLVVGDVRDLRQTTDVGHTNNQKIHQWSAGSVRFKLTYKARHLGMEVILQEETYTSRTCPKCLHVRSKFTGRVFRCTNKQCRWTYHRDGVGAINIRQKYLGISNTPPSSWRYGTAHGPAVLSACPCSSRGARSRASVEAAECHRNPLLRVLVVSLILFWRYPDLSLC

SEQ ID NO: 52906 - protein, 420 aa, unknown
  TnpB Polypeptide
MKLTKKVALYPNRTMMKVLDDLCDYRRYCWNQGLELWNDLYDQRVEMLPVDLRKKSQQAIRDKCITFSEEEQELLALFPSPSNRVVRDLLVADRADWQYSLSSRVLQLAIIDLSHSWVAFFNSKKSKKKGSKKKKRKVGKPSFRSKKNPKQGFKTDCARIKNGKLVLDKPWEYKDAWYGISFKGYDLPDGKIKYCAITKIGNSYYASIVMNCPEQPLPKTGKKTAIDANVNHFDYTDGSFKVFPKRLERLYAQIKHYQRLLDRKRQENGRNATCSKQYFKVRVKLQKCYRRVTAIQNDLLHKFTTMIYQIYDVVVIEDLDVQAMLMQKKAKNLHRSLFGRFRLYMDYKAIKFDKTLILADQFYPSTQRCSHCGYVKTGEDKIGLDGNKKYVTKHNEYICYSCGFVADRDQNAVLNLLALA

SEQ ID NO: 52907 - protein, 497 aa, Clostridium sp.
MPYKTISIKLLEPTKTKSRILEDALERYTEAFHIILKELGEIKSIDSKITKNYILKLLNKDIMDKVDFLNVEPFKDALRMDIAMTLSTYYNRKFISAKINYPVIRTTDDDIESILNGADNLSMVKINSMFNKYEKHRPLLFSRFAYNRDYTLLKDIESSRYYVKLYLFNRNNAVEKVEESYRILKYVTFPEEFLQKNTKKIRYELFPLYIGKWQEHHLNEIEAGMAMPKSAQLIKRGSNFYLNLRIWYESPKKISCNKFLGVVRGISKELFYVICNDSGELVKSGPISAVNVNGKNKLHELSNTVVRLAKENRCVIILENLVNKNDRLKQRNFNIPISIGEYNLFADFVLYKSEFEGIDKPVKVSPNSIFFRCPMCDTVKFINRFEKDKFLCIGCGNSQKLELVGAKNLATTLIRYKYNKIRVYYRRVEGHITFILKLLKIEYECSDDEFATERFYIFLKDFINNSTNTFNKREISIIKKLQAQKDIKDCISYTEIS

SEQ ID NO: 52908 - protein, 410 aa, unknown
  TnpB Polypeptide
MRSQKIRLKPTKEQERLMWWYSKVSRNYWNLLVDIDRRNNKGEFDEILSERGNKTYHSKFHDRDVYKLNSSDYLYLVGIVVTENEYNEEWLWYHQPNQSFIYNFLARELVKIRKQNKGKLSFRSIGEIQPNFNVTCCISSDKKRPSRIYLKENGKLQIPTIGDMNYGSARQGFDLSCKKQVANISFDGKYWYLSYTEDTENKIDNLPDYTDGVGIDLGIKTLFTMSDGTSVPNIKTFRRVRILTKRLKRLQRKVSRKYRINKCNKHHKTKNIIKLERQIKLIHRSIKNIRINHIRKFVSKLVKKRPRYIAIEDLNVKGMMKNKHLAKDIANCSFYTIREQLIRKAKEWFITVRLVDRFYPSSKTCSNCGNYKKYLKLSQRVYHCDCCHEKIDRDLNAALNILKTDKYVLA

SEQ ID NO: 52909 - protein, 489 aa, Thermus sp.
MSRIIGTYLYPSYANRGKIEKINSVLIEYRKTAKQIAKLQWKHFFKGGEFSKYLNVREVKSRLSKRYIQTCQWHVVDILESYLENAKNEFEKIVYKSTLGEKTKRVLLVINRQNKWFDKTIDKVYWIQNKKQAVEYLVSEEEKLIARKIIKYVLKKLRRPRFNNINLNLDSKVAILEENRSSKTFDKWLKISTLQKGEPIYIPIKNNPYAESVEGKFLNFYQIQVQKDKLIVKLIKQIKPKEYRPLTKYLAIDLGLNPLIATDKGDLIGRRFLDFLLSMDEKITKRMKYIQKKGIKPSQDKKYKRMIGKLRSFLKNEVNRYINNLVELYKPEVIVLERLDFRNQNLSKRMNRLVSNFGKRVIKEKIKRLKEIYGIEIVEVNPAYSSQTCCKCGYIDKRNRKDTQTFRCRACGYKANAQVNGARNILNRRSIEGVKVHTPKKVVLKILVKQYLERFKGCNSAPLEVLKENPYFRDYLEDFLNPWSVNKCL

SEQ ID NO: 52910 - protein, 371 aa, unknown
  TnpB Polypeptide
VVTVVLKAYKFRVYPNMEQKTQIAKTFGCCRFVYNQTLAYRKELYEKEKKTVGKIACNNYCNQELKKKCEWLKEVDKFALTNAIYNMDAAYRKFFREHAGYPKFKSKHDNHKTYTTNFTNGNIAVDFETGTIKLPKLRNIKAKLHRKFIGKIKSATISQVPSGKYYVSILVETEHISLPEKEGCIGLDLGIKNLCITSAGKKYDNQKTLTKQERKLKKLQRQLAHKEKRSKNYYKAKKKIASCHEKIRNTRKDYLHKVSHEIISENQVIVSENLQIKNMIKNHHLAKAISDVSWYELTRQLEYKAKWNGRKYIKIDTFYASSQICSLCGYQNSDIKDLSVRTWICPKCGAEHDRDINAAKNILAEGIRQIA

SEQ ID NO: 52911 - protein, 343 aa, unknown
  TnpB Polypeptide
MYRRAREAAGSVKKNNGSKTVLRELTARVHTLDYEIDLNRKTLEIAVQHDRWAELKLKWYSYLDKYLDGSWRFGEVLVGYRCGRFYVYITFHRDAVPREPRVVMGVDLNFNNITQVDLSGNLVSIGVIPFKGLKRALHLRKLAEDLQRKHPRNWRFLRWVRRARARWLSRAKNVLIDATHRVSKRLVEVARGYNAVVVFEDLKKLRENGNGGRKLSWEKPVWCYRRMQEYVEYKALIESIKVIYVNPAGTSRKSPSGKKVEFVNYRFVELGGAITSRDVVASWNFALKGFKQMRGSRVRWSPDSPRGEAVKTRAMRGNPEARTEHLELFTVNCLGETQAGKTL

SEQ ID NO: 52912 - protein, 379 aa, unknown
  TnpB Polypeptide
LNDRQRTACKRHAGTARFAYNWGLRRKIEAYQASGQSPSAIDLHRELNALKKTELAWMYEVSKCAPQEALRDLDKAFDNFFRRVELKKQGKLKGKVGFPRFRSCQHGLGSFRLTGSIHVFEDSIQLPRLGRLRLKEQSYLPTSGVTILSATVSEKAGRWFVSLQVEEEIADPPPAQGEPVGVDLGIEALATCSDGREFENPNALRKAQRKLKRLQRELARRQKGGKNREKTRQKIARLHYRTGNIRKDALHQATSSIVEAKPKPSAIVLEDLNVAGMLQNRHLALAISDVGLYEFRRQVLYKAAWNGVQVLIAPRFFPSSKLCHVCGCINDDLTLADREWQCVCGAYHDRDRNAAINLSLLATVSSTGSYACGDERLQA

SEQ ID NO: 52913 - protein, 431 aa, Tatlockia sp.
MLILNYTYRIHPDSNQEQMATEWLEICRRSYNYALRELKDWISSRKCPIDRCSLESEYIMPASYPFPGYHKQQNNLPSAKKQFPLLGKVPSQVLQTNIRRLHDAWDYFKERGFGFPRFKKHGQIKSLLFPQFATNPLTGWHLSLPKLGRVRINLHRPIPNGFVIKQVRLLKKAIGWFAVISIQSDVTLPKIEHPFGHPLGIDVGVGKIVATSDSFIEKGRKFFVTEQRKVKSLQRRLSKKHKRSNNYDKARLKVEKQHNHIAFKRKDYHYKLAHQLCDMGNSIFVEDIDFRVMAKGFLGKHSLDAGFGQLRSILEYVCTNRGKYFGTVNHRGTSQTCPNCRTEVRKTLADRIHSCPECKYTCDRDVAAAQEICNRGIESSRQGLCRTETVCQVEVSGAMSLDNWRTVGNIPTWAEMSQCELGSPLYITLSN

SEQ ID NO: 52914 - protein, 715 aa, Streptomyces sp.
MAKLMATATCTAFSGVLEGTGERVGRRALLERVGFLAQLSRELTGALVAARWDEGSLEVLAAGVDERGQDLPSKGWMAMRRLNWPRTLTPPAGVYVPDRVRRGAEEYAARTLRLALHRRGIVAAVLATWPDDPSRRTGGEWAALRAAVPAGVSGAEIRSRTRRIRQFVAGHGQLPAGLCALEGPPQVAGQVLLAAMDRQQVTLERVDAATARLRVKLPLRAAPATGRDWAWHVIDIRLPGTIAPDAVLHTPTLRPAPAGRIAVDLPHSRLVPATKASGHRVALGFDWGVNTLLTGTVGRLTGQGPAKRVVTDGRPLVFDATTVSAALHRLRGVREHLAAKRDHYRALAGGLGSPHLAWGEHLDRARVLQSEHGRVCARIRRLNASLAWAAARWAVDQAAALGASVIYLEDLTTLEARGHRTGNARLSGQVRGTVAEAIRHLAAKAGITVVTVPARGTSKLCPGCLSRLTHHPAPDRLHQRGWKWAHCAGCGLSMDRDHAAARRIVSRGLLAQAHTTTDRATGARTIRTTVDGTVALVRRPKKATRRLRRQRRAEQAPPRPRGPKATEGKQRPTPGRPSGTRHRSARRAAPAQAPGHKTSRRMPDVRTVPATTPTTGAVQRPAGHDTTTPAAVSGPVPGHGVPAPHRPEDLLPAGRRRLSHRTCRQRTRAAERTGFHHLHATEVHPLTPRFGPPDGNRTRPRRARKAWKPQAHTEF

SEQ ID NO: 52915 - protein, 204 aa, Helicobacter sp.
LCLVCEVQDNPKPAGGNSVGLDFGLKTFLTCSNGTQIPSPLFFSKFLPLIRACSRSLSKKKRGSHNRLKAKLKLARLHRKVQNLRKDFFYKLANSLAKQCTTIFTKDLNMRAMVRLWGRKVSDLAFSEFVAILAQKTQVVKIDRFYPSSKICSSCGAVKKDLSLKDRVFHCLSCGFSLDRDLNASVNIHRVGASTLGVEAVRPA

SEQ ID NO: 52916 - protein, 374 aa, unknown
  TnpB Polypeptide
MNKKPGGETMDITVKFRIIPNNEQAKLLKAISTEYISTVNTIVSNMVSADSLLKLSSKDIPSDMPSAVKNQAIRDSKSIFSKYRKAVKVNSKKPAEEQKTIKVPILKKPVCIWNNQNYSFRDGILNFPINVNEKSQRISVKMLTTNYQLEYLQYKSVSLRITQKSGKWIAQISVSIPKKLSIGSELMGVDLGLKVPAVAVTESGKTKFFGNGRMNKYIKRKFRAKRQALGKGKKLDAIRKLNDKEQRWMKDQDHKISRSIIDFAIQNNVSTIRMEKLTNIRNTARTSRKNEKNLHTWSFYRLAQFIEYKAKLAGITVEYVDPKHTSQLCPKCGTLNKAKDREYQCSCGYKTHRDRLGAINIIHAPVIDGKSLSA

SEQ ID NO: 52917 - protein, 409 aa, unknown
  TnpB Polypeptide
MKTIFRSYKFRIYPNKDQKVLLSQHFGCSRFIYNYFLDLRNKNYLETKTSLTFAKCSSALTQLKKDNSYIWLNDVSAQSLQSSLRHLDSAYNSFFQKKSKFPKFKKKANKQSFTVPQAFKIKDNKLFIPKFKQGITIKVHQKVLGEIKHITISMTPTGKYFASLTCEQEYTQYEPTGSSVGVDVGIKDLAILSNGKKYKNVRSLKLRLKKLKFKQSQVSKKVKGSNSRKRAIRQLSLVHEKIANVRKDHLRKVTTDIVKNHDVICVETLAVINMMKNHKLAQALSDVAIGEFFSMLEYKAEWNDRTLIKIDKWYPSSKNCSVCNTINQNLTLKDRSWTCRECGTIHDRDINAACNILTQGMKIKSGLGAKSDSKQKPVEPSKKYLLRRSKDPSGIEAEKLETPLANKTS

SEQ ID NO: 52918 - protein, 370 aa, unknown
  TnpB Polypeptide
MRLTIQLKLQPTPEQADALQRTLERANEACNAMSLTAWETKTFRQFAVHKLVYQDTREAFGLAAQMVVRCIAKVADAYKLDRKVQRTFRPHGAMAYDDRILSFHRGKQEVSIWTLDGRQAIPFLCGDRQRPLLASQRGETDLALVNGAWYLFAGCEVEIPDPGDVEGVMGIDLGVTNIAVDSDGETHSGKAIKNVRYRHRSLRRKLQRKRTHGARRRLRKLVGQEYRFATWVNHNLSKRIVAKAEGTKRAIALEDLTHIRTRITARRSQRATLHSWAFAQLQAFIVYKAAMCGVPVHRVDPRNTSRTCPMCGCIDKANRKTQASFVCTSCGFAGPADVIAAVNIGRRAPVSAPCYPAADSSVVQGKAQEL

SEQ ID NO: 52919 - protein, 453 aa, Lachnospiraceae sp.
VKVISSYKVEILKLHKPLMRTMEICRSAVSWLLPVIDGRWEDLSRIGQEKLRFNAAEKLIHGTKKNVAEYPFDHEFPKMPSYLRRAVLQHVIGLVSSAHTQKKEEMTSVSGEADRRAGRGHYMPVFYRDNMYRKKEDGVYLKLYNGKDWVWLKVLLKKTDLEYIRRRWTGVKEKSPVLVKRHKKYYLQFSFEEDTEFRKRPVEERRICAVDLGINTDAVCSIMTADGTVAARKFISFPAEKDRLYHVLNRVRKKQREHGAKSVRGFWAYAGRLNDQIAVRTASAIAAFAKEQDADVIVFEYLEMKGKRRGKNKQKLHMWKKRKVQAVTEHQAHRAGIRISRICPWGTSALAYDGSGRLMRDSRNHSLSTFQNGKQYNCDLSASYNIGARYYIRELQKSIPETEWSVLAAKVPGVQRRTSSVWADLVKINREMREGAGTGSPSGGYPLRGEAFT

SEQ ID NO: 52920 - protein, 423 aa, Halobacteriales sp.
MDDTPRRTVPIKLDVPKERRGDLHRTKDQFLYCANRTSKWAWRYDDYCITSKNKAENALYEELREKTDLTANLVQKGIRRAIEAVDAGVEKLKQGEKTSQPDFDSWSVVYDKRSATFNDDHATLSTPNGRVTAEYVHPPEDEREDTPFGRYYESDDWDASSATLQYDEQDDAFYLHVTLKTPDYESDGTERQECELRDDARENGVVLGVDLNVTGAFAVASTGEFIGSADHLNHKRDQYEQRRARLQQTGTRSAHLTIQSIGSRFSDWSLDWLHNRANDLIAEAQDAGVDGIIFENLDYIRKNIANGSKFQQWAYAKFVELVEYKVESTALFVDFVDPAYTSQRCSNCGFTHQDNRDDKSFECQDCEYEVNADYNAAKNIANRYCGYIHRGQKSRGGWATSQLALKSGTLNVNGDYTPTELLG

SEQ ID NO: 52921 - protein, 368 aa, unknown
  TnpB Polypeptide
MLRAIKYELRPNTTQRTLINKTCGCCRWAYNDALAFAKDNHVSNFELIKRLPQLKNTNSWLCEVPSQALQQSIMDLGRAFKNKFEGRAEWPVFHRKRGDESFRIPVACDIDYSRYRVSITKLGSVKFYRDKKIEGKIHSYTVSKTSTGRYFISILYECEDRILLNNGRTVGIDVGIKDFAVCSDGVVFENQKYYTSLQRELRVLQRRMSRRYDKSKPKSQQSKGYYKAKLAVAKLHEKIANCRKDFLNKVSTQIARRYSTVCIEDLNVKGMMSNHHLAKAIADCGWSELKRMLQYKCDCVVTVDRFFASSQTCSVCGEKNLKVKNLQVREWTCPHCGAHHDRDANAAENILREGLSRYAISTPLGVLA

SEQ ID NO: 52922 - protein, 305 aa, unknown
  TnpB Polypeptide
LKEVDSLALANVQLNLQKAYKNFFTSGFGFPNFKKKNHSQSYKTNNQKGSIALDGRFIKLPKLGWVRVKAHRQIEGVIKSATISMTPTGKYYVSILCETEISPLPKTNSNVGIDLGISDFAILLTGEKIGNERFLKQLSEKLAEEQKILSRRALAAKKAGRKLSESKNYQKQRVKVARIYEKIANMRRDFLHKLSTYLVKNHDILCIEDLSSKNLMKNHKLAKAIGDVSWSEFVRMLEYKANWYEKQVSKISRWYPSSQLCSDCGFNSGKKPLSVRDWTCENCGSHHDRDINASINILNEGLRLV

SEQ ID NO: 52923 - protein, 147 aa, unknown
  TnpB Polypeptide
MNQNYRRSSAIRKLHDKEQRWMKDQDHKISRQIINFAVSQNVGIIRLEALSGIRQTARTSRKNEKNLHIWSFYRLAQYIDYKARLAGIRVEYVMPEYTSQKCPVCGTLNKAKDRDYRCICGFHTHRDRLGAINIIDAPVADGNSLSA

SEQ ID NO: 52924 - protein, 305 aa, Thermococcus sp.
MPSETIKLTAKFKLKNPPEELNDLFSTYREIVNHLISYAFENNVTSFYRLKKETYKSLRKEYPELPSHYHYTATQMATMIYKSYRKRKKKGKANGRPVFKKDAIMLDDHLFKLDLEAGVIKLSTPSGRVELEFYPSKYHEKFRDWKIGQAWLVRTPKGVFINVVFSREVEVREPEAFVGVDLNENNVTLSLPNGEFVQILTHEREIRTGYFLKRRKIQKKLRTRKKRKELLEKYGQRERNRLDDLYHKLANKIVELAERYSGIALEDLTEIRDSIRYSAEVNGRLHRWSFRKLQNIIEYKAKLKG

SEQ ID NO: 52925 - protein, 400 aa, unknown
  TnpB Polypeptide
MQLVERHIISKNDPRWAVIDHTCWLSKNLYNAANYIVRQEYIFNHHFIPYAQLDKLMKHNPDYCALPRKVSQWVLKQVNQDWQNYFTGRAEYQSNPKKFTGCPRLPTYKDTAKGRNLLVYTDQAVSRKLLTQKGVIQPSQLAIQVQTKQKNIDQVRIVPRKTYYVIEVIYTVEIDPLPVEPHRIASLDIGLNTLAAVTFNQPEFTPLLVNGRPLKSINHHYNKERARLQSELPCGQFTSKRLEQLTEQRNRRVAHYLHLVSRRLIDVLCLNRIGTLVIGKNLGWKQAINLGKRTNQNFVYIPHARFIDMLCYKAQLVGIQVILIEESYTSKCSFLDDEPICKHEVYQGRRVKRGLFVASDGRKINADVNGSYNIMRKAIPNPFGDGIRASVVKPVRVTPA

SEQ ID NO: 52926 - protein, 542 aa, Streptomyces sp.
MGGLREVAAPFVVPGPSGVAIRSGLKGLTVQDETVLRQVGALLGSLASCDLKARCAAGSAHDGEQWARRKRALTGQSSSRWAGSITRSAHDQWALARRGQLAHLHSLQAGVETITHRLAQPVGAKGNKGVPGGYRSRREWFAKSRRLHVLQDRLEQVRADWEAGRVRVVRGGKKLLHTRHHLEAAGLTEAQWRLRWEAERWFLQADGESGKRYGNETIRITPGGEVSIKLPAALAGLANAPHSRYVLAGRVHFHHRAEQWADRIAVNRAVAYRIHYDTGRNRWYVTACWQNPPVRTVPLETARAGGLAGVDMNADHLAAWRLDEHGNPVGEPHRFDYRLTGSAQHRDAQVRHALTRLLHWTARHGLALAIEDLDFTADKTREKHGRRKRFRKLISGMPTARLRARLVSMAAELGVTVVAVDPAYTSRWGAQHWQKPLTTKARKPTRHDAAAVAIGRRALGCPIRRRTAPPPHDRSDRVGHRTVQAAPGSPGREGPRPRIPGPRTRSAGAGRGAKAGDQCAHNRSGHTAEHEPWHQDSLPLSL

SEQ ID NO: 52927 - protein, 405 aa, Streptomyces sp.
MLSGRRYLLHLSPEQEEMCEEFGAICRSVWNTALEQRREYRRRGAWMNYVPQCAELADAKREHPWLKAAPSHALQQTLKDLDRACRDHGTFKVRWRSKARWSPSFRFPDARQIRVERLGRKWGRAKLPKLGWVRFRWSRPLGGEIRSATVSRKGGRWFVSFLVDDQAAAPEQHAMPGTAVGIDRGVKTAVVTSDGDFHGRPFITAGEIVRYRRLQQRLARSKRGSANRHKTITAMGRIMSRVSDRRGDFCAQRAARIVAKNALVVLEDLRIKNMSAGGFGTVAEPGRNVRQKTGLNRAILDKGWHRLELALTNAARYTGTRVVKVNPAYTSQRCSACGFVTEGNRESQAVFRCKAPGCGHRDHADVNAAKNIKAAGHAVSACGDLGTSRSVKQEPVSRATGRTPS

SEQ ID NO: 52928 - protein, 225 aa, Bacillus sp.
VDSIAIQSSVRNLADAYTRFFKKQNSAPRFKSKKNNVQSYTTKQTNENIAVVGNKIKLPKLGLVRFAKSREVEGRIVNATVRRNPSGRYFVSLLVETEVQELPKTSSYIGIDVGLKDFAILSDGIHYENPKFFRSLEDKLAKAQRVLSRRMKGSSRWNKQRVKVARIHEYISNARKDYLDKISTEIIKNHDVIGIEDLQVSNMLRNHKLAKAISEVSWSQFRSML

SEQ ID NO: 52929 - protein, 195 aa, Salmonella sp.
MAKSKTALDVRWSRPLPSTPSTVTITKDAAGRYFVSCLCEFEPVSLPITASTVGIDVGLKYLFVTDTGFRSGNPRHTAKYAVRLVLLQRRLSKKARGSKNRAKARLKVARLHAKIADCRQDALHKAPRKLINDNQVVCVESLKVKNMIRNPSLSRAIADAGWGEFTRQLQYKGEWAGRSVVAIDQFFPSSKSPKI

SEQ ID NO: 52930 - protein, 417 aa, unknown
  TnpB Polypeptide
MLKGLMSHRYRMYPTVVQEAVLRGHCAHARFVYNLGLEQRSWWQPGRRSIHFVDQCRELTAARAENPWLAEGSSVVQQQALKDLTQAFVNFFEHPQHFGYPTFRRKGDREGFRLVGQSFGIQQLSARWGEVRVPKGGRIRFRLSRPLPEGVKSCRINRDCSGRWHASFPGPQPAVSRRPTGAMVGLDRGVAVSVATSDGELLHAPKQDSEQRCRMRRLQRRLARQTKGSNRSARTKLAIGRLKAKERDRRKDWVEKTSTHLIQAYDTVVLESLQVHRMTRSAKGTRERPGRNVRQKAGLNREILASGWGELARRVKEKGEASGVSVVEVSGAFTSQTCAVCWSVRQENRESQAVFHCRDCGHRANADVNAAVVIRERGIWMLAPAAGHAVAARGADRNAGATNRELTLAASAARPAG

SEQ ID NO: 52931 - protein, 404 aa, unknown
  TnpB Polypeptide
MLVKGVAFYLDSELPFEARSLLEDFRLAVNNAIRAGLQARVTSRNALVKIAYRDFREQHPRMYAQHLVSAFEVAGSVLKNHRRRVRKGVTGGVPYVKRLMMKAENQAYKLNRKTGIIDLPIRAGCHVELRLVVSQYHRKYLDDAALSLGSLTILPDRAIVAFRKDAPKPFVPESALSLDTNERSLDGVFVEGDVAKAVKAEFPDIAIIQQRHHDRRRRLQKKKAHDHRTSSNLCRREGTREHRRVDYRLHQVANSILKFAEERNSAIVLEDLKGMRSKRSKELNRRLSMWPRRKLHQIIEYKAQWKGIPVFKVDPRNSSRTCPICGRVQGSRMGVEFKCECGWHLDRHINASMNLLQTAISNGMAGGLWFNPGAFQHDVMMILYEPAMAARSEPNGTSGIVGVT

SEQ ID NO: 52932 - protein, 498 aa, Methylococcaceae sp.
MGGEVVEIKELKTKTYSITDKDPIEYKTLKFKLFPSQDEKDLLFDISNQQRSTWNACVNIFEQENSIHIIKNIIDTERKEKEIYKEKIKSIIQIKDKKLKKEKLEEVSKNKPKQENFNIDYKSFRNKIKKYKYVESPFGTTTDGQPMVLVEYQYGENNDSFPVPEYLKSKISHNRIPRGAIHNFSSSFNSCISNYRNSERDFSLRYKTKKDINQTIYFEDANYPSIINNIRNKYCYTKVIEGRKKRQFISLSEMKEHIKIKSFTIVYEKNTGQYSLNLSVPVDFLLPYDKRSENQALFKVRKSIISLDPGIRTFVAGYTLDETLMFGDGCSIKIFELLKQCDSLEILDTMTDREKDDIYNAKKLMRKRIKDMVTDLHWKVIKYLTSNFQIIIYPNFETSNMMKKLSKENRRKMSALSFYTFKQRLINKCKENNNTLFITNEAYTSRTCCSCGHLNTSSTNKVFNCKKCKYTVDRDINGSRNIMIKTLGDLYKLRKEDD

SEQ ID NO: 52933 - protein, 476 aa, Geobacillus sp.
MLRGQKVFFRASKVDLERLYSCNRESARVWNECLRLAKEYFLQHGCWITKSELQKQTKRKFHLHSQSVQAVCHKYLFARQAAHQAIQQGHPARYPYKKKKYFSTKWAKDGFKVYENGKIELSMGIHHGKREKPIVVYASHLPKGTIKEIECCFDHSLYLAVTYEDGQKAKAYEPGKAVGVDLGEVHTIGAFCENGQAILITGRKVRSLHRLRNKKLAEIQRRQSKCQKGSRQWKKYEQAKKYVLSKSERQLRDAMHKTTKQFVDWCLRQSASDVYIGNVEGVQRNTRKKKQASRKQAQKLSNWSFGKVKKYLAYKLDQHGIRLHEIEESYTSQTCPVCQKRKKVSSRLFVCRCGYEEHRDVHGARNILSKALHGTFVHWDVQTRCDADVAYWTHPEGFRCIHRVEGGRLLPRRSFFDGDGKKLPPLHGMKVGEVHQKNVRKNVPHPCHPFIHLRRLVSIIRSLFCFVWTSTQLTVR

SEQ ID NO: 52934 - protein, 271 aa, unknown
  TnpB Polypeptide
MGRVQVTYKFRLYPKKRQEERLMETLELCRQTYNYFLAQWNGKESIPSRLELQAQLPKLKEERPELNRVYSKVLQMVLYQLYSNLKALSQLKKNGKKVGRLRFKGKGWYKTFTYNQRGFKIIKTGRRLDLLHLSKIGDIPIRVHREIEGEIKQVIIKRHRSGKWFACICIEKEVRAIRREPKKAIGIDVGIRYFLTDSEGRQIENPRFYERTIERIRILHRNLSRKKRGSRNRGEGKSQACKSLREASQSKERLPPQTLKVLRQQLRPDLR

SEQ ID NO: 52935 - protein, 363 aa, Bacterium sp.
MTVALKVRLYPTKAQRFLLEEMLETCRRLYNNFLAQRKETYEATGKSPSKFDQIKSLTGTKNEWQLRVHSQVLQNVATRVQLAFDGFFRRVKSGETPGYPRFKGRGYYDSFTYPQSGFELQESAVKLSKIGVVNAIVHRQVEGKLKTCTLRRQNAKWFACLVIETEDQPLEPTGESVGIDVGLESFATLSTGEKVENPRLYRLDEKALAKAQRRLSKAEKGAKARRKARKVVARIHERIRNRRHNFVHQTARKIVNLFDMIAVEDLNVSALQKNHCLAKSIPDASWTMFRIVLAHKAESAGRRFVAVNPAYTSQDCSRCGTREKKTLSQRTHQCVHCGLVLDRDHNAALNILALGTQCLQVDT

SEQ ID NO: 52936 - protein, 389 aa, unknown
  TnpB Polypeptide
MKQVIVLKLEATPEQHQALLETVEAFNRGCNYVAGVAFAKHLPNKIALQPFVYGTLRAEFGLSSQMAVRCISKAVEAYKEIKKRDKNIQPTFDPHGAMVYDERIMSFQGVSHVSLLTLSGRVLVPLRFGDYQAARLDRRKGQADLILREGTILREGTILREGTILREGTILREGTFYLYVTIDLPSPPPIEPQGVIGIDMGIVQVAVTDDGESHTGEAVMQVRRRVREHRRRLQARKTRSAFKRLQKTARRQSRFVRDTNHVLSKHLVSKAMQERKALAIEALSGIRERANGSRHLRWLLGNWAFAQLAAFLSYKCEAAGILLLSVDPAYTSQTCHACGHCERTNRKSQSEFCCQHCGLTMNADANAAKNIKARAELSCSLMFHAVATA

SEQ ID NO: 52937 - protein, 330 aa, Vibrio sp.
  misc_feature (289)..(304): Xaa can be any naturally occurring amino acid
MIQNMKILRAFKYRLKVDEEQQSAFWKQAGACRFVWNLFLKRQQYRLNRGHYVENYATMCLHLTQVKKHFTFLKEVDSTVLQQTLKDLDKAYKDAFDKTHPYKRMPVTKKRSKCNNGFRYTGRFKVEGRHVYLPKLGNFGFFKSRDIIGKIKNTTVTHKAGHWYVSFQTEYERAERPHHSKSMVGVDLGVKRLATLSNGFYVNGLSALKTHSKTLAKLQRKLAKKVRFSNNWKKLKKKIARLHSKISAVRHDFLHKFSSYLSKNHAIIVFEDLKVKNMIQSSKGTLGEXXXXXXXXXXXXXXXXSRTGLGNANGFLQIQATVEKRHGFKG

SEQ ID NO: 52938 - protein, 384 aa, Streptomycetaceae sp.
MQLRYNFRLNPAPGQRIALAQAFGCARVVFNDGLRVRQEAHAAGLPYIKDTDLQKQVITAAKRTPEREWLGEVSSVVLVQALCDLHTAYRNFFASTTGRRKGPKVAAPRFRSRKDNRQAIRLTRNGFSLRPNGRLYVAKVGEIPVRWSRQLPSDPSSVTVVKDAAGRYFASFVVQTYPSEVLPETTGEVGIDLGLTHFAVFSDGRKVSSPKFLRRAERKLRKAQQALSRKAKGSNNRKKAVARVARLHARVADTRRDHHHKLSTTIIRENQAVYVEDLCVKGLGRTRLAKSVHDAGWARFVGMLEYKAARYGRTFGKVDRWLPSSQTCHVCMVIDGPKPLNVREWVCGACQTTHDRDVNAARIVLAAGRAESQNACGGTVSPSA

SEQ ID NO: 52939 - protein, 439 aa, unknown
  TnpB Polypeptide
MLMTEKVLLNPTPGQKKWLWTMSIMATILYNIALEQRKGWWLRYHNLKPGINYTFQNAQLVDLKESFPEFNCLYSLVAQEVLRVLHKNFKSFFQRLKNQKKKGEEITARSPRFKSTKIFFTLSYLQSGFALKGGKLVLSGGMEDYIDKKGRKKSRQHKEVIEIAGYRKLPSDVHSLTITHDEGKFYANLTYEVKPLKVEVIRPLRIIAFDPGVKTFLTGADYSGRLIEFQSLIKRSTKYFDNEIDKVKSLRDRCKRGSRRWKRLSHTLHILYQRRNAQINDELHSIAKLLAEGEWDVVGVGNPDKIGMISEDPEKGHGNQNINRAVQNNWPLKKWVGFLDYKLEYCGKLYLSVDERYTTQECNHCGHRVKLDPSVRVYQCPKCGMVLGRDENSAINMLNRVEAGLYQPKKNYKNFNVRIAFHRTLSGKWSHKDRLIRLA

SEQ ID NO: 52940 - protein, 370 aa, unknown
  TnpB Polypeptide
MKFHRSVKLHFNKHLTHYKQGQISAFLAEYSRAVNYFITAYYRKIPKLTKFELLTKRRIHKCVKLLNTWLSYNAIQCAFMEGYGMVASYQSNKKLNKHHNLPIHSGKTATLNYHSNKQCDAPDTKTFDFNITIQGLGNKTKISIPLHRHKQFNKWAVLGKRAKTITLTSTYILVSFEIESGSKPKITASTTNIGVDTGINNLATTSTNNFYGTELRRLIEVINRKQTGSKNQKQAIIHLKQYIDTTINILMKAEQPDLIVVEQLKGITRNLKRVGKTTRKLIKSWNYSYWLNRLQQKCEENCVVFRSVSAYNTSIKCSNCGLIDKNNRLSQEVFSCGSCGHRDHADHNAAVNILNRLLQGAYSPLLEKSG

SEQ ID NO: 52941 - protein, 466 aa, Acinetobacter sp.
MISGIKFRAYPTEEQKLILSQWMGCARFAWNAKCDEDKYFRGFARKFTPFKQYFDTQDQKYAQFKSEELTPWLDKCPSTILKNSTVNWYNTLKKSTKGICGRPKRKAKTDKGSIYLTRDLFSFEKDQFGKTRLQIGGRKYNIGYLSFNKHADFNEPKSLYIRKERGQYFVSFCYEDGIEMEDFDGKKFNEDKYLEKQLALLSDTDANELNKHVVGIDRGVAIPVCTPAQEFDFTREQKNHLTKAERYIKRLQRKLAKQQKGSNRRAKTKHRIAIHHAKKANIRKDFNHKTSHSLVSNERNKVFIFEKLNTQKMTKKPNPKKDELGRFIPNKAKAKAGLNKAILNVGWYMLEAYVKYKAIRLGKAVFKVQAAYTSQECASCGHTHPDNRKTQEKFKCVSCGHTDNADKNASKVIKSRAIKLILDTGTVLEKGLMSSSSGRGGSRKTKKSVKTLSRIADETSKEMIAA

SEQ ID NO: 52942 - protein, 207 aa, unknown
  TnpB Polypeptide
LNQATTGKSAGFDFGLKTFLTVHDGTSIASPLFLNRMLRQKQKLGRRFSRCKLHSAHWYSLKYSLAKLDEKIANSRRDWFFKLAHTLTDIYDCLFFESLNLDGMKCLWGRKVSDLAFGSFLETLKYVAVGKGKIVHFIDRWYPSSKTCSGCGYINRKLELSDRYWRCPSCQIEHDRDGNAAINILCEGTSSLALGDVRRGLASAIAV

SEQ ID NO: 52943 - protein, 695 aa, unknown
  TnpB Polypeptide
VWRHRELPSLPSARLFPNWGTTVTRRLTLTAILARARMTIRRPDHPSSLTLGGIPNVILIRARRGATSKPGPARSAASPAIATATAVGHSATPATPSTGQRDTPARSDFGTLSDPRRSVGRVPPSPGAPAPSRARSPARLQADQVQKRAQRYAAYLTPGQAQVLSLWASAARWLYNQAAESQLDRHRHGVKIESLMSLGYAVRAAREAGVTFRGDDGAEHSLTEVPARVLHGALRQLSGAWTRHLRALSERKAKGLPASAVASSPPGFRSRRGGRSVTWQVQEDAEPVPLAKLITTDGGRHATVGKVPSPLGPVMIRYHRPLPPDALAGFLVLREDNGRYWLTVQYETALARQPAGTGIVGIDRGVAVTLATSDGRAFTTPGLPQGQQARMLRLQRALSRRRRMNPCQGDRWVTVNGRSAIRRGPCPGGDGCWKTSRRYQRCKAAYLTLRRHETAMRADAAHKASRVIADSCAVAVFEDLDVSAMTRSAKGTEDQPGQRVRQKAGLNREISAAGWYQIETYTGYKARTLVKVPAHYSSQTCPQCGNVCAENRPSRDVFRCSECDFSGHADVVAAGNLAARHRAATAGACPAEAREKRDRTGERPVNPQPPEDHREHQGGGSQPGAGQEVPQAAIVTGPLVPASWGIGTARNSRYRRTPRPRRSRNPAMATGGMRDATCGTRRTTNRAPATGHARG

SEQ ID NO: 52944 - protein, 328 aa, Streptosporangium sp.
VSSVPLQQAIRHQQVAFTNFFAGHARYPRYKSRAGRQSAEYTRSAFRYRDGVLTLAKMDAPLAFVWSWPRIDPATIDPTTVTVSRDPCGRWYVSLAADVATPEQAPATGAVVGVDMGITDFAVTSDGEKIANPRHLAKRERNLARYQRRMARKQRGGANRAKARAKVARAHRKVRAARADFLHKTSARLVRDHDVIVIEDLHVRGMVRNRSLAKAISDCGWGTFRRMLEYKTARYGRHLIVIDRWFPSSKTCSACGHLLAGLSLSTRRWTCPGCGTLHDRDVNAAKNILAAGLAVSARGADVRPQGSSLRQSAVKREAPPARVGLPLL

SEQ ID NO: 52945 - protein, 377 aa, unknown
  TnpB Polypeptide
MDGMRNMLKSAYCYRLWPTKGQMRLLEQQLEVCRWVYNQTLAARRDAWDERQESLGLYDTNKLLPHWKAEHPPLKQVHSQVLQNVQVRVDLAFKAFFRRVKAGEKEVGYPRFKGKGRYDSITYPQYGNGAKLNGNTLILSKIGSVRVNLHRPIEGTIKTVTLRRSATGKWFICFSVEKEPQPQPDVPDAAVGVDVGLEKFATLSTGEEIPNPRFFRRDEKDMARAQRKLSKEEKGTPARAKRRKVVARIHERIANRRKNVAHQISRKLVNTFGIIVFEDLSITRMIKNHCLAKSIADAAWNQLITYTSYKAEEAGSVCIQIDPRGTSQRCSRCKTTVKKGLSVRVHSCPVCGLQIDRDLNAAINILAVGLHSLGVSP

SEQ ID NO: 52946 - protein, 463 aa, Moritella sp.
VLLGIKLKANPTNEQKQVLSQWMGCAKFIWNAKCGEEKYYSVFARKYYSIGTYAPVDQKAAQFKSKELSPWLYNCPSQIIRNSAVNWYQTYQKFMKGECGKPKFKSKSDRGSVHLTKEVFKFVKCDDGVTRLFIGTKTNNIGFLSFKAHSKFTEPKSIYIKKERGLYSISFCYDDGFDEKTLPSDEEHLSYLKGATKAFLQEKTVGLDRGVAVPAHAGYKAFDFTKEQKSSSSKALRYIKRLQRKLSKQTKGSNRRNKTKIRIAKHHAKCANIRKDFCHKTSCELIGSGFQIFVFEDLKTKNMTRKPKVKQDQNGKFVSNKAAQKAGLNKAILASGWHLLESYVKYKAKREAMAVFKVSAAYTSQECANCGHIHPANRASQSEFECVSCGHSDNADSNASSVISKRAINLILDSGTELSKRGVLSLGNGRGSKRKTCKRSKQASTKETSKKNVGDCLQEAQPL

SEQ ID NO: 52947 - protein, 368 aa, unknown
  TnpB Polypeptide
MQLTYHYRVKSYEGFLNGLARKVNFVWNYCNNVQQQAVKARRKWLGEFDLNHLTAGSSKELGLHSDSIQAIARQYVQSRAKCNKRWLKWRGKKSLGWIPMKAAALKYRDGSFVFMGHVFRVFSDRPLPTEARILYGSSFSQDSQGRWFLNVVIELPETSLRSGDASVGIDLGLKNFATFSDGTKIANPRILSKYARKLAIAQRANKRKQVRKIHQKIKDVRKDFHHKLSNDVTKKYNHIFVGDVSSSKLSQTTMAKSVLDVGWSNFRKMLRYKSIRNGAIYKEVDESFTTQTCHICGLKSGPRGLAGLNKREWMCDCGAFLDRDVNSAINILQRGLQHQALAEGAGSVLIGSVEATCYKSKEFLEAAQ

SEQ ID NO: 52948 - protein, 407 aa, Chloroflexi sp.
MVIYEYKLHGSKAQYAAIDEAIRIVQFVRNKALRLWMDTRGTNRNDQQCYCAVLAKEFPFVASLNSQARQAAADRAWQAIARFYDNCKTHKPGKKGYPRFQHDNRSVEYKQTGWKLEPDGKHLTFTDGCGIGRLRLVGNKGQQIETFPTKQIKRVRIVRRADGYYVQFGVKSDRTIEHIPTGKQAGIDMGLKEFLTDSAGNTVANPRHLQKAEKRLKRLHRQLSRKQKHSQNRKKARKALAKAYLKVQRQREDFARKTASTLITSHDLIAYEHLQIRNLVKNRHLAKSMSDAAWGRFLAWLTYYGVMHNIPVIAVEPAFTSQDCSACGARVKKSLSVRTHICPGCGVVLDRDHNAALNILARALDRTGGQSEMGEQSQNAWGELPATLLSAVGTEQGGSWNQEPPCL

SEQ ID NO: 52949 - protein, 403 aa, unknown
  TnpB Polypeptide
LWYNNYVNVNCVKVYKYRIYPTKAQARQLDKTLETCRQVYNSFLHWRTFAYDTAQKSVGRYEQEAALTHWKKDHPELSEVHAHLLQNVAHRVDLAFRAFFRRVKAGETPGYPRRKGVGQYDSFCFKQWNNGVQFKNGNLWLSKIGGIKCNVHRPLMGDAKTCCIHRANGKWFACITCETEAECLPPSEEAIGIDVGIKTFAALSDGTFIENPQFFRTEESALAKAQRKLSRAKLGTKAKLGTKNHSEIKERKKAKKVVARVHERVRNRRHDFSHQTARRLVNQYGMIAVEKLAVKNMSKSPAPKQDAETGKYLPNGASQKAGLNKSILDAAWSQFRNILTSKAESACREVVAVRPAYTSQRCSGCGYTAPKTLKERWHLCPMCGASLDRDTNAAVNILALAMR

SEQ ID NO: 52950 - protein, 457 aa, unknown
  TnpB Polypeptide
VKLTRIHHCKNLNLAKYQQLEKQALLLSQVRSLVWRQFGSISGLGLGDRKIRDDWLKQCVDFGVPANAWKETLRDAIADIRAYREAAKIKVKSTIRQLICDKDELKRLYRLLKCDKWMEDNFLRRQMRKHFKHGVNHTNNQIIVRSDMCKTFELNGQCWLKVPSLAPRKTIQIPLNTTMDYAPTGTLRIILKNGCIEVHSQYDVELINDCGTKTVGIDKGYTETFVDSDGDIFGEGLGSLISSESDYLNQKYMHRNKLRSVANKKTHKRQNIIKNNLGRNKLGKRQERQKAKVKTLVYTSVNELVDKAGLIVCEDLTSPIQSKRNYGKNTSRRLNSWVKGIIASALTTVSQRRCSTLQVVNAAYTSQMDSFFYGLLIGTRKGDKFYRVNGDVVQADHNAARNVLARLNDSEISLFLPYKKVREILQKRTDRYKSELTDLGSSYTLGNEALTECEVVL

SEQ ID NO: 52951 - protein, 514 aa, unknown
  TnpB Polypeptide
MRAQTPSYVVSTKIQLPESIAKRLEKSLRISNSAYNEALSFGLKRFEALKRNTTYQELLDARRLAVAKREALKKQKKQDTDLTKRIKGYNETLFKLRKAYGLTEFGLQSHLAEQRRKDGSSYRQLNAGELQVIATQAYKALEKVLFYQIKPHKVRFRSKYGLNASFRNRVNTTGTRLISSDKKGVAYRLYIHKASTFVDIPAKAFNTYQQMSLMRSEKIKYVQIVRKTIRGKKVYYLQIVYQGFPPSKGTKGEGVVGIDPGISTVAFASPTEVALVDLVPKNITQKEKLLKQLDRRIERSQRINNPECYEENGTIKKGARFKRPSHRQVRLRNRRLKAYRSLSEERKKLQGQLVNRIVSQASCIKVEELNVKGLQKRSRDIRINPKTNQPYSKKRFGKAVFRAAPSTFRTALETRASQLGIEFEVISPKDVKPSQYNHITQTFEKKPLSTRVYDLSEQYTGVQRDLYSAFLIGHIEMGHYHQERLNQDFPDFYQRMKDFLQLKPETERLAWYLN

SEQ ID NO: 52952 - protein, 556 aa, Burkholderia sp.
MAGMILVYRYRVKSLNGLLNKQSRAVNYVWNFCNDTQKHALKWSKKWPTGFDLNVLTTGSSKALGIHSGTVNATCEQYAKSRSQHRRPYLRYRGRKSLGWVPLKGRDLKREGDAFRFAGHTFRVFSSRPLPEGKIKDGTNFAQDARGNWFLNIVIEMPDVPARPIRSGVGIDLGLKDFATLSTGEKLPNDRFGRRAAEKLAKAQRARKHKRHIAKLHAKVANARADFQHKLALELVRRFDYIAVGNVSAAKLARTRMAKSVYDAAWSSFRDKLRYKAMAHGATFEEVDESGSTQSCSACGSQDSTTRPKGIAGLRIREWTCSGCGVVHDRDTNAALNILRCGRASPVVGIRRLQVAEDVKWWDARIDAQDSGGAFRYDVYPVVGTPPSCRRSMRRRSRTSYHRGRDHRDVIDARYFSPATAPQGFEPELRLFPGEPAPAYPPVVIHHKFIVIDAEGANPVVYSGSANMSRNSEQYNDENLLEIRDARVAATYLAEFLRLYEHYRARALAIDAKTRGASPHPRLALAPDASWAKKYFVAGSPEEKARVALAAPAPKG

SEQ ID NO: 52953 - protein, 421 aa, unknown
  TnpB Polypeptide
MITMQLTRKVRIYPTDGQVSTLWILSNQCRLTYNFALAERQKAWELEQRSVSYIDQQNKLPEIKEQYPSYKQVNSKVLQMVLRTLDGGYKSFFALTKIDPEARPPGFRGWKYFFTMKYNQSGFRVTDTEVTLSHKVEGGAKLVFPITPYEPIINPKQVDVHHHENKWYLSIVDEIEPPAYRDNRLYQAFDLGITKQTAVNMKGKFFEKKNLRPDLYWNKTIDRITGRRDHCIKHTKTNCRPSSKKWVMLNNIKRKFEKKRSNQILDFQHKTSLMIVQNTKANTILVGDLDVKSMPQSKKANRGMNRSTQGTGYLARFTGFLTYKAKRIGKKVIEISERNTSKSCCQCGKLHDMPTWKRVMKCDCGNEIDRDCNSAVNIMARFLSQNAMCTGYQQFVDNLRTGSGIIISPGYSQEAPSARVA

SEQ ID NO: 52954 - protein, 225 aa, Holophagaceae sp.
VTYALYPNATQEAALLDMKGSHMRLSNSALEQRISAYRRCGVTVRYKDQCKDLTDLRAADPEFKALNAQSSQMTLKRVDLAMQAFFRRVGRGETPGFPRFKSFDRFSGWGYKTHGDGWKLTPGKDFHHGRLRLSGIGNLRIRGKSRLKGEPVTCEISHKAGRWYASVSLEVRPNRECGSGAAGLDWGVETFATLVHPDGRVQEIQNPRWVKRAEDALAGSPRRAG

SEQ ID NO: 52955 - protein, 310 aa, Microcystis sp.
MPREKTKLINILSINIVQFAAIQFNFVDTLNSTARQASAERAWSAIARFYDNCKKKVKGKKGYPKFQKNNRSVEYKNSGWKLSDDRKKITFTDKKNIGTVKLKGTRDLNFYPLDQIKRVRIVKRADGYYVQFCLSVDIREYAKPLEPTKRCVGLDVGLKVFYANSDGETVEIPQYYRQAEKRLNRLNRKKSKKFRKGQPQSNNYQKARKRYARKHLRVSRQRKGFVEKEALRVIKSNDFIAQVNLNIQGMVKNSKLAKSINDVAWSIFRQWLEYFGFKYGKATVAVAPHHTSQNCSNCGQKVPKSLSTRT

SEQ ID NO: 52956 - protein, 388 aa, Tissierella sp.
MRAYKTEIKPTKEQKQKIHKTIGTCRFIYNFYLGHNKEIYEKEKRFVSGYDFSKWINNEFIPNNPKYSWIKEVGSKAIKQSIMNADKAFNRFFKKQSKFPRFKKKSKSDVKAYFPKNNKGDWTVERHRMKIPTLGFVRLKEKGYIPTNARVISGSFSMKAGRYYVSVLCDIDKSIKHDSYTEGIGIDLGVKVFAIVSNIDKPFKNINKTKEVKNLEKKLKREQRRLSRKYESLKKQKKKKEGTAAGENIQKQIVKVQKLHQRISNIRENYLNQVVNIIVKQKPSYITIEDLNVRGMMKNRHLSKAIAGQNFHSFRRKLEDKCRLNSIELRLVDRFFPSSKICSRCGSIKKDLKLSDREYICGDCGCVIDRDKNASYNLASAKTYRTSQ

SEQ ID NO: 52957 - protein, 394 aa, Streptomyces sp.
VKRAFKYRFRPTDAQAAELSRTFGCVRKVYNMALAARTEAWARQERVNYNQTSAMLTDWKKTEELAYLNEVSSVPLQQALRHLQLAFANFFGKRAKYPRFKSRKRSRRSAEYTTSAFRYRDGRLTLAKMAEPLDIVWSRSLPEGVSPSTVTVSQDAAGRWFVSMLCEDPSVRSLPVTDTTVGIDVGLDHLLTLSTGEKVSNPRHERRDRTALARAQRNLARKVPGEGANRAKARRKVARIHARIADRRRDGLHKLTTRLVRENQTLVIEDLTVRTMVKNRSPARAISDAAWSEFRGMLEYKAAWYGREVIAVDRFFPSSKLCSACGALARSMPLRVRTWTCEGCGTTHDRDVNAAKNLKAAGLAVSVCGAGVRPQRRTPGGQPATKQKSPRREP

SEQ ID NO: 52958 - protein, 479 aa, Shigella sp.
  misc_feature (4)..(81): Xaa can be any naturally occurring amino acid
VKRXXXXXXXXXXXXXXXXXXXXXXXXXXXXXXXXXXXXXXXXXXXXXXXXXXXXXXXXXXXXXXXXXXXXXXXXXXXXXXQAFKFQLRPGGQQECEMRRFAGACRFVFNRALARQNENHEAGNKYIPYGKMASWLVEWKNATETQWLKDSPSQPLQQSLKDLERAYKNFFRKRAAFPRFKKRGQNDVFRYPQGVKLDQENSRIFLPKLGWMRYRNSRQVTGVVKNVTVSQSCGKWYISIQTESEVSTPVHPSASMVGLDAGVAKLATLSDGTVFEPVNSFQKNQKTLARLQRQLSRKVKFSNNWQKQKRKIQRLHSCIANIRRDYLHKVTTTVSKNHAMIVIEDLKVSNMSKSAAGTVSQPGRNVRAKSGLNRSILDQGWYEMHRQLEYKQLWRGGQVLAVPPAYTSQRCAYCGHTAKENRLSQSKFRCQVCGYTANADVNGARNILAAGHAVLACGEMVQSGRPLKQEPTEMIQATA

SEQ ID NO: 52959 - protein, 257 aa, Thiorhodospira sp.
LDGKTLKLAKMDAPLAIRWSRTLPKAAKVTTVTVSKDTAGRYFVSLLCDDTVSPKPETANKVGIDLGLTHFAILSTGEKIAAPNTFRKNEAKLAKLQRRLAKKQKGSANRRKAKLKVARLHTRITDARKDFLHTLSTRLVNENQVIAVETLAVSNLQKNRCLSKSISDASWSEFVRQLAYKAKWCGRMLVGIDRGYPSSKRCSACGHTVAKMPLSVREWVCPECGSLHDRDVNAARNVLTAGLAGLVCTENVSPVLL

SEQ ID NO: 52960 - protein, 358 aa, Planktothrix sp.
VLKATKVRLYPTAEQELALAKSFGCARWYWNFALNACIQHYQETGKSLKLASYKGMLPQLKKEYPWLKEDCYSSVLQCVAINLDRAYKNFFEGRAKFPNFKSKHHKQSIQYPQSVTVNGEYLKVPKIGEIKAIFHREITGKIKTVTISKTSTDKYFASILCEVEGTDVKQSGDNIIGIDLGLKDFAIVHDGDSATKYANPQDFLHKLARELVNESQVIVVENLNVKGMVKNRKLSKAISDVGWGKFVNFIDYKLKQKNGELVEIDRFFPSSKTCSSCGHVLDELSLDIREWACPNCHTHHDRDINAALNIRNEGIRILTEGGGNPVFADGGCVSPPACKSKGHRSVNSEAYTDPIRAV

SEQ ID NO: 52961 - protein, 229 aa, Planktothrix sp.
MFQAYKYRIYPKIEQQIALAKSFGCCRWYWNYALNLCQETYKTTGKGWSRTAIQGLLPQLKKEYPWLSYAYSQCLQVVALNLSTAYKNFFEKRARLPQFKSKHSRQSISYPQNVKFLGDYLKLPGKVGLVYCVRHRPYEGTIKTVTVSKNRDGKYYASVLVDDGKETPNLSTHDRDLNAATNIKNEALRILSLGTSDTASLRGCQSSEKTSVSSDAIPVDARSPHLLYE

SEQ ID NO: 52962 - protein, 292 aa, unknown
  TnpB Polypeptide
VDEGNARIKLPRLGWVRYRKSRDILGAPKNVTVSQSCGRWFVSIQTERDVVAPIHQSTTAIGIDLGITRFATMSSGAFRAPLNSFNKHELRLARYQRAMSRKVKFSANWKKAKAKVQRVHRDIGNCRRDFLHRASTAIVCDHALICIEDLRVKSMSASASGTLDQPGRNVAQKRGLNRSILDQGWGEFRRQLEYKAVWAGAMVVAVPPHHTSQTCPACGHVSADNRITQSRFECMSCGYDNNADVVGAINVLERGQRLLACGELVQLGRSVKQEPAEATRSTPRSAVEIPVL

SEQ ID NO: 52963 - protein, 288 aa, unknown
  TnpB Polypeptide
LALAWTSRDGNLEKYERISLNGLLDGNTDKREYLSWQIAHQVVEIAKREGKAIVVENLEKVPKGRRGNGMPKLRQKLQKWIYKGLLEKIEIVGKREGVQVIKVNPVYASIIGKFKYSPMLGIDKDIASAYVIARRGLGFKERIPKNYEKLLEDKEFLSYSVARVEDRIAKLKKEIEGEKNECKRNKLKSELRRLKRELKPLLKFLLDSGKSEPATQQAVNRETKPMRGRAKSLQKIWRVLSVALAFSCLESFRDFSPWSGDDYTKYVQFCIVWVTRRLSSSTDQRASV

SEQ ID NO: 52964 - protein, 374 aa, unknown
  TnpB Polypeptide
MVKTRHKSYKFRLYPNQKQIVLFEKTFGCARFIWNQMLADKIAYYKETGKTLKNTPAQYKKEYPWLKEVDSFALCNVQLNLQKAYKSFFQSNFGFPNFKSKKKMYSQSYKTNNNHGNIELCDGEIKLPKVGWVRLKQHRKMTGLIKSATISKTATGKYFISILCETDIQPYPKTKSSVGIDLGLSHFAILSTGEKIENPRFLISASKKLRREQKILSGRGLLAKWRGKSLNDCMNYQKQRLKVAKLHEKISNQRRDFLHKLSTSLIKNHDRICMEDLASKNLMKNHSLARAIGDASWSEFVRMLEYKAEWYGKQIVKVNKWYPSSQICSDCGFNSGKKPLHIREWTCEQCGAHHDRDLNASINILNEGLKLKLA

SEQ ID NO: 52965 - protein, 133 aa, unknown
  TnpB Polypeptide
VARVYEKVTNQRNDFLQKQSTMLVRENQTICIEDLNVKGMIRNHKLSKSIASVSWAKFFEMLEYKAGWYGNEIHRVPTMYPSSQTCSCCGYRNPRIKNLGIRIWECPKCHGVHDRDTNASINILKKGLQMQSA

SEQ ID NO: 52966 - protein, 398 aa, unknown
  TnpB Polypeptide
MNCGYTAYFFLLLERLFGHTVSMNKAIKYRIYPTTEQAVMFLKTFGCCRKVYNLMLSDKIESYKSTGKFAVVTPAKYKKDYPYLKEVDSLALANVQLNLQDAFGSCFSKSRKTNNGFPKFKSAKRSRKSYTTNCQYPKTSNKLKQPTIRLDDKSIILPKVGVVKAVIHRKPLDGWMLKSATVSMDGDGKFYVSCLFEYEGLITLNSSTDKVLGLDYKSDGLYMDSDGNVGSNHKYYRESHVKLAKAQRKLKHKTIGSNNYRKQQLRINRIHKHIVNQRLENLHILSTKIANSYDVVCVESLGIRSMSNKGFGNGKATMDNGYGMFLKMLEYKLTDRGKRYIKVDKWFPSTQLCSCCGSRKKLALNERIYKCSCGLTINRDLNAAINIRNEGLRILQSA

SEQ ID NO: 52967 - protein, 430 aa, unknown
  TnpB Polypeptide
VSLYSYKYRLNPSKEQQVLLNKHFGCIRFLYNHFLEARIKAYEEQGETLNYYDNATSIPKLKQEHEWLKEVGSQALQYAAKALQSAYDNFFRKIKQKVKGKKGFPRFKSKHAKQSFKVLQNIQVIDGKLSIPKFKSGISIVFHRPLEGEIKFATISKNKAGQYFVSITTERTIPVLPKTKKTIGLDLNVKAIVDNKGTKYKNPLPKTNYRSKIKKLLKAKNRTEKGSNGRKKAWLKLNKLEQHITNIREDFQHKVSSKIINENQVIVLETLSVKEMLANADPEIRKMERWRERAYHRKLADACFSSFIQKLKYKALWYGRELVEVSKWFPSSQLCSACGWQNKDLTLDDREWTCWNCFTNHDRDENAAVNIHNEGLRQRTVGTTEIAVRPDVRPVKDGLLVGTEAPTFRRKVVSSQSRERSERVKMMQPL

SEQ ID NO: 52968 - protein, 189 aa, Symploca sp.
LTKNPRAQAPENVERAIQRFFANCKSNKPGKKGYPKFKKHTRSVEYKQSGWKLHPTKRRINFIDKKGIGELKLLGKWDIHTFDIKLIKRVRIVRRADGYYVQFCVKVDHTLEAPPTNAQVGIDVGLEYFYSDSNGHHEPNPRFFRKSEDTIKRSQRNIYKKKKGSTGRKKARGIYARKHLKVTRRAIRS

SEQ ID NO: 52969 - protein, 410 aa, unknown
  TnpB Polypeptide
MDRTIQIQLHPTPAQAKLLADTASQFTSVFNAVCRYGWDAHEKNGVKLHHATYHQMREQYPDLGSNVMIQARIKATEALKSAFTWQDKKEKAYPKKVAKAQKQGKKIPVFKPVQCPSADFCPIRYNERTSTLNWTHQTVNLSTVNGRTLVSFTVPDYCRKYIGSPRTTADLILRKGTWYLHVVVSVPEPVVPQDETVIGVDLGLNRPAVTSQKQFLGNKRWKEVDRRSFRLKRRLQSNGSKSAKRHLKQLSQRQSRFHRDCDHVLSKQIVASTPPGATIVLENLTTIRESSKIGRGKANKNVENKRKLHSWTFAQLYGFIAYKGQERGIRVEKIDPRHTSQTCSKCGHQARNNRRSQSLFLCRSCGYCLNADLNASYNIRDKYIATSLALFGTSLESGLSSTSLSSQASA

SEQ ID NO: 52970 - protein, 347 aa, unknown
  TnpB Polypeptide
VYNETLATRKNAWEQEQKSISHYDTIKMLPRWKQSKPELRSVYSQILQEVCTRVDLAFSAFFHRMKAEKKAGYPRFKGYGRYNSFTYPQTGFELLDNGLQLSKIGIVKISLHRPICGNIKTLNIRRDAVGNWYANFSCEIEPEPLPKLEKAIGIDVGLESFATFSDGRKVSNPRFFRRDENELAKAQRKLSKTERGTPKWAKRRKIIAHIHQRIANRRKDFAHKLSCSLVNEYGVIALEKLNSKNMLQNHRLAKSISDAAWYQLAQYIQYKAEEAGRECVLVDPRNTSKRCSRCGTLVEKSLSVRVHSCPVCGLEIDRDQNAAINILGLGLQSLGASPRSHPVYGME

SEQ ID NO: 52971 - protein, 412 aa, Nostoc sp.
MYRAVKLRIYPTDEQESYLAQCFGNTRWLWNYMLNATTTVYKETGKGLSKAAMDKLLPSLKKEYEWLGLAYSQVLQRVTFNLSSAFVNFFEGRAKFPDFKSKHGKQSIQYPQNVKLISQDSVIKFPGNLGIIKAVFHKELPNAKFTTVTISKNTDGNYYASILFNQNDHPVIAIRQAIGVDLGLKNFVITSEGSKYGLPNKQLASLEKNWKRKQKKLAKKTDKTSNKRRKAKRLVAKASSKIARVRVDFLHKLSRKIAYENQVICVEDLAVKNMVKNPNLAKAISDQGWRMFLTMLKYKAEKFGHTYQEIGRFFPSSQLCSETLLPILMLQNGYDSLAVRFVDCPHCQMRHDRDINAAINIKNEGLRLWALGTSASALGGDVRPKSSGRKKSMKTEAIPNELGSLPCTEQCK

SEQ ID NO: 52972 - protein, 432 aa, unknown
  TnpB Polypeptide
MNVTLTAKLKLSLTPDEHAAVRAVSLAYRDALNHAAQVAFALGKTSNANTLHKACYYDLRQQYGLPAQLAASAIRSVGATYKTLWTKVKDHAVRRKNNPRIKRYRGLDHPPHFVSRTVTYQEGKDYGFKPGQRVSIQTLNGRIVVPYEGYQKHLDMIAAGAELGTAKLWYDPRHRTYYLLVSLTIARPEPKPQRVVGLDVGMRQVATTCDTAGQVVFVNGGAIQQRCDHYARVRHGLQRKGTRSATRRLRALRRRENSFKRTTNHQIAARILKHHPQSLIGIEDLTHIRDRREQRHSPHSSAKQRRANRRRSSWSFAELQAIVTYKAHLEGSEVVTVDPSYTSQHCPRCGHTDNANRPRGRVVFQCVNCGYCAHSDYVAARNLMLRTLLFRQARSGTGCLSATPEGAPDEPKAREGVAGEGSSKPPASAGGR

SEQ ID NO: 52973 - protein, 200 aa, Blautia sp.
  misc_feature (22)..(45): Xaa can be any naturally occurring amino acid
VKTKQQKKDRQKNLLGSILRCXXXXXXXXXXXXXXXXXXXXXXXXREQRKLSRCQKGSQNYKKQKKRVALCHEKIRNQRKDFQHKLSASLAESFDAVCVEDLNLKGMAGGLHLGKGVHDNGYGLFLSMLEYKLEERGKYLIKVDCYFASSKICSVCGKKKEELSLSDRIYCCECGNRMDRDVNAAVNIMNEGKRIFAECA

SEQ ID NO: 52974 - protein, 255 aa, Pediococcus sp.
MILKGIKVRIYPNQNQQNKIRANFGYTRFVWNQMLNMMITRYENNPEAKFLSVFTLNNLLPALKLEYPWLKDAESTSLQVVNHDLIEAYKKFFKEHQGFPKFKSSKCPKQSYQSKAVNHNIFVIDNRHLKLPKLGVLRFKSGKKITGKIKNVTIRLSSTNKFYAILLVDAEISELPKTNNSVGIDMGVADLMITSDEAKYPTIRFDKILARKKHYWEKRLVRRRLQAEKEIAWDKHNQVVDQETFLTLKTIKKLK

SEQ ID NO: 52975 - protein, 369 aa, unknown
  TnpB Polypeptide
MIKAYKYRIYPNKQQKELIQKTFGCCRFVYNQTLAHRKELYETKKESMSRIDCNNWKNKTLKVKYIWLKEVDKFALDNAIINMDSAYQKFFKEHSGYPKFKSKRNKKKSYSTNFTNGNIEVSFENNKIKIPKLKWVKAKIHRVFTGKIKSATISQVPSGKYFVSMLVETEHTPMKENDNSVGIDLGIKDLLITSDGEKFNNIRITKKYEDKLAKEQRKLSHKVKGSKNWNKQRIKVARIYEKIHNTRIDHLHKISHQLISENQVIVSEDLAISNMVKNHNLAKAISDCGWYELTRQLAYKAEWNGRTYIKIDRYVPSSQTCNICGYVNKDTKDLSVREWICPQCGTVHDRDINAAINILNEGMRMLNVA

SEQ ID NO: 52976 - protein, 592 aa, unknown
  TnpB Polypeptide
MIASSQEAGSFKIVPSRFPLAMRTIEFKLDLNQSQQAKVDSWLNVQRWVWNHGLHLLEDFDNFTRWDKDSKTWAPCCPLPWEYYKDDNGQLIPFTRLAETKPYRMGCPILQDYRQPELESPSFFNILYYFAQKNHTDKPWFCEVPSKFVAGTLKSLTDAWSEYKAGKRKRPRFKRYKHKLKTLVNNNAKAIKTLGKQITLPKLGKVTVKTLDKRWDSSVPVATLKIVREPSGYYLQLTGELPTKQLKPSSKAVGLGLGYNYLLATDGGKVVEPPASYRKIEKRIQRLQRKLSRQQNLCPITTYNPELGEHFLSCPINPHKGVNKEKTRQKIARLHEKIRRTQKAFNHKISTKLVQEYGGIATAKSDMRKSTRRPKPIVNKQGTGYDPNGALLKSQFNKMILANGQGQLTAMSEEKAAVNGREYIEVAPKDIPDEPRQRTERYSKQLRLPRAVHLSAFQQRSYRPWGWKVTLGESPVTLNQEAMPVAPLREAGTTSNSTSETTNSSGLVVSEAISSLNTLNQRYAEPSAFAGDKASRATSQSASETESQLGTSFKSDVSSQPQKAHRHRAVQPKLENQSGRRKRRSTDENDSS

SEQ ID NO: 52977 - protein, 443 aa, Nostoc sp.
MLLTYQYKLNPTPQQVVTMETWGELLRRHYNYALGQRLDWLNRTRSLLDRCSLVCEPIGEIPEKIDYYTQASDLKQTKELFSEYKNIYADCQQQNLMRLDKAWKRWLLPDKNGKRGGRPRFKKRGDICSFTFPRVNNPKAGAHLVGNVLKLSKIGEIEVILHRPIPEGFEIKQATILRKADGWYCSFSLEDKTVPALLPIDEIKTATGIDVGLEKFLTTADGQSIEVPQYYHKAQAILARRQRKLARSAKGSKNHQKQASKVARLHLHVARQRKEFHYHVAHWLVNSYDLIVFENLNIKGLARTRLAKSILDVAWGAFLQIMQAVAVKRGKHTTGVDPRGTSINCSSCGQRVEKTLAVRVHSCSCGLVIDRDWNSALNLRQRGLGLCPEVQIAGDRRSDFSPSGATAVLKRGSVGLPIPGCGGLGDTQPMKQQVSFVNLRCSR

SEQ ID NO: 52978 - protein, 381 aa, Actinopolymorpha sp.
MLADHCSLYNGALQERREAYRHVSKTSLRYGDQSAQLKEIRAFDPERQGRWSFSSQQATLRRLDKAFQAFFRRLKGGQKPGFPRFRGVNWFDTVEFPKDGDGCRWDSTPHDRLTRVRLQGVGHVRVHQHRLVKGRVKTVSVKREGRQWYVVLACDNVPAEPLPATGAVTGIDMGVTHFLTTCQGAHVENPRHGKRNADALKQAQRALKAFPRTKRENRTAKHRQTVEKVAKLLRKVARQRLDHAHKTALGLVRDYDQIAHERLNIANMVRAPRPKPDPEQPGAFLPNGAACKAGLNRSILDAGWGVFLGILAQKAESAARVLIPVDPRNTSRTCPECGHVDGENRDGEKFQCTACDHRDHADRVGAWNIALRAGLVLPDVA

SEQ ID NO: 52979 - protein, 462 aa, Actinopolymorpha sp.
VKTIQAYRFALDLTPAQERAVLAHAGAARVAYNWSLARVKAVMDQRAAERTYGIPDGQLTPTVSWTLPGLRKAWNAAKDDVAPWWAECSKEAFNTGLDALARALKNWADSRSGKRTGRHVGFPRFKSRRRSTPCVRFTTGTIRVEAGRKHVVLPRLGRLKLHESSRKLARRLEAGTARIMSATLRRDGGRWHVAFTVEVERADRVPARPGSVVGVDVGIKHLAVLSTGELVDNPRHLNAAHQRMRRLGRALSRKTGPDRRTGQRPSKRWRRAANRLGRAHARVANLRRDGLHKLTTRLTQEHGTIVAEDLNVTGMLANRRLARHIADAGFAEFRRQLEYKTAWNGGQLLVADRWYPSSKTCSGCGTVKAKLALSERTYTCQACGLILDRDANAARNLAALAAEWHTAGSGPVAARGADQKTRSGGQVAKKREPGTAPAGQTGTVPPQGRTTFQACALKRSER

SEQ ID NO: 52980 - protein, 376 aa, Actinopolymorpha sp.
VRRALKFLLRPTSKQAQVLAEMLADHCSLYNGALQERRDAYRHVSKTAVRYGDQSGQLKEIRAFDPERQGRWSFSSQQATLRRLDRAFAAFFRRVKAGEKPGYPRFRGVGYFDTVEFPKDGDGCRWDSTPVDKVTRVRFQGVGHVRVHRHRPVQGRVKTISVKHEGRRWYVILACDDVPAEPLPATGVVAGIDVGVVHFLTTSEGTHTPNPRHGKGNARALAHAQRVLKIFPKVRRNERSAKHRRAVVKVAKLQRKVRRQRVDHAHKAALNLVRTYDQIAHENLNIASMVRAPKPKPEPARPGSFLANGAAAKAGLNKSILDAGWGCFLGILADKAESAGRVVIAVDARNTSRTCPRENCGHVSEDNLSSPGFRGD

SEQ ID NO: 52981 - protein, 233 aa, Actinopolymorpha sp.
MARFEVPDGWVVQAYRYALDPTPVQERRFWSHAGGARKAHNTMLGLVRAVMDQRVAERSYAVPEEGLTPTLGWFLPALRREWNARKDSVAPWWGENSKEAYSTGLDALARGLDAWSKSRRGQRAGRAVGFPRFKSKRSHASVRFTTGTIRVEPDRHHVTLPRLGRLKTHESTRKLARRVEAGTARILSATLAHDSAGRWHVSFQAVLQRAAGVPGHVGRREPVVGVDVGVKAR

SEQ ID NO: 52982 - protein, 562 aa, Actinopolymorpha sp.
MSKKQLRSIDAAFVAFGPSAVAIRDRLKHLTPADDKVLRLVGEHLGRLASLDLKARCADGLGHSAEAWAARKQGLTAQSSSRWAGSITKASHDQWALSRRCQLSHIQGLEAGVATLAHRLSQPLGERGTKRAPGGYRGKGEWFHKSRRLAALQHRLDVARAEAEAGRVHVVRGGRRLINTRHHLDRAQLSELEWRQRWEAQRWFLAADGESGKRFGNETIRVSPDGEVSIKLPAPLVHLANARHGRYVLASVVAFTHRGVEWRDRILVNQAVAYRIHLDVARGRWYLTAAWRRPVVQTIPLQAARAAGMVGVDTNADHFAAYHLDPHGNPVGEPRRFFYDLSATADHRDAQIRHAISRLLHWAKRCSVAAIGIENLDFTAEKTREKHGRKKRFRQLVSGIPTGKLKARLISMAAAQDLSIVAVDAAYTSMWGEEHWRKPLTSNKRKMSRHDAAGIAIGRRALGHPVRRRTAPPHDDQSDRCGHRTAPAGPEARGREGTRPPVTERAHDARCRTGTQRTRETSASNTVRDARSPRTWHQMPPLDTVQERLEVHVVGRGSTRFT

SEQ ID NO: 52983 - protein, 459 aa, Actinopolymorpha sp.
VRTLQAYRFALDLSPGQERAVLAHAGAARVAFNWALARVKAVMDQRAAERTYGISDDQLTESISWTLPGLRKAWNAAKGHVAPWWAECSKEAFNTGLDALARALKNWSESRSGKRTGRSVGFPRFKSRRRSTPSVRFTTGTIRVEPGRKHVVLPRLGRLKLHESSRKLARRLEAGTARIMSATLRRDGRRWHVAFTVQVERADRAPARPGSVVGVDVGITHLAVLSTGEVIPNPRHLSMTQNRLRRLGRALSRKTGPDRRSGQRPSQRWQRAAARLGRAHACVSNLRRDGLHKLTTRLAAMHGTVVVEDLNVAGMLANRRLARHIADAGFAEFRRQLEYRTAWNGGQLVIADRWYPSSKTCSGCGAVKAKLALAERSYTCQACGFILDRDANAARNLAALAAEYDTAGSGSVAARGADQKTRPRGRVAVKREPGTAPAGQTGTVPPQGGTTNHVHAKAH

SEQ ID NO: 52984 - protein, 499 aa, Actinopolymorpha sp.
VRAGRAGRAGTRRGAAPRAGPRGRAAARRGRRRRPPRRWSRPVRPVRGGRCRVRGGVRSRPGQPTRGRPTGSQGIWGGGPALHCGEEALCSRHFLSVLSFRFSVISRFRVVPTPAQEAGLVEHCRHARYVWNLGLEQRLMWRPDRRASPPGYAEQGRQLTEARATEPWLAAGSSTVQQQALRDLDRAWQNFYAGTHRRPTWRKAGRNEGFRIVGAQARRVRKLNRRWAEVIVPKVGWVRFRLSRPVPAIARSYRITRDWAGRWHIAFAVVPGPIPAPHNGEIVGVDRGVAVSAALSTGDLLRLPPMTAREASRLLRLQRRLARAKRGSNRRSRVKTAIARIKAAEANRRKDWVEKTSTALARRFDLIRVEDLRIQSMTRSARGTIENPGRNVRQKAGLNRSILASGWGQLVQRLEHKAPGRVQKVHPAYTSQTCSACMNVDREARESQARFACRSCGHTENADVNAARNIAAGRAVTARGGPPWGEPANREPQPILLSV

SEQ ID NO: 52985 - protein, 387 aa, Actinopolymorpha sp.
MSVEIVVQVKLIPEADQAAALSATLHTVNEAANWVSSVALERGVPREYELRKHTYAVLRSWGLGAQVAQHVIKKVRDAYTALKANVKAGHLGKPGSKGGRKAETKPIVFRAEAAQPYDDRCLSWHYDTQTVSIWTIAGRLKNVRFACSAGALKTLREHRQGESDLIEGDGVFYLYATCEVPEAEQYEPNGFIGVDLGVVNIATTSTGYKAAGRGLNRHRKRQLDLRRKLQRKGTKSAKRLLKKRNRRERRHVANTNHIISKTIVIEAERTSAGISLEELKGIRQRVRLRKPQRVALHSWAFAQLGDFIVYKARRAGVPVVFVDPAYTSQQCSECGHVDKRNRVDQGLFICRNCGVVAHADRNASHNIARKGEAVWTAGRESRVPATP

SEQ ID NO: 52986 - protein, 395 aa, Actinopolymorpha sp.
MRFRLVPTPAQERVLLGHCAHARFVWNLACEQQQHWRPGRSSAPGYVEQCRQLTEARKAFEWLAAGSQTVQQQALRDFAQAMANFFAGTHRRPTWRKAGRHEGFRIVGRRGRQWNVRRVSRKVGKVWVPKVGWVRFRWSRQLPDGVRSFRVTRDGVGRWHVAFAVISEPVPAPGTGAVVGVDRGVATSAALSSGELLSAPGLRETEAKRLLRLQRRLARARRGSNRRQNVKAAVARIKARETDRRKDWVEKTSTDVARRFDVIRVEDLKIRNMVTSARGTVQEPGTNVRAKAGLNRSILAAGWGRLVTRLEQKAPGRVEKINPAYTSQTCNSCGHCYAENRQSQAVFVCRACRHVAHADVNAARNIAAGRAVTAWGGSPLGEPLNREPQPVLLST

SEQ ID NO: 52987 - protein, 423 aa, Actinopolymorpha sp.
VPVTEHLVSDNWVVQLRYNYRVYPTPGQQIGLAKAFGCARVVFNEGLRLRQRAREAGEKYICDGELSRRLITEAKRTPRRAWLGEVSAVVLQQALADLNSAYRNFFNSASGKREGRRVAPPRFRSRKDNRQAVRFTKNARFKVLANGRLRLPKIGDVEVAWSRALPSEPSSVTIIADAAGRYFASFVVTTGQEETLPRVDSEVGIDLGLTHFAVLSDGRKVAAPKFLRRAARKLRRLQQGLCRKQKGSANQKKAVTKLARAHGRVGDTRRDWHHKLSTQIIRENQAVCVEDLCVVGLGRTRLARSVHDAGWASFTAMLEYKAARYGRRFARVDRFFPSTRMCSACGLINNKMALNVRAWDCACGAAHDKDVNAAKNIKAAGQADFNDRGAQVRPARVLAPRGEAVTHPDATRSTRSVEGISAL

SEQ ID NO: 52988 - protein, 268 aa, Actinopolymorpha sp.
VKADALLVVATPDGRELGRVGAPKSLTAAQARLRVLQRRAARQIGPYDPATKARRAPSKGWQHTQARIGRTHARAAALRRDVLHKATTFLAQRHQVITVETLNASGMRSAGGAYKRGLNRALADAALAQIRRMLAYKTRWYGSTLVEVPRFYPSSKTCSACGRRKPNLTLADRTYACEHCEVMIDRDRNAAINLARLGDTLHTGGTGTGTGSRPAAHQTNDGRVGDGRGATQETATTPVVNAAGRETSTPHQQPLDQTGTASPQGEAA

SEQ ID NO: 52989 - protein, 356 aa, Actinopolymorpha sp.
MVGGVFERGVQHRLGRPGPRTEELDGLPLRQARRAPRPCVRFTTGTIRVETGRKHVVLPRLGRLKLHESSRKLARRLEAGTARIMSATLRRDGGRWHVAFTVQVERRDRAPAPPGSVVGVDVGITHLAVLSTGEVIPNPRHLSKTQNRLRRLGRALSRKTGPDRRSGQRPSQRWQRAAARLGRAHARVSNLRRDGLHKLTTRLAAMHGTVVVEDLNVAGMLANRRLARHIADAGFAEFRRQLAYKTAWNGGRLLVADRWYPSSKTCSGCGAVKTKLALSERTYTCQACGLILDRDANAARNLAALAAKTTAGSGPVAARGADHKTRPSGQVAKKREPGTAPAGKTGTVPPQGQDCL

SEQ ID NO: 52990 - protein, 273 aa, Actinopolymorpha sp.
LPKIGDVEVAWSRALPSEPSSVTIIADAAGRYFASFVVTTGQEETLPQVDSEVGIDLGLTHFAVLSDGRKVAAPKFLRRAARKLRRLQQGLSRKKKGSANQKKAVTKLARAHARVGDTRRDWQHKLSTQIIRENQAVYVEDLCVVGLGRTRLAKSVHDAGWASFTAMLEYKAGRYGRRFARVDRFFPSTRLCSACGLVNTKMALNLRAWDCACGAAHDRDVNAAKNIKAAGQADFNDRGAQVRPARVLAPRGEAVTHPDATRSTRSVEGISAL

SEQ ID NO: 52991 - protein, 240 aa, Actinopolymorpha sp.
VEIVVQVKLIPEADQAAALSGTVHTVNEAANWVSSVALERGVPREYELRKHTYAELRSWGLGAQAAQHVIKKVRDAYTALNANVKAGHLGKPGSKGGRKAETKPIVFRPEAAQPYDDRCLSWQYDTQTVSIWTTAGRLKNVRFACSAGALKTLREHRQGESDLIEGDGVFYLYATCEVPEAEQYEPNGFIGVDLGVVNIATTSTGYKAAGRGLNRHRKRQLDLRRKLQRKGTKSAKRLLK

SEQ ID NO: 52992 - protein, 446 aa, Actinopolymorpha sp.
VRLLAYKYALDPTPRQARYIAGHCAAARRAFNWGLGRVKANLDQRAAERTYGIPEELLTPRLNWSLYTLRKDWNQAKNDEAPWWAEYSKESYSSGLDALARALKNWGASRTGKRNGARVGFPRFKSKRRAVQSCRFTTGTIRCEQRHAVLPRIGRVKLHEHPAKLLDALREGSARIICATIRFERGRWFVSFTVEQSLPELTPTRPDAAVGVDLGIKTLATISEGPPVENPRHYIQAQQKLARLSRRVSRRRGPDRRTGQAASKRWQRANAQRNRVHHRVADQRRDAIHKLTTRLASTYATVVVEDLNVTGMLSNRKLARHIADAGFGDFRRQLEYKAERFGGRVIVADRWFPSSKTCSGCGTVKAKLLLSERDYVCNTCDLIMDRDKNAARNLAALAVAASSAETQNGRGADQKTRITGQVAEKRQPGTASTGKTRTPLPEGAGV

SEQ ID NO: 52993 - protein, 391 aa, unknown
  TnpB Polypeptide
VESLIHVTSKNPIVKYTQFDKKFYKFPSYLRRGAINEAIGKVSSYRSNLVNWEDENPNTRGKKPSFPKAGYVYPCMYKTGMYKQVDTYQAKIKVYVRNTWDWITVDLRKSDIDYINRRCTVRTKCAPTLQKRGHQWFLDFPFKENVKLCDTDINEQIIVAVDLGINTAATVSVMRSDGTILGRHFCKLSEETDHLNHAVNRIKKAQKHGARKMPRLWVKVNGINHDISVKTAEFIINIAVLYNADTIVFEHLDKTGKIRGSKKQKLKLWCSQEVQRIVTDKAHRLRMRIRRVCAWGTSRLAYDGSGAVLRGKEAGFSTYELCRFQNGKVYNCDLSASYNIGARYFIREILKTLDESSRLLIEAKVPQCSKRSTCTLSTLINLNAELMPLVA

SEQ ID NO: 52994 - protein, 644 aa, Streptomyces sp.
MVSVMVLPLAVTDPADLARLNKLFGAMWHIKRAVQRDARAKVDAYWAAYHERDRDGARAVRQRLGLSREALERCAYQHLEGAGHLKHHASKALAMHMADEVWNGVQRHLFADSTGKRFGRPKTGRWYDFTRIPGRARSHTTANKWETFRLVGTLHGHGMAYADGGQQEVQQPRRMPKPPLPAGTVPAGKVTASGKPGVRKATWWDHTGPLAVVFAGGPYGIAGDLVLPVRIPQGPGQWARVEHFLAGSGRWHKVDLVRRCKPGTPGGWAYEAHLMILGPGYTAPAVEQMRQQAAALERVGGVDGNVSNLSIVSFPTSLNPAEGAPASTEITLTTAERARLEKEAKKRRGRARALERSRRATNTAQYGLSKKQTRRAERRAAKGLREKRVTVPGGARAARADGVPKQAFRRDRLSEGYRELRARQAEASASAAEHRRHCTRLVAREIIAAHGVNLAVEDCDIRTWYRLWGKRLSQTTPGMLIAALDQECRAAGGQLVRASTWSTALSQHCLCGQRVNKTLRNREHKCVACGLVGKRDLVSAALAAFVRLTDVDDPKTAYLDTAMSRHAQITYGQGLEEALRESTTPSPKPVRRPGRVAVPRQRETSAHRTAARRPRATPDETRPVRDHAGKPGRRPGCDPQLTLW

SEQ ID NO: 52995 - protein, 536 aa, Streptomyces sp.
VAAPFVVPGPSGVAIRTRLKGLTAGDETVLRLVGDLLGSLASRDLKARCAARLKHDSEQWAERKRRLTQESSSRWAGAITKATHDQWALARRGQLAHIQSLEAGIETITHRLSVPVGERGTKRVPGGYRSTREWHAKRRRLCVLEERLQTVRADREAGVVRVVRGGKRLLNSRHHLEQAQLTEEQWRARWQAGRRFLAADGESGKRFGNETIRVTPGGEVSIKLPAPLAHLANAPHGRYVLAARVSFAHRGEQWADRVAANRAVAYRIHEDTTRRRWYLTASWTVPPVQIVPLASARAGGLIGFDTNADHLAAWRLDEHGNPTGDPRRFFYDLSGTAQHRDAQVRHVLIRLLHWAERHGLSIALEDLDFTAETTREKHGRRKRFRNLISGMPVSKLRARLLSMAAELGITIVAVDPAYTSKWGAQHWQKPLTTKTRKTTRHDAAAVAIGRRALGHPIRRRTAPPRTHQSDGCGHRTVQARRDTPAREGNRPCIPGPRTRSVRAGRGANAVDQNAQHRSGRSAEHEPWQQDSLPLSL

SEQ ID NO: 52996 - protein, 465 aa, Streptomyces sp.
VAAPFLVPAPCGVAIRTRLGHLTAPDEKVLRLVGDLLGSLASHDLKVRCSAGLKHDTEQWAQRKRVLTEGSSSRWAGSIHREAGRVHVVRGGKRLLNTRHHLQEAQFAEAEWRKRWEAGRRFLRADGESGKRFGNETIRVTPGGEVSIKLPAPLAYLANAPHGRYVLTARAAFAHRGEQWADRVTANRAVAYRIHEDTARGRWYLTASWTMPPVQTVPLEAARANGLIGVDTNADHLAAWRLDQHGNPTGEPLRFAYDLSGTAEHRDAQVRHALIRLLHWAKRHGLAVAIEDLDFQAETTREKHGGRKRFRNLISGMPVSKLRVRLVSMAVELGITIVAVDPAYTSKWGAQHWQKPLTTKTRKTTRHDAAAVAIGRRALGHPIRRRTAPPRTHQSDGCGHRTVQARPGTPAREGIRPRVPGPRTRSVRAGRGANAVDQNAQHRSGRPAEHEPWQQDSLPLSLQER

SEQ ID NO: 52997 - protein, 309 aa, Streptomyces sp.
MSRFRMYPTPQQEQQMLQHCAHARYVWNLAVEQHSHWQKGRKSAPGFAEQCRQLTEARRANEWLAAGNADVQQQALKDFAKAKNAKFISGFGEPTWRKKYKHEGFRAIGTGRVPEFNEDGSPKVNPKTGKQVTGRSVVVRKLNRRWAQVKVPGCGWVRFRLTRHGLPQAKTFRVTFRNGQWHVAFAVIPEPIQAPGTGEVIGIDRGVTITAALSDGRKLNCPQLTVKERAQIRKHQRRAARAKKGSPKKTSAYAKVAKLKTREANRRKDWCEKISTTLARTYDLVRFERLNVKNMTASAAERSNNPASA

SEQ ID NO: 52998 - protein, 378 aa, Streptomyces sp.
VAFDWGLNTLLTGGTLHLTDEAQPRVVTDGHPLYFRAAGVLAKADRLRILSEHIGARIDRLRVLITSRQERGRRPSPLLLAKLAVLQAERERVARRRTRLNAALAKAAARFMTDHAIAAGARVIYFEDLRDIQARGKGRTLNTRLSQTVRGAIVTHLRHQAAAHGIAVVIVPPRGTSKYCPRCLTAFRHHKASGDRAAGWAWATCPNTACGYSTGRDNAAWQRIGARGLAHQHKTSLDRSSSTFVIRSVVEALDRASTVQHQTRDRTKSGPTAKRPVPGKRRRAPAPPDNRAPTRARPGGQRPAGRTPTHPTHRSRRCPRQQGPNTIGTPARHQPDGARLGAGFHRHAHTTPVRRRPWPSHPPARSRAPGITQETQAD

SEQ ID NO: 52999 - protein, 408 aa, Streptomyces sp.
VQLRYNYRVYPDAPQRRALARAFGCARVVWNDCLRDRKEAHTAGLPYVTSAELSRRRITQAKHTEERAWLTDVSAVVLQQSLRDLDAAYKNFFDSLKGKRQGRKVAQPRYKSKKDTRQSIRLNTNAFSLQDNGAVYVAKVGTIKVKWSRPLPAAPTSVTVTKDCAGRYFMSFVVDTAPDILPELDTEVGIDLGLSTFAVLSDGTRVRSPKFLRRAEKKLKQLQKDLSRKARGSKNRAKARIRVARQHARVADRRRDWHHKVSTQIIRDNQAVYVEDLAVSGLGRTRLAKSVHDAGWSAFVNMLEYKAIKCGRYFGKIGRFEPTSQVCSACGVKDGPKPLHVREWMCKECGTVHDRDDNASKNTLAAGRADRLNASQSAGKTRTKVPAQRVEAGSHPDGHTTVAGIPGL

SEQ ID NO: 53000 - protein, 390 aa, Streptomyces sp.
MRQFGHRARLALTSAQIRLMDDQAHAARTMWNCLHDWWTMLPKEKRSLAAADAATRQARKEIDWLGVLPAQAAQAVLNTYFQVWRNCWDGRADEPNFKARSRTVMSVDIPQGRDLNISRVHRRWGMVQIPRIGRIRFRWTKDLPVGKRANTENLITGARLVKDALGWHIAFRYDQIKQLRARATRRAVDWQHKTTTDIARQYGTVVVEALTITNMVNSAKGTIEEPGKNVAQKSGLNRSISQEAWGRTVTMLTYKTARQGGTLVKVPAPGTSQRCSACGFTTPGSRQASPWRQARRRKVGRNLPRLRGRALQGGEPDAAEAVGEETGRRAQSSTGDVPVHHGGEVRSVRGGAGRLRRGRRAPGDGAGARRRARAAARGGLGGGSRGRRAA

SEQ ID NO: 53001 - protein, 415 aa, Streptomyces sp.
MYWRTTVSSLHRSSSWTVRRTRLAPCGTCCTTGGPCCPRTSVPSRQRTRRSARPRKEIDWLTVLPAQAAQAVLKTYFQAWKNCWEGRAGAPGFKARFRTVMSVDIPQGRDLCITRVHRRWGMVNIPKLGRVRFRWTKDLPTGKRAGADNRITGARLVKDALGWHIAFRVQTLEPTPEPHTGPEVGIDVGVTMPLALSDGTTYDHHAWLTGTEQAKLGRLEQRAAHRKSFRRRGERTSRRLRATYDQIAGIRARAKRRHLDWRHKTTTAIAAKYSVVVVEDLNITNMVKSARGTVERPGKNVAQKSGLNRAISGEAWGRTVELLRYKTARHGGTLHKVPAPGTSQRCSMCGLTTPGSRESQAVFVCKNPDCGWVGNADHNGARNILHLYRMGLALIPAAGRAVVRRPRRVKPATAR

SEQ ID NO: 53002 - protein, 420 aa, Streptomyces sp.
LRRQRGHKARLFLTPAQALAAEGQGHAARAMWNLVHDWWTMLPKERRNLAAADAAIRQGRKDLPWRGVLPAQAAQAVLKTYFQAWKNCWDGRADAPNFKGRFRSRMAIDIPQGRDLQIVRLNRRWGRMWAPKIGHVLFRWTKDLPVGKHADKENRVTGARLVKEADGWHVVFRVQSEVPEPAPHTGPTVGIDRGITRPLALSDGTFRDHAPWLTSAEAERLRRLEKTRERKCRARKPGEPNSRRLTRTYDQIAQLRATAKRRAVDWQHKTTTEISRTFSRIGVEDLAITNMVKSAKGSVEQPGRNVRQKAGLNRAIAGEAWGRTVTMLEYKTADRGGSVVKVPAPNTSRRCSACGFVTSGSRETQARFVCKADGCGFEANADTNAGRNIDHAAGQAVSGRGDFGVTRSKKRQPLTQPHVA

SEQ ID NO: 53003 - protein, 683 aa, Streptomyces sp.
VWRRAKDVPVSVIRLPLVVADADVRGRVEQLFSAMWQVKRALQRDARDVVDAYWAGEVRRERDVKAWRAELGLSRTGLERRAYRHLERSGWLSDHVSKALVMHQADEVWAGVARHLHPDASGRRVGRPRTGTWWEYTRIPGRARSHTTERKWETFRLHGTLAGHLEAFRHPALPPSVTTPAQAAGLVPGVRVLAQPHRMPTPARPVGRIPAGTLDAAGRPRARAATWFDHTGPLTVVFAGGPTGRGEIVLPVRLAQGAGRWPYLLHYLNDPGLWHKIDLVRRRDPAALGGWAYEAHLMVLAPGYASPATRTRRCQAAALERVGGVDGNVSNLAVVSLPATLNPDDGGVCSDRITLTEQEQDALAAARKKARGRQRALNRSRRATNPQQYQRSRRQKARDERRRAAGLPPKAVAVPAGPRRTTTTGKPRQAYRRDTLSAGYRTLRARHSAMAASAAEASRHRAKKIAAALVAAHGPNLTVEDCDIRTWFRLWGRACSATTPGRLITQLAAECTATGGQLLRASTFTTALSQHCLCGRHVPKSLHQRTHHCDPADGGCGLKGDRDLVSAALAAFTALTDPDDPTTARLDQHRARTAQILFTQGLQEALTESTAPKSPPSGRTHAAAEPRRNTLPRQQTASARRNAGPCTVTTPDETRPAPTRPKAHAGTTRPHTGRPRTHIRDKS

SEQ ID NO: 53004 - protein, 674 aa, Streptomyces sp.
MIRLPLVVDDPATRHRVELLFAAVWQVKQTLQRDARAVVDAYWSGEVRRASDPKAWRAELGMSRTGLERRASAHVERSVWLRDHVSKALAMHQADEVWAGVARHLHPDAAGWRAGRPRPGTWWEYTRIPGRARSHTKDRTWETFRLHGTLAGHLDTFRHPALPGHITTLVQATALPPGTPVLAQPRRMPAPPRPTGRIPTGTADDRGRPRTRAASWYDHTGALAVVFAGGPSSRDGDLILPVRLPQGAGRWPYLAHYLDRPELWHKVDLVRRRDAAAPGGWTYEAHLLVLTPGYVSPATRARREQAAALGRVGGVDGNVSNLAVVSFPATGDPTDGDVRADKITLTDAERHTLTVQRRKAKGRQRALDRSRRTTNPHQYGPSRRQHARDERRRIAGLPPRTTATPAGPRCTTTAGTPAQAYRRDQLSNSYRTLRARHAMGAAGEAEARDHRARRIAAAVVADHGPHLAVEDCDIRTWFRLWGRACTATTPGRLITALAAECQAAGGRLHRASTFTTALSQHCLCGARVPKSLRERVHHCDSAGGGCGLRGDRDLVSAALAAFTALTDPDDPTTARLDHDRARAAQILFTPGLQEALSESTAPKSAPSGRTHAAAHGPGTHLPGQRASARRNAGTRAVATPDETRPATKRPKAHAGTTRPHPALPRTSIPIRDSS

SEQ ID NO: 53005 - protein, 262 aa, Parageobacillus sp.
MLVRVGKKYFLHFSYSKKIPFKQTKLNKQVIVAVDLGLTNSAVCSAIRFDGTVIGRKFINQPIEKDRLKTKVNKLKKAQSRSGLISAPNYWRRINGLQKYIIHHTASEIVKFAEKVHADVIVFEYLGKMKIPKGMYGAKKLRHKLHHWCKMGIQHKVEEMAHYRGMRIRRVNAKNTSALAFDGSGKVIRNGKKDLAVFPTGKIYHADLNASYNIGARYFLREILKFFSEKKRLQWEAKVPSLAARTRQTLSSLISLHQAFNT

SEQ ID NO: 53006 - protein, 399 aa, unknown
  TnpB Polypeptide
MVHVCKHDRPWRRARDLGTDLRCGRLRAVVGIHPEAEGPFAELVNDRNRDVVVVGGAGAEAGRRFTRQRGDSRVVGPNLSDDLVTKQVMCTPEQQQAAARAAVKTRARQRALDRSRRNTNSAEYGPSVRPAARAQRRCAAGLSEKHISDPGGPRHCRTGGVPVRAYRHDTLSNRYRTTRADHREDARKTSQAKQSRAVDIAARIVAAHGNTITIEDCWIFTWAALWGTRIALFSPGILVAALESECVATGGRFYRAGTRSTALSQHCLCRQRVKKTLDQRSHDCGHCGLHGDRDVVSAMLVARVELTDPEDPRTARVDYEFANVLQAWLAPQHERGGSVNRHQPPAPPDAVGPARTGSHHPVALAEHAALGPPPNRPDRKPGRRGNSRKRQPPKLSGAA

SEQ ID NO: 53007 - protein, 368 aa, unknown
  TnpB Polypeptide
VKTIAKMHLLTDEIGSKRLLDTMEAFNAACNEIAETCFIEKSASKFNIQKLVYHKVREKFGLSAQLTIRAIAKTCEAYKINKKVQPIFKKHGSITYDSRILTFKGLGSDFPQVSLTTLDGRRYFNLKVCAYFAGRINRVQGQVDLIYCKGKFFLYATCDMPEDTPIEPDDVLGVDLGVKNIAVDNTGKVFSNEKVEQVRVKLHKLCSDLQSKGNKHAKRWLKQVSGRESRFRTNENHCISKYLVVKAKDTNCAIALENLSGINSKTTVRKKQRAERLSWAFWQLRSFITYKAKLVGVPIILIDPHYTSQRCNVCGHIEKANRKSQSEFVCKQCGHNENADCNGAKNIKEKGLLSINLSVSAKKLLEVA

SEQ ID NO: 53008 - protein, 384 aa, Symploca sp.
MLKAYKYRIYPTSQQRVLLAKCFGCARWFYNYGLELTSRTYQETGKGLSRNDIIKLLPGLKKKHEWLKQPPSQVLQQAALDLSRAFLNFFEGRAKYPRFKSKHTRGSIRFPQGCKLIKDCLTLPKIKEVYCRLSRLPVGTLKSVTVSMSVSGEYYASCLYEDGKEKPEARSDGKAVGIDVGLTHFAITSDGSKHGNPKYYRLYERKLADAQKQLSKKQKGSSNRNKARVVVAKVHQKISRCREDFLHKLSRKLVDENQVIVVENLAVKGMVKNHKLAKSISDAGWGMFCTMLKYKAEWDGKTYLEIDRFFPSSKTCHVCLNQVGNLPLSVREWTCSKCQTKHDRDINAAVNIRDEGLRVFAGGHLASASGVRVRPSMGTAFVRR

SEQ ID NO: 53009 - protein, 260 aa, Moorea sp.
DVILRPGKSSCYLIEIVYEQEEKTTDNQQVAGIDLGVNNLMAVTTNQTGVAPLLINGKPLKAINTFYNKKRSLLQSQLKTRNNQNSSHRLNALTHKRNCRVENYLHTASKKVIDWCEVHQIGTLIIGHNENWKQSLNLGKKNNQQFVNIPHYRLRKMLTYKAQLKGIKVIITEEYYTSQSSALDGDELPKYGEKKPIFKGKRVKRGLYKTGDNKLLNADINGALNIIRKVIPDVFDQGIKGLPFNPVVLSPLRMTRLSGF

SEQ ID NO: 53010 - protein, 188 aa, Fischerella sp.
IGLESFLATSEGTLIARPLFFKSLQRQLELLQRRLRNKKLGSNNRKKLNKKIARLHQKISDTRKDFHFKTAHKICDQGDSIFIEDIDFRTWAKGMFCKHTLDAGFGQFFTILNHVAWKRGKYFGKVNKDGTSQICPNCDAYTGKKTLDVRIHSCPECGYTKNRDVAASEVIRNRGLNAVGQTVLQNAC

SEQ ID NO: 53011 - protein, 381 aa, Frankia sp.
MCREHRRSALPLAAVDRQMREARKSPPEGFEWLSLLPAQACQQVLKQYQAAWKRCYAGLARPPRFRFRRRARLAVDVPQASGLQVIRRSRRWGVLSVPGVGRVRFRWTRPLPGVSRGVPGRLTGARLVREVNGWHVVFRIETPDVRPEPHGGPVVGVDRGVTRTLALSDGSFRDLPVLLSVGEAGRLLRLERKAARQRRARARGAATSNRLTRTYDQIARVRARTKRRRDDWAHKVTTGISREFGLVVIEDLRVGNMTRSARGAVENPGRQVRQKAGLNRSVLNAAWGRIGAHLAYKTAWEGGVLVKVPAPYTSQRCHVCGVVDRASRPDQATFLCTSCGWSGNADINASLNIRAAGLSSMDVEISGLPGTVKRQPSGEAA

SEQ ID NO: 53012 - protein, 371 aa, unknown
  TnpB Polypeptide
VILARKVRLFPTSEQEQQLCKSAGTKRWAYNWALSKQQENYKSGGKFISDGELRKELTQLKKTEELQWLNEVSNNVTKQAIKDACNAYMRFFKKQSGFPKFKSKKHETPSFYNDNIKLKVKKNSVLLEKVGWVKIKEKIPMDCKYTRPTVSFDGKYWYLSVGIEQQTKNNELTKEVVGIDVGIKDLAVCSNGMVFKNINKTKTVKKTEKKLRMLQRKVSNKYEKNKKGVCYHKTSNIVKLEKQIRLVHRKLNGVRKNYLHQATNQIVKTKPSKVVMETLNIQGMMKNKHLSKAIQKQNLCEFKRQMKYKCEFNGIEFIEADKWYPSSKTCSECGCIKGKLLLSERTYVCEECGCIIDRDLNAAINLSRYSA

SEQ ID NO: 53013 - protein, 280 aa, unknown
  TnpB Polypeptide
MEYSHRYPAYPTQAVTAELEYHIDVHRQAYNYTLYEYENVDADNIGSAYKHHYRLPNWKDEFPVFSEVNSKALQRTVTRFYDNLSNLKDQKEHGNKVGKLKWKSPREFQSMTFSQSGFELKNTSGRRATLWLYKIGDIKIRYHREIPDEADIKEVTVKKETTGEWFVSFGLETADADLPEKPDVESLDATNSAGIDLGIRNYIHTSDGKTVDWLDLEGEYERLRREQRKLSRKQEGSNNWEKQRREVANVKRHIRRKVLDYQHKITRGSSASTTRCSLRT

SEQ ID NO: 53014 - protein, 419 aa, unknown
  TnpB Polypeptide
  misc_feature (400)..(400): Xaa can be any naturally occurring amino acid
MRCTNVVRVLPGKQQKKVLETIGDRCAALWNAVQYRCRQAFFKGEPVPSYAALCSEFKEHPAYRALPAHIGQEVIKKARKAWDSFFACLRLYRKGELEEPPRIPRYWKDRRTGRRTFRVIPVKAPTSYFLDARSLSLTLPADIRFERGNRLLLRIKGVLRFRGTPKTLELKYDRVKRRWYAHQVVEVPEAVRKIRPEKCAALDLGARVLAALAVEGLDRQILFSGREVWKDFLYWTKQIAEEQSRLNQAGRKTSRQLKKLYQTRARRLKHAFVALAAEIARILKQYRVTTLYLEDLTGIREDMDFGPKNILVHNFWAFRMIKNLIEAACTRVGIKVLPVEPRGTSSRCAVCGSPIRRLVRHKAMCERCGCVWHADANAALNILLLGSSKGHGAEATPLNXRFESAAGTLYAASGSRMAV

SEQ ID NO: 53015 - protein, 392 aa, unknown
  TnpB Polypeptide
VAKQPKAYRFRMRPTKGQGHALNRMAGACRWVWNWALHRWKGHHAATGKSIPMAQLSAELTALKQRPETAWLQEANAQALQQVLADLHRAFTNFFEKRARSPEFKSRKRGHAAFRLPQGVRVKDSKVNISKIGGVRIFQSRDVTEKTKSATFKRAADGKWYVSLVVEFEMPDVPIPTPDPAGTVGIDVGLIDFATFSDPTAQPIPAPKSFRTGQRRLRRAQRAVSRRQLGSKRRAKAVRKAAAVHRKCADQRRDFQHKLSTKIVGQYAAVCVETLSLKGLARTKLAKSFNDAAFGEFFRQLRYKCLWNCKHFIAIDRFFPSSQMCNVCGALNERLTLSDREWGCACGTHHRRDFLAACTIRDEGLRRLAAGQADSLNAQGDSVRPGMPGSCR

SEQ ID NO: 53016 - protein, 400 aa, Burkholderia sp.
MQRLRAFKFELTPNGEQQCNMCGFAGACRFVFNKALALQKENYETDDKFIGYVTMAKHLTAWRNGTETPWLKDAPVHPLQHALKDLERAYKNFFAKRAAFPRFKKKGHGDSFRYPDSKQIKLDQVGNRIFLPKLGWLRCRNSRDVLGEVRNATVSRHAGKWFVSIQTSREVAQPVPQATSAIGIDLGIARFATLSDGSFLAPLNSFKRHKARLRRAQRAMSRKVKFSRNWKKAKARIQRIHARIGNARRDYLHKATTTISQNHAMVCIEDLQVRNMSRSAAGNSDAPGRNVQAKSGLNKAILDQGWFEFRRQLDYKLAWHGGWLVAVPAANTSRTCPACEYVSIENRQTQAVFRCVGCGHEDHADVVGAINILARGHRVAACGESVQSGRSVKQEPADPI

SEQ ID NO: 53017 - protein, 556 aa, Mycobacterium sp.
MAEAKIYRMAPTPAPRSVGRCRARKRPKGAPAHVRSWPLRPNAAQCREIGIRFFTGVRVFNAVLGEFIARSRAVKDDPVWQAARELPGRTPAERAQRGAAFRAVELAHGFNVDAAQSFASSLRKSWVREHLPAQETQSLGARAFDAVRQWHVGRKGKPRFKSARRGLRSLSCKDGNGALRPKTDSAGRLVGLQWGAGFVIPIAAPAVAGRRGREQWAEFAEIEALIAGGKVLSTRIVRTVINGRDTYRMQLVCDGHPTRRHEVGQGRVSFDLGPSQIAVAVEHIDGSWSGWGEPLADAIRLDTDQLRRVQRKADRQHRSGSPECFNPDGTHKRLRCGWQRSHAAQRTVTRAAELHRRLAEHRKTLHGALANRLFGHGGEIACERMDYVSWQKNFPRSVRDRAPGLLVEMMRRKAESAGGTALYEYNPRTTALSQNCLCGNRKKKPLSQRVHRCDCGITEDRDLFSAYLGLHVRATVDGSDRLDLQAANNGWLHRQDVDESPESSRSAQARKRRGRRHPPSRRSVARIKARCKAKTLMRQSRSAPTSTTDQPTAIAA

SEQ ID NO: 53018 - protein, 375 aa, unknown
  TnpB Polypeptide
VRKAFKYRLYPTKAQSLALDTILDTHRHLYNRALAERRDAYQQEQRAVGYGEQSASLKAQRTANPYLAATNFSSCQATLRRLDRAFHAFFRRVKAGEKPGYPRFKGKDRFDTVEFSSHGDGCKLDGDRVYFQYVGSVKVRLHRPVAGTIKTLSFKREAGRWYLIASCDLGTAPAKRPVERTAGIDLGLKAFLTTSDGEHVQSPQCYRKAQAKLRRAQRHLSRCKDSSNRRRKARQRVARLHHHLANQRRDWQHKTALALVRTYDVIAHEDLNVKGLARTRLAKSIHDAGWTQFLAILTSKAEGAGVAVVAVDARNTTQVCSGCRALPAVPLTLRDRVYHCASCHVSLDRDVNAAHNIKRLGCSRQAPTEAMAPIA

SEQ ID NO: 53019 - protein, 346 aa, Paenibacillus sp.
MLINKAYKFRIYPSKEQEILIARTIGCSRFVFNHFLAKWNKTYKETGKGLTYNRCSSELPNLKKELPWLKEVDSIAIQSSVKNLADAYSGFFRKQNDAPCFEGNKIKLPKLGLIKFAKSKEVEGRILNATVRRNSSGKYFVSILVETEVNRLPKTNKEVGIDVGLKDFAVLSNGEVFENPKYLRKLQKKLAREQRKLSRRKKGFSNWEKQRFKVARLHERIVNARTDYLQKVSTHIVKNHDVIAIEDLQVSNMLKNHKLAKSISEVSWYQFRTMLEYKAKWFGRIIIAVGRTFASSQLCSCCGYQNKDVKNLNLRKWECPSCGRHHQRDLNASQNILAEGKRLLSA

SEQ ID NO: 53020 - protein, 278 aa, Rhodopila sp.
MIYDERLMGFKGPSLVSLLTLEGRQLIPMIYGEYQKARFDRLKGQCDLVYRNGKFFLLCSIDMPEDAPIKPKAFIGVDMGVARIVTTSDGQHVSGEHIEAVRVKHFNTRRSLGRKMGSKKRRTRKNARRAMKRIGNREARFRRHHNHVIAKTLVLFAKDTGRGIALENLTNIRARLRFRKQQRAKMGGWSFAELRGFIEYKGKLYGVPVVSIDPRNTSRACSECGHCEKANRKSQSDFKCLQCGFACNADTNAAINIAARATSKLAIEVSQRRSPKVA

SEQ ID NO: 53021 - protein, 421 aa, unknown
  TnpB Polypeptide
MLLDNNTANLRGLPFWSIAMFADKGHKIQLLPNNKQRATFRQWSGTARWAYNYGLEKKIEAYEETGKSPGAYSLMKDVVKLKQTEEYAWLRDVSKSVPRMALMQLEVAYTNFFRRVKNGDAKPGFPKWKSKKWSKVVFHLEPDTVKIEGERIRLPKIGWIRMTKSPRFEGKLIGTVAISERAGKWYVSLSVETEHIPADNQGGDVGIDWGVKTLATLSDGTTYENPKALKHYEKLLARAQRQLVRKQKGSKRREKANLRVRRIYKRIADIRVNAHHQATSDVVNQYNFVAVEDLNIKGMVKNHCLAGAVSDASFGELKRQLQYKLAWNGGELVSVDRFFPSSKLCNACGCINDSLTLADRTWTCTDCGTHHDRDHNAAKNLRNWGLKHRTVQTVLDVEGKDSSPPAKRQEGCVSISPSPVD

SEQ ID NO: 53022 - protein, 390 aa, Thermus sp.
LELGSFPLPQGPGGGEEAPLRPRAPQGLERLETGGGSLVERSLQVRPPGGVSGPGEGLQGVAEGEGGAPPLQAEEAHPRQQGPPHRERPGLPQARPAPPHREGEEQGAHGEASPPPGGGKAKILSATVSREADRFYVSLTCEVERPDPKPKEVRGERDVVGLDLGLSAFAVLSDGTRIAAPRPLAKKLRLLKRRSKQLSRKEKGSNNGKKAALRLTRLHRKVKNLRLDFLHKLTTWLAKTKPVIVVEDLNVKGLFRGQLSRSVADVGWGAFRRILAYKAEWYGATLIVAPRSFPSTRLCSRCGHLQGRMPLSQRVFWCEACGLEVDRDLNASVNLQKYGLAHLTGSTGSSSGSHACGDSSGGGTAFHGSRSTSHGSWKQEVACGRDSLGR

SEQ ID NO: 53023 - protein, 411 aa, Halobellus sp.
MNYNYRYRLRPSDALEERLAETVDTCRQVYNHFLHRLNRNNDTSAYSEQKQLPDLKKWWEDLKQVHSKALQKVVQRLYDNLSTLRGRKQNGHRVGNLKWKGQGEYRSFTYSQSGFELKNTSGRTKLWLSKIGEIPLIFHRDLPDAAEIKTVTVKREPTGKWYAILGVETPDDPPEKPETPSKCVGIDVGILKYAHDTDGTAVGPLDLSDERERLERAQRDLSRKEHGSNNWEENRRVVAERHADLKRKRHDFLHKLSNHYAREYDLVAVEDLDAAGLVELPGNSRNRAGAAWGTFLRMLEYKCERDGTHFVAVDPAGTTKECAACGVSTDKPLWVREHSCPSCGFTADRDWNAAWNILSRGIKRLGAGRSEPTPVETALPTGTTSVPAKRVVEAGSPTLKREGVSPSGRVG

SEQ ID NO: 53024 - protein, 439 aa, Halobellus sp.
MLEVHRTHQAKILNHRQVEEMLDRHGWSASKLWNVANYHSRQVWDETSEIPDHGDLKDELKTHPIYKGLHSQSSQRVLEELAEAFNSWYGKKQSDNRANPPGYRKKNYYDTQGRRVHEEHPRSTVTWKRNGIKHDSKNNRVRLSKGANHKEHPKAWEYILVEYETRPGVVVENLQQVRAVYDKAKGRWELHLVCKDEIGTPDAPGTESAGVDLGICNFAAVAYSTEDADLYPGNRLKQDGYYFPKEIAKCDDSSGDRATRLHNKWSERRTHFFHSLAKHIVQRCVEKDVGRINVGDLEGVREDGNGESKNWGTHSNLDLHGWAFDRFTNILEYKAKVEGIDVVDVSERDTSKTCCVCGKEDENQRVERGLYVCETCDAAFNADVNGAENIRLDINESNSESSTSLDEDRSTGWLAQPGVYLYDLSSGFQPQVQVVDCKP

SEQ ID NO: 53025 - protein, 409 aa, unknown
  TnpB Polypeptide
MKSLKAKLNLSWYQKLVLNTLSNEHRLLYNHLLEHVKNTGTIVELSKECNKFRHENSLTIHYRPAYETCKMLTNSIKSYFALKKKDKTARFPYRFKSWKYFTTILYRSNNFNLHNNKLVLHIQDCRCKNAKTLEITLPDYCKTIIGTIKILQIKREANDYFAIFTYSELKKVRTFVQERLISIDPGVTNIATIYNPNKKEIIEIPNDQFHKKLEKRIEVIQSLCDKKKKYSRRYKRLAAIYKRCKKKLANKNKDFQHKVSKKIVDYCVENEVSKVVYGDIKTKKLVKDSKLAKDRGLNKSTQSRGTLSRFKTFVEYKTLSEGISFVRQNEAWTSRTNCLTDERFDVELKLSDRTVRLNDSLVFTRDGNAAVNIMKSYLGECAIPIKGSWLAHLESVSFSRMLLDHDKVI

SEQ ID NO: 53026 - protein, 380 aa, Microcystis sp.
MRDMEKAYSYRFYPTPEQESLLRRTLGCVRLVYNKALHLRTQAWYERQERVGYAQTSSMLTDWKKQEELDFLNEVSCVPLQQGLRHLQTAFTNFFAGRTKYPNFKNKHQGGSAEFTKSAFKFKDRQIYLAKCTEPLPIRWSRQIPESCEPSTVTVRLHPSGRWHISIRFDDPTIKPLPVTDKAIGIDLGISSLVITSDGDKVSNPKHFKKHYRRLRRASKNLSRKQKGSKNREKARIKVARIHVQITDNRKDHLHKLTTQLVCENQTIVVENLAVKNMVKNPKLSQAISDVSWGEITRQLAYKCRWYGRNYIEIDRWFPSSKRCSNCGHIAEKMPLNISKNILAAGLAVSVCRATIRPEQSKSVKAGAKNPSGKKQKLKS

SEQ ID NO: 53027 - protein, 343 aa, Nocardiopsis sp.
VWQNCWAHRAGPPTFKARLRSRMCVDVPQGRDLNIARITRTWGMVRVPKVGVVRFRWTMDLPVGKHADAANRITGARLAREANGWHVVLRVLTQVKEPVPHTGPGVGIDRGVAKPLALSDDTFREHGPWLSKGEQERLRRLERKAARQRRHRKAGEVTSNRLCRTYDQIAGVRAKAKRRALDWQHRVTHGLAEEFGVVEVEDLNITGMVRSARGTVDSPGTHVAQKSGLNRAIAGEAWGRTVTLLEYKLADRGGHLVGRPPRTPLGAARGATSSPRAAGSPGTSSCARHPVADTSRTPTPTPRTTWSIRPSRKRPRTLWVPGRGALAVRRALKRRPPAADTFR

SEQ ID NO: 53028 - protein, 386 aa, Nocardiopsis sp.
VLTGFRYRLAPTGEQAGLCQVYGDICRAVWNTGLHQRREAVRRWQRGQDLPYCGYHLQARQLAEAKTEEEWLKTAPSHILQQTLRDLDRACRDHGTFNVCWRAKGRWKPSFRFPAGARVIVQRLGRKWGRLKLPKLGWVRFRWSRAPKGTVRSATVSRDGAHWYVSLLCEDGQTTPQAHERPDSAVGIDRGVVVAVATSDGDLFNRTFQTPKEHERERRLRRRLSRQHKGSANRARTKAALSKLTGRVRARRADFAAQTARVLCAKNAVVVLEKLHTTNMTRSAKGTVDAPGTHVRQKAGLNRAILARGWHGFKLACQNAARRTATRIVEVNPAYTSQTCHPCGHVAPENRESQSVFRCVVCGYRAHADVNAARNTLVRGWTSPSG

SEQ ID NO: 53029 - protein, 390 aa, Nocardiopsis sp.
MVGVSKIAVCLKLTPSPEQATVLGSTLRALNDHATRVAQVAHEQGVTRNYDLRKHTYQPLREAGVGSQAAQHVIKRVCDAYRTRRSNLHHGNHGPKGSARRERIESTPITFRPDSAHPYDQRNLSFALDARTISLWTFQGRLKDVPFACSPDQVKTLAECKRGEADLLRRDGVWFLAVTVDVPDTPQIEPDSFLGVDLGIVNIATTSDGQVLAGRRINRYRRRQLRLRQKLQAKGTRPAKRLLRKRRRREARHAKDTNHRISKRIVAEAERTGRGISLEDLTGIRARVRQRRPQRVTLHSWSFHQLGAFITYKAKRAGVPVVFVDPAHSSRECAECSYTHKANRISQASFICRGCGVACHADRNASRVLARRGQDVWDAGRKSHVPPDHP

SEQ ID NO: 53030 - protein, 128 aa, Nocardiopsis sp.
VPPGRSASRGARAVALEDLTGIRRRVRLRRPQRVTLHSWSFHQLGVFITYKAKRAGVPVVFVNPAHSSRECAECSYTHKANRISQASFICRGCGVACHADRNASRVLARRGQDVWDAGRKSHVPPDHP

SEQ ID NO: 53031 - protein, 374 aa, unknown
  TnpB Polypeptide
MNRTYKYRLNPTKEQDATLDFLLWQGRKVWNEALAQRIAIYEEKRATLNQMNQWPYFRDLRHDNPETLGKLSADSMNKILRRLDKAFQAFFRRVKQKGGKPGFPRFKNRQMFTSLEFTYGNGVALCYDGSTPRLYVMNVGEINMTYHRPIPECATPKMIIIYRHACKWYAVIQLELPDPTAKHPHPRRSVGIDIGLKSLVATSKGQIVEHHHLLQKNLARLRVLQRKAARQVKGSKRQKETYQQIAKLHEHIANQRGDFFHKLSHDLADEYALIGIENLPLAFMNRSKYLAASSYDAGIGAFRDMLIYKAEECGGRVIAVNPAYTTQTCSKCGHRERKKLSQRFHHCPKCGKKLDRDVNAARNILRLAKAKQLK

SEQ ID NO: 53032 - protein, 363 aa, Syntrophomonadaceae sp.
MLKTIKVKLYTDSEQHDKLLRTMVRFNQACNEISRIAFENKEFGQVGLHKLCYYDIRDQFELSAQMTVRAVGKVAESYKDKSRRHKQHVFRETGAVVYDQRLMGFKGLDKVSLWTLDGRTLVQLVVCDYYQNSVQGRRIAGQADLVLQNNNFYLLVVVDMPDDPEYKPKDYIGIDLGVKNIATDSTGTNYSGDQVNGLRKRHRKLRKKLQSKGTKSAKRLLKKRSKKEQRFARDVNHGISKELIEKAKGTQLGIALEDLKGIRDRTEKMVRKSQRAQHSSWSFYQLRQFIEYKAQLAGVPVILVDPRNTSRECPECGHISKKNRTSRDSFCCQSCEYAALADNVAARNIASRAAVNQPDVGVA

SEQ ID NO: 53033 - protein, 376 aa, Acholeplasmataceae sp.
MMKKHQKEFCLKMTVYRAMKTKIYPNKQQKILLTKAIGVARLTKNVCLDKLKKDYKNNIKHNYFSINKWWNSIKKIEYPFVNEVSKFIQEYAIRDLDKLVKKVYDGKNDFPDFVKKGENDSFKITGSAFFFIGKIINLPKGLSIKMGRSLRWEPLRIFNVTISKKGGEWFAAIQMLIKQKSINTAMGAVGIDLGVSTLATLSTGEKFYNPKAEKIYRKKIAYLSRSLSRKKKYSRNWYKAKRKLAKTYMRLTNVRKDAINKMTANISSKYEIIALERLHIKEMLKNNKLAKYISDASLYEVRKQLEYKAKKVKYVNRYYPSSQICSICNRRNEEVKSLSVREWTCPKCGTKHDRDVNAARNILVAAGHKVKPVDYL

SEQ ID NO: 53034 - protein, 583 aa, Streptomyces sp.
MRDLAGSRPLGLSEDSSTAGGDEVGGLREVAASFVVPGPSGMAIRDRLKGLTVADKKVLRLVGDHLGTLASRDLKARCSAGLEHDSKAWAERKWSLTGESSSRWAGSITKTSHDQWALARRGQLAHIHSLEAAIATITHRLSVPLGTKGSRQTPGGYRSRQEWFAKSRRLHALEDRLQKARADRERGVVHVVRGGKQLLNTRHHLEQAGLSEEQWRSRWEAGRRYLAADGESGKRFGNETIRVTPDGEVSLRLPAPLVHLANAAHGRYVLAARVSFAHRGEAWRDRVSANRAVAYRIHEDTVRGRWYLTASWAIPQVQTVPLEAARANGMVGVDTNADHLAAWRLDRHGNPVGQPLRFDYDLSGSATHRDAQVRHALIRLLHWAKRHQLAIAIEDLDFTAETTREKHGRKKRFRRLISGMPTSQLRARLVSMATELAIPIVAVDPAYTSRWGAQHWKQPLTSKTRKTTRHDAAAVAIGRRALGHPIRRRTAPPLHDRSDRAGHRTVQAEPGIPGREGNRPRVPGPRTRSVPPGCGAKAVDQNAQHRSGRSAEHEPWQQDSLPLSPQERFRARRSPCPPPPCGA

SEQ ID NO: 53035 - protein, 426 aa, Halogranum sp.
MEYSPRFRLLPTEKQREDLDWTRNTVRQVYNHGLYRFNQLDESEGTVKQRVRQVRDELPALKTWWTDLKDVYSKVLQTHIERIARNITNLGKLKAKGYNVGSLNWKKPREFRSFTYNQSGFKLDHKSGPNGRGKLRLSKIGWIPIRLHRDILESAEITEVTVKKEPTGAWYASFCIDVDEQDKPPVESLSMDDCVGIDLGVLNFIHDSNGVVVDRLDLPNDRERLEREQRALSRKEYESRNWGKQRRKVAKVHARMNEKKGDFKNKLAHYYTTHYKAVFLEDLNVRGMVEGQQNARNKAESGWRDLITIFQHHGKKNGCYVVTVNPENTTLDCASCGTSVYKPLWVREHSCPTCGFETDRDWNAALNVLSRGLKKLGVVHSEETPVETATAVSTDGGEYSSIVVDASRVTEAGSPVLKEATRSVAE

SEQ ID NO: 53036 - protein, 421 aa, unknown
  TnpB Polypeptide
VPAGADVPVTGHEIEYNSGMQLRYNYRLYPTSGQRSALARAFGCARVVFNDALRLREQAHQAGLPYVTDADLSTQLTAAKATPERAWLAGVSSVVLQQSLADLNVAYRNFFASVTGKRTGPQIAPPRFKSRKDGRQAIRFTANARFRVLPGGKLRLPKIGDVPVRWSRDLPSAPSSVTVIMDAAGRYFASFVVQAEAAALPGAEPVTGIDLGLTHFAVLSDGRKIASPRFLRRAQKKLRRAQRSLSRKQAGSRNRGKARVRVARAHARVADARREFHHQLSTALIRENQAVAVEDLAVRGLARTRLAKSVHDAGWSAFVHMLEYKARLNGREFHRIGRFVPTSQTCSACGAKDRPKPLHIRTWQCPTCGTWLDRDINAAVNVAKAAGLAVTACGAQVRPGPRVLAQRSEAGTHPNSRREAA

SEQ ID NO: 53037 - protein, 373 aa, unknown
  TnpB Polypeptide
MKTYKYEFSHQSNIIMLGNLIDDLHSVHVHLLRLQRRYYRIYAGYIPLKRILKHITTLKRTTKPHWNALPSQMIQDVAIRIDLGYQHFFDNIEDRKLGKTKRKVGKPKIKPNHKYKSVTFTQAGYKIEGSRLTINCLKKSFTFWKHREWTGTIKQVTIKRDNVGDYYLYIVCEDCEPSEKLPLTGNEAGADFGCKTFLTLSDGVKIVSPQFYKQGLNAIRSANKALSRKQYLSNGWYRAKRHLAHVHKAIANRRRDWFFKLALRLVRKYDKIAIETLNLEGMKKLWGRKISDIAFGEFALILQWTCAKYGKVFAQAGRWMATTKPCSDCGHHNENLILKDRQWTCPECGSHHDRDVNAAKTFCRLGYPRLDTR

SEQ ID NO: 53038 - protein, 441 aa, unknown
  TnpB Polypeptide
MKLKRTGKFKVKLSHPDYEMIKVHTIEAKEIYNYSNYIIRQIYFKNSKKHDYSMEFIHEYPELNKDFESYLKENNQFTSTFYRIICNFSRIKEHSLNSKMVQNIVDILKRDWKSYWKLLKLKTDGKYDKSVSIPKYKRKYSIVEYNPQVISKAKLKNGYFGIFKMKEGFKIPKFYKEYDLKSARALWKNDSLYMEIIYEKEIPKTKSNEKVASIDLGGKILMAVAYNFNRRGICISANMLRSINHYYNKIIGIMTSLLPKGKKISKAIINLWRKREEQIRNLFGYYTNRLIEELVSLNISKLIIGKNREQKQEIDLHSKLENRNFCMIPFNKLIEILKYKCEENGIECVEQEESYTSKASFLDNDYIPVYGEENKEYEFSGWRNGRIYKIKGKKQKIHADLNGAFNIMRKAGHELIEKVCFLNNDWIFPVGKFKVKNLNYI

SEQ ID NO: 53039 - protein, 218 aa, unknown
  TnpB Polypeptide
MAKSKLIAARQGRPFWESKRYQAHKAAAADLSAQQARVREDFAHKLSTRLVRGHDFIGIEKLSLDRMTRRGKGAGAAQKRGLNRALRLAAVGKLAKFIEYKANLAEVPFIEVPAAYTSQRCHQCGHTCKGNRESQAVFRCLSCAWTGNADTNAAVNIREEALTRWTARTEQLAGTSGEKPGGITPVSQAGSKSKTDPLTGPAPGPAASAMNRKPPNAA

SEQ ID NO: 53040 - protein, 393 aa, Bifidobacterium sp.
LPATVPRRTAGLDDVRHAPLVERMEGRDRPMVAGEQQGGVQQRLRMALPALRNWSDSRKGRRSGRRVGWPKYKSKRTSIPRFAYTTGSFGLIDGDPKALRLPRIGRVHCMEDTAKLVHGRRIVRMTVSRRAGAWYAALTVEQQPGAHPARKARRRDYPVGVDLGVKTLATLSDGTVLPNPHGYVRARHRLRHAQQTLSRRDKDTNHGRGSNRRYKALDRVRRIHARIAAQRADRIGKLTAWLAAAYPDISIEDLNVRGMTRNHRLAKHVLDAGFAEFRRQLEYKTARAGTRLHVIDRWYPSSKTCHRCGTVKAKLSLGERVYHCDGCGLTMDRDLNAAINIMVAGSAPETLNARGGDVRRPGSSEATQTPVKREPSGHESAVRLGAAPGDRGM

SEQ ID NO: 53041 - protein, 420 aa, Escherichia sp.
  misc_feature (64)..(64): Xaa can be any naturally occurring amino acid
VKRLQAFKFQLRPGGQQEREMRRFAGACRFVFNRALALQNENHEAGNKYIPYGKMASWLVEWKXLERAYKNFFRKRAAFPRFKKRGQNDAFRYPQGVKLDQENSRIFLPKLGWMRYRNSRQVTGVVKNVTASQSCGKWYISIQTENEVSTPVHPSALMVGLDAGVAKLATLSDGTVFGPVNSFQKNQKTLARLQRQLSRKVKFSNNWQKQKRKIQRLHSCIANIRRDYLHKVTTTVSKNHAMIVIEDLKVSNMSKSAAGTVSQPGRNVRAKSGLNRSILDQGWYEMRRQLEYKQLWRGGVSQPGRNVRAKSGLNRSILDQGWYEMRRQLEYKQLWRGGQVLAVPPAYTSQRCACCGHTAKENRLSQSKFRCQACGYTANADVNGARNILAAGHAVLACGEMVQSGRPLKQEPTEMIQATA

SEQ ID NO: 53042 - protein, 399 aa, unknown
  TnpB Polypeptide
LAFKSVWQYYVPSSDVLRLLDVFRRMVNESLRIGIANDASSLRKLSLLSYNQLAQYDSPSYYKLCAISRAAGILAARKKSIRRGFPTKTPYAVRPMLISCYGFKIGNGLLEMPLSRDRRFRIPLTKYVLEVASQPGVKVRSFTLTQNRLSLCIARDTPLLQCNSTVGVDRNLRNLTVGNDQQTSRYDLSKCVRIANTTVRIVASFTRDDNRIKMKIASKHGRRRTSRTGHILHTATKTIVAVAVQRRTAIVLENIEGIRSLYRKGNGQGRKYRGRMNGWSFGEAQRQIEYKARWVGLPLVRLSRRETRGSSVTCPRCGERLQSDKRLTRKLWCSNCRVVMDRDMVAVVNLARRGRVRFARSRPPIIEAQGGAVEAMKGNPTPTVIPGVDAPKLTQPTKS

SEQ ID NO: 53043 - protein, 383 aa, unknown
  TnpB Polypeptide
MVNDSLRIGIAYSASSLRKLSLLTYNQLAQYDSPSYYKLCAISRAAGILAARKKSVRRGFTTKTPYAVRQQLVSCYGFKLESGGLRIPVSRGRRFRIPLTKHVLEVISQPGVKVRSFTLTRNRLGFCIARDAPLVQCNSTVGVDRNLRNLTVGNDQGTSYYDLSKCVRIAKTTVRIVASFTRDDARLRTGLASRYGQRRTDRTGHIIHNATKTIVAVAVQRREAIVLENIEGIRCLYRRGNGQNREYRGRMNSWSFGEVQRQIEYKARWVGLPIIRLSRRETRGSSVTCPRCGERLQSDKRLKRKLWCSSCRIVMDRDMVAPVNLARRGRVRFARSRPPIIEAQGRAVQAVKGNPTPTAVPGVDAPKLTQPNKELTEPSRKFA

SEQ ID NO: 53044 - protein, 401 aa, unknown
  TnpB Polypeptide
MSRYRLLPTPPQEAALRDHCAHARYVWNLAVEQHTHWHPGRARAPGYVEQCRQLTEARAEHAWLAAGSQTVQQQALRDFAGAMAAFLDPENPAGHPSWRKAGRDEGFRIAGRRGRQWEVRRLGRNTGEVWVPKVGWVRFRWSRAVPPGVKSYRVTKDRAGRWHVAFAAIPEPIQAPGNGEVVGVDRGVAVSAAFSTGELRRVPGLTVREQKRLRRLERKLARTRGGSKRRSQIRLAAARLRARETDRRKDWVEKVSTDLVRRFDVIRVEDLKIRSMTRSAKGTRNNPGRHVRAKTGLNRGIMRSGWGRLVGRLEHKAPGRVEKIKPHHTSQRCSACGQVDGKSRESQAVFRCTACGYACHADVNAARNIAAGHAVTARGGDGVTRPVNCEPHLVASLAGCE

SEQ ID NO: 53045 - protein, 386 aa, unknown
  TnpB Polypeptide
MIKTYQYCIYPTSSQRKTMESTIETCRQLYNDCLAERKQAYEERRESIGKFAQLRKVKVLKETNPYAENIHSHVLQVAVADLDKAFQAFFRRVKNGEKPGYPRFKGKDRFDSFGFKEYGNGFKVDGRRLKLSGIGRVAVRWHRPLEGKIKTLRITRKAQKWYASFYCEIDEKPLPATGRVIGVDVGINSLIATSNDELVDNPKWYRDGQAKLRVLQRTVSRRKKGGSNRKKAIHALQVHHEHIANQRKDFLNKLAKELVVNNDLIAIEDLQITNIVKNHNLSKSILDGGWGYFAKRLSDKAVEAGREVVRVNPAYTSKTCSRCGAIFDDLDLSVRWVECDCGVSMNRDVNAAVNILLKALQNRDGQSPWELTWAVAPCVSQETTVL

SEQ ID NO: 53046 - protein, 111 aa, unknown
  TnpB Polypeptide
MLVGVKLSGNWNISATAMVVLLSKLIVGFLALKGVDIAVTLRLHCGYIVDKLPLNVREWDCPKCSRHHDRDANAAKNILAAGLAVNVRGATVRPEESKSRKAGARSQKPKS

SEQ ID NO: 53047 - protein, 281 aa, Lyngbya sp.
LKEDKISLSKIGKLKIIWSKPLTNPPSSVTVIKDAANRYFLSFVVEINQQLLPESPNSVGIDLGIKTFAVLSTGEKIDAPKPLKKRIKHLRKLDRNLSRKQKGSNRYERARVRKAKLYARMKDTRKDFLHKLSTRIIHENQVIVLEDLNVAGMVKNHKLSKAISDLGWRQFRTFLEGKAEKYGRDFRVISRWEPTSQKCSCCGFVGGKLDLSVREWTCLNCGTVHDRDSNAAVNILVAGGHSETLNGRGGKRQTFVKEAAAVEASTHLEKPVQLSIFDILQ

SEQ ID NO: 53048 - protein, 412 aa, unknown
  TnpB Polypeptide
MRSQKIRLKLTKEQENLAWWYSKVSRNFWNLLVDIDKRNNKGEFDEILNKNGNNTYYSKFHNREIYSLNQSDYLSLAKIVVAKNYEENQEKWSWYYQPNQSFIYGFLSRELVKIRRLNKGKLNFKSVDKIQPNFDVRCDVSSDNKRDSRIYLKVNGKLQIPTIGDVSFGSVRKSFNLSCKKQVAKISFDGKYWYLSYIEDIETSITNLPDYTDGLGVDLGIKTLATVSDGTTVPNVKSFRRVRILNKRLKRLQRKVSRKYLINKCNKHNKTKNIIKLERQIKLIHRSLRNIRINHIRKFVSELVKKQPQYIAIEDLNVKGMMKNKYLAKDIANCSFYTIREHLIRKATERCISVRLVDRLYPSSKTCSNCGSYKKDLKLSQRVFHCDNCQEKIDRDFNASLNIAKTDKYVLA

SEQ ID NO: 53049 - protein, 462 aa, Thiocystis sp.
MKVTRTLRADVPPELTPICQAMGDLRGDIWRRYGALGNVGRSALDIRKDIIERNLYGRLSVDGTIRNETTKDVVNDILTYKAAAKLKVRQAIAAHTTDQVERKRLYTALKNDRWLDDPFLHRQMRKHFRHGVSHTANQFIVRSDKQSSSVVDGRLVITIRIAKQVGGDIRLITTSNGKHVNLTGCNLRICVKDGFTEIHSATEKATGRPHGEQALGIDKGYTEAFTDSDGEAHGVTFGAVLTDYSDAAAQTGRSRNQLHALEKKHRTAGRIAKADRICRCNLGRKKIDARRARAKKRLRTIAYQSAHSIVDKAALVVSEDLTSPIASKVQWKRYNRRMSGWAKGALADAIDSVCEQRGAKHLLVNSSYTSQMDSSTGLLQGKRVGDKFYRITGDVLQADHNAALNVLARLADPEITRFTPYRDVKRLLLARSPAPLSVKRLEWGDPSRPPSADKSIEQVCSR

SEQ ID NO: 53050 - protein, 410 aa, unknown
  TnpB Polypeptide
MGEIVKTMKLHIHTDETAGQLFQELTSRYASACNEVSQYVFDHGFVLNFAKLQEVLYYQIRNTYGLKAQMAISALKTVTARYKTVRTQLLDHPYQYKDKDGEWQNINRTLEWLWRPIYFRRPQADLVRGRDYSFVENGTMLSINTLKKRVKVSFDIPNVFQPYFNGSWTFGTGKLVSLKGQWYFHIPITKTVPDTFDPAKPKHLVGIDRGLRFLAVTYDERGKTDFINGQDFMKKRVNFAKVRAELQSKGTRSAKRALKRISGRENRWMTDVNHQITKTLVTRYGTGTLFVLEDLKGVSFEEDNLSKRSKTQRMQTRSWAFYQLEQLLTYKAKESGADVIKVSPAYTSQRCPKCGRIHKENRHHTIHEYICDACGYRSNDDRIGAMNLYELGTMYVSGDSHPRFGKRKTD

SEQ ID NO: 53051 - protein, 405 aa, unknown
  TnpB Polypeptide
MELVKAYCYRLKTNDEIEQKLFQFAGCCRFVWNKALGIQKQRKEEGQKYLPYEELAKELTLWKKEEELVWLKDAPSQSLQQTLKDLDKAIWDVFKVKGRQDPRFKKKGVHYSFRYPQGVKIDNRRIFLPKIGFVGFFISKEVEGTIKNTTVSKEGNHWYVSIQTECEVEEPRHSHNDKVIGLDFGVVDSIAAASSGDMPKAISSFRLHQNKFALEQRKLARKEKFSQNWYKQKKKISALHNKIKNIRKDYLQKLSTTISKSHGVVVIEDLKISNLTKSAKGTIEEPGRNVKAKSGLNKAILDQGWHNFTTMLEYKQKWLGGKLIKIDPKYTSQKCSSCSHVSQDNRPKREIFECVECAYQDHADINAAKNIRAAGHAVMACGSNQVIGRKQESVEMSNHFLPVAV

SEQ ID NO: 53052 - protein, 383 aa, unknown
  TnpB Polypeptide
MPPSFMRTLRLKVRSEAYAWLNAAATEVNQVFNYCNETSYKAATRTDLKRKWLTGFDLCSLTAGASQYFERIGADTIQSVCVHYAQKRQAAKKPKLKWRASRGARRSLGWIPFKAASLKRKGRGVRFAGKCLRVFERERLEGVKWQGGCFAQDAVGGWWLCLPVKVQAECTIAPQEEVGIDLGLKSIAVTSDGDRLEAGRWTRRYAEKLASAQRRGHKRQAKRIHRKIARCRADALHVFSRKMVDRYQHIVVGDVSSLKLVKTRMAKSVLDSGWGTLKRFLAYKCEHAARSFEVRDERYSTVTCSNCGALSGPRGVNGLIVRSWVCRDCGKSHDRDVNSARNTVIGSRCRTSVRGNELSYSLIPPSNAYRVREAGMESARTAA

SEQ ID NO: 53053 - protein, 462 aa, unknown
  TnpB Polypeptide
MGTIIKTVKQHSCELDEETLKELLFIGEQYKNVKNYVYSRFSGINSILLIENDRKIRDEWTHNKFYEQWKLPARYWKLALSEAISNIKSEWSKTKKRIRTHIVKNINLLDDDRHYINYVLKFNDLFYKVLTNKKFDIPEIFKAKKLNYNYLNNLVKRYVRKYKGNIPYTKNSNVFSIDKGLYSYKDKCIKITCNKKRKRVFVKLTDNNIRRNTLIVKIIGNKLEIHCPLKIKTKKNKNKENIIGIDKGYKYLFSVSTDKFYGEKLNNFLSKETERLNDKNKQRNRFWALYKKNFELGNLNKANKIKENNLGKIKYNRHKNKHDQTVKSYINNSLRQLINIEKPTEIVMEQLNFVNWNKTYPKSVKRKLSRWIKGYIRERLEYLCQYYDINITYINPAYTSKICNVCNTFGDRDSDVFTCPKCGELHADINASKNILNRKYDNEITLYTPFRKVKEILKKRVS

SEQ ID NO: 53054 - protein, 453 aa, unknown
  TnpB Polypeptide
  misc_feature (14)..(15): Xaa can be any naturally occurring amino acid
MQQIITAKLKLLTXXDQFAALRTTQLAYRDALNAVSHYAFEHGKTSSVTTLHKGMYTELRAHYHLPSQLACSVERQVASTYKGLWTKVKKNAEHRRKKITKKRFKGLDKPPKYSSPTVQYTYERDYTFQRDSQVSVGTLNGRVSVPYQGYEKHIALIRQGATIGDAKLWYDRPKKQFYLLVSLTIDLASPTPAQLMNVVGVDVGIRYLAVTSTATGKATFHSGKRVRHKANHYARLRKRLQKKGTRGAKRRLKRIEQRERRLKMQANHTIAKQIIKEHPHTLLGLEQLTDIRERTKRRKRKRKQNGKGTERVSVKARKANRVYSQWSFAELHALISYKAALSGMLAIKVDADYTSKACPMCGYTADENRPRKGLLFACQNPECRYTLHADLIGARNVTLRTLLVRHDWTRTGTLSMCPDASDNEAKAARLRRYAELRWSPDGTSLRSETGGAN

SEQ ID NO: 53055 - protein, 428 aa, unknown
  TnpB Polypeptide
MNNVFEKLEIKQNNMFPLRHSFVPKSIFLDTNCISEILGYETIGEDAIDIWKTFFNKRVTGVEEINNNSYYRFNEQISTNGYDVSIHRADQKAVMKKKTKFGRKIVTPNVVDVKLNVITDINNEVKVEFKINILDIKEEKQRDPPNINAEIKYISDLTKKQLKEIKDAKYTLLGNDPGKNNLITLIDENGKTVTYSSVQQRFETKITLNNKKREDFLNSRPIIKKKIEEFVLCAATTNIDKFKEYIKARHKLYYEVEKFYQEPIHRRLKWHKYISTQKSQHKLIETIKKTYGTKIDGENQYDSSKILIGIGDWNEDKCLKNCMPTKGASLKRLLSHAFKTYLIEERYTTRTCSKCKHETEYYTKVIDQPTFKLDKSYIHGLLCCTNKNCSKLWGRDKNAATNILIILKGHINDGERPPYYDGNYRDLH

SEQ ID NO: 53056 - protein, 407 aa, Chroococcidiopsis sp.
MNQVLTLVVRLQPTPEQYAKLKDTATEFASCCEFINSSVKSTLTNRNSIQAVIYSDAKNKFNLVSNHVIRACARVGANRLSAKHKGKSRQSISGGSFPQKTPAVKGFKPTSFDCDKDTFTFREKDWTVSLSTIRGRARISLNVSNYHRGKLAGQKPTSAQVCLHRDGCFYVHIQLNSEAPRQNQTTNVIGVDFGRREIAKTTTDKGWDGKQVNQIRDKYSRVRASLQRKASQGTRSTRRRARRLLQRLSGRERRYQTWLNHNISKSIITEAKETNSTVAIEDLTGIRERTNEQPRNKTERRRSNSWAFHQLRIFLEYKGIKEGVKVIAISPAYTSQTCNCCLHIGIRTNKNFKCVNQSCGWIGDADTNGSLVIALLGATIVNSPKGSWLSCPLDKTAGGLLKAPRSA

SEQ ID NO: 53057 - protein, 401 aa, Escherichia sp.
KRLQAFKFQLRPGGQQECEMRRFAGACRFVFNRALARQNENHEAGNKYIPYGKMASWLVEWKNATETQWLKDSPSQPLQQSLKDLERAYKNFFRKRAAFPRFKKRGQNDAFRYPQGVKLDQENSRIFLPKLGWMRYRNSRQVTGVVKNVTVSQSCGKWYISIQTESEVSTPAHPSASMVGLDAGVAKLATLSDGTVFEPVNSFQKNQKTLARLQRQLSRKVKFSNNWQKQKRKIQRLHSCIANIRRDYLHKVTTTVSKNHAMIVIEDLKVSNMSKSAAGTVSQPGRNVRAKSGLNRSILDQGWYEMRRQLEYKQLWRGGQVLAVPPAYTSQRCAYCGHTAKENRLSQSKFRCQVCGYTANADVNGARNILAAGHAVLACGEMVQSGRPLKQEPTEMIQATA

SEQ ID NO: 53058 - protein, 386 aa, unknown
  TnpB Polypeptide
MIYSRKIRFYPTSEQKKHFNKFFGASRYLYNKTISLFNNKEINQKLSLSLPKIRPLVMKNNKDIKDDDIEAWLKDIPYDTRQLSIKNALSSLKSSFELLKNKKIKYFKHKFKSKKDRNQTFYVDHRALKNLNLFPTLLKEHSKLRVNKKYKKYENYIPDSDAIILKKGKKYFILFSKEKKFEKIEKKNDIISLDPGIKRFQSFYTPDGHVGELGNNKLKKKVLKIEKKIDKLKSLISIKKIKKCKSENKCYKLKTKVTNIISDFHWKISSFLAKNYKVVLLPIFKSKDLKKNLSPTNRRLIDIYSHYKFQQKLVYQGKKYGCKVIIVDEHYTTKTCGNCGNLNHFVGNSSVYWCPRCRIELDRDYQAARNILLKNSQGVINPLIDL

SEQ ID NO: 53059 - protein, 243 aa, unknown
  TnpB Polypeptide
MNQMRESYQVTWDFCRTKMMELKEKYHLQSIFALSRAEDIWAAIETILYSSGRKLHFKKRGDLPEIRAKQSTRGLVIDSSQSGLIVKYGKVTIPCKYKAKDLWLWDEEKAILAYLAEPELQDAHAVDQMSKGIITDTYRPCFASLVCKKIRGRLRVYVHITVEGKAISKRRKDSTPRHYYGKGNIGCDIGTQTIAYTSNTEVGLENLAERGNSIQHVERQEALILRAMERSRRAMNPNNYKRK

SEQ ID NO: 53060 - protein, 551 aa, Vulcanisaeta sp.
MLRRAVAVELEVTKELNKLLHSVETAYLNIVREVAEYAVTNNVTSAKQLHKLFYNKYRRKYQDLNSQLIIQAIRQASAVAKSFIERRRKGLVNKPYPEVRSVSIRFTEFTWNYEEFVKSVAPVRLAISPISTGKRGRGGRRFEAWLRLHKRFWLLWWRVLSGEAGLGRTLIIKRRANKWYAIFVFELKPREEEPKSIVAFDINENTVAVSRVDIIATINKIASWNRQYLTPELYMIRTDFGRLARRYGRVRRAIIERLKPEFALPSGKYVNITNTREFRKRVKHLRERVRKVGRVRYVANELTRIPAIIITEDLGDNPQESMIEDVGKDELRHRIKQTPFKALVRAVEDKALERGSKLFHVSSYRNSRVCPVHFVRLKETNDWHILYCPKGHYVNRDYASVMNMMWKATLEGWVKGVWWNMKKDMNWREYEGKSNPLVPYFMAKILHTTLKEFKASEESPAVLARGKPMNPAGGADEGWARKPPTPFQDREGSALILSNKEYGAPNTTLINDSLINYPKPIIISQSLHQGFPNRDDDERRPVTQQIPQCLK

SEQ ID NO: 53061 - protein, 374 aa, unknown
  TnpB Polypeptide
MKLIAQIKLVTDKEQVKSLLETMHKANAACNFISETAWTEKAFGQFRLQKLCYYSVKEKFGLTAQVAVQCIKKVSDGYKLDKKTKRVFRKEGAISYDDRILSFNLLKSQVSIWTVHGRKKIPFVCGERQKELLKTRQGESDLVYRKGVFYLFVTCNVDEPTENDFNDTLGVDLGVKSIATLSDGTEFSSLALNSYRLKRHKIRKSLQSKAHKGKRTTRKNCRRLLKRLGKKESNFATNVNHTISKRIVDIARAKGMVIALEDLKGIRQRTLKRLRKSQRGLHSSWAFYQLRTFLIYKARLAGVPLVLVNPRYTSQTCNVCKHIGHRKGKVFDCPNCGHHSDADLNAAKVIATVGSVVNQSENSAMLSCALHKAA

SEQ ID NO: 53062 - protein, 388 aa, Vulcanisaeta sp.
VNAGQVINLNNNAWKSYFELLKLYKQGKLPKFMGKPSPPGFWKDKVLGKRELRILVRNDRYYIEPINGGEGYIILKDWGLRIKYAGRIKWSGKQGTLVIKLEGGRWFAYVPITVGEKPARSNPKGYVKGIHEKIQIEKPRGGNKAFIDVGLNNLFAVVFNHSDTAILIKGSTIKAEYYWWKREIGTYQSVRDWLRNHGFESWRKYHTYYLHAVYKQHERLRHYYRTAIRFLARTMHGMGVDEVFIGYPYMVSQNDGNEYNTNIWWYAKIIKWLGEVLEEYGIKLNVVNEYGTSKQCSICNMEHEKGRVKRGLYICPVTGMKINADINAARNIAKRVGYETPMPRKILTYIVTSNGVKPITPKEGVTPETPTVKPDIHGGKGVIQQRLS

SEQ ID NO: 53063 - protein, 183 aa, unknown
  TnpB Polypeptide
MFEELRFEGDISSVTISRTAHRWFASITVETENTIAVDKNSTHPVIGIDVGINTLATCSDGSKYDNPRPLKRNENKLARFQRRLSKRVQGSHNWYKMKDKVARLHYRIACIRNDTHHKATTDIVNRVSGIGIETLKVSNMLKNKKIAKALSDSALGGFLSMLKSKAEARGIKPKEAGPVFCVQ

SEQ ID NO: 53064 - protein, 410 aa, Pantoea sp.
MHMLILKAYKYRLEPTDAQAQRLRQMCGCARFIWNYGLAETQRMLDAGQKLPTAFTLNKMLTAWKGLPELAFLSEAYTDNLQQKLKDLHGAWKRCFDKRLAAKKPVFKRKSQGNDSIRFVNFDKYCQLDRKRVKLPSGLGWVKFRQSRAVVGKIKNATVSQHAGGWSISFQVETEVEQPVHPSTSAIGLDAGISKLATLSDGTVFEPVNSFKKNQAKLARLQRQLARKVKFSANWKKQKAKISRLHVHIANIRRDYLHKVTTTISKNHAMIVIEDLRVSNLSKSAAGTADEPGRNVAAKSGLNRAILDQGWYEMRRQLEYKQSWLGGQVLAINPAYTSQKCACCGHTHKDNRQSQSRFICLECGYKENADINGARNILAAGHAVLACEVNGALMPSAAGTRRLSNQVATL

SEQ ID NO: 53065 - protein, 294 aa, Moorea sp.
MIILEFKAQGKNTQYQAIDEAIRTVKFIRNSCISLWMDNKGTGKYDLSKYCKILAKEFPFANELNSTARQAAAERAWSSISRFFENCKKKVPGKKGYPRFQKHCRFGKADAARTVEYKQSGWKLSPDKKSITFSDKKGIGRLKLKGTWDLWRFDKKLIKRVRIVKRADGYYVQFCISVEVNEQLTPSHSTIGLDVGLKEFYTDSFGNSEPNPRFYRAGEKILKFYQRRVSRKKKGSSNRKKAINRLGRQHLKISRQREEHAKRLVRSYRKKSAAFIVGRLCIKGDRFCCKAALF

SEQ ID NO: 53066 - protein, 494 aa, Acinetobacter sp.
  misc_feature (310)..(343): Xaa can be any naturally occurring amino acid
MKINKAYKFRLEPNEEQEVILNNLVGSARFVWNQILVVSFEMFAKNEFINATNLVNKITSLKKNPEYAFLANHSNAVSLQQKIRDLASAWTRFFNAKEHARLKENKRKPRKPKFLKLTDGSEIQLRPLMPRFKKKSDGYDSIRLVQFDKYCRIEGNRVKLPNGIGFVKFRKSQDILGTIKNVTISKRSGHWYISFGSEKELLENPVHPSKTAVGVDLGVKKLVTTSEGEVFNPKNSFKTNQIKLAKLQRKLSKKVKFSENWKKLNTTINKLHYHIANIRHDYLHKVTTTLSKNHAMIVVEDLKVANMSKXXXXXXXXXXXXXXXXXXXXXXXXXXXXXXXXXXKVTTTLSKNHAMIVVEDLKVANMSKSASGTIEKKGKNVKAKSGLNKAILDQGWSMLVDMLEYKQQWRGGLLVKIDPKYTSQTCSSCGHVAKENRLTQAHFECVACGFSENADINASRNILAVGHTVLSVEGGCGKGCPMKQKASEIREEVT

SEQ ID NO: 53067 - protein, 401 aa, Lechevalieria sp.
MFVAVGGQVRRAFKFRFYPTEAQAAELSRTFGCVRKVYNLALQARSEAWTQRRERVGYEATSALLTAWKRTEELAFLAEVSAVPLQQALRHLQTGFTNFFAKRARFPRYKSRKKSRASAEYTRSAFRWRDGVLTLAKMAEPLDIRWSRPLPEGETPSTVTVSRDAAGRWFVSLLCEDPSVTPLPVTDAVVGIDVGLDHLLVLSTGEKIGNPRHERHDRERLIKAQRALCRKQKGSNNRDKARVKVARVHARIVDRRTDNLHKITTRLVRDNQTLVIEDLAVSNMVGNHRLARAINDAGWRQFRQQLEYKARWYGRDVVVVDRWFPSSKLCSACGTLATAMPLHVRTWTCGCGATHDRDVNAARNILAAGLAVSVCGAGVRPQRKPPGGLSATKQKTLRREP

SEQ ID NO: 53068 - protein, 389 aa, unknown
  TnpB Polypeptide
MDDRHDTDAQAQDDADRRTEDLAAAYHGSIYKSVRDRRPVGYRNRNANKFEVHRGVYYTIRQEAPGLPASLVLTAKDMACEALKVVKFKEAPLRRTYAAMRYMRREARVHIPKGTISLASVDGRIKTTCHFPDAFRRYTLWEVRASNIMYDRKSREFFIGVMVKKEAPPKKDGKILGIDRGINKAAVCSNNVFFESKRINDVRGRYAKNREELQAKGTRSAKRRLKEMSGREKRFVTCEIHRMTKDIANMNYSVFALEDLSHINRQRRVTKDLKVKLHQWSYYQFEEFLSYKAEGRRKQIVFVDPTCTSQQCSRCGHIDRGSRVGGWFRCLKCGHQLDADLNASRNIARFGKIEMGRLHANQPNAMNDEEGCSGAQELSESSCKLRRCG

SEQ ID NO: 53069 - protein, 382 aa, unknown
  TnpB Polypeptide
  misc_feature (376)..(377): Xaa can be any naturally occurring amino acid
MISYKFKLYQNKKNKHLHGQINTAAGIYNHCIALHKRYYRLYGKSLNYYKLKKHVTKLKKMGKYAHWSRLNSQAIQNVVERIDRAYKLFYRNLKHGIKTAPPSFKKTRKYKSYTLTQTGYKFLDGNKVQIGKQVYKYSKSRGIYGEIKTVTIKRDALGDLYIIVVCNKEPSLHVIARTGNIVGYDFGLQTFLKASDGKDIVSPEFFKKSQDKIKRLNRNLSRKKKGSSNHRRAKRELLLAHRKIANQRKDFHFKLALRLSKEYDAICLEDLNIKAMQKLWGKKVSDLSHGSFVNILKYACSKSGSQVVEIDRFYPSSKTCSVCGSIKKDLSLKERSWVCDSCNAHHDRDFNAAMNILRVGASTLTGEVVRPAKAGXXYVNTL

SEQ ID NO: 53070 - protein, 270 aa, unknown
  TnpB Polypeptide
VIIINKNFLLKLSIFLSNISYDLLFKKRRLCIDLNKSLILFNRTDRIGDAIDMGIEKFLVDSDGRAVEYPKFIDKTIERIKRIQKDLSRNKKGSKNYEKCKKRLVKLYDKLNNQRKDFLHKLSKYYADNYKVIYVKDLNIRGLVRKGKANTLHRHILDASWGEFIRKLSYKVEGTGRAVVKVSPHTTSKRCARCGAIVDIKLSDRVFRCPVCGWTADRDYNASLNILKAGSGRPAVPVEREPLLQTLSYKDVVLGQNLSMKQEAPCVSKG

SEQ ID NO: 53071 - protein, 590 aa, unknown
  TnpB Polypeptide
MESTFGVTVNRKIMEVSDDDFLLIKRMIGTYCQVIDRFLEALKSEELRCYAAKKPYALRNELVSFLKERKKDPDNFPAVLRQLHEEHRHVLAQLLAYISTIPLQARHWKLALEEANVTVAGYWARVAMLAKKRIKHSPWYAKITDREKGYVMWLLEPSSPQFFEVLSGRTPRTSFNNLMKHGFDAKMIDWIVSTFPVAEFVKSLPPQPKPVIPESSIQTPTDDESKKLELSQNQLVQKVAKALKRVRHHESFPKVKKVNRIDFDCECWTWDTEFIRVDNEQKLVQYVELMTDQPRKRLHLRLKGNGALRGTLQLQIDRYGQLVLRVFVPSQEGKLREAGDILSLDAGAKAMVHDQYGNHYGEEIHLVTQKHLNRQNIRQAGRNRCFARKRVYEKRGTKASIKKAQRIKENNLGRKRFNKEEFRWKETCKCLINRVLNKLLKPYIVHDDGTVEGVQELVIEHLGKMRFNGKKKFSKKWRQLITSGWLRHYIHERIVFKCKKYGIKLTEVNPACTSVRCSVCGCVNNTTRDGDKFTCHNCGHTEHADTNAAKNILARKNWEEETLCLPPRRVREKLEEEFKKASGAQLQKQT

SEQ ID NO: 53072 - protein, 326 aa, unknown
  TnpB Polypeptide
LHSLAAKDGNGALRPKIDAAGRLVGLQWGTGFVIPVAAPAQSGRRGTKQQAELAEIEALIAAGKVRFTRIVHTVINGRNTYRMQLVMDGYPTPRHSTGGGRVSFDLGLNEIAVAVERSDGTRSGWVEPLAQGISLDTVRLRREQRHLDRQHRAGSPGCFNSDGTHMPGRCDWRRSNSVKRTRTRVAELHRRLAGHRKTLHGALANQLFSHGADIACEKLDYVAWQKNFPRSVRDRDLFSAYLGLHVRTGSDGSDRLDLQAARQGWLHRQDVDGRRGLAVAALSNRRGRRHPPTRRSVARINARRAAKRQSRLARTFTTNRPTAIAA

SEQ ID NO: 53073 - protein, 284 aa, Hydrocoleum sp.
MKSIRTKLKLNNKQKSLMAQHAGYSRWCYNWGLSLWNAAYRDGCKPNTRKLREVFTNHTKPLYPWMKNLSSRVYQYAFINLSEAFKRFFSFGMLRKQGLGKHPRFKKKGKHDSFTIDNCGKPIELNGWNHKLPFIGVVRTYEPIEATTKKITISRQAGDWYLSLSYEFTPTSTPKTIDVVGVDLGLKTLATLSDGKLFESVKSYRKFEAKLSRLQYINRNKIIGSANWRAAQLKIAKLHTKVANIRKDALHKLTTYLAKNHGTVAIEDLNISGMLANHKLAKIS

SEQ ID NO: 53074 - protein, 877 aa, Streptomyces sp.
MDVQAARRCRGKGKAPKWNKPDDGAVSVMVLPLAVTDPADLARLNSLYGAMWSIKRAVQRDARAKVDAYWAAPHERHQQGAKVVRQRLGLSRNGLERCAYAHLEASGHLRHHSSKALAMHIADEVWNGVSRHLFPDVAGRRSGRPKVGRYHDFTRISGRARSHTTDNKWETFRLVGTLTGHTLAYTDGGRSLGQPRRMPKPTAPEGRVRTGKVAASGVAGMRKATWWDHTGPLAVVFAGGSDSKRGEFVLPVRIPQQPGRRARVRHFLDDPGRWHKVDLVRRRKASAPGGWVYEAHLMVLGPGYSSPAVQEMRHEAARLDRIGGVDGNVSNLSVVSFPARLDGGTPVSTEVTLTDTERARLYKEAKERRGRARALERSRRATNRQQYGLSRKQAARAERRAAKGQEPKTVTVPGGARAARSHGVPQQAYRRDRLSARYREQRVRQAEAAASAAERRRHGARLVAREIIATHGPVLVVEDCDIRTWYRLWGRRLSRTTPGMLIAALDAECKAAGGRLVRASTWSTALSQHCLCGERVNKSLRDREHKCPTCGLVGKRDLVSAALAAFVRFRDVGDPKSAYLDRIRSRHAQIIYARALEEALRESTTPSPNAPRGAGRVAVPRQRRETSAPRTAGQRHRATPDEPRLARDHAGKPGPRPGSSPHLALRAACGSRLRIEAMAMTTTPTATGRTDAPTRREQILNEAARLFAERGFHGVGVDEIGAAVGISGPGLYRHFPGKDAMLAELLVGISERLLDGGRLRAEESDGDARALLGSLIDGHIDFALDDRPLITLHDRELDRLKDEDRKRVRQLQRQYVELWVTVVRELYPDAGESESRTAVHAVFGLLNSTPHLAALGRRPMEELLRKLAHGAFGSLGG

SEQ ID NO: 53075 - protein, 453 aa, unknown
  TnpB Polypeptide
VPARDSDPLQAFRKEIEKRKRSRRRTNRVALFPNRYEEETLFDIGLACARLWNELNYEKMNAFFNGELTPEKRDEINKKYYHRYKEVLGVNAGQVINKNDEAWNAFFELLKLRKQGKLPPHIKKISPPGYWKDRETGEKKIHILIRNDRYYLEPISENEGYIVLEDFDLRIRYVGRIRWEGKQGRLEIIYEAGRWQAYIPIEIGVDPPKSNLKGYVKPIYNDDEGKKKKRRIVNPRSIKQRDPIGDKEAFIDMGLNNLFAAVISDGSVMLIKGGSIKSEYCWWKREIATYQSIRDVLRRLGISTWIYYHEKYLDAMYKRDERLRHLYITAIRFLADELHRRGVRKLYVGYPIMLSQNNGNEYNTNIWWFRKIVLWIVDVFREYGIEVEIVSEDYTSKQCSICGNKHKNGRKHRGLYICSKTGKKINLDINAALNMARKLGHRMRIARKIESYL

SEQ ID NO: 53076 - protein, 381 aa, unknown
  TnpB Polypeptide
MPAGDEGVLTISIGVRVSPEPAGIELLRRYNVALNYAINKILSLNLKNIKDVHRELYRELREWFGLPSRIALDCYRDALANTNAWRNNPRRGRRPRVKKLSMLLHPGSGYRVKEGYVEIIGGIKLRIIGRNKRYDQYENGEARLVYRGDRMMLWISKKVPKLKPYKPRDTIAVDINERKVVYGDDKINKEIDTKIDEAHRWKKLAESLQKRYSSPRYTAWRRRKAILNRIRSYHRKARNILEDWARKTSLEIVRLAKKLGYAVAREDLTGLINSLRKIKNKDHRTRLIIMGYSRLRRWIDWQAMKHRVPLAIINPNGTSSECPKCGSKLEENGYRRLKCPRCGFEADKDIVGKLNIRRRALKILGISGEFWPPSLPPRCQM

SEQ ID NO: 53077 - protein, 417 aa, Kamptonema sp.
MILNYTYRLHPDSQQIQLLDEWLETLRVSYNYALRELKDWIASRKCPIDRCSLESEYIISADYPFPGYHQQQNNLPKAKKEFPRLKCVPSQVLQTNIRRLHDAWDFFRERGYGFPRYKKVGQMKSMLFPQFKTNPITGWHIQLPKLGKVGINLHRPIPNGFIVKQVRIVKKAMGWFAVIALYSDIEIPDPFPHGHAIGVDVGLLSYLATSDGFVEPGRKFFKTEQSRLKVLQRRLAKKQKRSKNYEKAITKVERQHNHIAFKRKDYQYKLAHKLCDMADTIFIEDIDFRIMAKGFLGKHTIDAGFGQFRSILKFVGKKRGVFVGEVDHRGTSQTCPNCRITARKELSDRVHSCPECQYEVDRDIASAQELLNRGLETYRGTPEKQEIGSQVEVSGAMCLDNWRRGAMPSRETGKPTA

SEQ ID NO: 53078 - protein, 374 aa, unknown
  TnpB Polypeptide
LRETTQQFTEAFNTVCHTGWKQGTGNAYTLHHLTYHRCKNALPALVSDLHIQARQKASEAVRSAITKMKKGRKVSCPQSVMCSPRYNLHTFKIYWDKGFISLSTSHGRMKIPFNLPEYAQYTAGYPTATADLIYRKSRFYLHVVFNLPDIPFVNNTQAIGVDLGVTRPAVTSDNYFHGNRHMKEIIKRIFRLRRELQANGSKSAKQHLRSLAGREQRFRRDCDHVLSASILNGIEPGTTIVVENLTNIRSHVKARRGEAKRRLHSWSFAQLKGFLEYKAEALGCQVVAVDPRHTSQRCNQCGYTYRGNRKSQSIFLCRKCGFHLNADLQASRNIRDKYLVGWGISPSDASTSTGVSSHPSQLGRDKLSALADGS

SEQ ID NO: 53079 - protein, 646 aa, unknown
  TnpB Polypeptide
MNNIKEKPPDFYKGVKVPIKYVLKHPEINLPKINDAVMRAHKIVIHGLMFTKLYLLNYYNTHNTIPEIDHSFVVNCLKIVCVKCGSGRLPSDETKELKDKLNSFYEEHYKPLRQDDNLKYTHMNTILDYLADDIITMYKNNIQLHYVEYVERFVNICWKKKYITDKIRKLKFTKKEKDNRINKLCCQLRKIKNDILNVETNEYKSHLVYHSWINNVKQHIIPNKIFAKNSIHYDIHCNQFDYLPCMIYMMKHIEQEGFSINNVFPSRSDVIPKHITLDSTTIVNILLRKEQGKKYDYLSKGNLKKRKSEIWDFFFRTQRKCFKREGYSFHHMIETDGVSCSILLIRDDLIDKFSKPKNTSISKELYIDELCDYTPLQNKKIVATDPGKCDIIYCVDGCCKDATTFRYTQDSRRKECKIKKYNKLILEFKKEQIDGKTITEYETELSQYNKKSLDINKYKDYIKKKNEINQKLFQFYERYIFRKLKLNGYINRKRNEQKIINKFKKIFGNPNEVVVCFGDFEQRKHMKYKEPIKGKGIRTLFRKSGYNTYLVDEFRTSCKCCNCEGGECKKFMIRKSPKPWKDYNALVHGLLRCKSGCGLWNRDVNGAKNIYKIVFNHINGLKRPLYLCRSNQSDTLHDVSNHNLPF

SEQ ID NO: 53080 - protein, 418 aa, Haloferax sp.
VADDYVRRTAITRLSVDGEQRELLEETISEWKRGCQIATDMAWGRCNAKSDVQPLAYDDVREHTGLGSQHAILATHQAAEAITGCLEHRSNGKTVSKPTFTAPTVTYDTRTMTLFDDDTVSLTTTESRVRCPLALPDADDGYQRQYLDSDEWSVTESTLTARNGDYFLHIGFRRPKTDTERNTAEDGTVLGVDLGIENLAVTSTASFVSERELTHNLREFETVRAGLQQTGTRSAHRTLEQSSGRELRYIRDVLHRASNAIVNEARRYECDVIAFEDLTHIRDRTGASWGHKWAFRTLYEQVEYKAESEGIAVKQVGSAYTSKRCAECGFTADENRLTRNEFRCLKCESEANADYNAAKNIGMRYVRRGQQSSRRTGDSQLALKSGTVTLSGEFTAHPDGFEAEFMDKPHPPRANPPG

SEQ ID NO: 53081 - protein, 278 aa, unknown
  TnpB Polypeptide
MASKHNALSCAVSYGRLMRWTVHYKSRWFAQLVLKGSPWHKPKHSVAEGQTAGLDIGPSTIAAVGDEDAFLARCCDELAPLDRYVRRIQRAMDRSRRATNPENYHPDGTVRSGAKRWRSSSRYQALSADLAEKQRRLAATRKRAHGRMANRILAMGADIKTESLSYEGFYKNFGRSIRDRAPKSFMACLRRKVANAGGQITKYATRTIRLSQTWVCGRLRHKPLSGRWHRYACGVSAQRDLYSAFLARYVEPDRLVIPRAKKGPGRVPNRSLGGRWQG

SEQ ID NO: 53082 - protein, 436 aa, Nocardiopsis sp.
MSRFRLYPTPAQEKVMLDHCAQARHTWNLAWQVSTTYRKGGPRLGRPPRFAGLCQMLTEVRRTPTTGLPKEEADYIGWVASGNADIQQQALKDFDQALANFLGGSHRHPKRRKKHRNEGFRVIGTSRVPAFTPDGEPVVNAKGKQVMHRTVVVHQLNRRWAQAKVPGCGWVKFRNTRPHLPGAKSLRITHRHGQWHVAFATIPDPTPAPGDGSVVGIDRGVVITAALSDGRVLNCPGLSKREAAQRRKHERRAARAPKGSPRRQAEHTKANRYRKKEADRRKDWCEKTSTMLARSFDTIRFEDLKIKNMTRSAKGTLAEPGRRVAQKRGLNRAILGQGWGLLRARTGHKAPGRVQDVPAKNTSLRCSDCDWIDKNSRKSQAEWSCTQCGFTCNADLNASLNVAAGQGASPGSKTCAGGTTRHTSASVREPQQLPLF

SEQ ID NO: 53083 - protein, 543 aa, Streptomyces sp.
VGELRSIAEPFVASGPSGVAVRTRLKGLTPGDEKVLRLVGAHLGSLASRDLKARCRDGLEHSGQAWAVRKRELTPASSSQWAGSITKATHDQWALARRCQSAHMQILEAGIRTIEARLSLPVGQRGTKKAPGGYRSRREWHAKARRLRVLQDRLAAARADREAGIVRVVRGGKRLARARHHLEEARLTESAWRVRWEAERWFCQADGESGKRYGNETIRVSPEGEVSIKLPASLAYLANAPHGRYVLACRVVFAHRGSDWADRVVADRAIAYRIDYDTGRGRWYLTASWQIPPTPTVPIEAALAHGVIGVDMNADHLAALRLDTHGNPVGRPRRIFYDLTGPAQHRDAQVRHALTRLLHWARACGVKAIAVEDLDFAAEKTREKHGRRKRFRQLISGMPTGRLRARLASMADATGITVIAVDPAYTSRWGAQHWQKPLTTTTRKTTRHEAAAVAIGRRAQQHPIRRRTTPPPQHRSDAVGHRTVQAESDVAGREETRPRIPGPRTRSVPPGRGANAGNQNAQHRPGRSAEHETWQQDSLPLSL

SEQ ID NO: 53084 - protein, 320 aa, unknown
  TnpB Polypeptide
MAIKTEIIRSLPEWAAIAAYHVRSVAIKDACKAVSNVKRKYMETHKISDVQFRSRKSIKQSCFLPKSAINEKGFFIKTLGVMKYAETLLAIEHDCRLVYEYGKWFVSVPFKRTIDIPKAKEPIVSLDPGIRSFQTYYSLTGTGSIGQNVWEKILGYCYQLDKLISRLSKAHGHRRQNLKRAAVRLRYRIKCLKDELHNKVAVWLCKNYKTIVIPEFSAMEMSAKHKRKLTRKTVRSMLNLGHSQFRNKLVQLAEVYGSQVIFVNESYTSKTCTACGHIHEKLGSSKVFKCPACGTVLSRDINGARNIMLRAMLEQTAGIN

SEQ ID NO: 53085 - protein, 156 aa, unknown
  TnpB Polypeptide
MEDLKTSKHLQRLYRKKNNCIKDYIHKMTRYITNYCVKNDIHTVVIGDIKGIRKEKNLGRKNNQKIHSLPYARIYMQLEYKFKMKGIRLIRQEESYSSQCPPQSEEVSCIYAEKRNRKKRGIYIVDTVIYNADAVGAYNIFEKNIMPYPAKKLICP

SEQ ID NO: 53086 - protein, 252 aa, unknown
  TnpB Polypeptide
MLLTHETTIVLNKNDANIVGHMCYAAYKLWNVCNYERNNYKNLGLEKYPDWYYQKSKHKDDLWFKSLPSQTAQEICKLLDKSWKSFYQLKESGGIENPGTPRYKKDKMPITYMQNGIQHENGSYNVRLSLPKKLKEYMAHTYDIRAAYLYLKNPVFSNMDIIKQIKIYPPANDGTSRILVIYEVEDVLPEEDNGHYLSIDLGLHNLMTCYDNVGKTFIIGREYLSLSYFYNKEIARVQSQWGRIQAAREWRI

SEQ ID NO: 53087 - protein, 374 aa, unknown
  TnpB Polypeptide
MKATVTLKVKLQTPEQVSQSLSETRKAYLVALNHTSQVAFEKQIFNSVALHHVTYREVRDLTKLPANLVCSARNVVAEAYKRDKEKRHRWKQTSAMRYDARTLTVKLDQQYATLTTLEARARVNLILADYHRQYLDGTWEVEPTATVSLKGKVWYLHLIVTKDVADSESDSVIGLDSGIVRIATVNTGKTFNGGIIKHIRERRFKQRRDLQSARHKSRSQRRLLKRLAGKEKRSVDWLLWNVANGVVGEALKSNAGTIAVEDLKGIRARIRVAKKQRLIHHGWPFSSLFLKIAHVASKYGVKVESVDARNTSRKCRCGHVDKANRTTQSTFRCVVCGYSHNADYVASHNVAVRYVEQRCESVTTRPKVRPSGHG

SEQ ID NO: 53088 - protein, 569 aa, Firmicutes sp.
MKKRKKNKKKLGSPDGETSYTVCGEFFPEVYPAIRSQKWSRGMEDPLDAEMRLFCSCTRWVFNRLQEGDSREALKKQGQGTFGLNSRYCDDTILKAKAVIESQKELLKLEIQETGTKLARTKKKLGWAKKDLDKAIEKNDPVKIEKFKRAIHGRRARVKKLADKFGELKVHQDNGAIPKVVFGGRALWKRVCKGKATREEWRQARQDRLYARGDETKGGNPNIKISWRNGEFFLSATISHLSEQKGTDSKSRPVMTRAPKVTGKLWLPEKQRLKVLELLLSGTSYTVELIKGRDDRYRAHITFTVAVPEAATNSNRGYLGMDTNPDGVALASISCTGQPEPWPTGFTAPYPKALHKFAGEFQVTVHPNGFLYIKIPELAYSRGYRRTYLTGVLAQVVVAIAKALGKPVAVEKLDFGKDRLDTNKKFNRMAANFPYKKMVEAVIRKAFKEGVAVKQVWPAHTSTIGYYKYMERYGIIIHHAAALVIARRAIGFRERITKELKQKIQAIREKLSQKVNSLPGEGKGMTRKVKQLVTRLGGKVSVHNGLTRFKQESFYSAWHDLKQLVLLSR

SEQ ID NO: 53089 - protein, 267 aa, Escherichia sp.
GNKYIPYGKMASWLVEWKNATETQWLKDSPSQPLQQSLKDLERAYKNFFQNRAAFPRFKKRGQNDAFRYPQGVKLDQENSRIFLPKLGWMRYRNSRQVTGVVKNVTVSQSCGKWYISIQTESEVSTPVHPSASMVGLDAGVAKLATLSDGTVFEPVNSFQKNQKKLARLQRQLSRKVKFSNNWQKQKRKIQRLHSCIANIRRDYLHKVTTTVSKNHAMIVIEDLKVSNMSKSAAGTVSQPGRNVRAKSGLNRSILDQGWYEMRRQLE

SEQ ID NO: 53090 - protein, 704 aa, Escherichia sp.
  misc_feature (382)..(382): Xaa can be any naturally occurring amino acid
  misc_feature (652)..(652): Xaa can be any naturally occurring amino acid
VKRLQAFKFQLRPGGQQEREMRRFAGACRFVFNRALARQNENHEAGNKYIPYGKMASWLVEWKNATETQWLKDSPSQPLQQSLKDLERAYKNFFQKRAAFPRFKKRGQNDAFRYPQGVKLDQENSRIFLPKLGWMRYRNSRQVTGVVKNVTVSQSCGKWYISIQTENEVSTPVHPSASMVGLDAGVAKLATLSDGTVFEPVNSFQKNQKKLARLQRQLSRKVKFSNNWQKQKRKIQRLHSCIANIRRDYLHKVTTTVSKNHAMIVIEDLKVSNMSKSAAGTVSQPGRNVRAKSGLNRSILDQGWYEMRRQLEYKQLWRGGQVLAVPPAYTSQRCACCGHTAKENRLSQSKFRCQACGYTANADVNGARNILAAGHAVLACGXEAGNKYIPYGKMASWLVEWKNATETQWLKDSPSQPLQQSLKDLERAYKNFFQNRAAFPRFKKRGQNDAFRYPQGVKLDQENSRIFLPKLGWMRYRNSRQVTGVVKNVTVSQSCGKWYISIQTESEVSTPVHPSASMVGLDAGVAKLATLSDGTVFEPVNSFQKNQKKLARLQRQLSRKVKFSNNWQKQKRKIQRLHSCIANIRRDYLHKVTTTVSKNHAMIVIEDLKVSNMSKSAAGTVSQPGRNVRAKSGLNRSILDQGWYEMRRQLEXFSIVLWHVRMRIMRPVINTSLTGKWLPGWLSGKTPLKRNGLKIRPHSHCNSH

SEQ ID NO: 53091 - protein, 528 aa, unknown
  TnpB Polypeptide
MQGKYMRGGSRMHTLRLKLNVDDNTAAVLEKRFRILAHISNQIRKKVKMMLSRLEDDKQYQQALDEYIKLKKLNSDDKQVQNDMKRLLKFMNDTREGIGLTKSGLEKYASVMQHQYKKNISSHQVQAEAAHVYKGVETVLFGSGKDVHYKKESDFRTMPGKDMSGVRIYFNQDDEKHQVDCYIKWNGLTIPVRYNISKSDMLGDKNYINEALSCGKIKYCEIVRLWFKNGWHYYVNLVMTENAPKKLVPGKSTLGIDEGPSTIAATSETSVFLEELSPECKKYNKQIASLQRKIDKSTKKMNPDRYNDDGTTKKKSKDLPAWKFSKTCIRNKAKIRELYRKKTEYTKCRHENLLNRMIKDASVFINEPMDFKVLAKRAKETSRQDKASVVTKSDGTEQTIYKYKRKKRFSKSISDRSPSLVISRLKQKCNQYGLVYIETDKWKYKASQYDHVLDEYIKSELSQRFKKIGDYTVQRDLYSSFLQSCMDTLEKPDRNKCIKLFDNFVKMQNELINEMKAAGISYPTCFGF

SEQ ID NO: 53092 - protein, 352 aa, unknown
  TnpB Polypeptide
MTVIQQVEKHIIKKSHPYYNMLCEYTHLAKNLYNHANYLVRNEFVETGKWLQYQELDKILKQDFDYPDYRNMPASQSAQQVLRLLETSWKSFFKSIKDWSKNKDKYSGQPKLPKYKPKDGKMVLPLTNQQVKVKGELLHFPKSFCGFTVKPRYVTLDNFEKINQVRVVPKGHSFCLEIVYSISVESDLLPDNGRYMSIDLGLDNLATIVTNVGLNPIIVNGKGLKSNNQYYNKKKAYYQSVAKQMNNQHYTNRLYRLTQKRNLKVEDYLHKASRYIIDFALENQINTIVIGNNKNWKQSSSLGKVTNQAFVSIPHQKLIDKICYKAQLFGIQVFLTEESYTSGTSFLDAELP

SEQ ID NO: 53093 - protein, 442 aa, Agathobaculum sp.
MKIVSSYKVAILPSNKISFKGTVTIYRKAIAFLIDVYNREWSKLSAIEKKYDRFVYAENLVHSTKNNKAKYDFDKLFYKFPSYLRRAAINAAIGAISSYITNYQNWEASQVGKPPRLQVDRNVLPVFYNVSMHTVDEAGTHYIKLYQNNDWVWVPLKLRQTDMKYINKYWSHVKASAPILEKRYGRWYLRFAFEEIQELSHTPIQNQRICAVDLGINSDAVCSIMTADGTVLQRKFINFAAEKDHLYHVLNRIKRQQRENGPRSIRSFWQYARRLNNELAIKIATAITDFAVLHSVDTIVFEYLDFKGRKHKGSKSQILSMWKRNSIQDYVTHKAHRCGIHISRICAWGTSALAFEGSGRLIRDDHNRALAVFTNGKRYNCDLNASYNIGARYFIRELLKTHPAKEWSDIKAKVPDVQRRTSCTLSTLRALVSVLSKPKSAA

SEQ ID NO: 53094 - protein, 385 aa, Agathobaculum sp.
MEKDNRAIRYRVYPTEKQRNILQQTFGCARLVFNETLLMHRGLYEAGMKPFSQMDMNNYCNRFMKENMPFLRNVDKFALTNSIYNAFAAFKNFFEGRNRYPRRKSRKDIFQSYTTNCTNNNIAIILHKKKSAFIKLPKLGNVPAVLHRLPKSNWVIKNATITKESGNRCYVSLLFEFEKKVPQNTALPTPENTLGLDYSSPEFYVDSNGNTAGVQHWYRLSQKRLAVEQRKLSHCTRGSRRYEKQKTKVNRLSGKIANQRKDFCHQKSRKIANSYAAVCVEDIDLRAMAQSLHFGKTVSDNGFGMFRNFLKYKLEEQGKHYIVIDKWYPSTKTCRHCGYVNPDVALGQKEWICPYCGVSIDRDHNAAINIRDEGIRQFYREYQTA

SEQ ID NO: 53095 - protein, 386 aa, unknown
  TnpB Polypeptide
MKARRAYRFRLEPAPEQEEGLRRIAGACRAVYNWGLSRRKDHYAEHGKTLPYAAQNLELTALKNRPGLEWLKEADSQALQESLRDLDRAFVNFFEGRARFPKFKRAKDERFAFRIPQRVKVEGEQVYCPKIGWIALRLSRPVEGITKSASFKRDAAGHWHVCLNQEFELPEVALPTPKAPVGVDVGLINFATLSTGESIPAPKFARKASQRQRRAQRIFSRRNKGSHRRKKAKRRVARVYQKIRRQRNDFVHKVTTGLVGRFDLICIEDLSIKGMARTKLARSVMDAALGETRRQLEYKTLWNYRTLVTLDRFFPSSKRCHCCKAVNDDLSLKDRVWVCGCGAVHDRDLNAALNLKAEGMRLVAVGQTDTLNARGAAVRPVMAGTR

SEQ ID NO: 53096 - protein, 406 aa, unknown
  TnpB Polypeptide
MLVKGVVYRLGDEIPPEAKFLLEDFRLAVNNAIRAGLQAKVTSRNALTKLVYKDFRQVHPKMYAQHLVSAFEVAGSVLKNHRRKMRAGNANHIPYVRRLFIKAENQAYKLDRMKGVIDLPIRAGCHVELKLVLSDYHRRYLDDRSYSLGSLTLFPDRVIIAFRKNAPRPYDPESVISLDTNERTLDGVLANNADIQPVNAEFSEVAIIQNRHHDRRRRLQKKKAHDRRTLRNLCSREGFREHNRIEYRLHQVANAVLSFAEGQRSAIVLEDLKGFKPSWNKELNRRLSLWPRRKLHQIIEYKAQWRGIPVVKVDPRNSSRTCPICGRIQESRMGADFRCECGWHLDRHINASLNLLQTAISKGLEVAGGLRFNPGAFQHDVMMILYDPVTGARSEPNGTSCMGAVT

SEQ ID NO: 53097 - protein, 430 aa, Noviherbaspirillum sp.
MQCYQAFKFELRPSGEQQRNMRRFAGSCRFVFNKALALQMERFKLGEKRLGYVPLCRLLTMWRKDPQTPWLADAPTHALQQSLKDLARAYANFFSKRANLPRFKKKGQCDSFRYPDPKQVKHDQANSRIYLPKLGWLRYRKSRDILGTVKQVTVLFSNGKWLVSIQTEREVERTIPDGGAVGIDLGIARFATLSDGTFYAPLNSFKQHETALRRTQQSLTRKVKFSNNWEKAKARLQRIHARIHNARRDYLHKTTTTISQNHAMVCIEDLQVKNMSKSAAGTNEKPGRAVRTKSGLNKSILDQGWFEFRRQLEYKMAWKGGWLIAVPPQNTSRTCPCCGHVSANNRKTQARFMCVACGFKENADLVSAINILRAGHARCACEVSGAARPPAAGTRRSDLFRISAGNAAVGIPGIKQGGCQGGAVGEFTAA

SEQ ID NO: 53098 - protein, 517 aa, unknown
  TnpB Polypeptide
MARKRPEHPPVHRTDLLPSNLTAGKRAKVLDLLAAYRRGAVLLGREQWRLFHETGRFNKNHDVDKTTFASVIGAANRVQMCRYQVVGQLHGWVSNRANEFRDAVNRSTLPPDTKHMLHVVNRMGAWFLRADVVMRETGEIIPEEVRRLARSIMRHVMSRHRRPDLSRISMRLDHRAARLAAPTKATQGGKVGWWVNLSTMKPGQKVAVPLLTYDYHAKRPGRVTNGVQVNLNREGQLTFGVVTDMGEACAKSRADYNGHGVLALDFGLSTLFATSEGQLLGQGWLKRLRAFDREISDIARGVQRRGGKPRDNARYREAVAALRGFLRTEIGRVLNRLVAEGRPKELVLERLDFRNPDLSRRMNAILRNCGRSIIQSKLADLEQRFGVAATEINPAYTSQTCSVCGYVDRRNRASQSRFKCLWCGNKMHADLNAASNIRERRARLIGSVFQSKAAVLADLVRGFGERRMRAYGPCRTGSRGAPADPRLTNPYFGGARPVASRVSSQTAALDLVLATST

SEQ ID NO: 53099 - protein, 409 aa, Mycobacterium sp.
VAHRYRLYPTSEQAAFMLGRHCADARYVWNLAVEQFNWGRSGRSAPGPAARQKQLAQARQAFEWLAAGSSSVQQQALRDFDRAAAAYFVGTHRRPTWRRKFVDEGFCIRDSRVESVNRKWAQVFIPKLGLVKFRLSRPLPAGKLGMARITCRAHRWHVAFPAPQPSVTAAPGREGRAVGIDRGVKTTLALSDGTMLRAPIMRRGEQKKLARLQRQLARCRKGSIRRDKVKAQIARLHARVADRRRDWVEKTTTRITAGYGVVAVEKLATRNMVRAPKPKPDPDNAGHYLPNGKAAKAGLNRGIYANCWGVIAQRLEHKTSASGTALVEVPAAYSSLECRNCGHSVKENRKSQTEFRCAQCGHEDHADIQAANTILARATRPALTSGPEATPVTAGVLAQARRPDDAQAA

SEQ ID NO: 53100 - protein, 376 aa, Serratia sp.
MKRAYRYRFYPTADQVELLAQTFGCVRFVYNSILRWRTDAYYERQEKIGYLQANARLTALKKEPECAWLNDVSCVPLQQSLRHQQTAFSHFFAGRAKYPAFKSKRHKQVAELTASAFKYRDGKLHMAKSKAPLDVRWSRELPSVPSTVTISKDAAGRYFISCLCEFEPVSLPISAKTVGIDVGLKDLFVTDTGFKQGNPRHTAKYAARLALLQRRLSKKAKGSKNRAKARLKVTRLHAKIADCRMDNLHKLSRKLINDNQVVCVESLKVKNMIRNPKLSKAIADASWGEFVRQLAYKAEWGGRSLVAIAPFFPSSKRCSCCGFTMKKLPLDVRKWNCPECQTSHDRDINAARNIKAAGLAALAHGESVNPESHQAA

SEQ ID NO: 53101 - protein, 368 aa, unknown
  TnpB Polypeptide
LALYRRSYNLAVERFRNDDYKDNDGKFINMRPAIKAQVEQEQKETGRAYNSLVSDNGTLAAATTFKAVCANNKKLKGAKSGFSEISFKSRKGAKHSFSIDRLPKGLNPCVKALGKIHLTEKVPNEAIGKSCIITFDKGRWFIQVQQHIELQTESQGEVKCVGVDPGVRTFATCFSQDDALVVGDNFAKDKLFPLMKRVDTLISQRQKVLNTQEGIAFSEMPQWARDRVIHFDREINRLKCKKDDLILDLHNRLAHELVTKYDVIFLPSFETKGMVKRKDKKVRTIRRNTCRQMLDLNHYGFKLRLKWYAKKYGRQVVDCNESYTSKTRTWCGTIDDKLGSSKIIKGHGFVVDRDINGARNILLKHLTR

SEQ ID NO: 53102 - protein, 392 aa, unknown
  TnpB Polypeptide
VLVLEYKAVAKKLQATAIDEAIRTSQFVRNKVLRYWMDNRGIGKKELYQYNTQLRAEYQFVNDLNSHACQASVENVERAINRFFDNCKNNKPGKKGYPKFKKHSRSVEYKVSGWKLHPSKRRITFTDNKGIGELKLLGKWDIHRYPAELIKRVRIVRRADGYYVQFCVKVENQQDAPPTTSEVGIDVGLEYFYSDSNGNHEENPRYLRKSEKDIKRVQRKIYKKKKGSSGRRKARGVYARKHLRVTRQRNEHAKRVARNLCLANARVVLEDLNISGMVRNHKLAKSISDASWYNFRQWLEYFGVKFGRQIIAIPPHFTSQECSQCGAKVYKSLSTRTHSCTHCGHIEQRDVNAAKVILSRANATGGHPGSNASEVVASTSVGRKTCKSKQRR

SEQ ID NO: 53103 - protein, 409 aa, Cenarchaeum sp.
MSQVTRQILYDLGRHYDQYVETERLKAAGLEPKVEFGEPHVKKHGSHISIPLTITHDNTTGQARFTDTRTIRIAKMGEIKLSREFPVLNYRYKTAQRFQLPDGGWRITISCNIPDEEPVVTEPTIIGIDRNVGNVTTPDWVIIIPEKVARRMNNAEKTASKAQKIASYRQKPEHTNRKPGSRRWAKAAKRAAKNKRKVANMRKTITHKISRIISNSATHAALEKLPIQNMVQSAKGTEEEPGKNVAQKSGLNKAILEQCWRLLAALLEYKLAGEIVWVAAAYTSQRCCSCGYMHEDNRDGRKFLCRKCGYTYHADCNAGSNIEDMGLKKLGRGAIHDQLKLRNLPDYTGSTHCTRGVWTWRVLALAPLGSVKHGPGNEMLHALSSSGMMCNCRCGNPRACSRNRWSQAS

SEQ ID NO: 53104 - protein, 368 aa, Microbispora sp.
MARIVKRAYKYRFYPTPEQADELARTFGCVRYIYNKALQERTRAYTQQGRRVSYVETSAMLTAWKKTPELAFLGEVSSVPLQQALRHLQAGFANFFAKRAKYPTFKSRKKSRASAEYTRSAFRWRDGQLTLAKMNAPLNIRWSRPLPEGAQPSTVTASRDSAGRWFVSILVEEAIRPLDPADNRVGVDAGITALVTLSTGEKVTNPTHERADRRTLARAQRALARKAKGSNNRAKARIKVARVYARIADRRRDHLHKVTTRLVRENQVIAVEDLTVRTMVRNRSLARAISDAAWRELRSMLEYKCAWYGREMVAVDRWFPSSKLCSACGTLQQSMPLSIRSWTCACGVAHDRDINAAKNILAAGLAER

SEQ ID NO: 53105 - protein, 308 aa, Ruminococcaceae sp.
MNKAFKFRIYPNEEQKAKIEKTFNCVRFVYNKMLEDKLAYYNETGKMLRNTPAQYKTKFPWLKEVDSLALANAQMHLQAAYESFFRNPTSNLPRFKSKRRSKKTYTTNCVNRNIVIQDSAVRLPKIGFVKMRMHRSVPENYKLKSVTVMRNSRGYYYASILFEYEPEQKEIIPKSYINLEYSDTDLYVDSNGHRIIYPKYIQRTIKKLRREKKKLSHMKYKSHNREKQCIKVIEVRRKYYRQRDDFLHKQSRQIANAYDCVCVKEPDNGVSNDFGWSIFKFLLQYKLLEKGKMLISADDKMLYSVQAV

SEQ ID NO: 53106 - protein, 314 aa, Escherichia sp.
VKRLQAFKFQLRPGGQQEREMRRFAGACRFVFNRALALQNENHEAGNKYIPYGKMASWLVEWKNATETQWLKNAPSQPLQQSLKDLERAYKNFFQKRAAFPRFKKRGQNDSFRYPQGVELDQENSRIFLPKLGWMRYRNSRQVTGVVKNVTVSQSCGKWHISIQTESEVSTPVHPSASMVGLDAGVAKLATLSDGTVFEPVNSFQKKQKTLARLQRQLSRKVKFSNNWQKQKRKIQRLHSRIANIRRDYLHKVTTTVSKNHAMIVIEDLKVSNMSKSAAGTVSQPGRNVRAKSGLNRSILDQGWYEMRRQLEYK

SEQ ID NO: 53107 - protein, 423 aa, Lachnospiraceae sp.
MEKGYGITTWRMTLRCRHPEWLAETEKLYRQVCLFYYHLILEEGILDQKGSIQQLQREAERLTIRGRDKKEPDRPLPFEKVPSYFRRSAINKAIAAARSQRAHQYDGRSEALEAPVTFFKGMYRELTERSVELKVWTGEVWRWMHCRLKGKSFPEECQLMSPSAVCEYGRWMFHVPVRQETEDARDIRSRMAAEERICSLQFTNTDAFAVCCVLDGSGTLLKVRFIGGGNEYRHHCQKLEEKVKRSWKSMGFGEQGPVKGERPEGQPNKKYFLHLKHLGEYYGHKASREIVEFCREQGAKVLVMPEYEETYSRMVQVKAGNYSPLHLGNRIREYVKYKSWAAGMVVVSVSAAVTSGRCSECGEPVKKEKNSCGELVVCAKGHRKNRFVNTGVNLGRKCLEGFGKKNSENGKKQFSEKMDSDKK

SEQ ID NO: 53108 - protein, 301 aa, Sarcina sp.
MQITSSYSVEIRKQGLCFRKTFEVYRSAAACLITVFDSVWGELEGIGNAKRRFNTAEHLVHSTKKNAARFDFDRRFPKMPSYLRRAAIQFALGAVSSYRTRLKAWETASRREEGGRGPGSARTGRPVLESRNHAMPVFYHDVMYKAGGTGSDQAKLKLFDGRDWVWREVRLKHTDMEYLRKHWCGKKASAPVLEKRYGKYFLRFTYTEETKLPERPAGEQTVCAVDLGINTDAVCSIMRSDGTVPARKFISFPGEKDHLKHVLGRIRRFQREHGAAKAGGFWAYAVRLNEELSKKTAAAIV

SEQ ID NO: 53109 - protein, 364 aa, Burkholderia sp.
VTGMILVYRYRVKSLNGLLNQQSRAVNYVWNFCNDTQKHALKWNKKWPTGFDLNVLTTGSSKAFGIHSGTVNATCEQYAKSRSQRRRPYLRYRGRRSLGWVPLKGRDLKREGDAFRFAGNTFRVFNSRPLPDGKIRDGTNFAQDARGNWFLNIVIEMPDVPARPVRSGVGIDLGLKDFATLSTGEKLPNDQFGRRAADKLAKAQRARKHKRHIAKLHAKVANARADFQHKLALDLVRRFDYIAVGNVSAVKLARTRMAKSVYDAAWSSFRDKLRYKAMAHGATFEEVDESGSTQSCSSCGSKDSTTRPKGIAGLRIREWTCSGCGVVHDRDTNAALNILRCGRASPGVGIASLWGGEDVNVAPD

SEQ ID NO: 53110 - protein, 374 aa, unknown
  TnpB Polypeptide
VEAAFKYRIYPNQEQITLIQKTFGCARFVYNHFLEERIKTYKETGKTPTFFDQSKEFTIYKEDKPWLNEVDLTALRYSLKHLYQAYQNFFRRVKNGEQPGFPKFKSRLDHNQSYTTGGCIRVDDKKIRLPKLGWVKAVVSRPIQGRILNATVSQTPSGKYFVSICCTDVEVPQYLPTGKQVGLDLGLKNLVTDSDGNMYENIQALLKSERKLVRLQKQLSRKNVGGKNYEKARLKLAKLHEHIANQRLDSLHKLSTMLVREYDTICIENFDIKKMLKDRRYAKAISDASWGEFIRQLTYKVQFHGKELIQIDRFFPSNQVCSICGFQNKTLHDSTVAKWTCPNCGAVHDRHINSARVVLQEGLRQTYVQNALAG

SEQ ID NO: 53111 - protein, 460 aa, unknown
  TnpB Polypeptide
VHSVTVRISSDLGVTQVVKLRLNPSGAQVELLRGYCGTARAAYNTLLFQVKANLGQRAAEKTYGVADQDLTPALSWHKFGLEKLLRANRDCWLPWHAQVPYLVLDRQAHQLAAGLAKWKTGSSQFPRFRKKRGVDAGLVPVTFKEKDSVWLTDGGRALALPISMVTRREFGSAASAQLASVPVVKDNRGRRAAKLIAGGRGQVQEVTFSFSGGYWWASLRMRVLPAAKTQPTRHLVRSRAAAVGVDAGMGRHFATLDKPLSGVTDVAGHIDAPLFLRRALKDLAVAQRAFKRTIPGSRRHAKALARVQKLHGRVAARRETWQQHLAIALTEHAQAVGVETLNLRGMARKTKGFRFSRSVGDNGFGLFVELLTRQAAKRGSAVVKADRFYPSSKTCSDCAAVKTKLPLSEREYTCTACGLRLDRDVNAARNLAALARTELARTAGSGIPPGSAGRDLVLAA

SEQ ID NO: 53112 - protein, 397 aa, unknown
  TnpB Polypeptide
VKLETTDAYLLLRTMEAANECVRWIGDQAWESKIFGKHALQKLTYVEARRRTGLTAQVTIHCIYKVANAYRSAFTMHRLRTTVVKRQNKKLAKLRRPLKPLPVMEPVGFHGTGSIAYDDRILRWIPAERAVSIWTVEGRRIIPFVGGEHQYALLATRKGESDLIYQGGKFYLAATCDAPEAPMIAATEFLGVDLGVANIASDSDGKRHSGSEVKSVRYRHRRLRRNLQKKQTRAAKRRLKQLAGKEARFAKHTNHVISKEIVACAKGTGRGLKLEDLSGIRDRITVRRRQRVVLHSWAFHQLAYFVAYKAQRAGVPLIFVDSRNTSRECAECGHIAKGNRPNQSTFRCLACGHAAHADTNASRVIAGRPACKPGEGIPARLSELCGVSHGSVKSPRL

SEQ ID NO: 53113 - protein, 397 aa, unknown; identical to SEQ ID NO: 53112
  TnpB Polypeptide

SEQ ID NO: 53114 - protein, 402 aa, unknown
  TnpB Polypeptide
MRLTERIQVKYSFELSKLCHLAKNLYNLANWYVRQDFFNLNNLLTYYDLDFILKDKEAYRNLPSQASQQILRLIIRNWNSYFRALKEYNRNFKKFKKKPRIPRYKKKNGESVVFFTNQQCRIKQGYLQFPKRVNIYPIQTRITEKLKEVRIIPLGVKYKIEIVYEKEEQELELNQNHILAIDLGLNNLITAVNNNGCRPFIIKGGIVKSVNQYYNKQLAYYRRIENKKGNFNDTKRIQKLHLLRNNKLTTIFHRISKSIIEYCTLNTIGTIVIGYNKEWKQKINIGKKNNQKFVQIPFLKLVRQIEYKAHLKGIHVLTVNEHYTSKCSFLDNEPIGNHETYIGKRISRGLFKTSKGIVLNVDVNGAYNIMKKAFPNAISVDGIEAFGLMPQIIQQNIVDTII

SEQ ID NO: 53115 - protein, 353 aa, Halanaerobiales sp.
MRLSFKFKPKLNHKQLDIINELAWHTTKLYNTVNYELRNNSDLKAIYTELEIQFKANWHNDYLHSHNRQQALKQLAQDWKSFFASLKDYKKNPQKYKGQPGPPNFKHMDSNPCEIIFTKPGIRIREDKLLLSLSKKIQSKYNVKSLNFELPEAVQSIVDLDAVQQIKIKQDHISKKWYLLIIYKVKEAKESKKSNIMAVDLGLDNLAALTFKNNSECYIINGKTIKSKNAYFNKEIAGLQSIRMKQLATSKIKDTKQIKYLRLKRRDYIRNYLHKTSWKIVDLAVENKVATIVIGDIKNIKQSSKLKSFVQIPIQRLKELIEYKAKLKGIKVVEINESYTSGCTKDFNLNYAM

SEQ ID NO: 53116 - protein, 457 aa, Verrucosispora sp.
VRTVQAYRFALDLTPVQERAVLAHAGAARVAYNWALARVKAVMDQRAAERTYGIPDELLTPSLFWSLPALRRAWNQAKAEVAPWWGEVSKEAFNTGLDALARGLRNWADSRTGRRAGRSVGFPRFKSRRRSVPSVRFTTGTVCVEADRMHVVLPRLGRLKLHESARKLARRLEAGTARILSATVRRDGGWWHVSFTVEVERTERAPAQPGSVVGVDVGIRHLAVLSTGELVENPRHLTCAQQRLRRLGRALSRKTGPDRRTGQRASNRWQRAAARLGRAHARVANLRRDGLHRLTTRLAATYGTVVVEDLNVAGMLRNRRLARHIADAGFAEIRRQLAYKTSWNGGRLVVADRWYPSSKTCSGCGAVKTKLALSEREYECQACGLVIDRDRNASLNLAALAAATAGSGPAAGRGANQKTRPRGQMAVKRQPGTASATQTGTVPPQGGTADRVLTKAH

SEQ ID NO: 53117 - protein, 401 aa, unknown
  TnpB Polypeptide
MKIIRSTQCSLKFSTLAKRQRLQSVLAEYGKACNLFIDAFWNDCPSKSELLKDIVDIPDTWLSARLRKVCAREAIDMIKSSQEKTANEKKRLLAKAEKSKRDSDTEKWKQKAENLQPVKPKHKGNRMNVSSTIADLQTSKTNEFDAWLHLASIGNKIVMNLPIRFHKHFNKWNLLGKRLNSYIITKDSVQFCFEIETGEKKQGKNAIGIDSGINALASFSNGEQLGRDIKDCVNRINRCQHGSKGQKQARRALKQRMDEVAKQIVTNEKIDLVVVERLNNLNHKTKERRRLSKNMRRVIGSWVWRYWLNRVQMGCEENRVSLRTVPCYNTSITCPECGHADKKNRNGEIFLCLGCGHKGNADTNAGRNILNRFFTGPYGAGFKPVSLRIFGALPSLSEARA

SEQ ID NO: 53118 - protein, 369 aa, Acidimicrobiaceae sp.
  misc_feature (18)..(18): Xaa can be any naturally occurring amino acid
LGREPRQEGRRHRGRPGXSSTYNDATQRLAKAIGNWRKGRAKFPTFKSKGQGGSVRFMGPAVRLVDSHHARISRIGEVKTYESTRKLFRHLERGTGRIVAATVTQRCGKWQVSFTVEVTRQVPATRAPGKIVGVDVGIMTLYTGATADGVHVLDVDNPRHFVRAQKKLARAQRIAARRQGPGPGKVPSKRWRKANGRVQKVHAGVANARKNLIHETTSMLAKSYDVIVIENLNIKGMVKNPSLAKHIADAGWGEFGRQLEYKTAWYGSTLVRVDTFYPSSKTCSQCQTVKATLSLEMRMFHCEACGLVIDRDLNAAINLARKGLPGTSSGTGRGGEVSPAQQKLAATAHPDEASTDPSRDVDGVGDASA

SEQ ID NO: 53119 - protein, 368 aa, Burkholderia sp.
MILVYRYRVKSLNGLLNKQSRAVNYVWNFCNDTQKHALKWSKKWPTGFDLNVLTTGSSKALGIHSGTINATCEQYAKSRSQHRRPYLRYRGRKSLGWVPLKGRDLKREGDAFRFAGNTFRVFNSRPLPEGKIKDGTNFAQDARGNWFLNIVIEMPDVQARPIRSGVGIDLGLKDFATLSTGEKLPNDRFGRCAAEKLAKAQRARKHKRHIAKLHAKVANARADFQHKLALDLVRRFDYIAVGNVSAVKLARTRMAKSVCDASWSSFRDKLRYKAIAHGVTFEEVDESGSTQSCSACGSKDSTTRPKGIAGLRIREWACDGCGVVHDRDTNAALNILRCGRASPGVGILRLEAGGGRQGLCHESLLCGR

SEQ ID NO: 53120 - protein, 314 aa, Bacillus sp.
VKALLVNKAYKFRNYPNKEQEILIVKTIGCSRFVFNYFLGMWNDTYKETGKGLTYNACSAQLPQLKIELEWLKEVDSIAIQTALKNLADAYKRFFKKQNDKPRFKSKKNNVHSYTTKHTNGNIVIVDNKIKLPKLGFIKFAKSREIDGRIMNATVRRNSSGKYFVSILTEVEIQPLEKADSAIGIDLGTTDFAILSDGHKIDNNKFTSKMEKKLKREQRKLSKRALIAKNKGIHLLDAKNYQKQKRKVARLHERVINQRNDFLNKLSTEIIKNHDIICIEDLNTKGMLRNHKLAKSISDVSWSAFVSKLEYKAT

SEQ ID NO: 53121 - protein, 390 aa, unknown
  TnpB Polypeptide
MIKTIRVMLIPNNRQRSKLFRYANAARFAYNWALEKQQENYKDGGKFLSDVDLRKEFTKMKQTQEYIWLNTISNNVTKQAIKDACDAYKKFFKGLTKFPKFKSRKKTTPSFYQDNVKIQFSDTHVKVEGFATSKKKNKQKLNWIRLAEHNRIPTNSKYNNPRIKFDGLNWWITVGVEYPDSITTPQNKGVGIDLGIKDLVICSDGNKYKNINKHHEIKQFEKKKRRLQRSISRSYEKNKKGKEYCKTNNVIKKEKLLLKATHRLTNIRQNYLHQITSEIVKREPSFICLEDLNVNGMMKNKHLSKAVQEQCFYEFRRQIEYKAAWNNILVIFAYRFFPSSKLCSSCGAVKKDLKLSDRIYKCKCGNVIDRDYQAALNLKIYGENVLKSVA

SEQ ID NO: 53122 - protein, 413 aa, unknown
  TnpB Polypeptide
MKTTAFLTFHVDTSALDWLMREFRLLVNESIRTAVTLKLGSRYRLARASYADLSRRHSVYKQYIPSAFGVALRAVKGYRRRLRKGLRASIPFAHRPMVEAENQSYRLDRRSGMLRIPIRAGQHVVLSLPVSRWHEKYLTDPAWSLGALTVVPGRVIIAVRREAPNRYDPESAIALDMNEESLDEVFSDKNHAKLIRVPLKDIRTIQERHHRRRRSFSARKSHDHRVLSKLLAKEGVRERNRVDSRLHFASKRLVEFAAAKRAAIVLEKLTFHGAGGPSHNWKRRFTSWPRGRLRRLIEYKANAIGVPIIFIDPHYTSKTCPACGAQRRGRVGRMFECECGWRMDRQTNAGLNILKRALASNEALARAVRFQPDPLRHDVVISLYDLRVFREVARGESSEADLTKSLTEARQGN

SEQ ID NO: 53123 - protein, 464 aa, Clostridioides sp.
  misc_feature (283)..(284): Xaa can be any naturally occurring amino acid
VEKAYKFRMYPNKKQQELINKTFGCCRFVYNKYLAKRIEVYKNDKETFTYKQCSSDLTNLKKELKWLKEPDKFLLQNALKDLDNAYKKFFKEKAGFPKFKSKKINRFSYKTNFTNGNIMYFSQHIKLPKLGMVKIRDKQVPKGRILNATISKEPSGRYYVSLCCTDVDIEVFENTNNQIGLDLGIKEFCISSCGDFIENHKYLKKSLNKLAKLQRELSRKTIGSLNRNKARLKVARLQEHIANQRKDFLQKLSTKLIKENDIICIEDLQVKNMIRNRKLSRLXXQFKINNLCKNRRNYGDSLWRISKTYFSMQNSMKQEPCDFSHGRFRFGGEIIRRNEKTKFDWLSRDKEQVEKYINDPFCGVVCSCGFFYDLVQGLKEIEDKENLKKVPLDIPIYIISGDKDPIGKNGKGVLKLRDRYIKLGVKDVTCKLYKDGRHELLNEINREEVFEDIICWLNNKIEIL

SEQ ID NO: 53124 - protein, 388 aa, unknown
  TnpB Polypeptide
MVSRAHKIKLKPNKAQAVMLSKTAGTARYAYNWALAETYKGWKETGKNPSVYELDSRWTTEKPEWASETARTSQTRAILNTKSAYKKFFENLKAGVYAGKQVIHPSFKRKGVHDSFYVDNAHAKLCGKHIKLPRVGSVRMTEKLRYSDCKIMSYTVSHEADGWYVSVQVELDEEVRSSSDSFVGVDVGCKVLAIASDGTQCKTPGMLKDLERQLKRKQRLLARKQKGSKNRAKARFKVAKAYKRISNVKQDAIHKFTATIAKNHGVVVIEDLDVKGMKEGNNKYVRKGVQQSCMSEVHRQLMYKCNSYIKVDRYYPSSKTCSSCGFHKADLLLGDRTFVCPSCGLTIDRDLNAALNLLHEGIRIYTVGHTGSACGEVDGTSVKQEVLL

SEQ ID NO: 53125 - protein, 368 aa, Bacilli sp.
MKKEILRAYKFRIYPDAEQKDNLSRTFGSVRFVYNWALDLKTRNYKQDIKLNAGQISAAMTALKKTEEFCWLKEVSSVCLQQSLMNLDVAYKSFFKGQSKHPTFKKRSNTQSVRYASSAFTFKDNKLTLAKHKKPLKMKITREISGDISSVTVSKTPEGKYYASLLVKEHYKPKSKTAKQLGIDLGIKDFATFSDGKRVANPKHLLSSMKKLKRLQRHLSRKVKGSKNRDKARIKVARLHSKIANQRADFLHNLSTQIINENQVICVETLSIKEMMKTKHIARLVGSLGLNQFINMLRYKSEWNERELIQIDRWFPSSKTCFECGTVNEDLTLKDRHWKCACGAVIDRDVNAAKNILKEGLLMLHSNT

SEQ ID NO: 53126 - protein, 349 aa, Bacilli sp.
LKTKGNWMYFAKELFHSLQTDPKFSYLSDIPYQIKKLAVEEAFKAFSTNIKKIKQTGKLFNLKFRSRKDPVQSFAAVSSAIKDKGLYVRMLGDMKLAEPLPNKPKDSRLVKENNQYFLKVPYEKEVTFSESQGKCIALDQGLRTFLTGFSETEVFKIGNQCLSKIARLCISMDKLISKMKKEKLHLKKQRMKKALMKIKAKRMNLIDELHFKSINYIVSNYDIILLPNFNVSDMVSKTKRKLNSKTVRNMLNLNFYQFSQRLIAKAEVLGKQVIRMSEAYTSKTVSWTGGVNDKLGSSKVVKSGTVRMDRDINGARGIFLKALVDSPSFLNERALSSNLAADLADLDQV

SEQ ID NO: 53127 - protein, 192 aa, Okeania sp.
MRYLNVHQGQALRDLDRAFKNFLTIPNRRFPVFKKKGRKDSFYLEGSIKIIQGNYIQLPRIGVVKTYCILPSVPVKNVTISKKADSWYISFKYNFESAPIEKERETIGVDIGINTLATCSDGSKFANVKAYRQAKKQLVRHQRAVSKKVIGSKNRRKAVKKLAKVHKKVANIRADALHKLTTWASFKPQPPK

SEQ ID NO: 53128 - protein, 440 aa, Bacteroidales sp.
MHVRQRIEIKPNNKQKTYFLKCFGLTRLAYNWGLEEWERMYAAKENPKWGEVRAHFNAIKHEDFPFVEEVSSHVTQEAFRNLGKAYKNYRISIKKKDWMYGKPIKKKRNRSKGSAYFGGVDCKLSDTNKNSTAFETIQHNLKNKRQYLFIPRLGWVKMCERLRYEGKLEHVIVRQHADKFYATFCVDVTTQEYLAHHHPATDKKLAVGIDVGLHHVATLSDGMCIEHRPSREDGRALIAKRARQMNHHVHANTKEERKAGMKSSNNFKKAAHRLAKTYRIVGDQRRDYLHKLTTVIVRHYGHICLEHLETSTMGQTCKRKKVKRKRESDVTDVAMYSIRKMIEEKAESYGRKVTEVGQYYPSSKTCSNCGYVNAKVDQQTKTWTCPKCHTRHNRDYNAAVNMKKQIGVACPEFTPEDLKALRLDFKKNGVATSEVETGMG

SEQ ID NO: 53129 - protein, 413 aa, Microcystis sp.
MKLVQKHLIKFNHKNYSVIDKLGFLSKNLYNCAVYLNRQGFFSHQPFLTMTELHHALKMSPDYQALPAKVSQLVLKKQVEKTFKSYQKATEQYKKSPDKFTGEPKLPRYKDKEKGRNVLTYNYQAISKKALKQGLIKLSGTNLEFKTNLNKVLEVRIIPKLGAYCLEIVYEQPSSSSQEGERYAFIDLGLNNLAAVTSNIPEFQPTLVCGKALKSCNQKYNKTLAKLKSELPSLQKTSKRIQGLTLKRNCPVDYYLHTASKYIIDKLLAHQINLLVIGHNQGWKQNINIGDRNNQSFINIPHSRFIEQLTYKANLVGIEVKTTNESYTSKCSFLDLESIQKQKSYLGKRIKRGLFRSSSGYFYGADINGSLNIARKVVGEAAFSGNPIERFVVNPVRVKAYKANSRCNICLQN

SEQ ID NO: 53130 - protein, 432 aa, Thermoprotei sp.
MTRVARTVIVKSVRLPRKVFRIFMELEGMYRNMVEQLILYAVRNNIKSFTRLKASKYRELRSLYPQLPSHYVYTACHDASTRAKSFLRLKKLGLAEREYPEVRRVSIWLDDHLWKSIGLTSIRIATHKGWVTVDFEPHKQYWKYANREWMLASEAKIKLDRRNRQLVIYLTFVKEVEEFRPRGYLSVDVNENNVTMLVDGIAYLFETNTEKLILGYYYRRKSIQERYDKLYGKRSRIKRKIMRRLNERMKKQDIKWKIANLIVKTAYEKQYAIVLEKLSKRVANNMIKRIRDKQLRHRIFQASFRGIQRAIEEKAREYGAPVIYVDPRNTSKLCPIHGILIIYNNGSRIGKCSKGGELWHRDVVACWNLLLKALRGDGSYAPSPAGLNVDVSPMPLGMKATHDPIRVAKPAWARWKSLEVTLNNPNLQGMTL

SEQ ID NO: 53131 - protein, 402 aa, Oscillatoriales sp.
LPSSTYSVADSTDSGNTNLVSKKIRVYPETKLAAVWRTWIAASRWCYNQAIATLKTQKIGKYDLRKQIMDAAPEWIKQQPYNPRQLAVFQAFEAHKAAKKSGGSAKFRTLRAPSQTIRFQTDNWKTDTFYPQATKGLNFKSAEPIVEVMQHEPSLSLINGQWFISYAIDEVKPAPSNSGLVIALDPGVRTFMTGFDGQEILEIGKYDIGRIYRLARHLDKLMSRVGHSKGRSFKRLRYCLRKAASKIRIKIKNLVSELHKKTAKYLCHKYKVIFLPTFETQQMVKKGKRRLNTKTARAMVTLSHYKFKQTLKHQAAKYGCAVVDVTEEYTSQTCSKCGRVHTKLGGNKYFTCPSCGHKLDRDLNGAFNILLKALRDTSLTGIITDFQVLPYSVISDCRELPG

SEQ ID NO: 53132 - protein, 376 aa, unknown
  TnpB Polypeptide
MISRAYKFRIYPNKTQAELIEETFRACRYVWNIALECKKVEWDDRGKNVSAYELMKLLTGVKSVCTWLYDVPNSAMQQSIRDLDVAFKNFFRRVKNGEKPGYPKFKKAGCSFQSYRTPAAGNAVRVIDDRHVKLPKLGKVKCRITQTPQGHLLSATVSRTPSGKYFCSITCENVPEPYMEDGTLDVMGVRLGVRDLITCSDGVRVENPRALSKSERKLRREQRRLSRKKRGSANYRKQKQKVALVHERVANQRRDNIHKATTRIVRDSKAIAVSSNDVAGMMRSKKFSKAVADASMSEVKRQLAYKAQWYGRDLVEVDASTAFGSTCGRCGAQAELKVGTTRWTCPKCGAHHDYALNAARNIAAIGMAEIRRGGRP

SEQ ID NO: 53133 - protein, 401 aa, unknown
  TnpB Polypeptide
MKALLKAFKTEITPTREQKEKIISSIGIARFLYNQYIAYNKKLYRMYQRGLLDNHQKHFVSANDFDKYVNHKLKLNLPWINDCGSKARKKALVNAETAFKKFFDGLAGFPRFKRKSNQDVKLYFPKNNKGDWTIWRHKLTIPTLKQVRLKEFGYLPVGTVVISGTVSCVDGRFYVSVVVDIDEKSKHNKDLETSYRTVTDGIGIDLGIKDLAVVSDGRKFKNINKSSKVKKLEKRLRREQRRLSRKYESKKKGGKTATASANIEKQKLKVQKLYHRIKQIREDYENKVIQEIVKQKPRFITVEDLNVKGMMKNRHLAKAVAAQRFNNFLVKLKRKAEIIGIEFRVVDIFYPSSKTCHGCGHIHKGLKLKDRVYVCPECGYTKDRDFNASLNLRDAKKYRIA

SEQ ID NO: 53134 - protein, 437 aa, unknown
  TnpB Polypeptide
MELVRSEDTKAKIRASMSATKARRQTQVCRVFELKVSIRHNPKAVFEKLSNCFKEAKWVINDMLSLSKDNPDNSMFDYKYTEHKDVVHYDKHKNPIESTITLPSVLHRATVAQKKTDIVNLAKAKKKGIKVGALKFKSEVNCLPIITGFTQILDGCRITIPGFRKLRVHGINQLHQFEKFELADAKLIRKASGYYVKISVMLPKEKRIPTNRNVGLDFGIKDSITTSYGDKYKCNVRETDRLKFLSRKLNRRGKKKNEKGSKLYYRCLRQLKREYEHIANVRKDMANKIYHKLVTDYDVIYFQDEQIKNWQKGLFGKQVQSSCLGALKQRLVALEESGRSFKISKWEPTTKLCPQCGASNILSLSDRIYKCECGYEMDRDIHSARLVLMIGSSKRAECLEQASPERLPLLQENQQIASAASMTCDGKTRSSHPLGCG

SEQ ID NO: 53135 - protein, 445 aa, unknown
  TnpB Polypeptide
MQTSAQKIMLKTDSSIAHVLNRACGCARYAYNWARERWFEKKKAGQESVTCAELRKEFNAEKLDWMYESPKGSMDQAIKNFCQAKKRHYENPKQFGFPKRKKYTSKRSFYIENDKARIIDEHSIKLPMIKTPVKLAEPVCRECLVGKINNYTISKESNGEWYVSISYTYDETAIHNKVTGNGIAGYDLGVKTLITKHDGTTYLNAKIFRKHAKALKRYQKRMSRRRKGSSKYKRVKKLFNKKNSYVANYRKDAIHKATTEMVRDNMVIAIEDLNVKGMMSNHRLASAIADCGFGMIRRFLEYKCKKLGTLLLFVDRWFASSKTCSGCGGRKADLSLSEREYVCEECGLIIDRDVNAAINILAEALFCELKIRFNTDVARRKFTPADLVALATTLLGRGETTEETPQLCGTDAQCILTGDGRAALVDEFFNRLRNHVANATVNCYV

SEQ ID NO: 53136 - protein, 396 aa, unknown
  TnpB Polypeptide
MKMSTITYNAELKFKDIAGQEYWTSLLEVSRLAYNECANIITTRKVHLDLQSVHNAVYYELREKFPTIPSQGIIKIYKDCISAFRSINSNGHVEHKVPTKKTLSMRLDKRLYSRLRLSSISLCSTNPGKRIDADIVKYPKLEEMFGKYPVHDPLIFKRDDRFFLALSFEVPEVPLKDETCIGVDLGERRFVITSDGLMLNDKEYNARRRKVRYLKRCLQKKGTKSAYRHRHKLCKKEHRQSNDMCCRVANAIIESTDASIIVLEDLSKIKQKTSKTKDGNKRKDHNRRISQVPFYKLKEILSYKALLAGKRVETVSPFMTSKTDCTTGKKNGTRKNRRFYCKNGTVLDSDWNAAINIARKSKHPFSFKMPLDGTLKTWRAGRLSTVRSYCKPAMAT

SEQ ID NO: 53137 - protein, 430 aa, unknown
  TnpB Polypeptide
MIKTIVLDIVNGIDLGELPRLYSSMVRISYNRAKEGMTGNDIRPYLQERFPEINSWLVHSAEVDGTTIHKSNVDEHKIHFGGKKTYEKYMKHQITKEEYRHSKIMPIYSLGEACKYGNRLFDFDLNECKLTFKPSKNTHIPIEFKPTKRMEELRKLQVLTDSGALALTVRLTDRNVFLSYEETGINVDKYDGLRKRRIMGIDLNPNYIGISVIEFDRKDKFEVIHKEVIELTDFNKEPDGLKSDDPKKKKFNRKRRFEIIELAYKIDRIAKYWHCGKISMEKLAIKSKDMKKGRKLNKLVNNTWIRNLLRTKIHMLADTHGIEFREVIPEYSSIIGNLYYANETTPDMCAAAIELARRAHKQFEKGWNLPTPDVTLCREQWKHTIIGARGWKTVATKLKNSGQRYRVLLEETQCRLRSFNYKSNIYFNYF

SEQ ID NO: 53138 - protein, 393 aa, Deinococcus sp.
VTHIQTTTHLKAFRYRLRPTRAQEAALNEQLRLCRNLYNCALQERRDAYRKAKKTVTGYDQMKYLTEIKAALPEYAGVYSQVLQDVLKRLDKAFKAFFRRVKVGEKPGYPRFQGRDRYDSICYPQSGFSVSEKTAYFSKIGNIRIRLHRPLEGKVKTATIRRECGEWYVSYMCEVEAQPLPGTGSSVGVDVGTTWFCITSDGEFVENPRHFPTAMKKLRVAQRAVARKRNKRSNRRRKAVQQVAKLHRKVARQRLDFHHKTATKLIRENDLIAHEGLNVSGMGKGNLARSIHDVGWGQFFSLLAVKAECAGRRVIRVDPRYTSQRCNACGHTCRENRASQSRFRCVACGHVDNADLNAARNILDRGTSTERGEPLGRAAPSGINVAVVNASVA

SEQ ID NO: 53139 - protein, 498 aa, unknown
  TnpB Polypeptide
MTTKLDEGLSLTLLADFTKIDKDIKPFWNSLSTDIHNILWQPYQIESPKPDLSVGDFNYVMEESSFWKKLITPNNSTRQCSSCSSLRLSIPTMESEAQNAIISKKVRIYPINENLWFDSLNLYRRAYNLTIEFIRKGRKPSSEFRTQICDWCFCECEENDVSYNSNLIQAAYKKACETRTAVIKKRTQGKKAVLTFMSRCATEQYFVVPRLSAKKEIFPKILQGCYWSENLPDEAKGKTAIVTYANGQWFASVKQERVVAKKKREHLSIVALDPGVRTFQTRFSDQDAVSYGEGFVNDKLVPLMLALDNLLSLRDKLKQEDQSKQWVQDRLKNLKQAIHKIKVRQQNLVADLHRRVAIDLVSNHDVILLPSFETKKMCQKSTETRKRFIRRQTVRSMLALAHYKFKQTLKWMAKKYGKTVIDVNESYTSKTLWDGSILSTLGGKASIRFQGKRVNRDIHGARNILIRFLTKVIDGLLPQGACSLNITKAGFCGFGVLK

SEQ ID NO: 53140 - protein, 188 aa, Fusobacterium sp.
MVRYLFKNINKTIKFKKLKKKLKREQRKMSRSIEYSKSKKIKLKECKNFNRKKLKVQKLFYRLNCIRDDYNNKIVDEITRAKLKYITIEDLKVSNMMKNKHLSKAIQEQNFYAIRTKLINKCKERNIELRLVDTFYPSSKTCSCCGEIKKDLKLNDRIYKCCNCGLEIDRDYNASINLEKAKIYKVIA

SEQ ID NO: 53141 - protein, 273 aa, Fusobacterium sp.
GYPKFKSKKDNRKSYRTNYLIIYRVLDKWIKVPKLGKLKIRDKIKPQGRIISATITQAPSGKYYISLCCTDVEAEKLESTNKNVGIDLGIKNFALTSDEISIENPKYLQKSLNKLAILQRKLSRKPKGSSNRNKARIKVARLFEKISNQREDFLQKLSTMLIKEYNIICMEDLQVKNMVRNHKLTRNIVDVSWSEFNRILSYKAKWYGRTIVRVDKFFASTQICNCCGYKNEEVKDLSMREWTCPVCRTVHNRDINAAKNILKEGLRILGISA

SEQ ID NO: 53142 - protein, 221 aa, Eubacterium sp.
LHIPVTYDVEESNISDICNVVGIDRGINFVVATYNSKHKSGFVSGKSIKQKRAHYSKLRKELQLRQTPSARRRIKAIGQRENRWMQDVNHQVSKALVESNPKHTLFVLEDLSGVRNATERVRTKDRYVSVSWSFYDLEQKLIYKAKQNQSTVIKVDPRYTSQCCPVCGHIEKANRNKRIHLFICKNCGYKSNDDRIGAMNLYRMGINYLEDSQVPATVTAE

SEQ ID NO: 53143 - protein, 404 aa, unknown
  TnpB Polypeptide
MLVKGVVFYLDSELPSEAKFLLEDFRLAVNCSIRAGLQARVTSRNALTRLAYKDFREQHPRMYAKHLVSAFEVACGILKNHRRRFRKGVTCRVPYVKRLIMKAENQAYKLDRRSGVIDLPIRAGCHVELRLVVSHYHRRYLDDMAISLGSLTILPDRVIVAFRKDAPKPFSPESALSLDTNERSLDGVFVEGDVAKAIKAEFPDIAMIQQRHHDRRKRLQKKKAHDRRTSRNLCRREGAREHRRIDYRLHQVANSVLKFAEEKKSAIILENLKGFKSKRSKELNRRMSVWPRRKLHQIIEYKAQWKGIPVVKVDPRNSSRTCPICGRIQYSRMGAVFVCQCGWRLDRHINASINLLQTAISKGMAGGLRFNPGAFQHDVMMILYEPAMAARSEPNGTSGIVGVT

SEQ ID NO: 53144 - protein, 226 aa, unknown
  TnpB Polypeptide
MEVGKINHVTIEHTPTDKYFVVLNVEFEPQPRQNNGGCIGIDVGIKEFYTDSNGKSVANPKYLEKTMCKLIREQRRLSRKQKGSGNRRKQRVKVALVHEKITNQRNDFLQKQSTMLIRENQTICIEDLKVKNMMRNHKLAQHIGSAAWGKFFDMLTYKSAWYGNDVVKVPTMYPSSQTCSSCGYKNPLVKNLAVRVWECPDCHTVHDRDGNASINILNKGLQMQSA

SEQ ID NO: 53145 - protein, 284 aa, Oblitimonas sp.
VQKVGAEYATRRRQFKKSRLSWRKSGGVRRSLGWIPINTGMAKWKNGQVYHNGHYFNVWDSYGLSQYTFKSASFNEDARGRWYFNVVVEVDVVMPKGQDCIGIDLGLTDTATCSDGTKLEAGRFYRGLEEKLAIAQRARNKTQVKTIHAKIANRRKDTLHKFSRTLVNRCGEIYVGNVSSLKLVKTKMAKSVLDAGWGQLKTMLKYKSDHAGIVFKEVNEAYTTQTCSCCGALPDSRPRGIAGLGIREWMCSACGVTHSDRDVNAAKNILAVGHGRLAVGIPAL

SEQ ID NO: 53146 - protein, 385 aa, Euryarchaeota sp.
MVVRGITFYIDDPPVEIKYLSEDFRLAVNKAIRAGLQSGITSRYKLSNLVYKDLRSEHQIYAQHVVSAIEIAASILKNYRRAIRKGMNPKKPYIKRLMMKAENQAYKLDRKNGEVDLPIRAGLHVKLKIIVSDYHRKYLDNPSYSLGPLTLLPGRAVIAFRKDASKPYMPKAALALDTNEISLDGIFVNAKRKKATAIKSDYSEIPIIQQRHYLRRKKLQTKKAHDRRTMRKLCRKEGRREHDRIKYRLHETANNLLSYAKDNKAIIILEDLTGMRAQRANPKINRRLSSWPRRKLHQIIEYKAEWEGISVIKLNPRNSSRTCPRCGSIKKSRLGKIFKCKQCGWQIDRQINAGINLLQTAISKEMVGGLRFSLDALQHDPVISI

SEQ ID NO: 53147 - protein, 373 aa, Bacillus sp.
MIVNKAYKFRLYPNKEQQILINKTFGCSRFVFNHFLAKWDNAYKETGKGLTYNSCSAQLTQLKKELTWLKEVDSIAIQSSLKNLADAYSRFFKKQNDRPRFKSKKNKVQSYTTKYTNGNIAINDNKIKLPKLGWIRFAKSREVEGRILNVTIRRNPSGKYFVSILVETEVQELSKTNSAIGIDVGLKDFAILSNGTTYANPKFFRKLEEKLAKAQRILSRRTKGSSNWNKQRIKVARIHEKITNARNDYLHKISTEIIKNHDIIGIEDLQVSNMLRNHNLAKAISEVSWSQFRTMLEYKAKWYGKQVVTVAKNFPSSQLCSCCGYQNKDVKNPGLREWECPKCHTHHDRDINASLNLKNEAIRLLTVGTTGIA

SEQ ID NO: 53148 - protein, 367 aa, Bacillus sp.
MFVNKAYKFRIYPNKEQEVLIAKTIGCSRFVFNYFLAKWNDTYKETGKGLTYNACSSQLTQLKKKLTWLKEVDSIALQSSLKNLADAYNRFFKKQNDKPRFKSKKNKVQSYTTKHTNGNIVIIGNKIKLPKLGLVKFAKSREVEGRILNATIRRNPSGKYFVSILVETKVQELPKTNSSVGIDVGLKDFAILSDGTKYKNPKWFRKLEKKLTREQRILSRRKKGSSNWHKQRIKVARIHEKIANARKDYLDKISIEIVKNHDIIAIEDLQVSNMMKNHKLAKAISEVSWYQFKTMLEYKAKWYGRTLIAVGKTFASSQLCSCCGYQNKEVKNLNLREWTCPKCNTFHDRDVNASKNILAEGKRLLSA

SEQ ID NO: 53149 - protein, 371 aa, Bacillus sp.
MTTITAKIQIYVSSDQSKNLIATTNAYRNACNWLSKHVFQTKILKQAKLNDLYYKQLRGQFGLKSQMAQSVMKTVIARYKSAKSNGHEWSLIEFKLPEYDLVWNRDYSLTENKFSVNTLDGRIKLNYERKAMKKYFNGTWKFGTAKLVHKFQKWFLHFPVTKDFSELDYADINNIVGIDLGINFLATTYDSQGKTTFYNGKIVKHKRGKFKATRKQLQKKQTPSARKKLKQLGSRENRYVTDVNHQVTKALVDKYPRGTMFVLEDLTGVRSATEKVQVKNRYVSVSWAFYQFRQMLEYKAQLNGQKVIVVDPKYSSQTCPKCGHVEKANRNKKLHLFKCKNCQYESNDDRVGAMNLHRKGIEHIGVVTAGV

SEQ ID NO: 53150 - protein, 208 aa, Bacillus sp.
VETEVQELSKTNSAIGIDVGLKDFAILSNGTTYANPKFFRKLEEKLAKAQRILSRRTKGSSNWNKQRIKVARIHEKITNARNDYLHKISTEIIKNHDIIGIEDLQVSNMLRNHNLAKAISEVSWSQFRTMLEYKAKWYGKQVVTVAKNFPSSQLCSCCGYQNKDVKNPGLREWECPKCHTHHDRDINASLNLKNEAIRLLTVGTTGIA

SEQ ID NO: 53151 - protein, 432 aa, unknown
  TnpB Polypeptide
VHVALEAQLCSSGRSGQQPNKRESNLSTSTKGEGNIVFRAHRIRLYPNNVQVTYLARAAGVARFAYNWALAEWQRQYAQSKVDPAAPKPNEMALRRQLNAIKREEFPWMLEVTKNAPQTAIMQLGQGFKNFFERRSRYPTFRRKGRDDRFTLTNDQFRVEVSRIHVPKLGWLRMRESLRYCGRIVSATISRRAGHWYASITVDTEDTLVPQAENQGAVGVDLGVKVLATLSTGETFAGPKALRGLLDRLRRLSRAVSRKVKGSRNRSKAKARLARLHARIANLRSDALHKLTTNITSRFHTIGIEDLNVKGMLRNRSLSRAISDMGFYELRRQLEYKAAQHGAHVVVADRWYASSKTCSHCGDVLDKLDLGTRHWTCRTCGTEHDRDVNAAINLKEVAVSSTVAACGGEGSGLAMKREAKPAPAKQESNSKS

SEQ ID NO: 53152 - protein, 207 aa, Okeania sp.
VKNSHGGQKTVVQLTLVPRWMPIPQLRDNPDYYSQKRDLVNTKDKFPDYKLIHSQVLQDCIKRVKLAFDRWLKADKNGHKLGKPRFKGKGRYRSFTYPQIKQDCIQENKIDLPKIGNIKFIQHRPLPLGFQIKTVTISRKADGYYVTLSLEDKSVPTSISEVEAKLKNTLGIDMGLKEFLVTSEGESVPIPQYYRSSQKRLKTLQKR

SEQ ID NO: 53153 - protein, 341 aa, unknown
  TnpB Polypeptide
VEAVKSYRIPVEAPKDLIEEYFKVKQRALDVIFSHVRISRKAHLEFDREDRKRLRDELLQEWKYFKHYVDSAINSIIGLVKGWITLYNRGRAEGKPEITKRTVYIKNTLFSFRNGILKISIEPDKRYLEVDLSKCSWIPKDFDKIGGLLMTEKELIITVKKSAEPKADKWATFDVNLTNVTAFIDGEIKRYDLRELYHIHRVYEVKRQRIQKTSKFKPLTSKKLLEKYSGRERNRTKDFMHKLTTQIARELKEKNCGAILENLKSVKSRILNGSKDMNRKLSKWNARTFQFMLEYKLKWLNLPTKYVNPANTSKSCPLCSGSMASYGGRIMKCEKMRINNG

SEQ ID NO: 53154 - protein, 406 aa, Castellaniella sp.
MQRLQAFKFALMPDGQQERQMRRFAGSCRFVFNKALALQKERYEQGEKKLGYAGLCKLLTEWRNSTETAWLADAPAHPLQQTLKDLERAYTNFFAKRADFPRFKKKGQSDSFRYPDPKQIKLDQANSRLFLPKLGWLRYRNSREVLGTAKNITVSQSCGKWFVSIQTEREVEQPLPQDGAVGIDMGITRFATLSDGTFYAPLNSFKRHEAHLRRAQQAMSRKTKFSNNWKKAKARVQKIHSRIGNARRDYLHKTTTTISQNHAMVCIEDLQVRNMSKSAAGSTEKPEKNVRAKSGLNKSILDQGWFEFRRQLDYKLAWNGGWLVAVPPRNTSRTSPCCGHVSAGNRQTQARFACVECGFEDNADVVGAINILRAGHAQFACEVSGAVMPPAAGTRRSDSGAAQCRA

SEQ ID NO: 53155 - protein, 380 aa, unknown
  TnpB Polypeptide
MHKTFKYRIYPTRIQRTRMRKALSTCCWLYNHFVEQRTSAWKKDKKSVSMYDQHMIIPKLKSKNPDLELVHSQALQNVSVRVDLAFKAFFRRCKTRENPGYPRFHGIDRYDSFTYPQYPSGCALHGKFLHLSKIGVVPVILHRKMEGIPKTVTIKRSRTDKWYVTFSCEVAEPKKLKKSKEKIGVDVGLSAFAMLSNGDHIDNPRFFRKEEKALAHTQRQHAKLAKGSTERRDHRKAVARVHERIAWRRSDFAHQQTRRIVNRFGFIAVEDLAVNRMLHNRCLSKSISDAAWSQFDGLLAYKAEWAGRQHVRVNPAYTSQTCSQCGHRQKMPLSDRTYACPCCGLSIDRDLNAAKNILALGLQGAGPKAPRSRAALAAAE

SEQ ID NO: 53156 - protein, 374 aa, Sphingobacteriia sp.
MLKTFKYELFPTKLQKTQLSGAMDSCRFVYNLALETKNAAYQAGKSYSCFDLIKQLPDLKEENTWLNNTPSQALQQAISNLDNAFTNFFKGRASFPKFKKKSKRQSFRIPIAAKINFEKQVIKLPKIGLVDLRISRTFEGIIKQYTVSKTPTNRYFVSILVDTLDNKAKLKPIQEKTSVGVDLGIKHFAVLSNGKKFENPKNLIKAQRKLRIAQRSLSRKKKGSKRREKQRLVLAKIHERVANQRKDFQHKLSTEIVNQYDTICIENLNVAGMIKNRKLAKHIANASWGSFETMLKYKADWKGKNVLQIGRFEPSSKMCSCGVINNELTLSDREWTCGVCNTTHDRDILAATNIKRFGLRTPPNIRQREALACA

SEQ ID NO: 53157 - protein, 324 aa, Lactobacillus sp.
  misc_feature (317)..(317): Xaa can be any naturally occurring amino acid
VSKVIKGIKLRLYPNQSQREQLWQMFGNDRFVWNQMLGMAKERYQNNPNSLFVNEYGMNYLLKQLKCEYAFLRESDSTSFLVVNHNLAQAFKMLFRHRGGYPHFKNRHSSRQSYTGRSACKVLARRRMQLPKLGSIRTSRTGLVGDAKIKRYTVSYEPTGRYYLSLQVETEVNQLAQAFKMLFRHRGGYPHFKNRHSLRQSYTGRSTCKVLARRRMQLPKLGSIRTSRTGLVGDAKIKRYTVSYEPTGRYYLSLQVETEVNQLPETRQSVGLDMGLADLVISSDGVKYGTFNAEWLEKQAVRWQRKYARRRYLAQCXGPRRSGD

SEQ ID NO: 53158 - protein, 359 aa, Planococcus sp.
MSQTITVKVKLLPTKEQKRVLGQMSRDYISLINQLVEEMVLEKKKTRKTSKHVISNLPSAVKCQAIQDAKSIFGMKVVKSNYSIIPFLKKPLCVWNNQNYSFDFSHIYLPLMIDGKAKKVPVRALLTDKNNRNYDLLNHKLGTLRINQKSGKWIAQIAVTIQTMEKTGKKIMGVDLGLKIPAVAITDNDKSRFFGNGRQNKFVKRRFRAKRKRLGHKKKLNAIRNLDDKEQRWMKDQDHKVSRAIINFAKQENVSVIRLEKLANIRQTARTSRKNEKNLHTWSFYRLSQFIEYKANLEGIKVEYVNPAYTSQTCPTCSEKNKANDRRYKCKCGFEKHRDIVGAMNIRYAPVIDGKSQSA

SEQ ID NO: 53159 - protein, 419 aa, Lactobacillus sp.
MLITKGIKAKLYPNHDQRAWLSQQFGDIRFVWNHFLAIEKGKWNRAKLYKMAKKAIPKPLKFPRKYDLYNQLKSLKKKYKWLAYSDSRSLQCELGILYQSYQNLFQHRAKAPKFKSRKYFKQSYRTTSIPKQIGKSHVLKLAKLGYIRVRFNEPLVGKIKQVTVTHDSTGDYSASLTVEYESQVQLPKTDQAIGIDVGLDDLAILSNGMKWNFKYYSKANEAKKHKWQIKSARRRHGAIKDIRYNKHLQKKMPNHHVKTLVEYHNYQKAKHEVAKINHHIRNQRVNYLQFLTTWLVKHYDFIAIEDLKVSDMQHNHKLARAIACASWYRFRTLLTYKCAWYGKHLELVNPKNTSRICHTCGKNTGAKPLNIRSFVCPYCHTKQDRDVNASINILHLGLEQAMANNSTSVQYTSLQLCTE

SEQ ID NO: 53160 - protein, 286 aa, Lactobacillus sp.
LTDNCNHLSVNTLKKRAVLDYYLPKYFKKYLGMTHKLGTAKLLNRQGHWYLHIACTVDTPDFDYHKQTENTVGIDRGLRFLAYTYDNHRHSLSFNGLKIRRKRCHFLKHRAVLQAKGTKSAKRKLKSISGRENRWMTNVNHRVSKALVRHYGKRTTFVLEDLRGVRFSTEQVSKKYRYSQVTWTFYQLEQFLKYKAKLNQSIVIKINPKYTSQRCPHCGRVLAQNRQHHIHKYICEYCEYSSNDDRIGAMNIRWLGQQKVQSIKKHFKPTINPNLIIKDNGQLALF

SEQ ID NO: 53161 - protein, 419 aa, Lactobacillus sp.
MLIIKGIKAKLYPNQNQRTWLNQQFGDIRFVWNYFLDIEIRKWNRAKLYKIAKKAIPEPLKFPRKYDLYNQLKSLKKKYKWLTYADSRSLQCELGILYQAYQNLFQHRAKAPKFKSKNYFKQSYRTTSIPKQIDKYHVLKLAKLGYVKVRFNEPLVGAIKQVTVTRDSTGDYFASLTVEYESQVQLPKTNRAIGIDVGLDDLAILSNGMKWNSKYYSKASEAIKHKWQILSARRRRDAIKDIRYNQHLQKEMPNHHVKTLAEYHNYQKAKHEVAKINRHIKNQRVNYLQFLTTWIVRHYDFIAIEDLKVSNMQHNHKLARAVACASWYRFRTLLTYKCAWCGKYLELVDPKNTSRICHTCGKNTGVKPLNIRSFICPYCYTKQDRDVNASINILRLGLEQAKANNSTSVQDASLQSCIE

SEQ ID NO: 53162 - protein, 393 aa, Lactobacillus sp.
IKQAIVLKTRLYPSQQQGLLFSQVCEQYRKACNYASRVYFKHNCNLSVTAFHCLTYRTIRAKYGLKSQLAVSVPRTIKARYQSVDTQLRHKSYSFQNQNTKQWYHGYKNIGWLWNPIKFNRPQADLVANRDWSLTDNCNHLSVNTLKKRAVLDYYLPKYFKKYLGMTHKLGTAKLLNRQGHWYLHIACTVDTPDFDYHKQTENTVGIDRGLRFLAYTYDNHRHSLSFNGLKIRRKRCHFLKHRAVLQAKGTKSAKRKLKSISGRENRWMTNVNHRVSKALVRHYGKRTTFVLEDLRGVRFSTEQVSKKYRYSQVTWTFYQLEQFLKYKAKLNQSIVIKINPKYTSQRCPHCGRVLAQNRQHHIHKYICEYCEYSSNDDRIGAMNIRWLGQQKV

SEQ ID NO: 53163 - protein, 453 aa, Lactobacillus sp.
MKSMSQLQYHFGAKYRWYPSDTQKQVVKVNADVRRAFYNHLIANKRKLGWIIHTSYWNGDLKRKIIANYKHTLHESVVRKRISWLRDKYIDSLNFAKTNQSNNLAYKNHASGLQGQPQFHRKKDHPYEWKYQTSRITWKSKGKRKSNIYFTDNRHLVLPVLGRITLGTTRKMPDDTLIGTVTIYKDATDKFWVSLQLASDTPFKSYQPQTHSAIGIDLNICNSLMDNYGHQVSNPKFYTHGLPYLKFLQQRENRRRRYAKSHHINLTVDKGYQRARKRCAKYYGYIKNERRAFLDRISTRLIENHDLIVAENLKSSNILRNHKIAQKASDCGWREFLSMLQYKAKLYGKTVILVNPAYTTQKCSHCGFVCTKHNGYAKKHGKHLDLDDRYWWCPICHTYHIRDRNAAVNILRRGQKEILVKQRQNLIRLKRKRTPQELDSRPNLTFEFHRAAE

SEQ ID NO: 53164 - protein, 381 aa, Lactobacillus sp.
MLITKGIKAKLYPNQYQQTWLNQQLGDIRFIWNHFLAIEKAKWLSYADSRSLQCELGILYQSYQNLFQHRSKAPKFKSKKYYKQSYRTTSIPKQINKPHVLKLAKLGYMKVHFNQPLVGKIKQVTVTHDSTGDYVASLTVEYENQVSLPKTNQAIGIDVGLSNLAILSTDMKWNFKYYNKANEARKHKWQILSARRRRDAIKDIRYNQHLQKKMPNHHVKTLVEYHNYQKAKREVAKINRHIKNQRINYLQILTTWLVKHYDFIAIEDLKVSNMQHNHRLARAIACASWYHFRTLLAYKCVWYGKHLELVNPKDTSRICHTCGKNTGVKPLDIRSFVCQYCHTKQDRDVNASINILHLGLEQAMANNSTSVQDTSLQLCVE

SEQ ID NO: 53165 - protein, 437 aa, unknown
  TnpB Polypeptide
MLSFDEDKPRAFLSIEYTVGKMIRTVSLLPDLPEDRFLPMMEACARIFNEHTAWAAENRTWSKRKAHEALYRSIREAHPEVNSAILQATRDCALEASKRCNKGRRGSWKTPVKRTLSVRYDLRTLSVRGGLLTLSCIPTLISSASSGCKRNHNCGRRFRTVLDIPEHFRQVTESLRWRCKGATLKYIRGRFRLNLNYETEAPPKVAGRAVGIDLGIRNFAVTSDGDRHPSRNPSVLRAAKRRYFHGKRALQAKGTRSAKRRLRATAGREERFSRDVCHMVSKEIAGTPGVNVFVLEDLRGVRDRWRGMWPNRDVHGWPFSRLRFDLTYKAEALGKSVVTVPAAYTSQRCPKCGSTEPGNRRGSRFHCGMCGFCGHADVVAARNILFVHESGASLSATRRPSPRREAPGGQAAVNQPTMHGPSLRGNPSCKPLALCQW

SEQ ID NO: 53166 - protein, 446 aa, unknown
  TnpB Polypeptide
MELMRFQCSATRSAYQAVHKHGLSGNDVCVYVKRNYMAALNQRYVADACAVASGIKQDHALFGGCGAWKKLQTGELTKAEWLDGRNSRLYSRGDRAKSRFGNSNIRIAGDRLLVNDPSGRGRWIEGRLFVPEKWREGLSRTPLYDIRIIYRKNGRFAVAASWEVDPPPIITDRSRGALGVDANPAVVAVADVSADGNLLGHHSIVSQRLPFASKVKRDNDVRLLAKLVVDEAQRLGKPIALERLKFPAGSRSAGYRKFRRAKSNFVWRKILDAVESRAGRSGVEVIPVHPAFTSDLGELKYARMYSMNRHAAAALVIGRRGAGFLERQSFAVAPDAPGSNRVNLEGGSRSLYLTPKAYSWMRDRFLRPVTRDVSQTPAGLKHSPGLKPADLTGPGPAPGSRPGIRSGAASGHAGPDAPRPLVPARAGLSRANRGPELVAPVEGRLG

SEQ ID NO: 53167 - protein, 397 aa, unknown
  TnpB Polypeptide
MRRAYKFRLFTNVTQERELGTMLETHRRLYNACLEQRKSSWEADKASVFYYDQSAWFKAQRAVNPWFARLNFSSAQATMRRLDKAFAAFFRRCKSGQKPGYPRFKARERFNSVEFQAYGNGVRLRPNGKLYVQHIGEVRCKAHRDVEGAVKTATLRREASKWFVVLSCDIDRPVPPSALSPVGIDMGLERFLTTSDGDVVENPRYLKRELPALRRAQRSVCRKKKGGSNRRKAVKILAARHARVANFRCEHHHKTALQLVRRHGMIAVENLNILAMLGDRRFSRAIADAGWGGFLAILRCKAESAGTAVVEINPRGTSQQCSGCGADVPKDIRVRQHDCPHCGLSLHRDENAARNVLARGLKDSRGIAWLDSQRQARTGPAGGNGQRPVAREVACLG

SEQ ID NO: 53168 - protein, 444 aa, Rhodococcus sp.
VRDRSAAGECAVDESADHGGEGFGVFDGEVVVVAEHQRYSYRAYPTAAQTLMLAKTFGCARVVFNDFVAHCRDAYETRGFVPDLDEVKSLVTAQAKHTPERHWLSEVSAVALQESARDAQAGYRAFVASVARTRRGPRVNPPRFKQKSGRQVATFTRSAFSLRADGCSRWGFVRLAKIGEVRFRLSRSLPSDPSTVKVIREPSGQYRVSFVVEVCAATRSEVAAAAGVDLGLTHLAIVVRSTGERYRVTNNKYLRTAERELVGAQRRLSAKTKGGRNQDKTRRDVARLHEKVARSRLDQLHKVSRRLIDENQVIAVENLDIAALGKTRLAKSITDAGWGILLRLLASKAAEAGREIVIIDRWFPSTQMCSQCAAVDGPKPLRIRTWTCRCGATLDRDYNAAVNVMLAAGLAERLNAHGGDVRRVLALAGPDEVGTRLADSRRSA

SEQ ID NO: 53169 - protein, 457 aa, unknown
  TnpB Polypeptide
MQARICNSFGEVNLVARQESAPKNSSEKVRLAKNARIKATYHATRVRRAKMNCFTRKMKVDRSHLSKRQEEAIKRLFLESKWLANSCIASERFDRSYIKELGGKVQVKAPAGMEEREFLVLGGQLAQSVLDGLRSNLKALSKLKSKGKKVGRLRYRKQVTMVNFPQYGNSHKIDREKNRVKLANIPGWMRVRGLEQLPENAEFANCKLLDKPDGLFIVITCYIDKRDQDFTPGTSIGVDMGVKTHLTFSDGTKIDALIEESERARGLRRKISRQKPGSNNRAKTLSRLEKVLAKDANKREDIANKIVHELLKNETVYYQDEPLHDWFKKQGQIKPGRRLQGSILGRVKANLERSPRAIMLDRYLATTATCICGCKTKHEPDKRTFVCSACGYSDDRDIHAAKNMVRLGQSQNAPATEHSSTLADKRVRPVAPMNYTFIGKTGGVWMKQETPTSLALG

SEQ ID NO: 53170 - protein, 408 aa, Lachnospiraceae sp.
METIINKGYQFKIVPTELQKEFFLKSFGCARKLYNHYVDTLYTYLDSIGYENGFIKAKEIPLDSPAFMKKVFPYLKEVDSLALCNVQIHFKNAIRKFNDEYDKKSYTKRSLKRKRTLSIEPTFRDLKGMPRFKSRKNNDFSYTTNNQAGKENDWHYIRLENGMLTIPKLKTSIKVKQHRPLPKDAIIKNATIRMDYRGNFHVSLCVEYTIDMKPTPSKKCLGLDYAQQDFYADSEGRKANYPHYYQKAEEKLAKEQRKLSRRVFGSNRWKKQKVKVQKLQLKVANQRKDWLHKTSYRLAQEYDAIMVEDIDLRAMSQGLKLAKNLQDNGFGMFRNFLKYKLEEQGKQFIKIDKWYPSSKTCRFCGKVHEELKLTDRSWFCPHCGTEIADRDHNAAINIREAGSALLAW

SEQ ID NO: 53171 - protein, 405 aa, unknown
  TnpB Polypeptide
MTTITRSYRVRAYPNSAQIRMLNHWFGAARWLWNHALDMRTKAWQRRQESVTSIDISRHITKLKKLPRFVWLAKVPATCLTQSLRDQDRAFAHFFRRVKTGETPGYPRFRSRHDHTLSLRFQDIPEAKWLKGIIALPKLGSLKLAENIPMVACPDMVTLKHEADGCYYVTFSTEVEIETLPWVASAIGIDLGLTHLATLSNGEKVSNPKRLANRLRYLKQQQRCLARRIQGSKRREQQRLRVARAHSAVANQRNYAIHQLTTRLVRAHQILCLEDLKVKHMMQHPRLARPIADAGWGEFHRQLEYKVTWYGQTLVAVDQWYPSSKTCGSCGHKLDELRLDVREWTCPKCGTIHDRDVNAAKNVLAEGLRQLAGGEHRDLRVDGVVVDAPREARTGQMAKVCQEHA

SEQ ID NO: 53172 - protein, 386 aa, Selenomonas sp.
LPSRTSSRKCWQAAKNRPAFRAAAALCCPKCTKACAVSGSGRKPVPPHALRDEPLVYNGKLLTCKSLVVEGDIRMLKSYKTEILLTTEQRGKICRSIGICRWLYNEYIARNKRLYHLYQRGCLDGHQKHFLTAMDFDKFVNHHLKNMDELTWINECGSKARKKVITNAETAFQKFFHGKTGFPKFKKKNRQSVSIYFPKNNRGDWTIERHRIQIPTIGKVRLKEFGYLPAGAIVKSGVISQKADRLKLHHRLFSIRTNYTNQVIYAILKREPSFITIEDLNVSGMMKNKHLAKAVAACKFYEFRTKLTAKCHERGIELRIVDRFYPSSKMCHNCGHVKRDLKSKSKQSFLGHCGRTAAVAFCVLCTLDNSGKMSYNKGKQEGVWGK

SEQ ID NO: 53173 - protein, 406 aa, Phormidium sp.
MLVFEAKLRGTGKQYAILDEMIRTARFVRNSCLRYWMDNPGVNKYDLNKYCRILRKEFEWCKKLSAQACQASAERAWSAIARFFDNCKKKVPGKKGFPKFRNYQTHGSVEYKVDGWVLSDDRLTITFRDGFKAGTFKMWGTRDLHFYSKKQVKRVRVVRRADGYYVQFSINQERNEHHEPTKRMVGVDVGLNHFYTDSDGNTVENPRFLRKAEKALKKAQKRVSRRKKGSKNRLKAIQRLGQTHLKVSRRRKDFAVKTARALVQSADLVAIEDLKVRNMVKNHHLATSISDASWTLFRQWLEYFGKVFDVPVIAVAPHFTSQDCSNCGEDVKKALSTRTHKCPHCGYLNDRDVNAAINILMKALQGLAQLPRGTRKVTPGDEMTLCLDGETQKSKVARRARNSRQR

SEQ ID NO: 53174 - protein, 374 aa, unknown
  TnpB Polypeptide
MIKTYKLRIYPNDSKAKELNALISFWQEEVNHKIKIFWDFNKVEGSYPPKEYTKGGRLIRDASVKAWQTVKGAKKAEQKERPFFNEKEIDLNEFSAHVIQDFTTKKFDLWLNVISLDSKQGRGNSKRIKLPCKKHREFNKALEIGELRKSFKISRDGKNYYATFFFVVPEFTKANNRIVGIDVGMTHPAVMSDGRKFGDELRNLRIRTKWRQYNRGLSAYKQGLNIIAKKIVSAYPDCNFAVERLLFKGKGKRSRRFRRNNNTWAYAYLSHRLEEIGKEKGFLLHKVNPAYSSQQCPVCGFTSRSNRISSEDFCCGQCGFKGDADRIGALNLCERVGRNIRSDTEIIGCDILSMRLGTEIEKLSEKGIPAKITP

SEQ ID NO: 53175 - protein, 383 aa, unknown
  TnpB Polypeptide
VHTTKKNQARFDFDLRFPKMPSYLRRAAIQHALGSVSSYKTRMELWKKTDQKGGRPKLVCDNHAMPVFYRDVMYREDTEEKDRVCLKLYDGHDWKWFRVSLSHTDMEYLRKNWAGKKAAAPVLEKRHRKYFLRFSYTEEVPLTKTPAKEQIICSVDLGLNTDAVCTIMRSDGTVLGRRFIDFSSEKDRMYRVLGRISRFQREHGSAQVKSRWAYAKRLNTELGRKIAGAVTGYAEENHADVIVFEYLETKGKISGRKKQKLHLWRKRDIQKRCEHQAHRRGIRISRICAWNTSRLAYDGSGTVVRDPGNHSLCTFQNGKRYNCDLSASYNIGARYFIRELLKPLPVTERSLLEAKVPSVKRRISCVYADLRELFLEMELLRAA

SEQ ID NO: 53176 - protein, 426 aa, Dolichospermum sp.
VFGCQQVLLHSDNETKAIIEYLCHESNSLYNCSVYYARQIWFKTGKIVSGFDLTAQMKNNKHFHAGYASAMQQTCLSVGEAFKSFKQLLAKSKKGELNQKPRVPNYRKPGGLFTVTYPKKWLKLVDNLIRFPLGNQVKAWFGITEFFLPMPSNLEWSDMKEIRILPRNRQFYAEFVYQTEKSIIEIDKSKVIGIDHGIDNWLTCVSNVGTSFIIDGLHLKSLNQWYNKTVANIKEGKPQGFWSNRLAAITEKRNRQMRNAVNKAARIVINHCIDNKIGTIVFGWNQRQKDSADLGKKNNQKFVQIPTAKLKGRIAQLCEQSGIVFVETEESYTSKTSFLDNDVLPTFGAKPEGWKSSGIRITRGQFRTSTGIKINADCNGAVNIIKKVAAIFKFDLSGVGRGALSAPKKVLLWTLQKSPRLQTGES

SEQ ID NO: 53177 - protein, 369 aa, Eubacterium sp.
MNRAIKYRIYPTNEQKIMFARTFGCCRKVWNLMLADKIAYYQEHQKTLQTTPAQYKKEYPFLKEVDSLALANVQMNLQTAYKNFFRGKKIGFPKYKSAKHSRKSYTTNNQKGTVAILDKTIKLPKIGIVKAKIHRQPNKDWMIKSATVSQERDGVYYISILFEYEVKELYAPVTSMSTLGLDYKSDGLYVDSEGNDCNMPHYYRLSQDKLAKSQRKLRHKTIGSNNYCKQQKKIAKIHRHVANQRKDFLHKKSTEIANQYTCVCVENLNMRSMANKSFGNGKATLDNGYGMFINFLEYKLKDRGGYLIKVDKWFPSSQLCHWCGYRSPNLKDLRIRRWDCPYCGHTGIDRDWNAAINIKVEGLRSLESA

SEQ ID NO: 53178 - protein, 414 aa, Aquaspirillum sp.
MALRKVTFRLYPNAAQAERLTELLSLHQRVYNTALEERIRAYQAEGTSLNFASQCKALTQWRAHVPALAEVNAQSLQVTLKRLDLAFAAFFRRVKAGETPGFPRFKPLQRFSGWGYKTHGDGWKLLAGDGMKHGHVRLSGVGMVRMRGQARTVGEAKTAEVLHKAEKWYLSVTVECSPDRASGNKAVGVDWGLETFATVVDSDGGNDPVPNPRFLDAAQRQRLKTLQQAVSRKPNKRSNNRRKAVKALAAEHRRIANRRKDFLHQTSAKLVSQCGLIATEQLNVKGMTASGGEYKKGLNRSILDTAPSTFLTLLKSKAEEAGLQWCEVPTRQVKPSQTCHRCGVQRKKTLAERIHRCSCGAECSRDENAARVMLNWALTGSASGQELAEVGSGGRFAVLNHETHAVPALAGQRE

SEQ ID NO: 53179 - protein, 399 aa, Oscillatoriales sp.
MPKAYKFRIYPSAHQQQYFAGAFGCCRWFWNYSLNKSQVTYKETGKGLSRLAIQGMLPALKKEYPWLKDGAYSQSLQVVALNLSTAYKNFFEKRGGFPSFKSKHNRQSVSYPQNVKILESTIKFPIIGEVKAKIHRQYDGTIKTVTVSQNRDGSYFASVLVDDKIGTPDANIEGKAIGLDVGLTDFLVTSDGSKYKHPRATAKHRKNLKRKQQKLNRKVKGSNRRNKARKLVAKVNSKIKRVREDFLHKLSRKIVNENQVIVVEDLNIKGMVRNHCLAKAIYDAGWGMFGTMLKYKAEAEGKVYLEIDRFFPSSKTCNHCLFKVSKMNLKIRQWKCPKCDSVNDRDINAALNIRDEGLRFLALGISATASGRNVSQPGRISVLSDAVAVEAGSPLSTAR

SEQ ID NO: 53180 - protein, 584 aa, Actinomadura sp.
MSPPAIVKGVDAVPAAADPGVDDAICQIGQTPAQPAGRGGRPRPLRPIDAPFVATGPSGVAIRTRLKGLTLQDDNVLREVGAHLGSLAGRDLKARCEAGAEHDSDGWAARKRELTGGSSARWAGSITRATHDQWALARRGQLAHLKSLEAGIAVIERRLSVPVGQKGTRRAAGGYRSRREWFAKSRRLHALKDRLAAVRADWDAGRVRVARGGRRLLNNRHNLDAAGLTEERWRARWEAGRRFCQADGESGKRYGNETIRVTPDGEVSIRLPAPLAHLANAPHSRYILTARVRFAHRGDEWADRICADRAVAYRIHHDPDRGRWYLTASWQRPTIPAVSLEAARAHGMIGVDANADHFAAYRLDTCGNPVGDPMRFSYDLSGTADHRDAQVRHAITALLHWARRCGVAAIAIEDLDFAQEKTREKHGRRKRFRQLISGFPTGKLRARLVAMAAEQGLALVAVDPAYTSRWGDQHWRKPLTSNKRQMTRHDAASVAIGRRALGLPIRRRTTPPPAHQSDEQRHRTAQAEPSAQGREETRPPVTERAHDARPRTGTHGTRATSASNTVRDTRSTGTWVQNPLLDTG

SEQ ID NO: 53181 - protein, 372 aa, unknown
  TnpB Polypeptide
MFLYGWEWVFVQMTFQFRLYPTPEQEEQMNRTLALCRTLYNRAKNQRETAYHQEGKTITYSMQQNDLPAFKKEYPEYKDVHSQVLQDSLRRLDDAYQRFFRGEAGYPHYKSADHYVSFTYPQPGAVKKTFAQEGSIYLSKIGFVRMNAHRPFDPEVVTQINVKRYADEWMVNISVNIPEAKTERAVKTAVGIDLGLNAFAALSDETKVVNPRYLRIAEKRLRRMQRRLSHKRQGSRNRQKARRKVAKAYRKVARQRNDFLHKLSHRLIRDHELIAVEQLKIRNMLRNRRLAKSISDAGWRRFVTFLSYKAQRYGKRLVQVPAHGTSQTCICGADVPKTLAIRIHECGACGLVQDRDVVSAKLILQRALSLTG

SEQ ID NO: 53182 - protein, 362 aa, Micromonosporaceae sp.
LCSCVTNFRLYPRPGQCVALARAFGCARVVFNDGLHIREEARRCGFRYVTDTELSRRLTLTKTAPDRGWLGEVSAVILQQALADLNTAYRNFFTSAAGQRKGAKVRPPRYRSRKDTRQAIRFTANARFKVLDNGRLRLPKIGEVEVRWSRALPCEPSSVTVIKDSAGRFFASFVVECGDPQPLPPVDAEIGLDLGLNAYAVDSRGRVIANPRFLRNHERRLRKAQKALSRKNKGSNNRKKARIRVARAHAKVADCRRDWLHKQTTRLIRDNQAVYLEDLAVKGLARTKLAKSVHDASWGTFRRMLVEKAERYGRYVGVIGRSNRPRRSVRFAGIGKGRNRCPCASGHAGRAGPPMTGITMPP

SEQ ID NO: 53183 - protein, 447 aa, Halovenus sp.
VKRTNTFTVRPLSDNDEQVLRDLLDASAALWNEINYQRLMRYNDEDGFEGDVWNADTGKLEGKYKDVIGASTAQTVRRANSEAWRSFFENRNAYHDESNTSVTEHPEPPGFRGNEDDGRVLKGVVRKDAYTVEWGDRSRLEIVVGKELRDRHNSPKTRLRLEVVGDPNWPDYEDQSRLELWYDETERTFRASQPVTVSDDARATPLADEKAALDIGANNLVACTTTTGEQYLYEGRDLFDRFRDTTREIARLQSKLENGRYSSERIRRLYRERTRRRDHAQEALCRDLLERLYAEGVDTVYIGGLTDVLETYWSVKTNAKSHNFWAFKKFTERLAFTAEEYGISVEVRSEAWTSQECPQCGGTDRTNRHQGTLTCPCGFEGHADLTASETFLKRHTEQAVRPMARPVRFKWDDHTWSEPPCSHESPNEQRTDPSTVHHNGNVASGES

SEQ ID NO: 53184 - protein, 484 aa, unknown
  TnpB Polypeptide
MQVGHRYRCYPTAAQAQALLRWIGCQRFIYTAKVGEDRYFRRFARSCLALTGQFAPIDQQYSHFKTELTPWLSEVPSQVLRNGAALWKAAYGRFFQKLGGRPTVHRKTGQQSVWLTSELFEFRPVLDPDTNKVTRHELHVGTRKFKLGQLDFTSHRPEDHQKFTAPASIHISLHAGRWHVSFNSDDGQPEPDEADTLALLMQHTENELSAVAVGLDRGVALPLATSDGASFGLSAIQIQRLAVQEGHKKRWQRRQARRIKGSKNWCKARAKVARHQRYESDVRKELAHQASHTLASDDRYQLFVFEALKVQNMTRKPKPKKDEQGRWIRNGAKAKAGLNKAILASAWGKAKECLQYKARKRGKLCIEVPAAYSSQECAACSHTHPDNRTSQSEFVCQRCGHQDNADQNAAQVIAQRGVRLVLSGAYDKKPKKTCRITRHRVGVEISEPDSATDPTPGETEVRREGGNTDTHWSMTQETPAIAQA

SEQ ID NO: 53185 - protein, 445 aa, unknown
  TnpB Polypeptide
MKLTGDLKALENTIVIYRNALRFVIPIVDTHWDDVKDFEFSNQRMMYVEKLVHSTTKSQARYTFDEEFPKFPSYLRRAVLNRALGIVSSYRSNLADWEEKKVELEEKGKKIPQRPRLSTRHFDCPAYYKNNLFRNFDPVKQTIELKVFKNGDWVYEVYQLKTSDCRYYQTYLTGKKQNVPIIQKKGRRFYATFSYEEKVPLVKEESISKICAVDLGLNTDATCTIMDQDGTVYARTFISFSKEHDRLNTQLGRIKRNQKRGSRHNKKLWRSVSGISQDIADKTVKAILDFGNEHGVDVFVLEYLDFKGKNIVKRAHFWRYKRIYKVLAQRAHQYGLRIARVNARYTSRLAFDGSGWSKRGREIAPETPYALMEFPTGKIYNADLNASYNIGARFFIRHLLKTVTATQRLALEAKVPQVAKRSTCTLSDLINLRSEFVALASKTQA

SEQ ID NO: 53186 - protein, 413 aa, Pistricoccus sp.
MVTNYISGMTLRKYTYKLYPKPKQQSALLECLRLHQQLYNAALQERIEAYRKCGKTISYNDQQASLTRIREALPEYKALPCTSARMTLRRLDKAFKAFFRRVSKGETPGFPRFKSLSRFSSFELLTPTFSHSDTGQHGRLFLRGIGHIKARGQCRLQGTIKTSQIQHKHGHWWISLTVDGDARRPRNATRACAMDGGVAHLLTVVEESGRFEQIANPRYYRTGKANQAQLHQSVSRKKRGSNRWKNACRQLSTFKRKQANQSKDAHHKLAATIANTYALVAMEALRIKNMSRSAKGTAEQPGKNIKQKSGLNREIRDTAPASLMSMIRYKVEEAGGEFVETPTRQLKPSQRCPACEHTHKDNRKTQANFICTGCGFSQNADVVSGLNSLFWALGLGREHVPEAFASKPLLSSA

SEQ ID NO: 53187 - protein, 414 aa, Calidithermus sp.
MHRAETVVLKLRPPGRAKREWLDQTAELFRRGVQLGLDHALSAKTSNRGKIHAATYASIRASGLPSDYCRMAVNQAVQLARSHFGLRKGKRRAGKPTAVRSQGIGLGVNAYKVVGPALRLSTRVKGDYIWLPLCVPARWRDKLQHVKGDARLFRRGDDWFVMLPLRVPHTPTVRDGDGHLTVTGVDLGIVRLAAAKHPKGVLVLNGKPIRQRRERFASLRKRLQRHRRTDRVKAQRGKERRWMTDLNHKVSRGLVDLAARYPNPVLAFERLDGIRDRVRGSKRFNRMMGSWAFRQLVDFVAYKAERAGVRVVFVDPRKTSRTCPRCGHATRSNRTTQADFRCVACGYQGNADVVASLNIAGVAAGLLRQGPPDTARLSAAPRRGAGQAAPAGERPDGVKVWASAHADSNLESSV

SEQ ID NO: 53188 - protein, 365 aa, Caldalkalibacillus sp.
MQKAYRFRLYPNQKQQTLIHKTFGCCRFVFNHFLAKRKEVYEAERKTLGYNACSSMLTQLKKELEWLKEPDATALQTALRHLDDAFKRFFREKKGYPQFKSRKNPVQSYTSKNNNGSIAIAGNRIRLPKLGWVKFAKSREVEGRILSATIRKNPSGKYFVSVLVETEIQPLPVCDSKVGVDLGVKDFATLSTGEVIPNPKYLRRYEQKLIRWQRKLSRRKKGGSNWHKARLKVARLHEKVVNCRKDFLHKLSTRLIHENQVICLEDLSVQNMQKNHRLAKSIADVSWSTFCTMLAYKAKWYGRTVIRVDKTFPSSQICSACSYRHKEVKNLGLREWTCPSCGTHHDRDINAAKNILQEGLRLLSS

SEQ ID NO: 53189 - protein, 430 aa, Oribacterium sp.
LAWKLYNASLYRIRQCFTGWDKSVRTVNEAEVFKEIKLLESSYPSIRVKRVISYSHLEKLMRVTKNPDFFTSLPMQTAQAVVKQAVQDFKNWLATIKDYKKHPDKYLGKPKMPHYKKSACTVTITNQDAVVYGRELKLPLVKERLKIANIPANSKLKELKIIPYYGRFIMSLTFESDDINVKNNGLNKAGIDFGVDNIAAIVSTDGSSRIYKGGAILSKNAYYAKNKAKAVSIITKGHSKMHADSKHLRQLGYNHANFVRDQIHKISRSIADYCLSHDVSLLVLGENKYWKQRLNIGDSNNQNFVQMPIAKLKQMIQYKASMAGITVVLQEESYTSKASFLDGDYIPVYGIDNYNADFSGSRIKRGLYRNANGTVINADINGAANILRKADPNAWHLNKLDSIEFLTNPEVLGFHELNPQGIPVRRIKAA

SEQ ID NO: 53190 - protein, 469 aa, unknown
  TnpB Polypeptide
MIKAYKLQLKANQKKIDTILKIAKEYRKIAKIVLNIQLNQLYKTGRFNKNLKLNIKSKLSARYLQTLQYQVVSMLNSYLSNRQNDFIDIVRNSNIDEDTKIKLFYINKYKKWFFNEVKIKDELIDREILKLARSIIKRTFKLNRFPNTKNIQLQLDSKVAIVEDKKENKAILFDYWIKLSTLTKGKPIYLPLKSNDYFESVKGKLKNFCQINIDKSNNIAITLLKDVEKREYKAKTDKIALDLGLSNLFATNKGDLLGRRFIDYLLRVDKKITTLQSRLQKNRLKPNQSKRYRRLIEKTRNYLKNEINRVINRIVKLYAPKEIIIERLDFQSPKLSKRLNRVLQRFGKSIIKQKLDSLKEEFGIKIIEVNPSYTSQTCSKCGYVDRRNRKSQAVFICGFCGSKQNSDVNAAKNLLFRSSKKLLSSIYISKSKILDELVKLFIKRYKKQVYSCPAILTNPYFSVRMKPPQ

SEQ ID NO: 53191 - protein, 218 aa, unknown
  TnpB Polypeptide
VDFGLRIKYAGRIRWEGKQGRLEIIYVNGRWFALVPIEVGVDPPKSNPRGYVKPNYKDKKGRVINPRSIRQRDPIGDKEVFTDMGLDNLFAVMISDRSALLIKGVSIKSEYCWWKREIAKYQSIRDVLRRLSISTWIYYHEKYLDAMYKKDERLRHLYITAIRFLADGLYRRGVRKLYIGYPIMLSQNNGNEYNTNIWLFRKNGSLDSGCIQGVRHRS

SEQ ID NO: 53192 - protein, 427 aa, unknown
  TnpB Polypeptide
LILKCYMQLKKHNMLVCIKKQMLIKGIVFRLDTDLPSEAKLLLEDFRLAVNNAIRAGIQARVTSRNALVRIAYKDFRQDHPKMFAQHLVSAFEVAGGVLKSYRRRVRKGVACKVPYVKRLMMKAENQAYKLDRESGTIDLPIRAGCHVRLKLVVSQYHRKYLEDMTLSLGSLTILPDRVIVAFRKSAPAPYTPESILSLDTNERSLDGVFVGSHSEAAVPVKAEFPDVAIIQRRHHDRRRRLRKKKAHDRRTSRNLCRREGRREHHRVEYRLHQVADAVLSFAESAKSAVVLEDLTGTRFKRGKDMNRRLSIWPRRKLHQIIEYKAQWKGIPVVKVDPRYSSRKCPICGKIQDSRMGTEFVCDCGWHLDRHINASINLLQTAISNGMAGGLRFDPGAFQHDVMMILYEPEMAARSEPNGTSCDCEVT

SEQ ID NO: 53193 - protein, 449 aa, Halorubrum sp.
VTELTETLELKLVEPNAHKHRKLCETKRAYQDALEAAFNANCTSQSATNDIVVNYDLSGYAKNALKKYVPQLCGGSYDAKELHDDHPVRFTNEGPKLDHKPQNAIKWYIKIPHHDDYNLWLPAQPNPEQREWLEALRAGDATMGECRLFDRDGEWYFHIVATRDVEERETSSASKETPIGVDIGEASLLTVCHRDERGSPTAPNLWNDEGKRVRQLRETYFTATRRLQQRGSERIAESYGYELWRHIDHILHTVTSEVVAYADQFENPVLVLEDLTHIRENMDYGAFMNRRLHGWGFAKMHAQIRYKAAENGIRVETVNPAYTSKTCHCCGERGYRPKQATFKCSNSMCWVSEYQADLNAALNIADRYLENRRLSTSTRISDSLDLSGESHSREHTSGDDSAEDGARLTAPQDSQAVNESLRDSFAHQKSKISGDDADTQQATLGTYAS

SEQ ID NO: 53194 - protein, 357 aa, Firmicutes sp.
MTYTHYSTLVNVDGLPTTQSLTCKLKLLTTAEQSQTLLRTARTYRDALNYASAVAFANGKLSKAMQLQQLVYRELRERFSLPAQMACNAPRQVAASYKTLWERARTNAAHRTKGWTKRRYKGLDKTPKFTALTVNLNYRRDWSLGKNQTVSIGTLDGRVRCRYEGWNKHLDWLREPARYGIALGAAKLWRDPGTKIWYLLVCVEKTLRADVLDCITTVKGVDLNRRNIAVESDTQDACRFYYGGRYKHLAQRYASTPSALQAKGTRGAKGRRRQLALQERRLNADVTHCVSKAIAVPHAMVGMEWLKDIREHTEPHHAKKASEKRRRANREATAWSFADLQQKIAYKRGLQMAFPPG

SEQ ID NO: 53195 - protein, 383 aa, unknown
  TnpB Polypeptide
MKAQRVEKQMIKPTNEYFPMLDQFCFLSKNLYNHANYIVRQSFVKDNKWIRYGELDKQLRADKDYPDYAEMPTAQAAQQTLRLLDKNWKSFFASIKDWSKNKDKYLGKPKLPRYANKNGRKSLIITNQNCKLKDGMIHFPKSFNGFVCKFYCCNRPDFVKLNQVRFLPHYNCIVIEIVYEVEITDTVKQNQNYISIDIGVDNLATVANSFGKQPFIVNGKPLKSVNQYYNKHVSKYRSIANQMNGVAYTKRMDKLTEKRNRKMEDYLHKTSREIIEYCKKYNVSKIIIGNNKEWKQNSKLSKKVNQHFVQIPYNRLIQMLEYKAQEIGVTVIITEESYTSGTSFVDNEMPVKENYNKSRRIKRGLFKTSDGSFINADVTEVTK

SEQ ID NO: 53196 - protein, 422 aa, Moorea sp.
MKHKAVKVRIYPTQEQIQVLAQHFGCARWWWNYALNQCIETYKETGKGLKQSALNSMLPKLKKQKETEWLKDCYSQVLQSVSLNLSRAYQNFFVRVSVAYGQGRAEYPRFKSYHHRQSIQYPQNVKQVGNYLKFPGRLGIIKAIIHRPLDGEIKTVTVSKTPSGKYYASVLMEYEPDDLQPSKKGNVIGIDLGIKDFAITYDGEKTSKFGNPKHLAKSEKKLTKKQRIAARKKKGSNGRKKAIKIVAKVYERIRNVRQDYLHKLSRKIVDNNQVVVVENLNVKGMLCATRTLRERNHKLAKAISDMGWGTFVNFLSYKCEKEGKVLVEINRWFPSSKTCSNCHYRIKELPLDVRAWTCPSCGTHHDRDGNAAKNIRAEGIRMLSSSGTGEVNASGEEVRPRRGRPSKLRHSSVKLEAPTSKK

SEQ ID NO: 53197 - protein, 432 aa, unknown
  TnpB Polypeptide
MFATQKVRIKKLSRGEYQAMRLLHRYAKNLYNVGLYALRQHFFATGKLLSFTKLYHQCKTNENYHLIQAGVSQQVLKSAHEAMESFIALNKKAASGQYPAEKVRIPKYLNKDGFYTLPCSTNAIRIKDGCFWVPLSNRFKQEHPKSAIAIRIPERIANRSIREVRLNPLHHARFLEAEFVYNAGDSVQSPGIEILALDLGVSNLAACVSTAGTSLLIDGKRLKAENQWYNKERSRLQSAKDLQGIKGETRKLATIAYNRENFIRDYLSKAGHLVLQHCLANKIGRLVVGVNPGWKQWINIGHVNNQNFVQIPFWKFRRFLAYLCEKHGIEYMEIPESYTSKASFLDRDEIPEYDPERTDAPMFSGKRVKRGLYRSANGQVINADLNGAANILRKAFPDIDLASVDRGLLNNPTKLYPLATLKKRTLKSKAAA

SEQ ID NO: 53198 - protein, 469 aa, Mycobacterium sp.
MARLKVPEGWCVQAFRFTLNPTQTQAASLARHFGARRKAFNWTVTALKADIKAWRADGTESAKPSLRVLRKRWNTVKDQVCVNAQTGQVWWPECSKEAYADGIAGAVDAYWNWQSCRAGKRAGKTVGVPRFKKKGRDADRVCFTTGAMRVEPDRRHLTLPVIGTIRTYENTRRVERLIAKGRARVLAITVRRNGTRLDASVRVLVQRPQQRRVALPDSRVGVDVGVRRLATVADAEGTVLEQVPNPRPLDAALRGLRRVSRARSRCTKGSRRYCERTTELSRLHRRVNDVRTHHLHVLTTRLAKTHGRIVVEGLDAAGMLRQKGLPGARARRRALSDAALATPRRHLSYKTGWYGSSLVVADRWFPSSKTCHACRHVQDIGWDEKWQCDGCSITHQRDDNAAINLARYEEPPSVVGPVGAAVKRGADRKTGPGPAGGREARKATGHPAGEQPREGASQVTTKDHSLATV

SEQ ID NO: 53199 - protein, 368 aa, Ktedonobacter sp.
MKQTMLLKLAPTSEQAQALLDTLYAFNAACDYVASQAFEAKVANKFELQKMTYGELRTTYHLPAQLAIRAISKTTDVYKRDKSIQPSFKPEGAIVYDERVMSFKGLTAVSLLTLSGRVLVPFRMGGYQESRLNAIKGQADLLYRNGTFYLAVTLDVPTPTPDETTDTLGIDLGIINLATDSEGETFSGEAIEKNRKRHHALRQRLQKRGTKSAKRHLKQLSGKEARFKRNTNHVISKRIVAKAKANGQGLAIEELRHIRTRTEARLRHSQRSRHSSWSFGQLRSFLSYKAALAGVPLHTVDSRNTSRTCSACGHCAKANRKSQASFCCVECGYTENADRNAASNISRAAVMQPIVSSGSRSGCNQIGA

SEQ ID NO: 53200 - protein, 420 aa, unknown
  TnpB Polypeptide
LEKYIEKMITLECLLEFETKEDINAILDLMRRFSSATRYAYKRLLEGEKRKDLKKHLSKLFNINTRYSDDATFLAQSMITLCKEREQNPKKLIFGSRKVFEQLKKNHLTGKRRKQLKTKWKESRQGNLYSRGDKTKQGNLNLRFEWINDKLYLRINTGDRQYIYAKVIRSVKREKDKWIEFMFMLENAYRYKEWFPYSVRLKLKNGNVYAFISVEEKFPPITIKKDSGVIGIDINAYPFHLALATASKDGNMENYQAISLHELLDVSSEKRQYLEWQIAHQIIEIAKKENKAISIENLDKLPKGKRGDGFAKLRQKLQKWIYKRLLNKIEITAKRNGIEIRKVNPAYTSLIGKLKYAPQFNIDKDIAAAFVIARRGLGYKEKLPKNYKGLLNDKDFLLFSEASIEDKIAKLKKEIKEERN

SEQ ID NO: 53201 - protein, 423 aa, unknown
  TnpB Polypeptide
MISKNEAIKASIKATKAKRKTQTCRVYETKIDQSYLNHASKEYLNRLFLEAKWLYNHVLSQENVFKMDDKIHEVPVKVKDAFEIRELNCLSSQMRQSIISRVYDNIRGLSERKKKGYKVGKLKYKSELQSIPLKQFGNTFKILNTKYVTIQGLKQKLKVIGLKQIPEYADIANATLIHKSGNYYLSITTYQEKIKPVSPIQSIGIDFGISKQLTLSNSISIQYSIPISPKPRKLARKLSKQEPHSKNWNKTRIKLNKEYVKSTNIKTDIKNKVVSHLKNKYEIICFQDENIKAWQRIWGRKILFTSIGGIISALKQNAHTPIEIHRMYPSTKTCSKCGNIQNIALDERVYVCKNPHCNNIIDRDHNSAINLDNEGLKKIDTERIESTPVEIETSTLISVKYFNSIPHIKASSVYESGSFTALA

SEQ ID NO: 53202 - protein, 370 aa, unknown
  TnpB Polypeptide
MILAKKVRIKPTPEQEQCLWRSAGATRWTYNWTLARQEENYRNGGKFIQDGELRKELTKLKYTEEYTWLNEVSAQTTNQAVKDACDAYKRMFKGQARKPKFKSRKRSKPAFYSRCDQFKAKGSAVYLEKIGWLQTSELFPKVDKYSNPRVSFDGKYWYVAVGVEQETEKPELTGEVIGIDVGVKELAVCSNGMVFKNVNKSAVLRKTEKRLRRLQRESSRKYEMNKEGNRFVKTCNIIKVEKSIRLLYQRITNIRNNHIHQATNAIAKTKPSAVVMEKLNVVGMMKNRHLSKAIAGQKLHEFARQVEYKCEKIGAKFVQADRWFPSSKLCSDCGQIKQHLKLSDRIYECDCGLKIDRDMNAAINLSRLAA

SEQ ID NO: 53203 - protein, 409 aa, unknown
  TnpB Polypeptide
MHTTGQGDTWFAKKKAGQESVSCAELRKEFNAQKADWMYESPKGSMDQAIKNFCLAKKRHYANPELFGFPKRKKYKSRRSYYIENDKAKVVDEFHVRLPLIKKPVRLAEPIKQECLAGKINNFVVSRGTNDKWYISISYTFEDDNVGYGTAENGIVGIDMGIKTLMQLSTGEVVDNAKVFNRQAKRLKHYQRMMSRRKYNSVHYKDVKKTFNKVNTYIRNFRKDLIHKATTEIVRHNMVVAIEDLNVKGMESNHRLASSITDCGLGMIRRFFEYKSAKYGTLLLKVGRFFPSSKKCSGCGHVKEELSLSEREYVCEECGLAIDRDVNASVNILAEALFSELNKRFNTDIARRKFTPADLAALSTDLSVRGQLAEVDAHGLLTRNGRAAMVDDFFNRLWNQVAHATINCI

SEQ ID NO: 53204 - protein, 491 aa, Bifidobacterium sp.
  misc_feature (402)..(406): Xaa can be any naturally occurring amino acid
MSQKVRIAGVKHVGASVFLGVDHCGNPCWTRNPERVMVWLCDGWRARFNQRREQRPHNIPVKDEAGEIVDWVKEPLGGPDVADLLSDKEARLQCSWMAGIPAPILSSTDRIEGTEWSAGLKRKKTAGGRVPGFKSRHRNLGFVCWRNASKTGNAIFHKTGRKSGVVVITGMTPARWVKPGEKAKWRIAIHVRVSQPIRPYTSVHVDWTHRSLVFVNMPLPLPRTRDGVIGLDRGCVHTLASSDGTFRDMPKPSKAELKRLKYLQRRMARQDRVNEARGGRTAKLASKRRRRTLSEFNALQGYIVRRRNDWIEKTTTRLAQENILVAMEDLDVQAMTKRPKPRPDPDNPGRYLHNGAKAKAGLNRSILSNNWSRLMKRLKDKMDANGGRLVIVPAAYTSQTCXXXXXILSNNWSRLMKRLKDKMDANGGRLVIVPAAYTSQTCHQCSHVASENRDSQAVFKCVECGYEANADVNAAMNILDRALTRTGGGTA

SEQ ID NO: 53205 - protein, 451 aa, Bifidobacterium sp.
MSQKVRIDGVKHAGASVFLGVDHCGNPRWTRNPERVMVWLCDGWRTRFNQRRGQRTHNIPVKDDATGEVVDWLKEPLGGPDVPKLVLDREARLRCSWMAAVPSPILASTNKVESSEWFAGLKRKKTIGGRIPGFKSRHRGLGFVCWRNASRSGNAIFHKTGRKSGVVVITGMNPKRWVKPGERAHWRIAIHVRVSQPIRSYTSVHVDWTNKTLVFVNMPLPLPRTGNGEVGIDRGCVHTLALSDGTFMDMPKPTKAELKRLKYLQRRMARQDRTNEARGGKTAKLASKRRRRTLSEFNALQGYIVRRRNDWIEKTTTSLAKANVLVAMEDLDIQAMTRRPKPRPDPDKPGQYLHNGAKAKAGLDRSILSNNWSRLMKRLKDKMDANGGKLVIVPAAYTSQTCHECGHVAKGNRESQAVFHCVECGYKANADVNAAMNILGRALRKTGGGTA

SEQ ID NO: 53206 - protein, 414 aa, Burkholderia sp.
MDHEYDWIMQRFQAYKFELRPDGRQERQMRRFTGSCRFVFNKALALQKERHEQGKKKFCYAELCKLLTEWRNSAETEWLANAPVHPLQQSLKDLERAYANFFAKRTDFPRFKKKGQSGGFRYPDPKQVKLDQTNSRVFLPKLGWLRYRNSREALGTVKNITVSQSCGKWYVSIQTEREVEQPIPQGDAVGIDMGVARFATLSDGTFYAPLNSFKQHETALRRAQQAMSRKVKFSRNWMKAKARVQRIHSRIGNARRDYLHKATTTISQNHAMVCIEDLKVRNMSRSAAGTTEKPGKQVRVKSGLNKAILDQGWFEFRRQLDYKLAWNGGWLIAVPPRNTSRTCPCCGHVSADNRRTQSRFKCMECRYEENADVVGAINVLRAGHARCACEVSGAVMPPAAGTHRSNSVAAQCCV

SEQ ID NO: 53207 - protein, 407 aa, Burkholderia sp.
MQRFQAFMFELMPTDEQRRDMCCYAGSCRFVYNKALALQKENYEAGGKFIGYVAMAKRLTEWRNDLETGWLKDAPVHALQHSLRNLEQAYKNFFAKRSAFPCFKKKGSRDSFRYPDRKQIKLDQVNSRIFLPKLGWVRYRNSRDVLGELRHVTVSLRAGRWFVSVQTECRVENPVPQATSAIGVDVDVGVTRFATFSDGTFVPPVNSFRRHEAQLRRAQQSLSRKTKYSNNWKKAKAKIQRLHFRIGNVRRDFLHKVTTTISQNHAMVCVEDLRVQNMSGSAAGSITRPGRNVRGKAGLNKSILDQGWFEFRRQLEYKLTWSGGWLVAVQPRNTSRTCPRCGYISRDSRVTQARFVCVDCRFEEHADVVGALNVLARGHRVAACGERVQLGRSVKQEPTEVAVRLIV

SEQ ID NO: 53208 - protein, 402 aa, unknown
  TnpB Polypeptide
MKRLQAFKFQLRPNGQQEREMRRFAGACRFVFNRALALQNENHEAGNKYIPYGKMASWLVEWKNATETQWLKDSPSQPLQQSLKDLERAYKNFFQKRAAFPRFKKRGQNDAFRYPQGVKLDQENSRIFLPKLGWMRYRNSRQVTGVVKNVTVSQSCGKWYISIQTESEVSTPVHPSASMVGLDAGVAKLATLSDGTVFEPVNSFQKNQKTLARLQRQLSRKVKFSNNWQKQKRKIQRLHSCIANIRRDYLHKVTTTVSKNHAMIVIEDLKVSNMSKSAAGTVSQPGRNVRAKSGLNRTILDQGWYEMRRQLEYKQLWRGGQVLAVPPAYTSQRCACCGHTAKENRLSQSQFRCQVCGYTANADVNGARNILAAGHAVLACGEMVQSGRSLKQEPTEMIQATA

SEQ ID NO: 53209 - protein, 356 aa, unknown
  TnpB Polypeptide
MMYNTMLETMKAHYEQNGTFLSKYELEAAFKGHGIHVPATTLQMLSDRLSKSLKRFLAAKTLGLPNVGFPRFKKPNQWQSIQLRQYGTDKNRRDVMLAPDEKHLSIPSKLGGSVKITYHRPMEGTAKTAHLVLRADGHWYVLLVCDGEPKNEHTAADCTHTDIGLDVGLKSFLTDSEGNTVDNPRFSRTSQATLRRKQRTICRRKKGSQRRRKACKSAAKTHLKIKRQRRDFHFKTAKHYADTHKTIVVEDLQINNMVKNHHLAKSIMDASWGAFLAILSVKAGNAGHQVLRVNPRFTSQKCYKCGEIVQKSLSVRTHLCPFCGYIADRDVNAAQNILKSGVRLGHSHQESTSRDT

SEQ ID NO: 53210 - protein, 423 aa, unknown
  TnpB Polypeptide
VLINISHKIELVPNNKAKTHFKKAFGCARLAYNWGLAKWQEYYKQGIKKSHLDLIKEFNAIKREQFPFVYEVSKYATQRPFFNLNLAFEKFFRDLKQDKVSYPRFKKKRDNFGSYYIGGDQVRIKNEKYLKIPNLGLVKMRENLRFNGKINSATISQKGDKFFVSFSMQITKEEYIRTHPKAKRNNLALGVDLGLKSFLSLSNGLEIKAPKPLAKFNRLLIKRSRQLSKKQYAKTKQEALQGIKKSKNYQKATLKLNKLHRRIANIRSDFLHKLTSSLVANVKYFSLEDLNVSGMLSNHKLAKSISDVSFYEFKRQLEYKARYNDKEMYQVDRFYPSSKLCSNCGSIKKDLTLKDRIYNCDKCGISIDRDYNASLNLLSQLKQHIGLVQSEFTPEDLKALQYDLLLNGIVTSKVETGIQHKSY

SEQ ID NO: 53211 - protein, 412 aa, unknown
  TnpB Polypeptide
VIAQQAFRYELAPKVGQRLLLAKHAGCARFAWNWALSERIRRYRERESKQRFTNAIEQHREMNARKGREWPWMYEVSKCAPQEALRDLDRAFRNFVRARRSGRHCGFPHFKRKGADDAFRLTGSIRVVARAVQLPRVGAIRTKEGTERFRGRIHSATVRREADRWYVSLTVEAERPEPAPILGPVVGVDLGLNSFAAISDGEGEQTVTAPKPLGRCLRRLRRRSRVHSRKTRGSANRRRSAVHLARLHRRIRNMRTDFLHKLSTALAKTKSVVVLEDLNVSGMVRNGHLARHIADAGWGAFRRMLEYKSRWYGSMVVVAPRFLASSKTCSECGHVLESLALSVRQWVCPACGVEHDRDGNAARNLVAWYRLSTGSSPGSDACGEPSGGAKARASASHGAAKQESAMEDLPIG

SEQ ID NO: 53212 - protein, 382 aa, Escherichia sp.
MRRFAGACCFVFNRALARQNENHEAGNKYIPYGKMASWLVEWKNATETQWLKDSLSQPLQQSLKDLERAYKNFFRKRAAFPRFKKRGQNDAFRYPQGVKLDQENSRIFLPKLGWMRYRNSRQVTGVVKNVTVSQSCGKWYISIQTESEVSTPAHPSASMVGLDAGVAKLATLSDGTVFEPVNSFQKNQKTLARLQRQLSRKVKFSNNWQKQKRKIQRLHSCIANIRRDYLHKVTTAVSKNHAMIVIEDLKVSNMSKSAAGTVSQPGRNVRAKSGLNRSILDQGWYEMHRQLEYKQLWRGGQVLAVPPAYTSQRCAYCGHTAKENRLSQSKFRCQVCGYTANADVNGARNILAAGHAVLACGGMVQSGRPLKQEPTEMIQATA

SEQ ID NO: 53213 - protein, 340 aa, unknown
  TnpB Polypeptide
MVYDKAAKTVRIGKYVIHVIVDYNDLYICYAMQDRIKYCQIVRKTFANGYHYYLQLIMEGTPPKKHVISDGRVGIDIGTSTVAAVSGKEICLKQLGENVPDYSLEIQRLQRAMDRSKRAANPNKFHEDGTFKHGNHDRWIFSKSYKQLRNRKRMLERKQAAALKQSHEMTANDIIAMGNEIYVEDMNFKALQRRKKETTKSVNGKFHRKGRFGKSIKSHAPAMLISIIKRKLSYQNKELYKVNTKEFRASQYNHITDEYVRKKLGRRSNLIGNVKIQRDLYSAFLLMNSDVELQHTDRQLCMDTFHNFKELHNRYMNQLVSQYNSGIVFPSCMGIKDFVA

SEQ ID NO: 53214 - protein, 424 aa, unknown
  TnpB Polypeptide
MFQKAGRPRFKSFRRGLNSIEGSDNREIMYKPERGAIVWRKHVMTYMKPDTGYMKEALASDQRVKYCRIVRRTLKGVRRWFVQLVVEGLPPVRKVYASKCEVVGIDPGSSRIAYFHERHAAIVEVAPHVDLKEPKIRLLQRRIDRSRRANNPDNYNPDGTVKKGSLTWNTSNRGRRTAAKLAEHHRCLAATRKRDHGELVNDLLQIGGTIKIEKNNYRSFQRCFGRSTNRRGMGEFVEHLKRKAESAGCEVIELNAYKLKMSQYDPQTDAYRKKPLKERWHRWGNTGTLVQRDAMSAFLACHATEKGHDRALLLEKWTTAEALLSGSGLCRHEPCSDPEVSKDASGLTKPNCGSKAEREYMVSSPFASVRGIFGVQLPLEGASMRVLHSIRGEATPLNLAFRGFVWVIPARNRIVKLSWNSAGR

SEQ ID NO: 53215 - protein, 244 aa, unknown
  TnpB Polypeptide
LSRPIDGIIKTVIIKRDTLGDFYIYITIDKKDSKLNVATGKSVGIDFGMTTFLTLSDSSDIQSPLFHLKNLSQQKKLNRNLSKKKKGSNNRAKAKLQLAKLHIKIANSRKEYFHKLTNQLANSYDIIFIEDLNMKAMQMMWGRKVSDLAFSEFVIVCGTAIKKKNETQILQTRAQKKSENIIILQITKNILVIIKDASVGEEIKIKGRPANLKTPDRKLFKSSMSRNNTDSSSCETIVIEELNL

SEQ ID NO: 53216 - protein, 180 aa, Crocosphaera sp.
MLKLVGSRDINYFQPEQIKRVRILKRADGFYVQFCIKLDPRDTIKPIEPSGKAVGLDVGLKYFLADSQGNIEPNPRFYRKAEKRLNKLNRRKSKKFKKGKKQSNNYHKARQRYACANLKVSRKREEFVKRVALRLVKSNDLLFCEDLSVKNMVRNAPPLSAAAFLLDFKSTRNAAAHSTP

SEQ ID NO: 53217 - protein, 336 aa, Microcoleaceae sp.
SFFEAVKAYKVDSSKFTGRPKLPNYKDKVKGRNLLVYTIQAISSKQLKKGIIKLSGTELLIKTKAHPDQVCQVRLVPKCDSYVIEVIYNACTEPCDYAQGKLRRSEPESTISNANYIASIDLGLDNLVALTSNQPGFIPLLINGRPLKSINQFYNKRKSRLQSQLKGNRQTSPRIQRLTRCRHQKVENYLHHASRLIVAILNTKQIGTLVIGKNAQWKTEIALGSPTNQNFVSIPHSRLIEMLEYKARLVGITVIVQEESYRSRASFVGLDPMPVYGKTEKEPVFTGKRIKRGLYKTSTGQLINSDVNAAYNILRKAIPNAFSNGIGRGRSSAEAG

SEQ ID NO: 53218 - protein, 403 aa, Lactobacillus sp.
MKQAVTLKMRITLTAEDALLLQETMRQFALGCQLVSQYVFDHEFVLDQYALHEALYRQLRTESGLKAQMAQSAIRLVVGNYKTVQTQMKDEPYTFQDRYTGAWTRCPRDLTWLRQPLQYRQPQLKLVRNRDWSWLQDGRLSLNTLAKRIRVTPHVQGFEQYLAPDWKLGTATVVHTGGHYFLHIAATKELPAVDRTQLENIVGIDRGLRFVLVSHDTAGHTSFVSGKAITNKRAKYNRLRQQLQRKHTKSAKRRLGRLSGRENRWMSDVNHCLSKTLVANASPKTLFVVEDLTGVRQQSRSQAQARRELHSWAFFELEQFLRYKAVLAGYEVVAVSAQYTSQRCAQCGRIDETQRDRQRHEYRCTVCGYQSNDDRIAAMNLVTLGQQYVAGNNQPRFTKEVIG

SEQ ID NO: 53219 - protein, 371 aa, unknown
  TnpB Polypeptide
VRKAFKYRLLPTPAQKRAMQAALDECRWLYNHLLEQRKTAYEERGETVSLYAQHAVLPTLKRERPTLDCVHSQVLQNVAVRLDLAFKAFFRRVQTGEKPGYPRFRGRGRYDSFCYPQSGFMLDGERIFLSKIGHVKAVIHRPLEGAVKTCCVRRTSTGKWYVAFACEVESEPLPATDSAVGVDVGLESFVTLSDGTKIANPRFFRADEKALAKAQRRLSKEPKPEKGQPATPERHKRRKVVAHIHERIANRRANFAHRQVRQTVNAYGTICVEDLSIKQMVHTHCLAKSIHDAAWRQYIALMTYKAESAGRRVIAVNPAYTSQDCSCCGHRQRKELSERVHRCSCCGLVLDRDHNAALNILRVGLHSLASA

SEQ ID NO: 53220 - protein, 433 aa, Shigella sp.
  misc_feature (381)..(381): Xaa can be any naturally occurring amino acid
VKRLQAFKFQLRPGGQQEREMRRFAGACRFVFNRALARQNENHEAGNKYIPYGKMASWLVEWKNATETQWLKDAPSQPLQQSLKDLERAYKNFFQNRAAFPRFKKRGQNDVFRYPQGVKLDQENSRIFLPKLGWMRYRNSRQVTGVVKNVTVSQSCGKWYISIQTESEVSTPVHPSASMVGLDAGVAKLATLSDGTVFEPVNSFQKNQKKLARLQRQLSRKVKFSNNWQKQKRKIQRLHSCIANIRRDYLHKVTTTVSKNHAMIVIEDLKVSNMSKSAAGTVSQPGRNVRAKSGLNRSILDQGWYEMRRQLEYKQLWRGGQVLAVPPAYTSQRCACCGHTAKENRLSQSKFRCQVCGYTVNADVNGARNILAAGHAVLACXSATVKPQGQIQQQLAEAETQNTATAFLYRKYPQGLPSQSHNGRQQKPRNDSH

SEQ ID NO: 53221 - protein, 420 aa, unknown
  TnpB Polypeptide
MIIIEFKVYGKTHQYQAIDQAIRTVKFIRNSCIRLWMDNKGTGKYDLSKYSKILAKEFPFANELNSTARQAAAERAWSSISRFFENCKKKVPGKKGYPKFQKHCRSVEYKQSGWKLSPDKKSITFSDKKGIGKLKLKGTWDLWRFDKKLIKRVRIIKRADGYYVQFCISVDVEEQLEPVDATVGLDVGLKEFYTDSRGNTEPNPRFYRAGERRLKFYQRRVSRKKKGSSNRNKAVNRLGRHHLKISRQREEHAKRLARCVIRSNDLVAYEDLRVKNLVKNHCLAKSINDAGWYQFRKWLEHFGQKFGKVTVAVNPAYTSQNCSECGEVVKKSLSTRTHVCECGCELDRDHNAAINILKRALGTVGHTGTWIDRRSRYANIDPNASGESTSTLSGSDLTEQVGSLNEESPRMRDRGVSKKS

SEQ ID NO: 53222 - protein, 382 aa, unknown
  TnpB Polypeptide
MKTVKTVKCMLQVKVEEAAALMETLFKFATACNEILYISQENHTTNKVKLQRLCYYEIKERYNLHANLVIRAIARVAEASKKRKGNEPRKFNYTSINLDARTFSFIEKTEQVSISVIGGRLKLKLNISDFQRSLLTGQKPTSAVLCYNKQKKVFYINIVINQKVPCPPNTGNVIGIDRGIYNLATTSTGMKFSGRQAMHLRKHYSKLRQSLQSKGTKGTKRLLKRLSSKEQRTIRDINHKISKTIVQTCEPGDVIVMENLKYIRDRIRVARKQKQIQHSWAFGKLGDFIEYKATEKGINVAYVDPRHTSQKCPLCGCISKNNRHKHLFKCTSCGYIANADLNACRNIRQVYLNTLTDGLLSTSPETPTPMVRCKPMDLSVGC

SEQ ID NO: 53223 - protein, 236 aa, Fusobacterium sp.
GIIKSVTISKNSPDHYFVSILCEEEIEELPKTNKNIGIDLGIKEFATMSDCTKVENLKLSKEYEKKLKREQRKLSRRCKLAKDSTKKLSDSKNYQKQKKKVAKIHNKIRNKRKDFINKLSTKIINNHDIICIEYLNIKGMLKNHKLAKSISDVSWSEFLRQLEYKANWYRRKIIKVPTFYPSSKTCSSCGNIKETLTLSERIYHCECCGLEIDRDYNASINILRKGLEILKEEKVS

SEQ ID NO: 53224 - protein, 498 aa, unknown
  TnpB Polypeptide
LPGGERDPQGPGDHARPCSSPDLLLLQIPDQQAGQSPEGPELQSAQEGVPGVAQDADPLDQELICLYGWSDIRGNHQGIYRIPMGKIVERTYSARISDPRLLDLAREAAEVYNTAQEKFWEVESERGVELDKYRLQAELKGLIHVEMLGGDSRLAAMQQFSRAFSNHKAAMRSYAKDPERFNGVPNPPTRPRQTCSVFFKKENIRIRNGMLLLSLAKGFDPIKTRWNPDTGTPKFAIINWNTRRGWELHCVVEKQVKEEKLNPGRSMGIDLGVKRIAATCDDDGVVVTYSGKKIKSLVRLREKLKADVASRSSGMIKHSRRYKRLRRGLRKQVRRIDNQIKDVLHKASRTMVNYCVRKNIGMAVVGDCSGIHDSPNMGRRNNQAISQGPEQRLRKYFQYKMEDIGGRVVTVPEPYSSKTCPKCGARSKPKNRLFRCKKCGFEYDRDGVGALNIWGLGRKVSLGGALSALGRSGGLTPPIGWKYKSSRDCLVPVGPGLG

SEQ ID NO: 53225 - protein, 224 aa, Salmonella sp.
MVGLDAGVAKLVTLSDGTVFEPVNSVKTNQKKLARLQREMSRKVKFSNNWKKAKNKVQKLHAHIANIRRDYLHKVTSEISKNHAMLVIEDLKVANMSKSAAGTASQPGRNVRAKSGLNRSILEQSWYELRRQPEYRQLWRGGQVLAVNPAYTCQKCACCGHTSKENRQSQSLSGRLECGFAANADINGARNILAAGHAALACGEMAALGRSMKQEPTEASQASV

SEQ ID NO: 53226 - protein, 354 aa, unknown
  TnpB Polypeptide
MKTLKFRLKDKHAKLLIQLACEVNLVWNYVNDLCFKHLQRTGKFFSAFDIATYTKGASKSGLNLHSQTIQAITEELVVRRKQFKKAKLNWRVSNPKSAKKSLGWIPFKASGIQYQNGQVKYAGHWFGLWDSYGLSKYKVRCGSFNQDSRGRWYVNLVVDTLEPATTTEGKTPVGIDLGLKDFATLSNGQKIEAQRTYRKYEQKLGIAQRANQKQRVKAIHAKIKNIRKDFLHKLSRQLVNDHAAIFVGNVNAKGLAKTKLAKSVLDAGWSAFRTMLKYKCDHAGVWFEEVNEAYTTQTCSCCGSCDSSPKGRAGLGIREWTCVQCGTLHDRDVNAAKNILAAGHCRLAGGIPSL

SEQ ID NO: 53227 - protein, 421 aa, Haloferacaceae sp.
MSNRVVTRTFKASIRNHSQVCDDLDSHGFAASKLWNVGRWTVQRVWDAIGHIPDADELCSYLKRHDRYGDLHSQSSQRVLQELGEAFKSWYKQDDPDANPPGYRKYGDEHPRSTVTWKNQGFRLDTQYNRVRLSKGTNMKVSRYAADYILCEYTLQTDDDQTLADVENVQTVRAVWGGEHWELHFVCKLRVEAPETSGEKTAGVDLGICNTLAVSVGDETLLYPGNALKEDAHYFRQEEYETEGDNGPSDHALWARQKKSRRQAHFLHALSKDIVEQCAERDVGTIAVGHAKHIREDVEWGRHGNKRLHDWAFETLLSHIEYKAEDRGIAVERVDEATLKTSKTCCVCGLEASTNRVERGLYVCEGCGLVANSDLNAAENMRKTVTPNPSADRSNGCLAQPSVRLFDKSTGRIVPQEQAVP

SEQ ID NO: 53228 - protein, 402 aa, unknown
  TnpB Polypeptide
VKRLQAFKFRLRPGGQQEREMRRFAGACRFVFNRALARQNENHEVGNKYIPYGKMASWLVEWKNATETQWLKDAPSQPLQQSLKDLERAYKNFFQNRAAFPRFKKRGQNDVFRYPQGVKLDQENSRIFLPKLGWMRYRNSRQVTGVVKNVTVSQSCGKWYISIQTESEVSTPVHPSASMVGLDAGVAKLATLSDGTVFEPVNSFQKNQKKLARLQRQLSRKVKFSNNWQKQKRKIQRLHSCIANIRRDYLHKVTTTVSKNHAMIVIEDLKVSNMSKSAAGTVSQPGRNVRAKSGLNRSILDQGWYEMRRQLEYKQLWRGGQVLAVPPAYTSQRCACCGHTAKENRLSQSQFRCQVCGYTANADVNGARNILAAGHAVLACGEMVQSGRPLKQEPTEMIQATA

SEQ ID NO: 53229 - protein, 422 aa, Thermus sp.
MHKAFKYRLYPTRPQQKDLERTLALCRSLYNAALQERRDAYKKGGRTVGFYEQKRYLPEIRAELPEYKRIHSQVLQNVIERVDKAFQGFFRRLKAKGKAGYPRFKGQGRYDSFTFPQADKTGVKVQKGRVLLYGIGSVKCKFHRPLEGKPKTATVKREGEEWYIVFVCEVDPKPLPSNNRAIGIDLGTNPHFLVTSDGEMVEAPRYLHKAQAKLAAAQRSLARKKRGSRRREKARKRVAKLHRKIANQRKDFHHKIARRLVNTYGTIVHENLNIQALSRSRLSKGVLDAGWAQFLQILAYKAEEAGRRVVGVDPQHTSQDCPVCGHREKRPLWVREFTCPGCGTPLHRDVAAALNVLARAWTGPSGMGTAWAVPWSRAKPVSWEPRSLGLQSEESSQDQGEGGERHGRKVRGQGQDHGGTPL

SEQ ID NO: 53230 - protein, 303 aa, Thermus sp.
LTDPGGVKGYRHFPHVHQAADVGLKESRVIPRFPIPRDLQVHLAEGGLQLAGVVAVPAASVHLQEGRPVQLQNRLQNLGYCLPHRFPQQDPQGILVHGAPPRAKVCPPIKHGPLHINPYTTLQRKLSRQKQGSNRWMRTKRAIARIHRKVANQRDDFQHKLTAGWVAKYGLIATEALKVKNMTARGGSRKAGLNRAMLDVGIGDILRKLAYKAAEAGTRLVEVPTSKVKPSQTCPLCLRQEKKLLSQRVHQCPCGCEMPRDQAAALVMLRWALDPWEPGGGEGLTGPVELRNPDHAAIAVGRG

SEQ ID NO: 53231 - protein, 575 aa, unknown
  TnpB Polypeptide
MSSTHLSLPLRLPDEERERYDRLATLTTQTANTLLEQYWTPDLLTGINDSSYQVWKYFDEQEAFEEFGRYLPSRYKRCLLQKVGETLRSHADKRDAFQTVKPLLPDHKIRRIHTRRIKELLWDSDEYLSSGYVELLIDQLNTYYDVHGEYPESYFDFQDCPEYSSGVLPYSADDGPTSGQAVKYSYDETTQQLTVELKTPDTLDPGTYGDWTWTEYTLDGYEAFHELVEHGGLSAPSFHPNTSKRGGEYYELSFPVEVEHADTPADVETVLAIDGGLRKDATVVVVDSEGEQLSTPYFIQNTERERMRNLNRERNQLNAKLADLRRQGRDHTDQFKHLQSEYERVNNKIRHKREQLVHDVANQILALAVVYDVDAIVHEDLRSLSPPRGEGQLSWELSSWARRRIIENIGYRADIAGIHVERVYAGNTSRSCPRCGSTGHTTKSPDHYFEVWHGSHFRCDNSRCGYQADRDYVGAVNVARVFYAESDSLDSDFTSSYTGDFEIELASRSASSRPTFGTSLIAYVGQSRVTAGGGSAFITPAVTPIGTKNNSSKSSVFSPATHSYSLFVRDAAVCC

SEQ ID NO: 53232 - protein, 232 aa, Calothrix sp.
MRISYQFKIKPNKEQAEKIDSTLEMLRYQYNYLLAQRFDWYEMNRCAIDRCSLICHLPELKDKPNYYSQKASLTQLKIDRSWYKNIHSQVLQEVPKKVETTFDRWLKGDSNGKKSGRPRFKGVGQYKTFTFPQFKRHHFSRDRITLSKIGDVKVIVHRQIPDGFDIKTVYVTKKADGYYVTLSLDDKTVPVIKTDFNADNIVGIDVGLIDFLLLLIMKEFQHQSFYEKLNVN

SEQ ID NO: 53233 - protein, 382 aa, Alphaproteobacteria sp.
MHRNYQYRLRPNKRQKRKLELILHQTRLLYNAALQERCDAYKNCNRKSRISISQIDQQKSLTQIRLEDPEFSAMHLRPQRGALMRLDRAFAAFFNRVKKGEKPGFPRFKSRDRWRSIELPDNYRLDNAQLKTRDFSIKIHMHRPLPENFKKHCGAILVKDHKGWLVNFKIEIEEAPEKKPINSAVGLDVGLKALVATSDGEFHDAPGYFRKAEKKLRRLQRALARCKKGSKRRQAAKQRVISLHDKIKNQRRDYAHKLARDIVNQADFIAVENLKITNMVKNRHLAKSISDARWASLTAKMEYKAESAGKYFVWFDPKNTSQQCSNCNKLVPKTLSDRIHLCDQCGLKLGRDVNAAKNILALGLKTHRDALGTQGAVAECFT

SEQ ID NO: 53234 - protein, 412 aa, unknown
  TnpB Polypeptide
VRRAFVFRFYPTARQQVALGQMMGAHAEVYNAAVQERRDAWRQCGVSVRVGQQMAQLSEMRVARPDQARWSFTSQQQTLRRVDKAFAAFFRRCKAAQTPGFPRFKAARRWESVDFRHGDGVKWLHTGRAAHARLRVQGVGCVDVRMHRRLPANAVLGQVTLKRDGVGARAKWFVVLPVDTPTPAPLPAAGRELGLDVGVTHLGTLTEPVAGLTDTDGHIANPRHYRAAQARLARAQQALSRCRRDSARRVKARDRVAAVHAQVRRTRCDALHKTARALVNAADVIAVEAILTANLVRAPNPRPDPDAPGVFLPNGRAAKAGLNTSILDAGWSTFLAMLDAKAEEAGRRVVRVNPAYTSRDCSQCGHRKTELSLSDRVYECEHCGVALDRDVNAAHNILLRVGTTRRTAAQAA

SEQ ID NO: 53235 - protein, 406 aa, unknown
  TnpB Polypeptide
LPVEAVPGGAIRWPRKDDDTIPVSADVLYFAIKRNYDRDMQLRYNYRLYPTPDQRAALARAFGCARVVFNDGLRARQEAFAAGLPYLTDAELSARLTAAKASPDRAWLGEVSAVVLQQALADLNAAYRNFLASLAGLRKGPKAGPPRFRSRKDRRQAVRFTANARFSVTPGGKLRLPKIGDVPVRWSRDFPSAPSSVTVIKDAAGRYFASFVVQTVPDTLSATEPVIGIDLGLTHFAVLSDGRKIASPQFLRRAEKKLRRAQQALSRKEKGSRNRDKARIKVARAHAQVADARREFHHQLSTTLIRDNQAVAVEDLAVRGLARTRMAKSVHDAGWSAFVAMLEYKARLYGREFHRIGRFIPTSQTCSACARAPSLRCHRPSRRAKLTAGDRWPSFSARTNRGCQFL

SEQ ID NO: 53236 - protein, 412 aa, unknown
  TnpB Polypeptide
MQLEDKEYRGVEYRLFPGTRTKARQLAGIAGACRFVWNYFLAKNKEEYKQAMESDGAKPSISFFSLGKQFTQLRKEVDWLSAYSFAIVRYSLKHQADAWQGFFKGVRKHPKFHSRYGKRLSFTIPENVKIQDGRLFIPKVGWMQMRRKGGNPYQDGRPIRATVKKAGRYWNVSVCYEIDALKRTKNGVAVGVDLNTYNTAWTDTTGERGMLDVPKLDKKEIRIRRYQRKLARQQNGSNRRRVTKRKIAKWKRKQKNCRKNQAHQNSRFLANRAEALVREDLKLKNMTASAKGTAENPGKNVSAKAGLNRAMLNASHGRFNQYCDYKFETVVGVDPRYTSQTCYACGHVDKANRQTQCRFKCVSCGHADHADLNASANILASGIGAAGRREAFSLETSMNRQIDLAETDNGYY

SEQ ID NO: 53237 - protein, 342 aa, Salmonella sp.
MIVIEDLKVKNLSKSATGTLSQPGRNVRSKSGLNRSILDQGWYEMRRQLEYKQFWRGGQVLAVPPAYTSQRCACCGHTAKENRQSQSKFRCQACGYTANADVNGARNIYPDPKQIKPDQGNSRIFLPKPGWIRCRNSRQVTGIVKNVTVSQSCGKWYISIQTESEVSTPVHSSASMVGLDVGVAKLATLSDGTVFEPVNSFQKNQKKLAVLQRQLSRRVKFSNNWQKQKHKIQRLHSRIANIRRDYLHKVTTTISKNHAMIVIEDLKVSNMSRSTAGTVSQPGHNVRAKSGLNRSILDQGWYEMRRQLEYKQFWRGGQVLAVPQPALRVLWSYREIKSPVTK

SEQ ID NO: 53238 - protein, 605 aa, Salmonella sp.
MKRLQAFKFQLRPDGQQEREMRRFAGACRFVFNRALARQNENHEAGNKYIPYTKMASWLIEWKSVPETQWLKESPSQPLQQALKDLERAYKNFFQKRTSFPRFKKRDQSDSFRYPQGVKLDQEHNRISLPKLLGWIRYRNSREVIGEVKNVTVSQSCGKWYVSIQTEYEVSEPQHESTSMVGLDAGVAKLATLSDGTVFEPVNSFKTNQKKLARLQREMSRKVKFSNNWQKQKHKIQRLHSRIANIRRDYLHKVTTTISKNHAMIVIEDLKVKNLSKSATGTLSQPGRNVRSKSGLNRSILDQGWYEMRRQLEYKQFWRGGQVLAVPPAYTSQRCACCGHTAKENRQSQSKFRCQACGYTANADVNGARNIYPDPKQIKPDQGNSRIFLPKPGWIRCRNSRQVTGIVKNVTVSQSCGKWYISIQTESEVSTPVHSSASMVGLDVGVAKLATLSDGTVFEPVNSFQKNQKKLAVLQRQLSRRVKFSNNWQKQKHKIQRLHSRIANIRRDYLHKVTTTISKNHAMIVIEDLKVSNMSRSTAGTVSQPGHNVRAKSGLNRSILDQGWYEMRRQLEYKQFWRGGQVLAVPQPALRVLWSYREIKSPVTK

SEQ ID NO: 53239 - protein, 424 aa, unknown
  TnpB Polypeptide
VPIEPESHPTVAAPKTSANRVRVLRFRIKDKHRDWLSAAAREVNFVWNYCNDLSSKVFERERRFMSGYDLQAYLNGASKAGLSIGSPVFQQVAEEYATRRRQHKKVRLAWRKSGGARRSLGWVPFKARAVEYRGGQIRFNGQCFGMWDSFGLVDYVAAGARLRSGSFSEDARGRWYLNVAIEVRDMCGPPRPRVLDPVGIDLGLKELAVLSDGRKVAAERFYRDLEPALAAAQRAGKKARSRAIHAKISNRRKDHLHKLSTKLVANHRRIFVGNVNAAALAKTSMAKSVLDAGWSTFRTMLQYKCDDAGVWFEEVNEAYSTVTCSACGARSGPSGLGALGVRQWSCACGVVHDRDVNAAQNILLAGLASMSGSVATKGYTAPGRVDRKVASAARVSNKDSGNALQCTAMAGAGHGPLAEGIPVL

SEQ ID NO: 53240 - protein, 474 aa, unknown
  TnpB Polypeptide
MDARTNQYTASFPSETAKQVYCEFAAASDACYNSINHCRQQAYFTDDESVWDAPVRELRGEYVPIIGSGTFDQLERKNSDMWESFFEQLDKYHNPENQSVTEKPIVPGYWGSRSEGYPLRTLVRNDLYEFEWSDDRSTVEFTIGQALKHKYDYGHYERLRLDVQGEPRWTGKNGQLELCYDEDFDVVCVNHTVRQPELRTSGHSHTQQGHANRPETSSNAQFAAIDLGVNNTVTVVTSAGDAIVCNARGEFQRFHSLTDRIATLQSKLPDGVYSSRRIRRTFSLRGDRRDHHRDATIRLVAEWLCEADVEHVVVGDLTNVLSTHWRARVNEKTHAFWSHGGLLKRLEETFEELGVEWSEESESGSSSTCPACSSEHVERDGDAFDCLDCGYRGHADVVGAANLLVEHTEVSSSEVGLMAQPAGHDAGRSWRGDVEVTHLKWDDHAWTPTRTSEREHAGHSTNEASANPQVHSTR

SEQ ID NO: 53241 - protein, 640 aa, unknown
  TnpB Polypeptide
MSIKEKPRDYFKSVKTSLKSIIKHPEINTKKINDAVLKSNKIVIHTLQFLKLYLLHHYELHSSLPPVNHLLINTTMKILCDVKEDKRGRPKKEATANMYETLTAFYQEHYQPTIQSDKLDYTYLNNVLEYLTEDIQTMYENNIQLHYVDYVERYVNVVWKQKYLTEKIRKLGKTKVEREQRIRKLHKTMRSIKEDLLNVENKEYKSPSFYHVWITQQKHHILPTKEKFQKDRIAYDLKCSPMDYLPCMLYMMKQVEATGETIQNVFPLRSSILPHYISLDTTTLVNLLMRKEQGNKGHYLTGGNLKKNEDKIWEFFFRTERKLFQKTNYLFHHMISTDGVGVSMLFLRKDLVGKRIPVMKKKENAELYVDELKDTTVYQSKKIVGIDPNKGDLIYCVDGCTKDSTIFRYSQDQRRKETKSKKYRNILLRMKHHKIQGKNIYAYETELSQFNRKTLHIDKYKEYLTAKNHCNQVVGAFYQRELFRKLKFSSYINTKRNEQKMINNFRKTFGEPDEVVICIGDWEQRKQMKYKEPTIGVGMRTLFRKNNYSVLLVDEFRTSCRCSKCEGGICEKFLPRMNPKPNKEDIRLVHGLLRCKSGCGTWNRDRNSASNIYKIAYHALHNMARPSYLCREKQCIIPLQ

SEQ ID NO: 53242 - protein, 287 aa, unknown
  TnpB Polypeptide
VPTRDPDPLQAFKKQIEKRRKSCKRAVRLRLFPNRYEQETLFDIGLTCARLWNELSYEKRQAFFRYELTVKRRDEINKRYYHKYRGVLVVNAGQVVKKNDEAWDAFFELLKLRKQGRLPPHIRKVSPPGYWKDRETGEKSIHILIRNDRHHLEPISENEGYMVLEDFDLRIRYVGRIRWEGKQGRLGIIYVNGRWFALVPIEVGVDPPKLSPKGYVKPIYDDEEERKKKKRRIINPRSIRQRDPIGDREAFIDMGLNNLFAMVIWMVLLCSLREGPSSLSITGGRRR

SEQ ID NO: 53243 - protein, 394 aa, unknown
  TnpB Polypeptide
MRTNKFRLYPSKKTEQSMLNTLDLCRQTYNELLGLLNEQKEIDKSQIQGIIPDMKICDARFNQLYSKTMQYECYRLFSNLSSLAKTKEKGRRVGSLRFKSKGWFKTFTYNQSGFKLINTGNRCQTLHLSKIGDIPIRCHRNIAGKVKQVTIKREQSGKWFASLAEETETPKPINTINSVVGIDLGLIDIIYDSDNKKIANPKHLKQCEERLAFLNRKFSKKSRGSNNKNRVRIRLARQYEKLANIRDDFLHKISRDYVNNYDAIGFEDMPINNMVKGCFSKSVLDASWGKLRRYVTYKAESAGKLCIPVNYRGTTLRCSQCGCEVKKELWERVHNCLRCGLIISRDYNSAIEIRNLTISKIRQELPESTLAEMEALPIGQLLSMNQEATTSTAK

SEQ ID NO: 53244 - protein, 402 aa, Spirochaetes sp.
MYRVHKIRLEPNDKQATGLSKAAGVSRFAYNWGLARWTEQYAEYRDDKRDAPPSQLSLRRELNAIKREEFPWMLESTKCAPQEALINLGKAFDNFFKKRGKYPSFKKRGVHDAFKLSSGQFSVDTTGGVARLRIPKVGCVRLSETPRFDGEPVSVTISRRAGRWFASLMFRITDNRPSAHTSPEVVGIDLGIRELVLSTGDHIQVPREYRRRERQLRRAQQSLSRKDKGSKNRARAKAKVARLHYRTACVRENWQHQVTCRVTRDFGTVVLEDLNVKGMTKNRSLAKSVADVGFGELRRQIEYKAARTGAVVVVADRWFPSSKMCNVCGTKTKSLPLSIREWTCAECGIHHDRDLNAAINLRNLAVSSTVTACGEFLSSGSWPVTVVAQDASVKQESDSRVV

SEQ ID NO: 53245 - protein, 358 aa, Parvularcula sp.
MSYITYKYRIKDATSGKWLDRHATACNQVWNFCCNTQRQAELRRYGDRGHFWPSAFDLINLTAGSGKMLGLHSDTVSALCRRFEQNRDTQERSPQFRKSFGPRRSLGWVPITKRALKICGDEVVYLKRRFKLWRSRDISGEFKAGSFTQDARGRWYVSLVCKVEDGLARKDGCVGIDLGLRNLAITSDAEKISAPRLFRRYERKLGDAQRAGNKRRARAIHAKIANARRDYLHKESTRLADNYSFIAVGDVKAAQLARTRMAKSIMDAGWALFRDMLRYKAARRRAVYVDVDERYTSQMCSGCGVVPDSSPKGMGALGMRRWDCCECGASHDRDVNAAKNILRAGLECQPPAEEILAA

SEQ ID NO: 53246 - protein, 438 aa, unknown
  TnpB Polypeptide
MPGEDIYEAEFKNARTNVIHLLPNGFQERKLRKLADAAARLWNELNYERRQQFFRNEGVDLKGTWHKYYEKYKGVLGVNAQAVLQKSNEAWNAFFSLLRLKKEGKLPPFMRRVNPPGYWKDRASGRRRLILVVRQDRYVVDEQSHVIILKDFRMEVRFVGRLRWLGKQGRLEIHYDHAKNAWYAHIPVEVGVEETKTGKRSKHVVKGERRFIQIATPKGNRATSIDLGINNLASVVADDGTWILYKGMRAKEDYFYMQRLVSRIQSLRDSLKDKLPSDAIDELSREMRRLYGKLMRRLLHLYRNFAKHLIEQLHELGVSTIYLGYPFNIAQDKGNKFTVNMWSYRKLIEAIELKAQEYGIRVFEVVEYNTSKYCAYHNVEVERRPRGVVHCPRGHKLHSDLNGALNIMKKATGEIPLVIKKPLSFIVDHNRVAPVKAG

SEQ ID NO: 53247 - protein, 369 aa, unknown
  TnpB Polypeptide
MKLVANLKLTPTPEQESALRSTLERCNEACNWLSQSAFEQGVFRQYDMHKSFYAELRSRFGLSAQVAVRCIAKVADAYKLDQKKVRVFRKHSAQPYDDRIFRFVDGDMISIWLLYGRNKISFVCGEHQRRLLEHRKGEVDLMFVRGKWYICAVCDFDDPGLLTPDGMLGVDMGIVNIASDSIGNQYSGAGVEAYRARYAKRRAELQRVGSRAAKRRLRKIGGKQQRFQKHQNHCISKAIVSTAERYGMGIAIEDLTHIRSRVKANKEQRKRLHNWGFGQLRTFVEYKAKRAGLPVETVDPRNTSRACFECGHVSKSNRKTQSEFRCQVCGHSNNADLNAARNIAGRVLVNVPESFSHRNVLGAVKSPVL

SEQ ID NO: 53248 - protein, 455 aa, unknown
  TnpB Polypeptide
MSYNNGFGMGIVRVELNRIDRGKQRIFKDTLAVFRDAVSFVIHVVCDHVDKVSVLDSREGLTFVEHLIHTTKNNEAEYPAFDKIFYKFPSYMRRSAIHAAIGHVMSHETRCIQYYGKREKLVSHGIHYRKMEPAFTYTPNVFPALYKMQSFSDDGCSVKIKVRAGSTWDWITVAMPGRDYRNLMKARALGTLKNPRLVYEYHKYYLEFPVKYRTKKFPETPLEERTILSVDLGLNNAAVCSIVDASGTIHGRCFSPFKADTDRIDHVINLIRKKAASSGKGQSLAALYTKLEGLKDNFVKQLSRWIVDRAREGGVYGIVLEHLGGMKGRGKTAARVHHWCRAKIRGYISGMAMREGIRVFLVNPKNTSALAFDGSGLVTRDNSNYSMCTFKSGKRYHCDLSASYNIGARYFLREYKKSIPETEWSELAAKDPGLSKRTTWTLSTLRSLNAHLKAS

SEQ ID NO: 53249 - protein, 378 aa, Dictyobacter sp.
MLMIRGYKTELDLNNAQRTLCLKHAGAARYSYNWGLKRYQEEYQAGRKAPSAISLHKELNVLKQTELPWMYQVSKCAPQEALRNLEKAFKNFFGKAKLKTQGKYRGKLGYPRFKSKKKGIGSFRLTGAIHVFEDQIQLPRLGTVRLSEHGYIPMTAKVLAATVSEQAGRWFVSVQVEETAPDPINATGPVIGIDLGIKTLATASNGTVIANPKALRSNLKKLRRASRQHSRKQKGSKNRAKATRKLARLHVHIANIRKDALHKATSQLVMKTKSPDVRPAVIVLEDLNVSGMLKNGRLSRAIADVGFAEFRRQVEYKAQQVGIMVKCVSRWEPSSKTCSSCKVVREKLDLSERTFVCHACGLVIDRDLNASYNLADLA

SEQ ID NO: 53250 - protein, 203 aa, unknown
  TnpB Polypeptide
VPITINKDKVLGLDYSTPNLYVDNNGNSPTSKLKYFKLSAEKLAKEQRKLSKKVIGSKNWIKQKQKVNKIHCKIANQRNDSLHKISTAITKQYDAIVIEDISIKEQIRSRKYKNYRKSILDNGWYNFTTMLDYKLKEKGKKLIKLDKYYPSSQICNCCGNINAAINNDNIRKWICPSCGAFHNRDINAAINIKNEGLKILGIA

SEQ ID NO: 53251 - protein, 334 aa, Lyngbya sp.
MHPHSLPTIKAPLSYGNLAVGHAARTTDGFLDSFIFLSYSLRKVVPRQMIVLEFKVKGNKTQYAAIDDAIRTGQFVRNKCLRYWMDNKGVGQKDLYRHNTWLRSEFPFVKDLNSHACQASVERAYNSISRFYSNCKKQVPGKKGYPKFKKFCRSVEYKTSGWKLSPDTKSISFIDKKGIGKFKLKGTWDLWRYDQKLIKRVRLVRRADGYSVQFCVKVDVKESLEPSHTNIGLDVGLKEFYTDSKGDTEPNPRFYRKGEKRLKFYQRRVSRKKKGSSNRKKARNRLGKTHLKISRQREEHAKRLVRSYRKKSAAFIVGRLCIKGGRFCCKAALF

SEQ ID NO: 53252 - protein, 342 aa, Ensifer sp.
MSASPSTRPICRTIRNGVVPWCRSRDAASASISIRTGIGIAAAANTKGPGSVKSTKLLDHALVKLDLDKDASAELVRETLAAVCGRAISMARKHRCGTIVLKKGLGKLQSCGRGRSLNRLLNYWARTVFVQMLTRRARLAGIDVLEVSAGYSSAIGNLAFDAPDACASATEIARRTIARLAGIKGVLLALEEGCVSRLWKNGTVPAELGSWQEVSKRRRLATAARTPTCRLARGVPMSTRRRCSVGMRSSALAGVTDRDFCPGCLLPSGTQQFGLLFNVEVSLRDRIPRENPNSDLYSEIVEGGATLKDVFQRLCGRVEIRTQGACRDSSNCLTFADGFNDH

SEQ ID NO: 53253 - protein, 695 aa, Ensifer sp.
LQTISIPYRCSDEDRAFLGDLRRVQSAAIRTAYANGLHADGSTPKEMDLRNLVKTRFAHEGLLDSWAIHCATKLGIWKRKLTPGGTAVFGGRTELERRRKGLISPDEWKRKRLHPFVSFGDRQKARGNQNIHLIDETAVVVKIGRKESGGRSGKTVTRTAALHLARMTGNRGIIMRQLTAICAQKDEADRINVTFSISDTHVSVTFDPTDLPNHPQRRRPVVPIKGRCLGIDLNPNWIGLAAASNTEDQGSVGKTRLLEHALVKLDMPKNASAELVRETLAAVCDRAISMARKHRCGTIVLEKGLGTLRSSGKNRTLNRLLNCWARTVFVQMLQRRARLAGIDVLEVWAGYSSTIGNLAYEAPDACASATEIARRGIVRLAGMKDVLPALEEGCVSRLWKNGKVPAELGSWQDVHRTIKAAKIGYRRPHPDVPLGARGSDVHGTHMFCGHAVVRLARRQRPGLLFRLTPARPDAAVRIFAQCGRVPSPALHTKIRIAEKASFDVSAILATAERLKYTSGVKQVISKLIEEPSEDFVRLVAGSVYEGRITAQVKKMLTGVVRTAFRDVIMVPVKNRLSSALADTEEVIEKIDEPVEEEPEVVTTEEEREGYMIVKAIVRDTISSKRVVMRDQKSYCGILIDNNNRKPLARLHFNRSVKYIGLFDGESEERLIIDSLDQIYDHSDRLRVTAKKYFAE

SEQ ID NO: 53254 - protein, 243 aa, Haloarchaeobius sp.
LVTVCHRDERGHQTESDGQPDRTRSGDGSPTAPNLWNDEGKTVRQLRETYFTATRRLQQRGSERIAESFGDELWRQIDHIVHTVTSEVVAYADGFENPVLVLEDLTHIRENMDYGAFMNRRLHGWGFAKMHGQIRYKAAERGIRVKTVNPAYTSKTCHCCGEEGSRPTQVTFNCSNSACWVSEYQADVNAALNIADRYRSGESHSREHTSGDDSAAEGGRLTVPQDSHADADTQQTTLGMNAS

SEQ ID NO: 53255 - protein, 345 aa, unknown
  TnpB Polypeptide
LHGLVRNDLYELDLDEDGSTLKFGVGDVLEEKYDFAYQERITLDVRGNPHWEGEDARLELVYDEAADVLRVTHPVRIRPDHVQEQRLDGFTHTLDPENTTHAAATDVGANNTLAIVTEQGDTAVYHARPEFERFQTLSDRIAALQSELPDDQYTSTRIQRLYDERGEKRDHSRDAAVKHAAEWLLARNVDTVYVGDLTDVLETHWSATINTKTHAFWSHRQLLDRLELTFGDVGIIVKEVSEAGSSSECPDCGSDDISRDGDSFRCQDCALDAHSDIVGAWNLLQNEIGPMARPAALSAGRQRDAPSDGAYWEWNGHDWLPARFGKQTRPLDQTSLGKPASSQPG

SEQ ID NO: 53256 - protein, 505 aa, unknown
  TnpB Polypeptide
MRVPPEQPARRLWMCYPRRFFGSVFAAVAYCFKTVSTRFESGRFSSFANRISKVRSSGSIRTLSAIFAIAVSLMLCYDCHMVTRLKAYKFRIYPDAAQRQQLAIEFGNNRFVWNRCLDLRNKDYEAYKAALVAGDTDANKPAWNYVSLARLVTEWKHGEFPWLADSVAACLTQTLIDQDKAFQHFFRRVKTGQKPGYPRFKSRHGKQSIRYTLDQRQIDRAYRAGELLKLPKLGAINVRWSQVPAGIPKMATVSKDPCGRYFVSFACEVEIQPLPLTGKTVGLDLGIKDVVVSWDGERVTKSGNPRHLKRQLKHLKRQQRRLARMTKGSNRRRKQRVKVARIHARIAASRADFLHKTTTALIRQADVIALEDLNVKGMVKNHCLAGAIADVGMGEFRRQIEYKAAWYGRQVVVVDRWFPSSKTCSACGSYQAKMPLSVRDWTCPDCGTQHDRDANAARNIRSFATGGEPGIARGACKNLSATVGTREEARTEEIHDDDRRERAAA

SEQ ID NO: 53257 - protein, 324 aa, unknown
  TnpB Polypeptide
VLDKNWKSFFASIKDWKIHPEKYLGRPKLPKYKHKENGRFNLILTNKQFKIKDDYIFFSWNPLKPLNNLFKTKVNGKLMQIRFIPKLNNYVMEIVYEIKIPELNIQNNNIASIDIGINNLATIGNTIGLKPIIINGRPLKSINQFYNKEKARLQSDLKLRHNKNWSNKLQQLTDKRNNKIKDYMHKSTKEIINWCIKNNIDTLIVGKNINWKQGSKMSKKVNQNFVNIPHAVFIEMLQYKCENIGINFIETEESYTSGTSFLDRELPIKENYDKTRRIYRGLFKTKKGELINADLNGAYQIMKKVFPKINIENPELHPKIINIA

SEQ ID NO: 53258 - protein, 408 aa, unknown
  TnpB Polypeptide
MITKTILLKIKDPDILKFKLLRQEYSKSLNSGIEYLSQQWPNKTSHSQLYDYLKEKTIIPSSVLNEAVRLIRSRWITFCKQRKLHIKTSVPHFKNTVAVGFNNQNWSARKNGCKYSIGFPIDGSKPYFELALSQRQKDTVDRLSTAQIKPGNGQLLERKNKWYFVATLNFSEPEQTTGDNTVGVDLGLNNIAVCYDKEHDKTKFYSGKEVRFHRTKYASRRKSLGKAKKLDCIRKSKTKERQWMKDFNHKLSRRIINLALKSKSGIIQLESLKNIRTTAKTNHKQRQRLGTTLHNWPFDQLKQFVEYKAKELGILVNLIDPVYTSQECPKCHHISSSNRNGIYFHCRACGYRSHADRVGAINIANRQPCDVVTASLPGIVYLSREGLPDTAPNLRVARTGNGQKALTT

SEQ ID NO: 53259 - protein, 381 aa, Streptomyces sp.
VKWSRTLPSTPSTVTVVEDSAGRYFASFVVETGPDEVLPETTPELGIDLGLGHFAVLSDGRKVDSPRFLRRAEKRLKKARRALSRTEKGSRNRDKARVRVARAHARVADARREFHHRLSTRLIRENQAVAVEDLAVKGLARTRLAKSVHDAGWSAFVSMLEYKAARYGRTFIRIGRFEPTSQVCSRCGVKDGPKPLHVRVWTCGGCGAVLDRDINAAVNVAKAAGLAVTACGARKTGTRPGTAQRSRNPLDTAAFNDAVGRESPLSGGEDVNTSSSARRGSYGTRRARTAPRRRCSTSCCGGANSSARQSQPRRDRLSGRPRRVQSSSLTMSSITPWFVNRVSQVANRGPNAHMAALPMAASSSSSGGARPKFRSSHIRYS

SEQ ID NO: 53260 - protein, 384 aa, Streptomyces sp.
MKLVVQVKLLPTPGQASALEATLRACNRAATHASAVAFAEGLKDRNGLQKEVYAGLKADFGLSAQPAVRVVKKVVDAYATLKANLRAGNLGPSTSKRYRTAVGTPVVFRPGAAQPFDDRCLSWQYDARTVSIWTVDGRMKGVRFACSPDQLKTLVIYRRGESDLVRRGGTWYLIATCDIPDPEVYEPVDWIGVDRGIVNLATTSDGTSHQGRRLGRYRRWQARKRADLQKKNTRSATRRLVRRAKKEKRHATHVNHQISKEIVSVAQRTGRGIAVEELGGIRDRVRLRRDQRGTLSSWPFHQLGQHLAYKAKKAGVPFLEVDAAYTSQRCPRCGHTERANRPDRNHFCCRRCGLAGPADVVAGVNVRDRARSAWVFVTAPAPSP

SEQ ID NO: 53261 - protein, 370 aa, Acholeplasmataceae sp.
MGVSLMNKAFKFRIYPTQTQQTLIHMTLGHNRFLWNKMLEDKQKQYELDKTMLYNRPAQYKDTYPFLKVIDSLSLANTQLNLEKAFKQFFNHKQDFPKFHSKKQDYGYTTNLVNNNIVLLKGYIKLPKLGEVKIKQHRAIPSDMTLKNVTVSKSSTGKYYVSILYEYQKEIKRQEIKTSIGLDFSMNHFYVDHQGFKLDYPTDIQTDFIKLSILQRSLSRRIKGSSNYHKKVLEIALLHERIRHKRDDFLHKLSNAITKRYDLVSVERLNLIEMSQTNPYYAKQISRFGWTRFVSFLKYKLESQGKTLMVMDQWYPSSKTCSTCGEIHSELKLNNRVFECKQCELHLDRDHNAAININQEGLRQYKLAFQ

SEQ ID NO: 53262 - protein, 409 aa, unknown
  TnpB Polypeptide
VTNEDIKRYLTAERDAMKTGYSIKTWKMRLFCPEKQMIETTEALYREAVAFYYELLKESEELWAENLLTIQGHLEKLTVPGRDGREPKYIPPGGKLPVYFRRSAMNKAAMAVKTAASAESFPEKIDANITFFKGMYRDLTDTSVVLKLWNGKKWIWVSCGLTGRPFPKEAAILSPTLVHEEKWLMFHVPVKQENSDARTAKERMQEGARVCSVRFTNTDSFAVCTVLDEESRQLAVKNCRGGNAYRHHCKALMKKVEASRAFTDKDNVSQPNRKYYMHLKHLNEHYAHQVSKEIIDFCKEKHTGILVLPEYDEDFSRISMYRSGNYSPLHLSIRIRNYLKYKAWAEGILVLELRADGTEKQCSICGATGKKQGSVFICQNGHQVNRFLNGARNLGRKCQESFRKSNKPS

SEQ ID NO: 53263 - protein, 469 aa, unknown
  TnpB Polypeptide
VQRLQAFKYELLPNGQQERQMRRFAGSCRFVYNKALALQKERHEQGQKKLGYAGLCQLLTAWRHSTDTAWLADAPVHPLQQALQDLERAYSHFFAQRAGFPKFKKKGRSDSFRYPAPKQIQLDQANSRIFLPKLGWLRYRNSRDVVGKVKSVTVSKHAGKWFVSIQTEREVNWPIPQEGAVGMDMGIARLATLSDGTFYAPLNSCKRHEARLRKAQQALSRKVKFSNNWKKAKARLQRIHSQMANARRDFLHKVSTAICKNHAMVCIEDLRVRNMSKLAAGTADAPGKNVRAKSALNKAILDQGWYEFRCMLEYKLAWKGGRLIVVPPQNTSRTCPCCGHVLSDNRQTQAWFECVACGYENNADRGSGPEAFRGSGPEAFRGSGPEAFRGSGPEAFRGSGPEAFLVGAINILARGIQLLRDEGQDTADAAVGMRVGEPPVSARVACGSNCTGGRKQEPAETTAQGAIRA

SEQ ID NO: 53264 - protein, 418 aa, unknown
  TnpB Polypeptide
MTRAEKIKKSIQETKKRREDKKAIVYQLKLQNLSGRAQELLGRAFLEAKWLYNWLVSDTRRLELPANKVCSVEVKVGETFEERQLTFLGSQVKQEVADRIHDNLKALARLKKNGHKVGVLKPKRFVNSIPLKQYGITYKLDFARNRVRIQNLGGFRVLGLHQIPPTAEIANAVLVRKPSGYYLHVTCYLPKEYFHREPVAEMVGIDFGVGSKLTLSNGLKINFEVRETPRLKRLQMRLARTKKGSRNREKIRFLLRKEYEKLNNRRRDAQNKILAFLRLYKKVVFQDDCINGWTTLFGRQVHSSGIGGLKSRLRTSLETPIVVKRVEPTTRECFACGKRHKMTLSSRTIKCDCGWECDRDVNGALVVARKGLGLSPDQAVRLDWPELKPLERKATAQILGSNPYICVSFLEEGGSSTP

SEQ ID NO: 53265 - protein, 381 aa, unknown
  TnpB Polypeptide
MKVQRGFQTELAPNDVQRTMLLKNAGAARYTYNWGLQQKKLAMDAKTKIPNNIELHRRLNALKPSEFPWMYDVSKCAPQEALRNLDKAFDNFFRKCKLKKQGKFKGKVGFPRFKSKKKGIGGFRLTGTIKVMTDRIQLPRLGTIRLKERDYLPTDAKILNASVRERAGRWYVAVQVEMEMPEPQVKPEAVVGVDLGIKTLATCSDSEVFENPRSLGKNLKRLRRFGRQVSRKEKGSRNRRKAADRLAKFHKKVSDIRKDVLHKITTQLTKTKSVVVIEDLNVSGMMKNRCLSRAISDVGFHELRRQLEYKGGWYGCRVIVADRFFPSSKTCCECGQIRSDLTLSDRVYVCPCGNEIDRDLNAAINLERYSTVSSTGSYACG

SEQ ID NO: 53266 - protein, 463 aa, Streptomyces sp.
LGVLREVAAPFVVPGPSGVAVRDRLKQLTVADERVLRLVGDHLGSLASRDLRVRKSRRLRVLEDRLEAVRADWQAGVVHVVRGGKQLLNTRHHLDAAGLSEAGWRARWEAARRFLAADGESGKRYGNETIRVCPDGEVSVKLPAPLAHLANAPHGRYVLTARMAFARRGEQWRDRITAHRAVAYRIHEDVLRGRWYLTASWANPPVNCLPLAAARMRGMLGVDTNADHLAAWRLDTHGNPVGAPLRFGYDLTGTATHRDAQIRHALIRLLHFAKRRSLAVAVEDLDFAGVKTREKHGGRKRFRKLISGLPTARLRARLVGMAAELSIPVVAVDPAYTSKWGAQHWHKPLTSINRATTRHDAAAVAIGRRALGHPVRRRTAPPLQHQSDAAGHRTVQAGNGSRARKETRPRIPGPRTRCVSPDAERKRATSASKTVRDAPDAQVRVQDSLLLTEEERCHGVHDR

SEQ ID NO: 53267 - protein, 498 aa, unknown
  TnpB Polypeptide
LKESEIEVFVWRNTAPNKKEEQLIYCVQNLILDSLGHKKLALEETSKMALTHWKSVIAEAKRKLAHTLKRFNDQDRHYACWLLCGVNRQFFELLDGRIPVPNPEVSFDRNYCLSYDRPLSSKTLRSIAGVVRRTVNKVRRDSVCYPRTKAFHNRIDFDTSCYTVRSTEDAQFLELMSLQPGKRISLRLKGRSKIRGTLQLIRDTAGTYSLRVYVPQECEAQRKTGTVIGIDLGYTEMMATSEQELLGTDLGQYFSAISDKRRKNSEGRNRMYSLFRNLLKKSGKDKLAKAERIRKNNLGRKKQRARYIRDIGVIKTIVNRELNLLFTRRKNPIKEIVVEDLSARMKVHFGKKWNRRLSGWMRGYLQERIRYKAKKFGIEVSEVNPAYSSRECPRCHCTDKENRQGNSFKCSRCGYHGHADLVAALNILGRLGDKEIRIGMPPSRVKAVLDGRYVGWKSLNHTVSDKTSGVARVVNESPRSASSKSELRSNVQVCIASR

SEQ ID NO: 53268 - protein, 427 aa, unknown
  TnpB Polypeptide
MQPIAKPKRKATYRLYPTPRQALALEALLRSHQQLYNAALEERISAWRKARKTIGYTDQCASLTEIRRDLPEWAHANCSSQQMTLRRLDKAFAAFFRRVKTGEAPGFPRFKSLSRFPGFSFKSHGDGWRFTPDEGWRHGTLRISGVGHIACRGKARQGGEVCASDLLHRDGRWFLSLTVQPAAIVRECNGHSAIALDWGTQTLLSGVREDGSSFTLDNPRWYQASKDEITALQQAVSRKNRGSERRKRAVRRLARARADLARRRLDFLHQQTCRLAREHALVAMEEIKITNMTRSAKGSVEAPGKQVAQKAGLNREILDTAPALLMQLLRYKVTDTGGLWAEAPTRQLKPSQTCPACGHVRKKALSERTHRCEACGHTEARDFASARVVLNWALYGTPVAPQSRQELAEAGREPCETPSNRVATWVE

SEQ ID NO: 53269 - protein, 670 aa, Bodo sp.
MDDSEISIEDTVKKKTFSIQLNKKSYINNIFKHLSSITKNIFNTTIYITNIYYKHKNDIFENSYEKYNDLVEKTDLAFYEILKNEIKFFYDVHSDKSSICNINHKFIMNYIIKNYNGILLNNTNFYPIENKIIDELKDIIVFSNKYEFNDIIRQILKNRYDGQYYSLQKKMLSRIPFVIEDDILIDNVRNNEYLFVYKEQFKQQIKLDNKIKSDDNILKQFIYENLGNNYDRIPSDIICNTINKAQNTFASYWSKRRKGMFANKPNYIKDSVFVVPYFERSFIIKNNKVRLTVGKYVAANYNTITNNNLICLNKEEKTEYKKYVDEKYLITTDKNKKIPKNKNYIIDNKTERKYIDKNDENIVNGYYVYIDIPKKICDKTIKMIEICPLYDGYRYKINFTYDTDKKIEDEKLEIIEKKINCNPNDALSIDLGMGNLMAIYDPSGYQFLIKGTYLISLNKKFNKKIDELNKKISKTTSVDEKEKLRKIKQTLLLKRENKINDHFNKIVKFMENKYINKKVIVIGYNINWKQRVNLGKTTNRKFYEIPYSNLLKKIKDKFGNKIIITEESYTSKCDALSFEKICKKEKYSGKRIVRGLFSSEKKKLINADLNGAINIMRKKIELKEIQGKSIYNPITIKMFRNGTLSQSREVIITSEGKAIMELSTTVIKLI

SEQ ID NO: 53270 - protein, 656 aa, Bodo sp.
MRRFIPRTSDNEFIVLADNISTYSTHYVDISTIPAYSTNIKTNSWFTNLCSNYSLPYYEPSFNFSKCENVIPNRKTIKINMNLNNKQKLILDKWFYSSNLMYNQTIIFLRKHISYCSIQNYKSLHNLMPKYYENCKNMKNTKHILYKKQMLYSSVLVKLEKLYITDNKTKKEYSQIITLKKKISEINIQITKLNIELDTYSKKNIDLSKQYHNYVQLEKHINTFLSYEHIRTKYLKKIRDNIALKYSCYNDDRKYKIHTHSLDGAIKQACANYKTCITNLLDGNIKRFRVRCRNSDNQKKLVEIDSESFNGSENNYCICKKILGNIDYTYNNNKYTLSTKQTSTIYFDGSKYTFLIPIHIEKPFATVRKPYTALDGGVRDFLTGFDNNSLKNYGHNVANVLYKYFNKIDKLKSVSYMGDYTNLLNYKNKLMSKKNYLEDVYICDKLEEIEEQLKYKSTSIEKIIENCKRIIKNNEKLINVSNDKNKIIKLYASINFNKYRIEKLSKMNEKEREKYTKYINYKKANKVQFLNKKIKWKIDELHWKIARELCENYEMIILGKLDTQSILKNKDLNKGTKRVLQSLSHYKFRERLVYKALSLGCKIIVQNEKYTTKTCTLCGHYNEWVTTEHTIDCKGCKKTYNRDNNGARNIFLKSLA

SEQ ID NO: 53271 - protein, 529 aa, Bodo sp.
MPKYYENCKNIKNTQHILYKKQMLYSSVLVKLEKLYITDNKTKKEYSQIITLKKKISEINIQITKLNIELDTYSKKNIDLSKQYHNYVQLEKHINTFLSYEHIRTKYLKKIRDNIALKYSCYNDDRKYKIHTHSLDGAIKQACAHYKTCITNLLDGNIKRFRVRCRNSDNPKKLVEIDSESFNGSENDYCICKKILGNIDYTYNNNKYTLSTKQTSTIYFDGSKYTLLMPIYIEKPFATVRKPYTALDGGVRDFLTGFDNNSLKNYGHNVANVLYKYFNKIDKLKSVSYMGDNTNLLNYKNKLMSKKNYLEDVYICDKLEEIEEQLKYKSTSIEKIIENCKRIIKNNEKLINVSKDKNKIIKLYASINFNKYRIEKLSKMNEKEREKYTKYINYKKANKVQFLNKKIKWKIDELHWKIARELCENYEMIILGKLDTQSILKNKDLNKGTKRVLQSLSHYKFRERLVYKALSLGCKIIVQNEKYTTKTCTLCGHYNEWVTTEHSIDCKGCKKTYNRDNNGARNIFLKSLI

SEQ ID NO: 53272 - protein, 644 aa, Bodo sp.
MQIDSDGCEENYLCIADYVTNSTINEQLSLKDYNNIFDFMTNISKNVYNTVIFFNDVYYKFKNRMFKNILHLFFIHNTQKITEENIQAQIYYQYDLFYKLYVSSKKNSYNNNKILYPYIKDYICKHNITLMNNNYNHYKNNIIKNIIKEFKFSYSDDNIKHIELISVVETILRSFYNKNWNNTLNEIKNKLPCTINNAEFINQIKKNDKLKNNNNYKEQFNEYAELYKIKGTSDRNIISRFVYKNLGNNKNYLPSNVITEIINKSFNGFILYFSNKEKGIKCSTPKYLKKNDKYSLVYSPQSFKIIGKYVRLTVGEHISKNLNSIVKNKYVLLNENEKTYYKMYVKKKHMKTIDKNTKVPITKNYIVNDNYIDKYDKNIIDGYYLNIRLPKKVHKKSIKNIEINSIQNGLKYKISYSYKHMATTKEEKEITEKNSISIDLGMVNLFSIYDPTGEAKIIKGNQLISLNKFYNKKIDKAHSIAKKANDKEITKKIQKMEINRKNKIDDYFDKIVAWIEKEYSHKENIIIGYNKGWKTNVNLGRKMNRKFYNIPYSRLLKKLKNKFGNRIKITEESYTSKCDALGLEEIKYHDEYLGKRVQRGLFSSSKNKLLNADINGAINIMRKKISLDEIKGEIQNPKVVRLFR

SEQ ID NO: 53273 - protein, 153 aa, unknown
  TnpB Polypeptide
VACTTAAGDQYCYSGQEPFRQFRETTERIADAKAKLPDGQQTSTRIQRLYRKRSRRRDHAVNALLRDLVQRLYDDGVETIYHGDLTGVLGEYWSVEANLKARTFWAHRQCLDRARERLRRVRDRRGSNVRKRGPPKRVRSAASASRRAAIVRR

SEQ ID NO: 53274 - protein, 365 aa, Lonepinella sp.
VYEVSKYATQQPFLNLNLAFQKFFRDLKQGKVSYPQFKKKRDNAGSYYIGGDQIVLSDTNKNSKKYKKIITECNAQYLKVPNLGYVKLSERLRFSGKINSVTISQNGDKYYASFSVSIAEENYQSQPKTKRGLGIDVGLKSFVSLSNGLEIKSPKPLAKLARKLKTKSRQLSKKQHPKTKGEKTKKSANYLKASLKLAKLHRRIANVRNDFLHKLSSSIIKQADYICLEDLNVKGMMKNHKLAKSIADVSFYEFRRQLEYKAKYNGKQIIFADRFYPSSKTCSQCGSIKKELKLSERIYCCEDCGAKIDRDYNASINLLRLIEKQIGQVLPEFTPMDLTAMQSDLAINRIVTSKIEVGIQQKSHL

SEQ ID NO: 53275 - protein, 427 aa, unknown
  TnpB Polypeptide
MNRINFLDKLIISPYNIFSGKGGDIVVQTKTLKIRIYTTEEQSKKFLALTNAYRDAENFISQYIFDHDCDTNFYRVCKEVYYQIRERFRLKAQISQACVKEVISRYSTVDTQLRQKPFRYRENGKTYKVKRDSSWLLKPLKFKRLTATLVINKDWSFTKGKISLLTMGKRELCDYDHNIVERFLQEGYVFGSGKLVCHRKGKKLLWFLHIAVTKEIPDFDRKNPSAVVGIDQGLRFLITAYDGKKTTFVSGKPIAKKRAHYAKLRARLQAKGTKSAKRLLKKLTGRETRWMTDVNHQLSKALVTKYGANAVFVLEDLTGVSFDERNLKRTKDGKRELRSWTFHQFEQFLQYKAEAVGAKFLKVSAKYTSQRCPYCGKIDKSQRDHDYHEYRCTCGCRMNDDRVAAINLQELGRRYISGEDNPKIMKE

SEQ ID NO: 53276 - protein, 432 aa, unknown
  TnpB Polypeptide
MQGITATLFINFSIFVKMLRAYKYRIYPTDEQKVLFAKTFGCCRFVYNWALNLKITAYQERKETLGNVYLTNLMKNNLKAEHEWLSEVNSQSLQSALRNLDTAYTNFFRNTQSVGFPRFKSRRDRQSFLCPQHCRVDFEKGTITIPKAKDIPAVLHRKFNGMVKTVTVSMTPSGKYFASVLVDTTIQELPVTPIQDNTTLGIDLGIKSLAVCSDGRTFDNPKNLQKSLDRLKLLQKRLSRKQKVSSNRNKARIRVARLQEHIANCRKDNLHKTTHALTHDSQVRTICMEDLNVKGMQRNHHLAQAVGDASFGIFLTLLEYKCSWYGVNLVKIDRFAPSSKTCGKCGYIYKGLKLSERSWICPECGTHHDRDFNAACNIKEIGLRALPTERGKVKPVDCPLVDDRPRVLKSNGRKKQEKRGGIGISEAAKSLV

SEQ ID NO: 53277 - protein, 433 aa, unknown
  TnpB Polypeptide
MFEAVKVALDPSPAQERRLVSHAGGARFAYNVMLARVKAAMDAGESMDRSFYSLVKDWNANKNELAVGAEGSPWWQENSKEAYSSGIEALSKGFSNWSKSRKGDRKGRKVGFPKFKAKGRATTKFTYGTGSFGLIKDDPKALKLPRIGRVHCMENVAKRVGEAKVKRMTISQRAGRWYASLTVEREDKPVEKLPKGGAVGVDLGVKTLATLSDGTVIENHRYLRKSERKLKKAQQALSRKTRGSNRHAKAKAKVSRLHDRVANQRQDGLHKLTTWLTRKYSDISIEDLHVAGMVKNRHLAKAVSDASFGEFRRQLEYKTTRTGARLHVVDRWYASSKTCSGCGSVKAKLSLSERTYTCDGCGLTMDRDLNAAINICVAGSAPETLNAHGGTVRRGSPSGHVALVPVKCEPSGGESCVSLGTDGRKAVLQATVR

SEQ ID NO: 53278 - protein, 402 aa, Escherichia sp.
VERLQAFKFQLRPGGQQEREMRRFAGACRFVFNRALARQNENHEAGNKYIPYGKMASWLVEWKNATETQWLKDSPSQPLQQSLKDLERAYKNFFRKRAAFPRFKKRGQNDAFRYPQGVKLDQENSRIFLPKLGWMRYRNSRQVTGVVKNVTVSQSCGKWYISIQTESEVSTPVHPSASMVGLDAGVAKLATLSDGTVFEPVNSFQKNQKTLARLQRQLSRRVKFSNNWQKQKRKIQRLHSRIANIRRDYLHKVTTTVSKNHAMIVIEDLKVSNMSKSAAGTVSQPGRNVRAKSGLNRSILDQGWYEMRRQLEYKQLWRGGQVLAVPPAYTSQRCACCGHTAKENRLSQSKFRCQVCGYTANADVNGARNILAAGHAVLACGEMVQSGRPLKQEPTEMIQATA

SEQ ID NO: 53279 - protein, 394 aa, unknown
  TnpB Polypeptide
VDRTIQAQLQLFPELAEALHETVSQFTQAFNTACRKGWEQRTGNAYTIQRFAYRESKNDLPALVSDLHIQAIHKASEAVKSAISRMKKGYRVSCPQSISCPPRYNLHTFKVYWDAGLISMSTSRGRMKIPFKLPEYAQYATGNPAATADLIYRKGKFYLHIVVKLPDVAFASNGQAVGVDLGITRPAVTSDNRFHGDRHMKEVVKRIFRLRRALQAKGTKSAKRHLRSLAGREQRFRRDCDHVLSASILNGIEPGTTIVVENLTNIRSRVKASRGEAKRRLHSWSFAQLKEFLEYKAEAIGCQVVAVDPRHTSQRCNRCGYTYRGNRRSQSDFLCRKCGFHLNADLQASRNIRDRYLVGWGISPSDAPPSTGVSSRPALMGLGRNKLAALAVSG

SEQ ID NO: 53280 - protein, 422 aa, unknown
  TnpB Polypeptide
MNNTATFVTRTILIKTNNNALYDYFDKFVCLYQFLYRKVYHNYKHNLNNQNESQYRSDLMKQFNITNRMAKAIILDVKTSINSHKSLFDYQLNKSKIKISKLFIKIIKLKKKLQTKKYGRFKTKINLQRHLFRCQVELNKLKQFLTYNKQSVTFGTKKLLNSNINKFLSKRDNQINYYGDKNEYRQNQQFQITYNIKFNRFDYKIRLDNKFIKGSKYIYGSFYLKDKQAKNEIRNILKFKDRPLSYKIIKRNDKLYLHIMFRHNTSVNVSDNNGVLGIDFNKGFITMSNIDKNGKLLKLYKIPYIHKAKASICDNSLNQLVNTIINISLDTNKIIVIEDLKSLNNKKLVSDNKKYNSMITLLKFSKFKKKLINKACKVGSDIKLINPAYTSQIAKNKYCYTMKLNIHSGASYVIARKYYNLD

SEQ ID NO: 53281 - protein, 102 aa, unknown
  TnpB Polypeptide
VEDLNLKGMSGGLHLGKGVQDNGYGQFLFMLGYKLEECGKHLIKVDRYFASSKICSVCGHKKKELALSDRMYVCECGNRMDRDVNAAVNIREEGKRIYKECA

SEQ ID NO: 53282 - protein, 414 aa, unknown
  TnpB Polypeptide
  misc_feature (285)..(285): Xaa can be any naturally occurring amino acid
  misc_feature (312)..(312): Xaa can be any naturally occurring amino acid
  misc_feature (328)..(328): Xaa can be any naturally occurring amino acid
  misc_feature (332)..(332): Xaa can be any naturally occurring amino acid
  misc_feature (350)..(350): Xaa can be any naturally occurring amino acid
MMNAYKFRMYPNKAQTAILEDTLEICRRLWNTALADRKNTYKETGVGRTYNQQAAILTIEKKENPELKTVFSQVLQNVLKRVDIGTAAFFKRLREGAKEPGFPRFKREGQYKSFTYPGSGFEIEDDHLILSKIGTIRIFKHREIEGQIKTCTITRDRTGCWYCSLVTELEDVPKIIPETAIGVDVGLKHMAAISNGEYIEYPKYYYQSEERLGQAQKEMSRKKKGSINRNKARTKVARIHKHIANQRADFSQKASRKLVDMADVVVFEDLQIQNMLKNHHLAKSXSDHAWGMLIRNTISKAESAGKIVVLVXPYNTSQRCSNCGAKVXKDIXTRVHACPRCGLVMCRDRXAALVILADGLSVSAYRDMASTLGEPLKPSYIDEIGSPAPSGAGRKSRQMHSDEIRNDWGQFAPI

SEQ ID NO: 53283 - protein, 386 aa, unknown
  TnpB Polypeptide
LTLKIRIHPSGEQREILNNTILKYTESFNRVCEVGWEKKRVNGVELHHDTYFNERSLTGLPAQLVCSARAKATEALASAKALSKKGKKVSCPRSKRQCIRYDSHSATINLAGKATIASIKGRQPLTFEVPKHHHSRIDWKVCSTDLCCDRKGRFWLHIVVETETEEVQPTERIVGVDLGVCRPAVTSEAKFLGSSRWREVENRTFRLRRALQAKGTRSAKRHLKKISCRQERFRRDCDHVLSKRLIQSVEKGATIVLEDLTDIRTRMKGSRNVKRRLHSWSFFRLQTFLAYKALLFCVFVTYVDPRYTSQKCSRCGHIAKANRRSQSHFQCEACEFRLNADLNASRNIRANHLASRAICFRSGPEVNRPIVATEDLGTRNHSETSS

SEQ ID NO: 53284 - protein, 373 aa, Methanolobus sp.
MLKAYKYRMYPTKEQEEMFFQHFGACRFIYNWALEQKIKIYEQDGKSVSRFDLNKGITMLKRDGKHDWLKEVNSQSLQGATLNLDNAFTKFFREKMGFPKFKSRKNPVQAYNVPQNYKVDIENNRIYLPKIGNVKTILHRPLGDGDLKTATVSRTSSGKYYISILVDDNREFPEKSDFSVNDTVGVDVGIKDFAITSNGDKIDNPRHLKNSMKRLKVLSKRLSRKQKGSKNRNKARQQVAKLHEKISNQRHDFQHKVSTKLVSENQAIAVETLNVSGMFKNHCLAQHIADASWSSFITKLEYKAEWYGKTILRIGRFEPSTKICNVCGYYNSSMTLADRKWKCPECNANHDRDINASINIKKFALQGQNLIGI

SEQ ID NO: 53285 - protein, 314 aa, unknown
  TnpB Polypeptide
LEPINGGEGYLVLKDWNLRVRYAGRIKWAGKQGTLVIRFEDGRWFAYVPIEVGSKPARSNPRGYVKGIYDRVQVEKPKGSNKAFIDVGLNNLFAVVFNHTDVAVLIKGSTIKAEYYWWKREVKTYQAIRDWLRNHGFESWRRYHAFHLHAVYKQHERLRHYYRTAIRFLARIMHEMGVDEVFIGYPYMVSQDNGNEYNVNIWWFNRITRWLDEVLQEYGIKLHVVNEYGTSRQCSICNNEHENGRIKRGLYICQTTGIGINADLNAARNIAKRVGYRTPMPRRILSYIVTTNGVKPLTPAEGVTTETPRVKPAR

SEQ ID NO: 53286 - protein, 435 aa, unknown
  TnpB Polypeptide
MNARKSKTAKRREQAASLVSQRTVTLTLALDDGQFSVLTRVAEQYNQLWGVLVSWCSQNHTVSRARIQKENYRRLREQFPMLPSQFVCIAMRDAAGAVRSWNSNNPKRRWNLKATRKALVINYDQCTMSVRGNMLTLSATRGERRIRTLMPETPGWFAERYPVRKLGAAKLLIDPRTRTAQIALIYRVESESPVADGDVLGVDLGQHSLYVDSRGGETTTSKIREAKRKYAHNRKTLQEKGTRSAHRRLKAMSGREKRFIRDVNHCVSKQLANSPNVQAIAFEDLTHIRRQAAKRSKTSKRRRNMLHQWSFSQLQEFTTYKAAANGIRIIMVDPSYTSQQCNKCGYVDAGNRNRARFDCKRCAWSDNADHNAAMNIRDRAIATLEHENTSTDRPVDRVQSTTRMDGTPTMTSTSDDDGRVVGSTFTSKPLGLPQR

SEQ ID NO: 53287 - protein, 372 aa, Bacteroidia sp.
MISYKYRLYRSKKEKTLERMMCEAAFVWNHAIALQRRYYSVAKTLGWTRRYIPSARMQHHMARRYKPTRLNSQTVQEILQRLDSSYKLFFNRVTRRPPKMRPGKDFSSFVFKQTGYKLYGNEFIINKVSKRFKFAKSREWEGRVKIVRVFRSQGKWYILVITDAKAKQCGKSHTGASAGIDFGLKTYMTFSDGTRIEAPQFQRQLLNDIRRYHRRMSQAQRGSNHWRAAKRRLNATFATLKDRRTDWNYQTAHALCRKYEYIFVEDLNLAGMMAHKHWGRKISDLGFASFLNTLEYVASKYGTTVHKVNRFFASSRLCECGYKNDTLTLREREWTCPVCGLQHDRDLNAARNIYRRGVADLESTSKTVPCTA

SEQ ID NO: 53288 - protein, 357 aa, Okeania sp.
MKSIKTKLKVNNQQKTILAKHAGVARHAYNWGLATCITEYESNKKRLSAITLHKRLVREVKSENPWYYEVSKCAPQQALRDLERAFKNFLTIPKRGFPVFKKKGKKDSFYLEGSIKILQGNYIKLPRIGIVKTYEILPSLPVKNVTISKRANNWYISFKYDLGPEPTPTLKQRDIIGVDLGINTLATCSDGSKFANIKAYRQAKKQLVRHQRAVSKKVIGSKNRRKAVKKLAKLHKKVADIRADALHKLTSWLAKNHSTIVIEDLNVSGMLKNHKLASAIADCGFYEFKRQLTYKCEWYGSELVIVDRYYPSSQICSNCGHQQKMPLHLRTYECSECGFETDRDFNAAVNLKNYVNQ

SEQ ID NO: 53289 - protein, 452 aa, Thermococcus sp.
MVKLQPSKEQAKILFELADTGTKVWNRVNYLRRQQFFEGKIVDFNSTEKTVYEEFKREIGSATVQQIARKNAESWRSFFSLLRKKRNGELPNWLKPKPPNYLKENGRRKPLIVLRNDQYKIEGNKLILKGIGKFKRLEIQFKGRIHLKGKQGRLEITYDPVRRKWYAHLSFTVEEKLEGGEWVKLPRTPKGSLSAGIDLGVNNLMAVYVENGESFLVNGRPLKSIDFYWRRKIADYQSKLNKSGAKTSRKLRRMHRRSKLQAKHYLNTAVRQTMRKLYELGVSKIVVGYPKGIARNSDRSKKQNFILSHVWRFNYVIKRLTEVAEEYGIQVELVNEAFTSKLCPVCGRPHEEARFVRGLFKCPATGLVFNADLVGAFNILKKAVNTITPNPSGLYAQRRGNGGKALPEGFEELVPTGSLMRTPQTFLSMRGVNSLEPSPFRAGRRSVRNRPP

SEQ ID NO: 53290 - protein, 423 aa, unknown
  TnpB Polypeptide
MSQINLALKTINLFLKYNRYMLNLTYIYRLKLNQQQSQTYEAWLETSRRVWNFGLGERKDWYNSRSCRIDACSLKSEYIIPSDAPRPTFASQCKALTQARITNLNLNAAHSQMLQQVLRRLEKAFIGMWESGRGFPRFKKQGRMRSLLFPQLGVNPIRGSKVKLPGVGWVKMQLSRPIPDGFVAKQAQVVKKASGWYVMLTLQANVDVPSFAPHGQPIGIDLGLKSFLATSTGEQIARPRFFVDLQRKLKLLQQRVSHKKLGSNNWRKAQQRVSRIHEYIHNTRKDFHFKLAHHLCDQGGMIFAEDLNFKAWAKGMFSKHTLDAGFGEFLSILEWVCWKRGVYFAKVNPNGTSQTCPNCNHHTGKKDLSERIHHCCECGFQTDRDVAAAMVVMQRGLAAVGHTVKMLGEGLSNSSLSTQESPV

SEQ ID NO: 53291 - protein, 351 aa, unknown
  TnpB Polypeptide
MSGFRKSTPNPCRVRCAISIPPTPAFSATPRLSASHVSRAAGIGRASFAPQHCHVDFKKGTITIPKAKDIPAVLHRKFKGAVKTVTVSMTPSGKYFASVLVDTNLQELPPSPKSMTTAVGIDLGIKSLAVCSDGRTFGNPKNLPGSLDRLKVLQKRLSRKRKGSSNRNKARIRVARLQEHIANCRKDNLHKITHELTHDNQVRTICMEDLNVKRMQCNHHLAQAIGDASFGMFLTMLEYKCNWYGVNLIKIDRFAPSSKTCGKCGYVYKGLKLSERSWTCPECGTHHDRDFNAACNIKEYGLRALPTERGKVKPVDCSLVDDRPRVLKSNGRKKQEKRGGIGISEAAKSLV

SEQ ID NO: 53292 - protein, 412 aa, Acidilobus sp.
VERTVKLRVKVDHATYSALKEVEREYREILEDAVDYGLRNSTTSFTRIKAGVYRVEREKHKDLPSHYIYTACEDASERLDSFKKLKRRGRAYTDRPSVRRVTVHLDDHLWRFSLDEISIATKGGKVRISPTFHKLFWRYYNGGWRIAGEARFRLAKGNVVELFIVFKKEEPKPYEPKGFTPVDLNEGSASVLVGGRPILLETNIKKITLGYEYRRKRVQSGRSTEDRDVRRRLKRLREKYRKADIRRKLARLIVKEAFESRSAIVLEDLPKRVPEHMIKDVKDPQLRLRIYRSAFSSTKNAIIEKAREFGVPVVLVSPSYTSSTCPVHGSRIVYRPDGGAAPRVGVCEKGGERWHRDVVALYNLRRRAGDVSPVPLGSKESHDPPAVGLGRWLRAKSLRLIVSELKMIEMKA

SEQ ID NO: 53293 - protein, 370 aa, unknown
  TnpB Polypeptide
MKTYKYKFGDPSNTIRLGNLLDDMWQVHEYFHKWQRHRYQDGLPYAGYEAMCLRVTELKRTTHPHWKALPSQAIQEELKRIHLAYERFFKRLGGRPKIKKRHKFKSFTLKQAGWSLKDNRLTLNFRKWEKGKWRHNKVAYTFRKHRDFYGTISRITIKRDACGDYWLYIITEFVETKPLPTTGKSVGETDFGMKDAYLTLSTGEKKHHPQPLKRSLNKLRSLNKSLSRKVRGSNSWWRCVRQLARLYRKISNQRKDFQWQLASDLCKKFDTIAIETLNLDGMKRLWGRKVSDLGFYQFVQILKYKCQKHGRKLLQVGQWTATTKPCSDCGFHNENLTLKDRQWTCPNCGSHHDRDINAAVNILRAGIAVT

SEQ ID NO: 53294 - protein, 219 aa, Microcystis sp.
  misc_feature (63)..(96): Xaa can be any naturally occurring amino acid
MEKAYSYRFYPTPKQESLLRRTLGCVRLVYNKALHSRTQAWYEKQERVGYAQTSSMLTDWKKXXXXXXXXXXXXXXXXXXXXXXXXXXXXXXXXXXSIRFDDPTIKPLPVIDKAIGIDLGISSLVITSNGDKVSNPKHFKKHYRRLRKAQKNLSRKQKGSKNREKARIKVARIHAQITDSRKDHLHKLTTQLVRENQTIVVENLALNARIIDHVRTSKQ

SEQ ID NO: 53295 - protein, 414 aa, Microcystis sp.
MKARYQYRIYPTDQQKKLLSQLFGCVRVVWNDTLAYCQELYRQGEKKPKYTELSKRLTQVKKTEERRWLTEVSSIPLQQSLRDLETAYSNFFASCKGERKGKKVKPPKFKKRKSKQSARFTDNGFTINQHHVTLTKIGDLRIVWSRPLPSEPSSVTVIKDAAARYFLSFVVEIRPETLPDNKQTVGIDLGIATFATLSTGEKLDAPKPLKKRLKRLRKAQKNLSRKQKGSKRREKARKRVAKIHAKIKDTRTDFLHKLSTRVVRENQTIILEDLNTSGMVKNRKLSRAISDLGWRSFRDMLSAKSDKYGRDFRIISRWEPTSQRCSCCGNIGGKKALNIREWECLFCGTFHDRDVNAAINIKVAGGQSETSKNGRVGKCKTSVKEASSREASTHPKIVQLSLFDLPVITVRPRR

SEQ ID NO: 53296 - protein, 326 aa, unknown
  TnpB Polypeptide
MAHTEGYRLTVDDDTNRVQFRISPKPYKKVTGHLRGEPDAMDELREALTSDEVDVGQAEFLSRDGVYSLHVTVTREFDVPEPDTSDTLVGVDINERNVALTALDRETMRTKGTLVLDYGRVKQERQRSHTITKRCQEHGKTSIHRKLGDKEERFTEWVLHRLSRAVVEFAEQFLNPGIVFEDMEDIREEMQYGSYMNRRLHKLPFHNFETFVSYKATWREIPTDTVDAYYNSKTCSCCGERGSRQRRRFRCRNDDCDVVQDHADRNASGMVNIAWREKAKVDGNESNSRTHKTQPQVRLVRLSGSGRITRPPSSRSLAEQGVLAHG

SEQ ID NO: 53297 - protein, 394 aa, Spirochaetes sp.
MAYKKNKQQNELRAYKFRIYPTTQQQTELQNNFDAVRYLWNRSLALKSFAYQKFGANIQMSTLKKRIVKLNDRHEWLKGAHSQVKQQSIINLDIAFKNFFNPQLRAKYPQFKSKRNDQSIQYPQGVKIVDGDKLILPKIGKIRLLMHREMESGLIKTVTIKKTKTNKYFASILVDTGIVKDTPVAKVFVDEILGIDTGLIDIVTCSDGFKQTNPKFLKKRLKTIKKEQRKLSRKTNKSSKRRAKQKIKLAKAYEKLTNTRNDFLHKLSTALVSENQVISVETLAIKNLMKNKKLSRAFSDASIGNLYNMLRYKIENKGGHFVKVDRFFASTKTCHVCNHKVEKMPLNIREWACPQCKTIHDRDINAAINIKSEAIKMLRATGTVVLRRGDTVSL

SEQ ID NO: 53298 - protein, 150 aa, unknown
  TnpB Polypeptide
VNHCISKAIVSRALATNSFIALEDLTGIRERVNQQPRSKTERRRANSWAFYQLRQFVDYKAMRAGVKVVLVPPAYSSQTCHRCLWIGQREGKHFRCVNPACGWEGDADFNGANVIALLGLNVNQPRGPWLACQLQGYQKPAPYRLAVGAG

SEQ ID NO: 53299 - protein, 224 aa, unknown
  TnpB Polypeptide
MVGLDAGITKLATLSDGTVFEPVNSFKTSQKKLATLQRQLSRKVKFSANWQKQKRKIQRLHSHIANIRKDYLHKATTKISKNHAMIAIEDLKVSNMSKSAKGTAEQHGRNVKAKSGLNRAILDQGWHEMRRQLEYKQLWRSGQVLAVPPAYTSQRCACCGHTAKENRLSQSKFECLERGYTENADIKGARNILAAGHAVLACGGMVQSDRPLKQEPTEVSQATV

SEQ ID NO: 53300 - protein, 378 aa, unknown
  TnpB Polypeptide
MKLVAQIKLLPTPEQTDALMCTLKQANAACQFVSDTAWETQTFRQYDLHHKCYHVIRKHFNLSAQMAVRAIGKVADAYKFDRKNKRTITMTGCIAYDDRILSWRLQDQTVSIWTVSGRLRIPFVYGKQQFELLQSRQGESDLGFSKGIFYLSATCEVDEPKPVDVDDTLGVDLGITNIAVDSDGQVYSANHINNVRHRQRRLRAKLQAKGTRSAKRKLKRLSGKEHRFAKDTNHCISKKLVAKAKDTNRAIVLEDLEGISSRVTVRRAQRATLHNWSFYQLRSFVTYKAKRVGIPVFLVDPRNTSRTCPVCGHIDKANRLSQSCFSCVVCGFAGLADHIAAVNIGRRAAVNPPIVARNEAKAILSLESRQSAVTSYSL

SEQ ID NO: 53301 - protein, 385 aa, unknown
  TnpB Polypeptide
MNMQRTVRLRIEPDHEQAGALLETLRQHTACFNAVAAYGWAHAEKNGVRLHHATYYGLRERFPDLPAQLVVAARVRATEAVKSALTWKKKGRKASCPTAALVPIRYDARTYAIKPRQGIVSLSSAAGRLKVPFAANPHARNLLEQAVGFDSADLIWRKGRFWLHVVVTIPDVGFQPSSEVVGVDMGLARPAVCSNNRFFGERRWKEIERRYFRLRRSLQRKGTRSAKRHLRKLAGKVNRFRRDCDHLLSRRIVDSVQPGTVIVVENLVNIRTRTKQRGRESRRRLHSWSYAQLRAFLTYKAEAKGCRVIGVDPRHTSQTCSRCGHVHRSNRRSQSRFLCRACGFELNADLNAARNLARKYLAGGGMSAAGGPPSTGLSCQPTQAG

SEQ ID NO: 53302 - protein, 542 aa, unknown
  TnpB Polypeptide
MGSKHTEESKPSKKKTPTFLLELPLVADAGQAARLCAHLEAGRQFYNAVLSEGQRRLRRMRADPAWQAARAIPRTHTQERKAAFSALREQYGFSEYAFHDLAKELRVSWLTDHLDAVLAQTLATRAYRALNRVCVGKARRVRFKSRGRGLSSIENKRNDTGMRFVLQTQDEGRRQGFLLWHDDRLAALIDADDPVVAHGLAHEIKYARPVRRRASSPRAQGADREGERYFVQLVLKGLPHHKPNHTVGSDTIGLDLGPASIAIVPREAEARLEPLCAELAPDARAIRRLQRQMERQRRAANPEHYDEKGRPRKRGKAAPRWKQSRSYQASRRRKAARERRLAAHRKSLHGQMIHQIVAVGNTVITEKISYRGWQKRYGRSVGLRAPGMLIAHMRRTVASTGGTLHEVPPRSTKLSQYCHGCGMFVPKPLSQRWHQCPCGIGPVQRDLYSAFLAAYLDPAADCIPSCAQYVVPWEGAEARLRAAHERATQRANEGQVMPRSMGIPRAGARLPQSPSEATPELLFLSRRGKVEAWKRRPEPPAL

SEQ ID NO: 53303 - protein, 371 aa, unknown
  TnpB Polypeptide
MLLRAYKFRVYPNPAQADLLEKHFGCARFVFNFGLEQKSKAYAQNQEKLSCLTLMNQLPALKAELLWLSEVNAQSLQMALRNLDIAFTNFFKKNADFPTFKSRKGRQSFQCPQACSVDFEKSVLHIPKVKGIKTNFHRQFQGKIKTVTVSRTPTGKYFASLLVEQEGEEPKLFSVTENTLGLDVGLKHFLITSDGDKISNPKHLRRSAKKLGRKQHAFARQKKGSNRHQKRKKQLARLHEKVANQRTDFLHKITHHLVSENQATAYAIEDLAVKNMVRNHCLARSISDASWGMFFQFLSYKAERAGKNVLTIGRFEPSSKRCHVCGYVNQGLTLKDRNWDCPDCHTHHDRDINAAKNIRAFALVKHYTKSE

SEQ ID NO: 53304 - protein, 483 aa, Scytonema sp.
VLEELPNSCGWGRESISSSSTWVIVLSACAAYSCNLFNLRDDILIFNDLSFMLYPRCSLFNASIGVTKEVVKVLNAIKVRLYPTIEQQEALAKSFGCARWYWNYALNACIQHYEETGKSLPMKTYKGMLPQLKIEHPWLKTDCYSSVLQCVAINLNKAYTNFFEGRARFPKFKSKHGKQSIQYPQNVTVVENCLNIPKVGIVKAVFHKEIKGVIKTVTISETPTEKYFASILCETENGENVFIDDKVIGIDLGIKDFAIVHDGTKVTKYSNPKHIKKHEKNLARKQQKLARKKKGSKSRAKAKKLVAKVHEKVSNSRQDFLHKVSRKLVDESEIITVENLNVKGLIRNRKLSKSISDAGWGMFVNFLDYKLQRKGGKLIEIDRFFSSSKLCSNCGHVVDELPLDIREWDCPSCTTHHDRDGNAALNIRNEGIRILNSQTSSEVSGGGFPVTASGDCVRPPTRKGKGRRSVKLEAYTVPVLRSV

SEQ ID NO: 53305 - protein, 401 aa, unknown
  TnpB Polypeptide
VKLVEQHLIRKHDPHFAAIDQAAFASKNLYNQANYQIRQFFFQEGKYLPYAEVFHRLKHHEAYCALPRKVSNSILIQLHTNWVAFFKANKAYKEDSSKFLGRPKIPGYKEKEKGRNILIYDKQALGKLVPSGLPIAIETTIEWDAIDQVRIIPRLNSYMVEVVYQKAEEQAVVDPSLIAALDLGVNTLAAVTSTKQGFVPLLVNGRPLKSVNQHYNKQRAHHQKHLAKAKRFTSRQLDRITTKRNRRVNAYLHTASRRIINLLVQEGIGTLVIGKNPFWKQEVEMGRKNNQEFVHIPHARFIDMLTYKAKLVGIQVILHEESYTSKASFLDRDDIPTYDPKRAEKPHFSGKRETRGLYRASDGRRIHADVHGSYNILRKAFPNSFGQGVAAPAVVPRRLAV

SEQ ID NO: 53306 - protein, 394 aa, unknown
  TnpB Polypeptide
LQRVERHIIKNNDYKELAIKSKELYNQSLYYLRQMLFGNIEWCEEYGMTKLFAEFDEPCYRALPIQTSQQIIKLLFKNWKSWLSSLKDYKKNSNKYKGRPRIPRYKKELFIVIFTNQQIKLKDRFIHFPKKLNLEPIKTKVNNVAQVRILPRNNHFILEIVYNMLDVEPLKDNGNYLGIDIGLNNLATCGSNVINSFIINGRPLKSINQYYNKHKAKFQSELEIKQKRKSSKRIKILSFKRNNKIQDYLHKSSRIIINRCKKNNINTIIIGNNKLWKTNINIGKRNNQNFVSIPFDTLIEQIKYKAEEIGINIKITEESYTSKCSALDLEPIKKHKKYLGKRVKRGLFKTSKGLHLNADMNGSLNIIRKEVCDADFFSQQIEGLVLNPIKINIF

SEQ ID NO: 53307 - protein, 583 aa, unknown
  TnpB Polypeptide
MSRYRLVPTPAQEAILRGHCAHARFVWNLAVEQRAHWCPGRAGAPGYLEQCRQLTAARAEHPWLAAGSYTVQQQALRDFAQAMAAFFNPGNPAGRPSWRKAGRDEGFRIVGRRGRQWDVRRLSRRVGEVWVPKAGWVRFRWSRAVPMGVKSYRVTMDRAGRWHVAFAAIPDPVPAPGNEQAVGIDRGVAVSAALSTGELLHFQALKARERTRLRRLERKLARARRGSKRRRRVTLAMARLRARETDRRKDWVEKTSTVIARGFDVIRVEELQISNMTRSGRGTREHPGRNVRAKATLNRGILRSGWGLLVRRLEQKAPGRVQKVKPHYTSQRCSACGQVDPKSRESQAVFQCTACGYADHADVNAAKNIAAGHAVTARGGDGVTRPVNREPQLLASLTGCQWLESPPSLQAWEDANEVSSYQATDLPCSPPEVAVTSPHPNHMDWRGGWSGTKGPAVRLLEPGRRAHAPRCSARGSGGSPSSRTSRAGWMDPLGLIGPRNLRNALIARRGGVLLGEAGRDRAAVPGRAQLRPIQGLPRPGRGLRPRGPRPVLTPSAVAARRCPSGAGFSGHDDGELVRSDQFF

SEQ ID NO: 53308 - protein, 402 aa, Escherichia sp.
VKRLQAFKFQLRPGGQQEREMRRFAGACRFVFNRALALQNENHEAGNKYIPYGKMASWLVEWKNATETQWLKDSPSQPLQQSLKDLERAYKNFFRKRAAFPRFKKRGQNDAFRYPQGVKLDQENSRIFLPKLGWMRYRNSRQVTGVVKNVTVCQSCGKWYISIQTESEVSTPVHPSASMVGLDAGVAKLATLSDGTVFEPVNSFQKNQKKLARLQRQLSRKVKFSNNWQKQKRKIQRLHSCIANIRRDYLHKVTTTVSKNHAMIVIEDLKVSNMSKSAAGTVSQPGRNVRAKSGLNRSILDQGWYEMRRQLEYKQLWSGGQVLAVPPAYTSQRCACCGHTAKENRLSQSQFRCQVCGYTANADVNGARNILAAGHAVLACGEMVQSGRPLKQEPTEMIQATA

SEQ ID NO: 53309 - protein, 376 aa, unknown
  TnpB Polypeptide
MLKALRVRLYPTPEQAHFLRGQFGAVRFVWNKGLYLKRHYYRVKGTNLDPVHDLKKLLAVAKRHPKYAWLKDYDSMALQESLRNLGSAFSRFFKKQAGFPHLKSRRGEQSSYHCTCVSVGEDFIKVPKMDPIKAVIHRPVEGKVKSITLKLDTCGDFFASILYDDGKSNAVKPKAVRASEVVGCDVGLKSFVTDSNGRKIEAPKAYRRARKRLAKAQRELSRKQKGSANREKARRRLAKQYRRVARIRKDFLNKVSRKLVNESQALVVETLTIKNMLKNHHLAAAIADASWGEFVRLIEYKAEREGRYVVHVDTYFPSSKTCSQCGYKRDELDLSVRSWACPKCGAHLDRDVNAAVNLKAEGIRMLRANGLVVLRA

SEQ ID NO: 53310 - protein, 199 aa, Massilimicrobiota sp.
MKQYPNSNKSTGIDMGISHFCTFDDGVKIDNHKYLAKSLKKLARLQKQLSRKPRGSHNWDKARIKVARMHEHIYNQRNDFLHKLSTDIVKQNSIICIEDLDIQSMQNNQYIARDVADVSWSRFMSMLEYKSAWHGRTVVKIDRYFASSQTCHECGYKHADVKNLNIRRWTCPECGTVHDRDVNAAINILREGQRLLLLQ

SEQ ID NO: 53311 - protein, 496 aa, unknown
  TnpB Polypeptide
MNTNTISYKRICSIKLSVLESEEFGDYRKLIKKFAGEISKEMFKMTQTGFFQDYKSYKFYCEAPESAGGEYHYTGRGDKKKLKYPVPVKRLTQGEFEKLPAISKVINKYFPEGSDAQKGYITGFIDQVARRYEGCMERNTKMPSRKIDPLRASIDFNKEQVNVNVDSGEVKIRSVFGKGKNTFYFDLVTNLNESFIGHLEDFKHEFADKYNAKTGFYEKLNATYIYRKGNRRELMFKITEYRNLEKADIFLGIDLNKNLENFIALSREVGGKKIYSKFIELTACEEKIRELENEVKDTIAAPNAEKIKGSSKRAKRTRLRRQVHSWQAKQLNIARAAVTELLNKFRNENSDKRIGIAIDTNTTGSKLGTYSHDVVRRALKEYADSEGVVYYEIPTAYTTMHHPECGAFDPKARGRVPEKFMHLKGDAKAYIETKYKNMYVCECGYEEHADIHAAKNIEIRAGVLQDLNVQMNNTWSGKVKIEYLSRLKEAGYSPNK

SEQ ID NO: 53312 - protein, 276 aa, Metallosphaera sp.
MKEVLVEAKIIDFGKLKEIYSDVLYYTAYYKTLQKTGVKVSASPPPLLKDLNAVYSANRLGPLKITGEGSYYKIEKINALVKADMQGFPLHAIVDFNDGIKVLLAYPVDEPIVGIDLGIRHLFTVVAIVKEGKVYKSKYIGSANILDTFTKYMSETQSLSYVREIKNKVKIALKELLEFLMELNPRIVVLEDLRFYDAKIGRGLRIVEDELEKELMEKGIRFRRIDPRNTSKICSRCGYKKGEVLGSIFVCPACGYKADRDFNAAYNLALKCYYTC

SEQ ID NO: 53313 - protein, 387 aa, unknown
  TnpB Polypeptide
VETIKLCVKGVISPRDIGLEKLMHEYTVYKRVLIPRTKHAVREVIKDRSIVVYAQQKWELDKKINEYLKNLSFHPMPFHNQSVYIENGNGKFWIHFKTKEGEAVCHLHVPAKYKPLIEKSCGSGYATNPVLGQVELIEDEKYGWINCHITLRLPKPKPYEPKGWLGVDVGWNKLATSILATTNPHLCFNNPTVHGKLFKTRIIQLKYLLKDYARKRRAWKKWNFRLKQTVKYATGVVAKEIVTKAKKHKAGIVMENLTFQSQTKKWLIPRYKLMIAIKTLCEREGIPFKLVPPKHTSIKCPRCGYINNENRKGERFACQKCSYEADADITAAMNIAAIAVGLAPTVKEVRLYAEASGDVATPLSPMVDDLYEDEGKPSKIEMRWAKS

SEQ ID NO: 53314 - protein, 385 aa, Bacillaceae sp.
MYNIVKVVKYMILAKKVRLKPTKEQEIQLWKSVGTARWTYNWTLNRQQENHTKGNKFISDGDLRKEITRLKKQEEFKWLNDVSNNVAKQAVKDACDAFKKFFKGQSKFPKFKSRKKSYPSFYHDTEKLKVGKGYVQLEKIGQVLTSEQLPMGVKYMNPRITFDKKYWYIAVGIEQEQPKQELTDTVVGVDLGIKELAVCSDGQVFKNINKTKAVRKTEKRLRRLQRKVSRKYEMNKEGKSFVKTSNIIKIEKQIQRLHRRLTNIRTNHIHQATTKVVKTKPCKVVMEDLNISGMMKNRHLAKAVANQKLYEFIRQMKYKCEKYGIAFLQVDRFYPSSKTCSSCGKIKKDLKLSDRTYKCECGNKMDRDLNAAINLANYGKLSVSH

SEQ ID NO: 53315 - protein, 244 aa, unknown
  TnpB Polypeptide
MYGCQQVLISPHKDLRAILEFVCEQSNKLANCGTYYARQLYFKTGKLPTNCDLHKLLKGNPHFQALYSHVAQQTLTSVAESFKSFKALSKLFKSGKLANKPKLPQYKKNSLKLATFPKADVKLKDGLLRLPLGSKVKAWFGLDAFYLPMPSNLSFADIREIRILPRNRCFYAEFIYKLEVEKPILDPAKALGIDHGIDNWLTCVSNVGTSFIVDGKWLKSANQWYNKSVATINWTLDKVEVKNG

SEQ ID NO: 53316 - protein, 524 aa, Firmicutes sp.
VLRLLSSSNTSKAKKTSNKREHTPSFICEIPLRVTRRQEQILEARFEAGRQLYNALLGEAKKRLALVRQSIGYTKAKISANKKERQAHFAVARQAHGFSAYSLEAFADEMRRTTWLGEHLDSHVVQKLAKRAFEAVQKVAFGQARKVRFKGKRGLHSLEGKKSTACIRWKKDRVLWKGLELPMVNGTDDDPVIQHGLSSRIKYVRLMKREIRSHSRYYAQLVCEGTPYHKPEHTIGNETIGLDIGPSTIAIVGDTQATLTQFADEVVRDHKKIRRLQRKQDRERRANNPDCYDEKGRVIKGKRPTKKSRHQWETETELQELYRREAAHRKTLHGQLANQVMAMGTHIKTEKLNYKAFQKTFGRSIGVRAPKLFLSILTRKAESAGGKVEEFSTYHTALSQVCLCGQKHKKKLSERVHACDCGVVMQRDLFSAYLAKHVENERLQVADANEHWQGAEPLLRTAWQQAYNPPASGRQGPFRTLPSSFGTFRSQSGSSEKESLPKHEAQDVVATVQASARACESAKV

SEQ ID NO: 53317 - protein, 473 aa, unknown
  TnpB Polypeptide
MDTDRGAITRMLLTYKIKHNRNFSEELRKARKVAEFCIKHQTQNRSLNSPPIQKAISSLPSSPSSSFSTFSEFSQDFSIISSAHSLGSLSAPNSLSVSGSLSPGDVKHIGLKSVISGQILKKYSRNQDFRSAKNVKLIIPSRAVRIDRKERTITIPCLKLLLNYHFSNNFTKISQIEIDNIYAYVAVVFPDDELKNSEHYIGVDRNTKGHIAVVADPESGKIWKLGKMRYHTHKKYENMKKRLYNMGRSKELKAVEIREKNIVKDLNHKISRKIVDVALYNGCGIKLENLKGIRKLNSKIGDAGKGEKNKSKNRIREKNRDKNRSKEISKNSLKSKRTSEKQSWSSEYSLNSWSFQQLQQFIEYKARLRGVEVVYIDPHATSKKCSRCGHIGNRHSKQFECPHCGHVDHADVNAAFNIALTPKGSGQFSAERDAGKGSTDTPRRVLDRTILSKRTARKKTSPQFAWEVCQFLN

SEQ ID NO: 53318 - protein, 473 aa, unknown; identical to SEQ ID NO: 53317
  TnpB Polypeptide

SEQ ID NO: 53319 - protein, 375 aa, unknown
  TnpB Polypeptide
MVNESIRIGLANDVSSLRKLSLLSYSQLAQYDSPSCYKLCAISRATGILAARKKSLKRGFPTRTPYAIRPVLVSCYGFKTKNGGLEIPIARGKRLSLPLTKHTLDVIYQPGVKVRSFTLTHNRLCLSIARDVATLECTSTVGVDRNLRNLTVGNDKETHHYDLSETVRIASTTIRIVASFKRDDTRIRTGIASKYGERRTTRTGHLLHTATKTIVAAAVEQRQAIVLENIHGIRALYRKGNGQNRKHRGRMNGWSFSEAQRQIEYKARWAGLPIIHLSSHETRGSSMTCPRCGERLQSDKTLRRKLWCGKCRVVMDRDRVAAVNLSRRGQVRFARSRPPISLEAQGGAHEAMKGNPTTTVIPGVDAPKLTQPTKS

SEQ ID NO: 53320 - protein, 316 aa, Thermocladium sp.
LEAACEVYNTLRWADTHFYHEDEKGLTLTELRQLALDLRKQDEEYQQLYSQVVQQVADRYYEARQRFFNWLARFPREKKPHKYYSLVYPQSGWRILAREGKGRKEKKLVLMLSSLGVFKLIIHRDFPLEKVERVVVKLTRSERVFISFIVEDYEFPKLPNTGEAVGIDVGVEKLLVTSDGEYLPNLRPYEKALNKVRRLHKALSRKKFLSKNWFKAKMELARAYEHMESLRRDLYMKLGRYFAEHYDAVVMEDISVKQLIGKSGRKMRQRLHDVAIHELRSIVKYQMEKYGKKVVLVDPRDSSKTCAKCGYVKDLT

SEQ ID NO: 53321 - protein, 403 aa, unknown
  TnpB Polypeptide
MPKIVDVNRTYKYGLYDNREANRRLHDTINISGIIWNHITALRKRYYRLTGKHLASARLQAHVSHLRMKTQRFGYWRLVGSQAVQDICQRHDKAYARFFKKEVGLPRFKKVKTYTSFTLKQSGWTLGADSAPRGGHKHPKWTGQITILGEVYKFVTHRPMQGDVKTVTVKRDAAKRLWACFSVVERISLEEETSTSQIGGFDFGLKTFLTTNDGIQIDAPQFFKQDLPQFRTIQSRVSKKDKGSQNQIKGQKHLARRHIRIADKRRDFHFQLVHLLFKHYDTLVFEDLNIDGMKRLWGKKVSDLGFAQFVKIAQWMAVKHGKRVVIIDRWERTTGQCSGCGHKQTLTLADRVFQRERCHVHLDRDHNAAINIFEAGHRLILSQSEEAPALSTASGVHGRRPRL

SEQ ID NO: 53322 - protein, 544 aa, Streptomyces sp.
VGGLREVAAPFVVPGPSGVTIRTRLRVSETDTAVLREVGAFLGSLASRDLAVRSRQGPTHGTDAWAVRKRELSGVSSARWAGSITKATHDQWALARRGQAAHMTWLRGQIAALDARLARPLGAKANKREGLPRGYGSRAEWHAKSRRLCALKARLARLEADWAAGGVRVVRGGKKLANLRHHLDEAGLDERGWRERWQASRVFLAADGESGKRLGNETIRITDTGQVSIKLPAALTHLANAPHGRYLLDAAAAFKYRGEEWLDRISVNRAVAYRIHHDPLRRRWYVTASWQRTPAAVLPLEAALARGVVAVDMNDDHLAAWHLDIHGNPVGEPRRFFYDLSGSTAHRDAQLRHALTRLLHHTRRCGAAAIAIEDLDFSEGKMREKHGRNKRFRRLISRFPTAKLKARLVAMAAEQNIALVAVDPAYTSRWGAQHWQQPLTTPTRQVSRHDAASIAIGRRALGYPIRRRTAPPPHDRSDRVGHRTAQARSETPRREETRPRLPGPRSRVVPPGSGAKVGDQRARHRRGHAAEHGFWYQDALPLSR

SEQ ID NO: 53323 - protein, 557 aa, Streptomyces sp.
LRAVAAPFTVAAPSGARIRDRLRVDVADEEVLTLVGQHLGRHQRADLAERVAIGLVPVRDNRRAGRKRKLTAVSSSRWAGAMTRASEDQYQLSMRCLYDERAGLRRAIGTIVRRLAVPCGQRTGRVRGYRDQGERFQKQRRLQALEVRLAVVEERIAQGRPSVVVGGGRLVKMRHNLADARLTAEDWRTRWDAARLFLTADGESGASHGNYTISVDPADGSVTIVLPEPLRHLANAPRGRYRLSCTVAFHHRREEWLDRVTAHQAVRYDIVHDPVRDRWYLDASWSAPKTVLPAPEEIRAAGRRMLAVDLNADHLAAYVLDPHGNPVGDPLTVPLELTGDATRRDGRLRAAVTSLIGLAKAHGCAGIVIENLGFTDARHTGRETMGRGRRGKAFRRTVAGIPTARFRERLRGMAYHQGLVVVAVDPAYTSRWGDAHWRRPLDDQSKTTVTRHHAAAVAIGRRALGHRIRRRPGVTACDRRIAQRRATGQTASVPRARGNASPPRTTGTLPEGGKTCWSRSDQLVLFPAPRTVRGAPGARHHTPGPEYVDSANTGPQH

SEQ ID NO: 53324 - protein, 545 aa, Streptomyces sp.
VKGLARLRELAAPFVALGPSGVAVHDRLKHLTAEDEKVLRLVGDHLGTLASRDLKARCGAGLEHDSDQWAQRKRALTEESSSRWAGSITKATHDQWALARRGQLAHIQSLESGIATITHRLSLPVGEKGNKRAPGGYRTRQEWFAKTRRLHVLADRLEVARADREAGVVHVVRGGKRLLNTRHYLDTARLNEPEWRQQWRAERRFLKADGESGKPFGNETIRVTPDGAVSLKLPAPLAHLANAPHGRYVLASRVAFAHRGEQWRDRLTANRAVAYRIHEDVLRGRWYLTASWTIPPVKTVPLAAARTGGLVGVDTNADHLAAWRLDKHGNPVGQPLRFGYDLTGTAAHRDAQVRHALIRLLHWAKRHHLAIAIEDLDFQEEKTREKHGRRKRFRKLISGMPVSRLRARLVSMAAELGITIVAVDPAYTSKWGAQHWQKPLTSKNRKTTRHDAAAVAIGRRALGHPIRRRTAPPPAHRSDEQGHRTVQARPDTPGREGPRPRIPGPRTRSVRAGRGANAGNQDAQHRSGRPAEHESWQQDSLPLSL

SEQ ID NO: 53325 - protein, 399 aa, Geitlerinema sp.
MLVFEAKLKGTQEQCERLDEAIRTARFVRNSCLRYWMDNKGVGRYELSAYCKVLAQEFPWAKKLNSMARQASAERAWSAIARFYDNCKKKQVKKGFPRFKKHQTHGSVEYKTSGWKLSEDRKTITFTDGFKAGSFKLWGTRDLHFYQLKQIKRVRVVRRADGYYVQFCINQERLEKREPTGKTIGLDVGLKEFSTDSNGQTVENPRHLRKSEKALKRLQRRLAKTQKGSNNRKKARNRLGRKHLKVSRQRKDFAVKLARCVVESNDLVAYEDLTVRNLAKNHRLAKSISDAAWSTFRQWVEYFGKVFGVVTVAVPPQYTSQTCSNCGKNVKKSLSMRTHRCPHCGLVIDRDWNAAINILKLALRTVGHTGIHASGDIDLCLGGETPQGKSSRGKRKPKK

SEQ ID NO: 53326 - protein, 411 aa, unknown
  TnpB Polypeptide
MCYNNAMITNQAFKFRLYPNAEQRPALDRQFGCVRFVYNHFLRLRMDYYAAHKGKEKQGLNYNDTSRMLTALKRQPEHAWLQEVNSQALQVALRNLDTAYGNFFAGRAKFPRFKSRRDKQSFGVPQHFTLDIERGCLTLPKLTPLKIVVHRPVTGTLKSVTITRSPSGRYFASLMCEVEVQDRPPKRKGKEIGLDLGLKSFAVTSQGEKIDPPQHLRRAEKMLCRLQRQLSRKQKGSQNREKARVKVARLHEKVANQRADFLHKQSRRLIDESQAIYVEDLNVKGLLTNHHLAKSISDAGWGEFLRQLQYKGAWYGCRLEAIGPFFPSSKLCHRCGYRKTDLTLAEREWDCPECHTHHDRDVNAALNILFEGRAKSAMKRRAGIARTQTPGEIRARRAGLRTRKLPPSGVE

SEQ ID NO: 53327 - protein, 351 aa, unknown
  TnpB Polypeptide
MQALTVKIRIFPDRPDVLHQLGKEYIRVVNHLTEQAEQLGSFPKVTTKHVGTILPAAVCNQAIRDAKSVFRKIKKLGVRPILKKPVYFVNNQNYTVSENTVAFPIVVDGKTKKTVFRAITTSRDMELFSKAKLGLMRIVEMSGKWYAQISLEVPASESNNENIMGIDLGLKIPAVAVTSTGKTRFFGNGRQNNYIRRKYQQRRRKLGKLKKLSAIRKLGNKESRWMRDQNHKISRQIVNFAIQENVSTIKLEKLENIRKTTRTSRKNTKNLHNWTFYQLQQFISYKANLAGIQVVEVNPAYTSQTCPCCGARNKAEDRTYECQCGFKTHRDRVGAINIMRQPVTDGNSLSA

SEQ ID NO: 53328 - protein, 367 aa, Paenibacillus sp.
MLHHKAYKFRIYPTKEQATLFNKTIGCSRFVFNRFLALWNDTYKETGKGLSYGACSSELTKLKQEIDWLNEPDKFSLQNALRNLSDAYHRFFKKQNDAPTFKSKKNPVQSYQTNYTNGNIEILDNQIKLPKLGLVKFAKSREVEGRILNVTIRRNPSGKYFVSVLTEVQRHELPKTGNEVGIDVGLKEFAILSNGEVFGNPKFFRILEEKLGRAQRKLSRRMKGSSNWKKQRIKVARIHEKITNARTDYLQKISTHIVKNHDIIAVEDLQVSGMMKNHKLAKAISEVSWSMFHSMLAYKAKWYGRIVVAVGKTFASSQLCSCCGYKNKDVKDLKLREWDCSDCGAHHERDFNASLNILAEGKRLLTM

SEQ ID NO: 53329 - protein, 385 aa, unknown
  TnpB Polypeptide
MEKGYVYRAYPNAKQRELIKKTFGCKRFVYNYFLDVRKERWKNEKKNMTFFEMNKLLTPLKQEKDFLREPDKNALQNALRDLDKAYENFFGTVNLSRKRKFGYPCFKSKRDNYQSYRTNFTNNNIVFEGAHIKLPKLGRVRIRGGKTLVPEGRILSATVRIEPDGRYYISICATDVPAPVLEHSEDPVGIDLGIKDLAILSDGTQFDTLKPLSASLKRLKFLQRSFDRKSRSSSRREKARVKVARMHAKIAAQRLDYLHKLTNLVTKKYGIIFIEDLNVGGMMKNNKLARHIADSSWGELRRQLEYKSLWRGRVLLSVDRFYASSQTCGNCGYQNPAVKDLSMREWVCPECGHHHDRDLNAAQNILCEGLRLLTELDKKSHDKSA

SEQ ID NO: 53330 - protein, 288 aa, unknown
  TnpB Polypeptide
MVPGQSQPYRYGISEEILGGKKNSSSRAGKRHRKYFLRFSYTEEVPITKAPVKEQIICSVDLGINTDAVCTIMWSDGTVLGRKFIDFPSEKDRMYRVLGRIRRFQREHGPVQVKSRWAYAKRLNTELGRKIAGAVAGYAEENHADVIVFEYLETKGKISGRKKQKLHLWRKRDIQKRCEHQAHRRGMRISRICAWNTSRLAYDGSGTVVRDPGNHSLCTFQNGKRYNCDLSASYNIGARYFIRELLKPFPATERSLLEAKVPSVKRRISCVYADLRELFSEIELLRAA

SEQ ID NO: 53331 - protein, 376 aa, unknown
  TnpB Polypeptide
MKRGEKMEYSYKFRIYPNREQQTLIQKTFGCARYVYNHFLAQRIAEYKTIGKAPTRFQQDKELTSLKKDLPWLCEVDATALQSSVQTLDVAYQNFFRRVKGGEKTGYPKFKSKKNRRRSYKSKCVGTNIKVLSKAVQLPKLGLVKCRVSKEMKGRILSATVSQNPSGKYFVALCCTDVEMEPLSSTGAVVGLDMGLKSFAITSDGATYPSHKFLTKNQKKLARLQRQLSRKSKGSKRREKARVKVAKLQEHIANQRQDTLHKLSTQLVRDYDLISIEDLVTKNMVKNHKLARSISDASWSEFRRQLEYKAKWYGKQVVTVDRFFPSSQLCSVCGTQWLGTKDLSVREWTCPVCGTVHDRDINAAKNILNEGLRLLA

SEQ ID NO: 53332 - protein, 235 aa, Okeania sp.
VEDFKKGTWLPLVTKGLKFQASEVIPTTNIEYQQKQKDGTYKSFVREQSWDAETKLVYDKKRWFAVFPKDFKPEDSKSQSIIALDPGVSLRDMKRSFLTGFDGEKFVDIGKGDITRIFRLAQHIDGLISHKTVLKGRQNKYKRQGLNKKINSLFIRIRNLIDEVHKKVAKWLTTEYRVIFIPTFESSQMVAKSGKKKRKLNSRVSSANVKLGTLPFQTNSEVSGFKTRGNRNRCN

SEQ ID NO: 53333 - protein, 436 aa, Thermococcus sp.
MKRTVTVKLHPSKTQEKALFELSDISAKAWNRANYLRRQEYFQGKPIDFLKTQKTVYEEFKREIGSATVQTIARKNAEAWRSFFSLLRKKRNGELPNWLKPKPPNYLKENRRRKPLIVLRNDQYKIDGNKLILKGLGRFKRLEIQFKGRIHLRGKQGRLEITYDEVKRKWYAHLSFTVEERLEDEEWIKLPRIPKGSLSAGIDLGVNNLMAIYVENGQSFLVNGRPLKSIDFYWRKKITDYQSKLNRSGAKTSRKLKRMHEKAKLQARHYINTAVRQTVRKLYELGVSRIVVGYPKGITRNSNKGARQNFLLSHVWRFNYVIKRLTEVAEEYGIRVVVVGEAFTSKTCPVCGKPHEGARFVRGLFKCPATGLIFNADLVGAFNILKKAVKTITPSLGGLYAQGRGNWPKTGPEGLKTHFLAGLNETPQTSPSMARG

SEQ ID NO: 53334 - protein, 592 aa, unknown
  TnpB Polypeptide
LEKKFTSISTSAIPFACSRGERQPQCLECPKGLSESCLMKETSDASGCQADIDATISLDMSLRLKTWQLNKIQSMHIAESPDSTKKKTSSDKLSTCRTNSQDTLSSPTSVQESTSNDKVCKPFFDSRCLEMSRKLWLPTKTALQGLPVTYWSGSSQPTIRNSWSSITQLKASKETLPKTSWPLSTFSVAEQMVSEDIQKNTRKTKIPKTKTKKKALANCTRKIRIFPSPEDKAKLTQWLGCHRVVYNRALAFANKTKNRNYTEMGKRFVASRNIKEKWLLECPQVIRSVAIRDLKAAFDSNFAKMAINPEHRFELKFKSKKEGAQACRIEAKNSALKITKDGLLSFFPKSLKPMRFEKKSLEGINFNYDVTIVKDKLGRFSLHIPYHRENQPVKESMSWCAVDPGVRTFATVYSPTAVLKIGDGAATRLSRLLLCMDNLMSLRSTTKGVQKKRRMGKAITRMRFRIQNLTKELHCQAANCLTREFTDIVLPPFETQKMAARLGRKLTKKTTRNMLTLSHYKFRVRLQNKAVSRGCRVHVLGEEYTSKTCTRCGTIKANLGGAKEYKCSHCDLIIDRDVAGARNIFLKNISGP

SEQ ID NO: 53335 - protein, 414 aa, unknown
  TnpB Polypeptide
MDLTKKVRLYPNKTMLAVLDMLCDYRRYCWNQALDVWMTLYQQRQKHLPRDLRFKVKQSIKDKSISFTDDENALLTQYPAPTHYTVRKILTKQKQEWQYQLSSRVLQLAVADLATTWKYFFNNKENKALRAGKPTFRQKKNPKQGFKTDRSRIHNGKLLLDKPRQYKGDWCAIPFKGYSLPDGNIKYCSITKINNKYYASLVIETPIEPLVKTGQNTAVDANVNHFDYTEGQYSLNPKRLNLLYSQITFYQKRLAHKRKVNGKKATESKSYTVMRAKLQALYAKATAIQNDLLHKFTTYLYRTYDAIVIEDLDVKAMQMSKKAKNLHRSLFGKFRFQMEYKAQKFNKQLIIADRYYPSTQRCSNCGTVKKGDDKITLQGNAKHGTAHNEYVCYECGYTTDRDMNAVNNLLALIK

SEQ ID NO: 53336 - protein, 539 aa, unknown
  TnpB Polypeptide
MIEASKWIATIPTPSLANNSKIDIVNELLIPYSNLMSYFLSDIDLRFVRDNEHLPFTNAKPYQSTKDYKRLFESCKKRYKSQLEKEQTPKQSLEEQLKAIETYAIQTPLSARYVQTCYKQTLEIHSSWLTKLEDVVRSFLGNSSIVDELFLTTCYRINKSHLWHHSAVDLKWHQTTDGQLIVPSKSHKANVTLPVSSDILFFMRKLIKRARKCIRFPQLKRIKTLKLDEKVAVLEVSENASHFDYFLKLSTLQKGKPIYLPLKRNPYLDECLQKGERLPFVQVRITDKTCTISAIVGYDKVPLRPSTESIGLDFGMVSMFTTSDGERHGLSSFTKLKIWDKELLDLSKNLQKQSIKFSTNERYVHLQQRIKSYFKNEICRILNKLAKKNVGVFAVEHLDFRAAGMSKQMNRLIERTYRSVVKAKLSRLEEQYGIQIVAVNPAYTSQECSRCHHVSKYNRKTQKEFICQHCHFSCNADVNAGRVINQRRSLMLEFPVYAKSSTSRTVRCQVQEASKECHRRYCHNNGLMTYEESLAKSSL

SEQ ID NO: 53337 - protein, 382 aa, Archaeon sp.
MPIKSIRQNFTPNTEQLQMMETFSEMISHSIRIGLDHDCSTMKKLSMLSYSQLRDYPVLSYYKLTAISQAAGRLSLKKDIKKGRKVKSPFVRKSYLVSCYGFKINGMLLSFPLNREFANAPLTDHTVSELSNGIRARSFTMTPTSLSISIQKDIPEIKPESVIGIDRNLRNITISTPQRAIMYRTKKILSIKQNSQHVRDSFRRFDVLVKNRFFARIRKRQTRRVNQILHKISKDIVQKARESRSMIVFEDLKGIRKLYRKGNGQGNSYRRKLNSWSFYELQRQIQYKAAWEGIPVRFVDPERTSTLCPICGDRIQEDRQNRRKVLCINCGKLMDRDVVASMNVAHKGWARFTHPGGPPDEAMKGNVILEYREPLIECMGVS

SEQ ID NO: 53338 - protein, 415 aa, unknown
  TnpB Polypeptide
MSKYKKDYLTYIIATARPTEQLDGMNRLGGRIYSKTLSLAFKTHRQKGFWLSDGGLKAYLKFKKYPCHAHSVQAIIDDYCGARRSFFESRKSNPNAKPPKKTRKFHTFTWRATGISYTRGKLRLSMGEDREPLWIRMNKKFHKKVPAEISLVFNRTTKHYEFHATYITQPKKAKSKIGSVVAVDMGEIHPIVSFDGLNTEIYNGREHRSKVRYREKSKTSINRKISRCERYSKRWKKLKRAKDKTLAALHAQLRDMRHKITSRFVSTCRERKIETIVIGDLKHIRQSIQYGNKANEKLHQWAFSKIREMITYKAKVVGIEVDSQDEAYTSQTCPSCGHRKKPSNRTYHCSECGWQGHRDVVGASNILTAYQGWLFNPVVGVVVSPVGIRYNPNLCRLDKWSPFSGLKSSKPSKRR

SEQ ID NO: 53339 - protein, 410 aa, unknown
  TnpB Polypeptide
VTLRHRAFRFRVYPTDEQAQMLAQTFGCVRVVYNQALRHRTDSWFERQERVSYAASSARLTELKKTDEFVWLNDVSSVPLQQSLRHLQTGFLNFFAGRTGYPSFKAKHHHRDSAEYTKSAFRWDQVTQQLTLAKMKTPLPIRFSRHVPAEPTTITISRDPSGRYHVSMLVETEVTELDDAPNDAIGIDMGITTFATLSTGEKVANPRYHQADMDRLARAQRDLARKQKGSKNRGKAAQRVARIHARIADRRRDHHHQLSTRLVRENQTIVVEDLNLRGMVKDRHLSRAISDVGWGQFASMCEYKSDWYGRDFVKIDRWFPSTRRCSNCGHIGPKLDLSIRKWDCVECGAHHDRDHNASINIRAAGLAVQACGDGVRPSRNSGDATLVEAGNFRSDSENPTDSSVGRSQLV

SEQ ID NO: 53340 - protein, 397 aa, unknown
  TnpB Polypeptide
MFRTFEAVLAPTIGQQAKLGRLFRLQCELYNAALEERRGVWKQNHRTVTRFEQFRGLSGFDHPVMGFGLVPARGTLTRLDRAFQGFFRRVKSGGTPGFPRFKPSARWSSVEYPDSSCWKITGGTRKHAGTGRLYLKGVGQVRFRGSRRGIRGAPKTLIVRRVAGKYRMYVTYVLEPTLGPRKPRTPKNVGVDLGVTEVVALSDGTLFPNPRESKRAAAKLAEAQQDLARKQKGSNRRNRAVDRVACQHRKVANARRNRNHQISRAIVDRTDGGLIVFEDLKIGNMTARCAPKPDPDNPGQFLANGQTAKSGLNREIHAAGWSQLRQMAGYKAEEAGTRLVVVNPAFTSQTCNKCGHIAAENRNGTKFRCVKCGHKAHADVNAAKNIKRVGQTQRLAA

SEQ ID NO: 53341 - protein, 393 aa, unknown
  TnpB Polypeptide
MLKAVKVRIYPTDEQSIVLAKHFGCARWIWNHSLAVMSERYKTTGKGISAFTMKKQIPVLKQEHEWLKECYSQCLQQSVLNLSQAFINFFEGRAKYPNFKAKHHRQSVQFPQNVKIVSDSEIKFPGNLGSVAAKIHRPIEGVLKTVTVSRNPDGNHYASLLIDDGVAKPELSSDGKTIGVDLGLTDFAVTSDGSKHANPRHLKKHERNLKRKQSKLSRRTKGSKNRNKARIKVAKVHSKISRVRSDFNHKLSRKIVNENQVIVVEDLAVKNMVKNHNLAKAISDVGWGQFCTMLKYKAEFDGKVYLEVGRFFPSSHLCSNTLLRLAKMDLSVRSFVCPHCSERHDRDINAAINIKNEGLRILASGSGASALGRNVRPKGGRRKSTLSEAVAVD

SEQ ID NO: 53342 - protein, 411 aa, unknown
  TnpB Polypeptide
LSLTDSKHRKLQDTYSVFKTVAATTFDAIKREQPNGYTQLHHLLYAKNKANRVASQLVEEAQRYAWQRRKVASKIEHPTIRFDKRLFSWKTTKRGHPILSVRGNHERLGLPVQQDGAYRRLLKHMGDGWVATSVLMTRRYRFLVLLKKSPPVWRATENVVGVDQNSNGIGVTVMNKRTGRILRQLYLGRDISLRQIRYENRRAVLQEYRDKNGHRGKAGLKLKGLSGRQRCYVRTNTWLLAKQLTDLATRHKATITIEQLYKLRRRKGQMSRKSRRKTNRIPYGFFRHALTHKSAQLGIPVIQVPAKYTSQTCPNCGHVSRNNRKNWRYFRCVRCRFEANADRVASVNICRKAIQATYPVTRNQFLPTGAPVSVPVRQDEEACWQHPTPQSCKLLTLVTEKLTVLLSYQCA

SEQ ID NO: 53343 - protein, 399 aa, unknown
  TnpB Polypeptide
MLKVFFRQNERNIKTMFKSIKVMLLPNNKQRTKLFQCFEVSRFAYNWALNRQQENYKNGGKFISAFDLIKEFTQLKKLPEYGWLNSYSSEIPNRAIIDVCSSYKNFFRGNNKFPKFKSKKNSKSSFYVHNCKIKFTSTHVKLIRLSDSTRKNRRKLNWVKLAEVGRIPTDCKYSNPRVTFDGINFWLSVAIEVENSNETPTNEGIGIDLGVKDLAICSDGHIYRNINKTKEVKCLEKKKRRLQRRLSKKCVANKYEKTKNILKLEKELLRLNHRLTNIRHNYIHQVTSEIVKRKPSFISLEELNVFGMMKNRHLAKAIQEQSFYSFKATLSYKAKSKNIQIIEVPRFYPSSKTCSVCGTVKSDLKLSDRVFICPECGNRIDRDLNAGMNLKNYGLSTLK

SEQ ID NO: 53344 - protein, 352 aa, unknown
  TnpB Polypeptide
MIQIQLKLRPTPRQERRLGHWLRHLGSVWNWAIKKIEHDSRDCIYYSSLDFRNLLNSHGPKMDVAQDAICGTLWSAHTSWRRCFKKVSRKPRLKGRRNRFNSIPFAHGVKVIDGRLSVVRLGRIRFHKQEIPEGQISQFRLVKRASGWYACLFIKADGDAIFATADGCVGIDPGFSSLLTLSDGEVVEHPRELEASAKRLSQSQRGRNRKFTSRLQERIANQRKDRNHKLSRRLIAENQLIAFSADRHKSIAKRFGKSVASSGHAQLRQMLSYKSKRRTDGLGVYVEVDSRNSTKTCSACGCLSGPTGLAGLKVREWECAQCGTEHDRDINAAINTLIVGLGGSHERQAIAI

SEQ ID NO: 53345 - protein, 196 aa, unknown
  TnpB Polypeptide
LSYKTTEEVPTSCPYGTELMRVKDRWYAIFPEPVNWQCTLARGVIAVDPGVRTFLTGFDGDSFIEFGKGDFGRITRLCQSLDNLSSRMSKVNAKRRRRMRMAALRLRQKIRNLVDECHRKVVSFLTDNYRVIFLPTFESADMVAKARRKIGSKTARAMLTWAHFTVGQQCRDSVPLTRPAVFSVNVSVLVSSLLRH

SEQ ID NO: 53346 - protein, 283 aa, Rhodococcus sp.
MWLRGRRDSSHLTCGTATTQARRSWAARWDTTIPTTTRTAYCRSSIRRTNWSGSTITSPPPTAASATSPGAWTSCGGSCAADDESAGLHLCTETCFSGRWRGTPAVQGSGSRCGVGGHCHDPGMKRVVRVKVLPDGRQLDTLIGKKPDSPPTPTIRYPRGSWPRRSAPDAASPSKNSRASAKRVRLRKPQRATHSSWAFAQLGAFISYKAVRAGVPVMSVDPAITSRRCTRCGHIDKKNRPGQDRFACLDCGFVEHADIVGSNNIAHRAAENYRAQSTSPGAA

SEQ ID NO: 53347 - protein, 397 aa, unknown
  TnpB Polypeptide
MLKAIKIRIYPNQEQMNYINNLLGSARFVYNNCLAFKIDSYNNEKKNVGFAELGRYLTELKQKEEFIWLKDVHAKVLQQSLINLNQAYSNFFKNGFGFPNFKSRKSYKQSCRFPKDAIGKIEENKITLIKQLKNIPFRCSERDKNYLNSHQENIHSATLLKTKTNKYYLSILIDFELNKKLKETEKIIGIDLGIKNFIVTSENEKIENIKIIRNNQEKLKKLHQNLSKKKNGSKNKEKARIKLARFNEKLNNKKEFYLHQISNQLLDENQVIIMEDLDIKSMLQNHQLARSIQELSLYTFKSILKYKAKWYNRDIIEINKFFPSSKLCSSCGYKKDDLELKDRNWTCPECGAEHERDLNAAKNILKEGKRILEIKENKIGLSRPESTLVESNSLESR

SEQ ID NO: 53348 - protein, 512 aa, Streptomyces sp.
  misc_feature (4)..(86): Xaa can be any naturally occurring amino acid
  misc_feature (421)..(510): Xaa can be any naturally occurring amino acid
LARXXXXXXXXXXXXXXXXXXXXXXXXXXXXXXXXXXXXXXXXXXXXXXXXXXXXXXXXXXXXXXXXXXXXXXXXXXXXXXXXXXXASLARTFGCARVVYNDALAVRKEARKGGLPYPKSTDLQKQVITAAKRTAERAWLASVGVDPLIQSLRDLDTAYRNFFDSLSGKRQGRPVGLPRFKSKRDARQSLRFTRNGFRIRGNGKLNLARIGDVRVKWSRALPADPSSVTIVLDPSGRYHASFVVEVEPDPLPEVDAEIGIDLGLTTYAVLSDGSVIDNPRFLRKAEKKLKAAQRELSRKAKGSKNRAKARAKVAKAHAKVADTRRDWLHKQTTKLIGENQAVYLEDLNVRGLGRGRLAKSVHDAGWSTFRRLLEEKAARYGRYIGIVHRAFPSSQLCSECGHRDGPKPLAVRAWTCGTCGXXXXXXXXXXXXXXXXXXXXXXXXXXXXXXXXXXXXXXXXXXXXXXXXXXXXXXXXXXXXXXXXXXXXXXXXXXXXXXXXXXXXXXXXXXAA

SEQ ID NO: 53349 - protein, 456 aa, unknown
  TnpB Polypeptide
MKKRKKYNFKKAKILKDSIVNYTELVDLPTINEIKFNNVQLINGINTTKFDYDLIEENIDLFSDNLIDGRKRNDVFVKTFKIKLLPTLKQREILLIWMDTWIDMYNKVISVIKAERKKQSTELNKPLKYNEMDLDNLNITKLKKDLHDFKKLLVAKTKIDSHSLDYCINDVLTMLSSSISNLNNANCKKCKLKYIKKTKKSKIFKLENNGTTITNTSFCTSKMGKIVKSNPKVNFKEINSTVCTIQYKKGNFFMLIKKKLNTKNRIHKIKEQQIASLDAGHRTYFSCLTNKSLIEIGNGIDKKIKKKLIKMDKIKKSKEVKYKRKYLLKHEKDIANYINDMHWQIISYLTNNYNHILLGNYSTKSMVESSNTTKMNKRIGSTLKFYQFRQKLIYKCLLKGCKLNIVDEFNTTKSCSNCSKLNDIGSSKEYLCKGCKNKYPRDINSCKNILLKAIKK

SEQ ID NO: 53350 - protein, 227 aa, Virgibacillus sp.
LDGTVKQVVIKRQGGHWFAIFSVEKHVNHKAVDVRFDTTGIDVGIKKFAVLSDGTEIANPRFLHKEEKKLKRMQRKLSRKAKGSENWKKQLEKVKKIHAKVTNQRRDFHHKQSFRISNDYSMVFMEDLTIKNMVKNRHLAKSIHDAGWGNFRNMIAYKCERNGGVLVKIKPHYTSQNCSSCGNHVKKSLSIRTHICKDCGTILDRDHNAALNIENAGLAQMGLSPTA

SEQ ID NO: 53351 - protein, 387 aa, Virgibacillus sp.
MILNYKYEIYPTERQIQLLDSWISICRQQYNSALFDKQHYYKKHKKGLSRYNLQKQQTKDKKKFAILKSIPSQPLQEVFFRLEKAFDKFFKGDAKYPKQKKYKDYNSITFTQFGIGMQKVKNKKTGKIGMRPVRYAASFDDNGNLRLSKLGSLKINLHRKLDRTVKQVVIKRQGSRWFAIFSVEKHVNQTATGSEYSTTGIDVGIKKFAVLSDGTEIKNPKFLRKEEKKLKRMQRKLSRKEKGSENWKKQLEKVQQIHTKVANQRRDFHHKQSFRISNDHSMVFVEDLTIKNMVKNRHLAKSIHDAGWGNFRNMIAYKCERNGGVLVKVKPHYTSQNCSGCGKKVKKSLSIRTHICKDCGTILDRDHNAALNIEKAGLDQMDLSPTA

SEQ ID NO: 53352 - protein, 568 aa, Virgibacillus sp.
MSTKVFFSNRIYKNTLPITFVDAIHDALFRFNRAKQFVLNTFVKEKRSGQSKREKSSHLVVKETFQLDDYYTNSAVQAANAQLKSLDELKKLYIKNKTAQIRSIKRKLKKDRSRLTTLRKIKTSFIKDNPTFPKNAKEQKQDNFFVVNFKKKTDIYYHAYQFEHTYLDPAIHQLQTRIGFLTSKRIRKEEELKQLRTHISSVVFGSKKLFKSQYTKQCYIDDHETWQEAWQQSRYQKMALSGRKDAGMGNFVFQYDIENQQLHFKTPSGTCVNMENIHFPYGQEKVEYAVHTQQNCKNKKKYGKPIAWSLEDHGDYYIVKCIVDVEANPHINYSKADGIIGIDCNVDHFAITNINAKGQLISSCTLPFNLEDKTSGQITKIMEAETITVVNIAQKANKPITLENIDTTTSKVAHPYGNKKANHKMSMFAYKKMITAIKSRAEKKGVAVYEVNPAYTSQIGKIKYMKRCGISIHQAASYVIARRAMGFQEKLPPVLDALLPEKMIGAHHWTQWKYISKPLKEVRTHAFYLSELFDVDRFHNTGEFFVSGALTGPEQKGLSKLESRKTAS

SEQ ID NO: 53353 - protein, 423 aa, Virgibacillus sp.
MNGFYYLLKIINRTLQIIKNSVNSKYKHTFENEGRLMILNYKYEIYPTEKQVELLDSWISICRQQYNAALLDKQRYYKKHKKGLSRYNLQKQQVKDKKKLAVLKNVPSQPLQEVFFRLEKAFDKFFKEDAKYPKQKKYKDYSSITFTQFGVGTQKVNNKKTGKMRIQPVRFAASFDNNGHLRVSKLGSININLHRKLGGPVKQDVIKRQGGRWFAIFSVEKHVNQTAIDGGYSTTGIDVGIKKFAVLPDGTEIKNPKFLRKEEKKLKRMQRKLSRREKGSENWKKQLERVQKIHTKVANQRRDFHHKQSFRVSNDYSMVFVEDLRIKNMVKNRNLAKSIHDAGWGNFRNMLVYKCERNGGLLVKVKPHYTSQNCSGCGKKVKKSLSVRTHVCKDCGTILDRDHNAALNIEKVGLDQMGLSPTA

SEQ ID NO: 53354 - protein, 447 aa, Virgibacillus sp.
MLTYNKKVRLVVSKENRQLLDSQSRMCNWLYNQLLDAVEDDYRDGNAKRLLSGRNLRNEVPKIKKENPFLYKVHSSPLKNTALRLNDAYNRFFDEKLANHKPKYRSWKKKWFSLYYDEPKKGFKLVNSSELSITFGRLKDEELKEAKKTDKKTKKSIWINVGLVEGVALSETEEIKTLRITKDLNSYYAIFTIKDCKEIEQVEEQSFIVFDPNHKNLAVGLGSDGKSYELKSMNALLKYWDKRIDDIKSRRDKCEKLSKLVCTEKVTYFEPSKRWKRLNCALVKAELKRREQMKTLLFSYAHYFSKRYDAIYIGDYTPSPDVATYGTMRRAMLNQTPVGKFRSILNWVQAKNGKHYYKIDERDTTKTCCVCGNKEKKEPSIRSFTCVNCGTTLSRDINSTVNIGKKAKKRLPRAGYIGVESPMYTVWWDCKQARVACGVTPSAGLGK

SEQ ID NO: 53355 - protein, 447 aa, Virgibacillus sp.
MLTYNKKIRLVVSNENSQLLDSQSRICNWLYNQLLEAVEADSGNGNVNKLLSGRNLRNEVPKIKKENPFLCKVHSSPLKNTALRLKDAYDRFFDKTLSNKKPKYRSWKKKWFSLYYDEPKKGFKLFCPNELSLTFGKLTDEELKEAKKIDKKVTKSIHIKVGLVEGVVLSETESIKTLRITKDLDSYYAIFTIEDSREIEQIAGQSFIVFDPNHKNLAVGLGSDGKSFELKSMNTLLKYWDKRIDEIKAKRDKCEKLNRLICTENVTYFEPSKRWKRLNRALIKAELKRREQMKTLLFSYAHYFSKRYDAIYIGDYTPTPDVAKFGTMRRAMLNQTPVGRFRNILYWVQTKNGKYYAKVDERDTTKTCCVCGHQEKKEPSIRSFTCVNCGTTLSRDINSTVNIGKKAKKQLPRAGYIGVESPMYTVWWDFKQAKVACGLTPCAGLGK

SEQ ID NO: 53356 - protein, 350 aa, Paenibacillus sp.
MQITIQLKLQLTKEQTQWLKETSKEYIRLVNQVVADWVGGSQVKHSSRTVSAALPSAVKNQALQNAKSVYRKIIKTNIPTILRKPVCIWNNQNWKLKDGVISFPLWIEGKSKRVAVPVKITEYQEKKLIGKTGTLRITEKSRKWIAQIAVSGLETGLSGTGVMGIDLGLKVPAVAVTDTGKTKFFGNGRQNKYMKRKNRSKRRKLGKLKKLSAIRKLNNKEQRWMKDQDHKVSRQIINMAIQEKVGVIRLEKLSGIRQTARTSRKNEKNLHSWSFYRLSQFLEYKAALAGIRIEYVDPKYTSQKCPKCGSLNKVKDRDYQCGCGYHTHRDRLGALNIMHAPVADGNSLSA

SEQ ID NO: 53357 - protein, 346 aa, unknown
  TnpB Polypeptide
LARKIFKDLLGKNKRPRFNNISMHLDGKVIDVSKKKENGAKSFDYWIKIATLEKGKPIYIPLKANTYAEEFEGEFLNYCQVVEDDDRNIEFRVVKELKKKEYIPLTDEIAIDLGLNPLFATDKGDLFGRNFLDVLKSFDEKITKRMASLQKRNIKPRDDKKYRQYVDKLRDYLKNEINRLLNVIVKIYKPKRIIIERLDFRSPELSKRLNRLIQRFGKKYIKQKLERLQQLYGIEIIEINPAYTSQECSSCGYVDERNRKNTQEFECRACGNKTNAQINGARNILKRSSLGSLYLTKKQVLKILTERYLERLKGCKSPPLDILKGNPYFKDCLESILNPCQGLTSS

SEQ ID NO: 53358 - protein, 367 aa, unknown
  TnpB Polypeptide
VEKAYKYRIYPNKKQKELIQKTFGCCRYVYNHYLAKRIEIYKQNKATFSYGQCSNDLTNLKSELEWLKEVDSTALQSSLKYLDYAYQKFFNEHSGYPKFKSKKTHRFSYKSKCVNNNIQYCDKHIKLPKLGMVKTKNKLIPRGRILNATVSQEPSGKYYVSLCCTNVDIEPLEKAGNVVGIDLGIKDLLITSNGQKFDNQKLTKKYEDKLAKEQRKLSHKVKGSKNWDKQRIRVARIYEKISNTRKDYLHKISRQLVSENQVIVAEDLAVSNMMKNHNLAKAIQDCGWYELTRQLQYKSEWNNRQYVKIGRYTKSSQPCHVCGYINTKTKNLAVREWTCPNCETVHDRDINAAINILNEGLKLLNVT

SEQ ID NO: 53359 - protein, 675 aa, unknown
  TnpB Polypeptide
VRTDALPDPAVAAVAAARRRGKSKTANWRRPEQVAVIALELDLSGDAVMRWRVAKHWDAVFRLRRAVQRDTGAASRAYLAARHERAGDPQAVRHRLGLNRRAVEDRAKVHVERAGWMRAHLTKATALHVADEVWQSCDRFLFPDSRGRRHGPPRVGSWWDFTRIPGRARSHTKPQPVWETYRLVGSLQGHLDTYGQGASVAAVAALEAGRSALAQPQRLPAPAGGRRSWWDYDGPLAVVYTGLPGGDLVMPVRLAQGAGQFGRLAHFLADPACWHKIDLCRVRDRRAPGGWRYQAHLTILGPGWVGPTTAGLRQFAPTGRIGGVDGNVSNIAVASIDTHGERPAVLTSHVTATPDQQQATVREAKKARDRMRALDRSRRATNANQYRLSPNQQARAERRAAAGLPARTVGTPAGARVATSTGIPVQAYRKDAVSQTYRDLRADHAAAASATARRKDSVARQTAQVIVAAHGPHLITEDVDVRTWARRWGRGVAAFTPGRMLSRLAGECAAAGGGLLKASTFTTALSQHCTCGARIKKNLSQRWHTCPCGIEGDRDIVSAAMAANVAFTDTADPRTARIDHDQRQRLHDTVLAGRVHNIPVTRETAQHERPVRSTIHHNPTSGTGEDGSPNPGAPAGQGESPALPRNRPHSYTWGRRRTRRTSTDPTIQQSAPADL

SEQ ID NO: 53360 - protein, 573 aa, unknown
  TnpB Polypeptide
MKKTRDTFYTTAQGRLPSDLTRKQRQALGAYSDQFSRAERHYLAAVTRDEVINKPAFLAKFSITSRQFNAVKRSAQGKIDSQLSNLDNRLNELAIKIKRLEKARKKLTAHIDAWKKKSDAANQQQKLDYFYHRLSRVDRGLQISKSKQAAFSQQREAKRPSICLGSRRLFKAQYHLEENGYANHREWRDDWETARRSQFFVLGSKDETMGCQGCVMTRQEDGRLTLRIRMPSGLEKVHGKHLVIENVELGYQAALVDEVIERNLARQAKAKRLNQINYAARKAHKEKKAEGKPEQINLNEVLAEEGLAVNFRFVRDDKGWRVLISFEQLAMPDANTDMSKGVIGIDLNADHLAVAEIDKQGNLVKSWSIPLPSDLDASSRANRTAIEMACQEVVTFAEIAGKPIIIEDLDFTFKKANLQKGKNTRYNKMLSALSYRAFEQAIRRQATKRGVYVKSVNPAYTSFIGQVKYLNQTRGSVHEAAAMVIARRGKGHRDRLPKESRQTFRSQSRTFLLPVDRRKDLYAVYRKAKEAFDKWMAAQISELRQNHQDDLERRCQSRTVSELESELDALTAA

SEQ ID NO: 53361 - protein, 515 aa, unknown
  TnpB Polypeptide
MSSVTRTILLRPFFCRETKTGINLDLHNILEELRLDAELCATKAYKHITVENLEKLSEHDGLKPAVAGRRMGIQFSVPGRGTGRSRFEAMVQEYAVMMLRSWNERHKASTGKTDKYVSTGFKRTANPNEPDFLKPRLALSATDKQYHVIRLHGSTIELDMVVNQRWVTFKFKAPERFLEPGVRVIAPMISIDDNNRVIFNWPIEIPVERAPFSEKYVVGVDVGITNHTTAVVRDITTDRVIEASFMNQRVRSLENKIKRSKTQITALYRKGRVEEVEPHRKALSNRRKELAILIGQEVADLSWNYDNALVAVEDLSHMTNTMKHGRWVRGMIVQRITDMVESNGGRVMTVSAAYTSQKCHRCNTRLNMTDYHTPICTTCQVGWDRDENAAANIASKLKEKDRHKKSCQTRKKHASKNRRRNSKDTTRPLKHPLKKNSPTPKAPQNRPKTNHTIHHKKVVIKNREGGVFPVLCAAGWSLHDVRVPAVAPASGWSDKKPHDYPTGRHRFYDVCLSKE

SEQ ID NO: 53362 - protein, 438 aa, unknown
  TnpB Polypeptide
VTSHDIAPAVVFRAYVYAVDPTPHQIAILRSHVGGSRFAYNALLELVKDNWDENDAKKRAGFDLAKDDLIDTSHFSLLYLWAELRDELAPWWSENGSSTYNDAAKRLSAAMANFRKGRSEFPSFKRKGQGGSVRFMGRVVRLKDSHHLRIARVGEVKTYESMRKLYRHLERGTGRIVAATVSERSGKWRVSFTVQVTRDIPETRPPERIIGVDVGIANLYTGATPDGEQILQVANPRHFQCAEKKLAHAQRIASRREGPKKGVDPSKRWRKANTRVRNIHTDVRNARSNLIHETTSYLAKNHDVIVIENLNVAGLVKNHVLAKHISNAAWGEFARQLEYKTKWYGSTLVRVDRFYPSTKTCSRCGTVKATLSLDQRTYECRTCGLTLGRDHNAAINLARMGLPGTSSGTGRGGEVSPGCFGTLVHPGEASTEALFIGA

SEQ ID NO: 53363 - protein, 387 aa, Streptosporangium sp.
VGDVKLVVQVRLLPTPEQAAALAATLRAVNEAATWVSALAHHQRVFRNYDLRRHAYGRIKDNYGLAAQAAQHVIKKVTDAYATLHANLRNGQVGRPGSARRERALAKPIVFRPGAAQPFDDRCLSWRMESRTVSIWTTCGRMKSVAFTASADQLTTLAAYRKGESDLLYRDGRWFLIATCDIPDRPATTPDGFLGVDLGIANLATTSGGVRHSGRALNAVRHRHRELRRRLQAKQTKSAKRLLRKRRRKEARFAADTNHTIAKRIVTEATRTGQGIALEDLQGIRDRVRLRKPQRVTLHSWSFHQLGRFVVYKARRAGVAVVYVDPAYTSQGCSACGHIDRRNRPDQETFRCTSCGFAEHADVNAARNIASRGVAGWAVSHAADDAA

SEQ ID NO: 53364 - protein, 429 aa, Streptosporangium sp.
VLTGRRYRLDLTPGQAEFAERIGGACRSVWNTALEQRRVHHRRGAWIGYHEQARQLVEAKGEFGWLAEVPGRCLQQTLIDLDQACAKHGTWKVRWKSRVRNAPSFRFPEGGKITVERLNRRWARAKLPKLGWVRLRITRPLGGKIKNATVCRDGRHWYISFLVEDGLAPPERHANPGSRVGIDRGVVKVVTRSDGIFHHRVFARDREAAHAKKLQRDFARTARGSARRKKAAGRVADLAGRIGRRRQDFAAKTACVLATGFELVVFEALATKNMTAGVEPRPDPERPGAFLPNGAASKSGLNRSILDNGWHRIEVATIGKARYTGTHVIKVNPAYTSQRCNVCTAVDGKSRESQAVFRCTSCGHTEHADVNAAKNILTAGRAEHAQPRPGVRVGARKPRNRVGRKANRQATAAQVTAQTEPEPAGIPRL

SEQ ID NO: 53365 - protein, 429 aa, Streptosporangium sp.
VLTGRKYRLDFTPEQGEFAERIGGACRSVWNTALEQRRIYRRRGGWIGYHDQARQVAEAKDDFPWLAEVPGHCLQQALIDLDQACARHGTWKVRWKSKVANPPSFRFPEGGKITVERLNRRWARVKLPKLGWVRFRLTRPLGGKAKNATVSRDGEHWYISFLVEDAVTPPERHADPGSAVGIDRGVVKVVTRSDGRFHHRVFARDREVEHAKKLQRDFVRTAKGSARRKEAAGRVAAMARKVRRRREDFAAKTAHTLATGFEMVVFEALTTKNMTAGVEPRPDPEQPGAFLPNGAAAKTGLNRSILDKGWYRIELATRSRARYTGTHVITVNPAYTSQTCNVCTVVDRKSRESQAVFRCTSCGHIEHADVNAAKNVLTAGRAEFAQPRPGVRAGARKPRNRVGRKANRQATAAQSTATAGSGLAGIPRL

SEQ ID NO: 53366 - protein, 358 aa, Streptosporangium sp.
MLVTEMLKLAPSAEQREALLATMRACNAAANRVAEVAFEQRTANKIALQKLVYADLRHEFGLSAQMAIRSIAKACEAYKRDKKIKPAFRKLGAVAYDPRILTWKGRDAVSILTLTGRALIPVVYQGRWTQGPENRIRGQADLVYHDGMFFLAVVIDVPEPPGGGEPDGWLGVDLGIVNLATDSTGEAHSGKGVRAVRRRNAALRARLQAKGTKSAKRLLKKRRRKESRFARDVNHVISKHLVGKAKGTRSGIALEDLEGIRDRVTVRKAQRADLHSWSFHQLRTFVMYKAALTGVPVRLVDARNTSRTCHRCGQCKKKNRPSRDDFRCVDCGFAGPADHNAAINIGRRAVSHAAIDAA

SEQ ID NO: 53367 - protein, 358 aa, Streptosporangium sp.
MLVTEMLKLAPSAEQCEALLATMRACNVAANHTAEVAFEHRTANKIALQKLMYADLRAEFGLSAQMAIRSIAKACEAYKRDKKIKPVFRELGAVAYDQRILSWKGRDRVSILTLTGRIVVPVVYQGRWLATTGATMRGQADLVYRDGAFYLAAVIDVPEPPQGDEPDEWLGVDLGIVNLATDSTGEAHTGKGVRAVRRRNARLRARLQAKATKSAKRLLKKRKRKESRFARDVNHVISKHLVGKAKDTQTGIALEDLEGIRDRVTVRKAQRADHHSWAFHQLRTFVTYKAAITGVPVRLVDPRDTSRTCHRCGHCDKRNRPNRDDFKCLGCGFAGPADYNAAINIGRRAVSHAADDAA

SEQ ID NO: 53368 - protein, 716 aa, Streptosporangium sp.
VPIRSARSTLGDGRATSAKASMAKTASAARAARGSPAVRPTATAAPAMIARLAPETAVRWLSPASLKSALTCPSMRETSPTTSPGSSPRWSGGSTSAASRSPDRSAPAVRCAHEGPSRTRGGPRTSTTAASSSPESAGPNRPWTAIRWLGSRVRHSPPEASITTGACNVTLPGPVPIASIRAGTTKLSLRNGPPRCAGSRGSPVTTASITVEARFSTSSATGPALTACSRKATVPATAAAHPSTAITTLRQPAIPPAGTSTAAESAPAAASAATRAPVQDGQPSRMRAVVQATRAGRTRWRAYALRPLSVAPSSRSAEAAPNRLIALPPGGAESSNLLERGRPGLQSRGRNAAQRRMGFSRTRVRCRPCCVMMCAVAQGVKRAFTYRFYPTPEQAERLARTFGCARLVYNKALEERSRAHALHERRVSYGESSAMLTAWKRTQELAFLGEVSSVPLQQALRHLQSAFTNFFAKRAAYPRFKSRKRSRLSAEYTRSAFTWRDGRLTLAKTAGPLDIVWSRPLPEGAQPSTVTVSRDAAGRWSVSILCEDTIRPLDPADGVVGLDAGITSLLTLSRPIPGVSDAAGKVANPRHERADRARLARAQRALARKERGSSNRAKARVRVARVHARITDRRRDHLHKLTTSIVRENQVIAIEDLTVRNLVKNHRLARAISDASWRQVRTMLEYKAAWYGRQLVVVDRWFPSSKLCSACGTIAS

SEQ ID NO: 53369 - protein, 318 aa, unknown
  TnpB Polypeptide
MESESHVWLNAGLQAKNIGATFIDCAKVVTLVSTIPQAFAYGAIQVGIKMQGSCVSCGSPENVCKCKTPDVQHKRVVPYGNHTYPLYSARPLGKKSTGNVVYFPCCSVPFYLQKGELPKDSQSYKIVDVTNHSDKERQFELHVTIREHIPDRVCTGVFAGVDMGGHHTMVVAKSDGTADVLSLREKITLHKIRGLHQRMSRCTAGSRKYINLKKQLNAIYRKMKNRQRDRLRKFAKKLFEQCDRIIFEGMGLDTLTRAGSGQTEKNKKCDSQSAARHGITWRMAPHDTTSNMQRSTPATPQRCALCAADITHCAKTGN

SEQ ID NO: 53370 - protein, 352 aa, Candidate divison MSBL1 archaeon
VKKVKKTVQGGVVNLTNVKGSLLGREFENLQKFLRGDEDVELYSANKQQAERYYNKIKEENEYPVSIRKDLIDVQECSSDVCDYFVKIPVAGRYGGVKVPVNTHIEIERNWEVCESKLFRKNGRFYLNITIEIEVEEVEEHEGVLGIDLGLRNPVVSVALPSRKSEFRGREIKQVQARYFYLRRQSETGKGWHRRERDKVRDQLHKTTTKIADYAEENKLVVVVGDLSGVQKRDKGREMNRKLHRFPHYSFRRMLEYKCGERGIEYIEVSEAHTSQRCSRCGEEGNRNGGEFKCSNCGLEIDADVNGARNIASRALGKSEIRPLVNAGAPVAVPGTLSVDATSGASSEAISC

SEQ ID NO: 53371 - protein, 1174 aa, unknown
  TnpB Polypeptide
VAFVTGEPGIGKTTLVETFAGWAEGGGRTVVARGQCLEHRGAPEPYLPVFDALGRLGRQDGGVVELLGRVAPTWLVQMPALLAAGDREAVERRALGSTRERMLREVAEALEAVAADRALVLHLEDLHWADPSTVDLVEWLARRDGGARLLLVATYRPADARAAGHPIDAAAADLLLRGRAAELRLGELDTDAVRAALAQRLDGGEVPEELARTVCRRTDGVPLFAVQLTQSWVDSGVLRAAAGRWELARPGGADPEVPDDLRRLIELQLERLGPADLAMLEAAAVGGMEFAAATAAAGTAEPAEEVERRCAALARHGQLLRAADPVDWPDGTVSAGFAFAHDLHRTVLYDRIPAGRRARLHAAVADRLERAYGPAAAEHVTELATHFLHGRDDARTVQYLQSAAEQTLGRSAQLEAIQHLGALLQAVQRLPEGPDRDRAELRARMTLGPALIATDGFASPAVEGAFLRARELCRRLGDPPELAVVLHGGWPRSTSSAAATTSPRRSWSSCSGPATPRWPWRPTSCWPAPPSTRAGRPPPSGTPRRGWPSTTRTATAASWPPTGSTGRRLPRRRAALALWFLGHPDRAMAHATRALALAREHAYSLAAAEVQLTMIFRAQAPPFRAGLARSAWGALLADVLLERFQRGATRRGGEVRRGPQVLAVGADPVAGAQVAGGDALESVYQPGDGDPWRVGDQQVDVVVVAVHLDQRGAEVGAQLGEHLPHGVQVLVGQHPAPILGYEDQMYAEGRDNVPALAVVVVLSYRPSMFGGMLVRYRYRLDLTPGQRQALARAFGCARVVYNDALRARQDAYAAGERLSDTEVQRRVVTLAKRTPERAWLGEVASVVLVQACQDARRAWRNWFDSLSGKRRGRRVGHPRFRTKHGHQSIRLTRNGFTLHETRLYVAKVGDLKVRWSRPLPSLPSSVTIIREPDGRCYASFVVERSPALLPPIDRTAGVDLGLGAFAAVAASDGTTELVPNLRYLRAAERRLARAQRRMARKRKGSANRAKARHRVAVAHRKVRDRRADHHHKLALRLVRENQAVAVEDLAVAGLARTRLAKSVHDAGWAMFVRRLEGKAAQYGRRVVKVGRWEPTSQTCSGCGHRDGPKPLGVRTWACQACGAVHDRDLNAARNILKLLVAAGLAETQNACPAGVSPPAMAAVGNEAGTHRGAA

SEQ ID NO: 53372 - protein, 384 aa, Burkholderiales sp.
MQTKTLKLRIKDKHAAWLGGLAREVNTVFNFCNEVSMKASNPYSGKPKWLTGYDLQKLVSGSTKGEDALSIPSQTLQQVCEEYATRRKQFKKHRLNWRVSNPKSSKYSLGWLPLKKGAVVYKAGQVRYAGKLLSLWDSYGLDKFELRGGSLSEDSRGRWYLNVCVQLEVAPSKGTACVGIDLGLKEAATCSDGQVLASRWYRNAEVSLATAQRSKKKKRVKAIHAKTANRRKDAMHKLSTKLVVGNAAIFVGNVASAKLVKTKMAKSTLDAGWSLFKTMLEYKCNHAGVVFEEVNEAWSTQTCSCCASVEGPKGLEGLGVRQWVCQSCATEHDRDINAATNIMAKGLAQLAISKAAEAKADEPVLNEAKAEAGHGLPAGGIPAL

SEQ ID NO: 53373 - protein, 421 aa, unknown
  TnpB Polypeptide
MHLVERHIIKQNNKLWKEMDLLSFLSKNIYNYANYLVRQKFIETTKQKENGEVKHATYLNYYDIRRMVLKQIDYCSLPRKVSNQTLMLLDKNWKSFFKSIKDWKKNPYKYNGIPKLPNYKHKTKGRFVLIYELGAVSKKRLKNNIIKLSGTNIEIPYINYKEKLNQVRIIPRSKSYIIEIIYEKSENVSKEINGRYCSIDLGVNNLATIGSNILIPTIINGKPLKSINQYYNKKRSKFKSKLGHYKNNKNEIKQYGTCNKIEKLTQKRNNKINDYLHKASRYIINHLVSHNINTLVIGNNKKWKQEINISNRNNQNFVNIPHSKFINMLVYKAKMEGINTIIMEESYTSKCSFLDNEMIEKHIKYKGRRIKRGLFKSKSGKLINADLNGSLNILRKAVPNIKFDNGIEVVAVSPKVFTLNN

SEQ ID NO: 53374 - protein, 500 aa, unknown
  TnpB Polypeptide
VRRGAAGHEGEGSVPGQAKAALTAASSSRWAGAITRTSEDQVRLAEQNLRAGRASLQTRVRAIEARLAVPAGGKPGRTRGYATPAERHAKAVRLQALKARLGRVQRQLDTGAVSVVRGGKALLRKRGNLAAAGLTEARWRRQWESARLFLTADGEKDKVWGNETIRWNPDEGWLEVKLPAPLADVANRPHGRYRLSAPVTFSYRGDEVAAQAASGAVRYDISHDPARDRWYIDASWKTAPAPVPSLDELRQHPVVAVDVNHGHLAAAAIAPDGNVLGVPATIPLGLGGLPASTRDGRLRAAITTLIAAAKARGARAIVIENLNFAEARAEGRERAAGRASRGRRGRHFRRLISGIPTGRFRDRLTQMACNAGLSVIVIDPAYTSRWGAEHWLRPLREHHPKTTGHHAAAVVTGRRGLGHRARRRATGNQAAPEDAARPAQARTRTIPAAGTAPRKPAAPRDPRQPPGAKTGRPHRDTAGDQAAQHRPGPPARQRHVLLAQ

SEQ ID NO: 53375 - protein, 415 aa, unknown
  TnpB Polypeptide
VLRWGTARPRPPRRRTARSSPPPVPARCPAAPRALPTARTSLPLPVVAEVLSRHRNCGVETLAFRPRGNAAPPSACLLIHNVRSRYDSIVRTAYKCRAYPDPEQAAVLGRTFGCVRVVWNRTLAWRHARYHRDHAGTSYAQASAHLTAMKATAELQWLNEVSSVPLQQAIRHQQAAFTALFAGRARYPRYKTRTGRQSAEYTRSGFRWRAGKLFLAKMGTPLAFTWSWPGTDPASVDPTTVTVSRDPDGRWYVSLAVDTDDPEPLPDTGRSVGIDLGVKNFAVTSDGDKVPNPRHLERKARSLARYQRRLARCQKGSANRAKARAKVARAHRKVRDARQDFLHKASTRLVREHDLVAVEDLNVKGMVKNRKLARGAPGDACGADFRHSGSSRVQSAVKQEPRRATAGIPVLQGGE

SEQ ID NO: 53376 - protein, 393 aa, Limnoraphis sp.
MQRAFKTQLKLNNRQKTLMAKHAGYSRWVWNWALAMWNEAYKEGLKPSTNKLKKFYTNHIKPQYSWQSTLSSRVYQFAFMHLGEAFSRFFQGVAKHPKFKKKGRNDSFTIDNCGKVMRFSGRRLKLPFIGWVNTYEPLPEIQTKRVTISRVADSWYLSVAYEFEPEQTVKSREYLGVDVGVKVLATCSDGTVFANPAAHKKAQKNLARLQRELSRKQKGSNNRNKARLKLAKAYQRVANIRKDTIHKLTSWLCKNHAVIGLEDLNVSGMLKNHKLAGAIADSALYEIRRQVEYKSEWYGSVVVFADRFYPSTKTCSSCGHIQEMPLKERVFNCQVCSVSIDRDLNASLNLLHYAEGFSVKSLSDRVLPTVRGDAAQSPISAETAREGTLQDRK

SEQ ID NO: 53377 - protein, 530 aa, unknown
  TnpB Polypeptide
MEEKETVPCFILKLPLRVDSAGRRVFARDFLYALQLRNATLGTVLRRDRKMKQSDEWKEICRLPKGPERNQRFQKIRKDYGLSSANDFEKILKEHAERSGRKKQLNSNLGQIIADDLYRSYADWIFHKKGRPRFRGKNNATGVVWKHKERSVRYGKRLYRAVVDPKDRYVREALADPADPSKPRRVRYCCLVRKRIRGKERFYVHLVLDGVPPARTVAAPKEECMGIDPSLRNVTCVHANGSVAKIDISAPKEDAKEVRRLQRAMDRSLRAVNPDNYNENGTPKKGARKWVRSKHYLALQAELADLKRRGVETRRNIHGRVVRILVGSAGTIRVEENNWKALQRGRYGKSVLNGAPSEFIERLRRTAESAGSEVILVNPRELKPSQHDPMSGTFVKHELWERRCRLGDTAFFLDRDVMAALNLVHAEVTTNTYDSEALARALQTSKQHWLDAGVVVEMKTANRTSERKLRRFLRRGLDPVSVERLHPHSFLRGVGPHSLANGAIVSDACPEEASSDADDGQERPPTSETL

SEQ ID NO: 53378 - protein, 431 aa, unknown
  TnpB Polypeptide
VSEVTRTVIVKSIPLPRKLFRVFVELEGMYRNMVEQLVLYAVRNGITSFTRLKALKYRELRSLYPQLPSHYAYTACQDASTRVKSFSKRRRKGLARRDYPEVNRVSIWLDDHLWKMRSLTSIEIATHRGWNAVELEPHRQFWKYINSGWRPASEARVKLDKRSRRLVIYLVFKKSTEVYRSRGFVSVDVNENHVAVLVDDKVFLFETGFRDIVLGYYYRRKRIQEKYDKLYGVNCRVKRRIFRKLKERRKKSDFKWKLANIVVRVAREKQYAVVLEELGEEPAREMINHVEDDQLRHRVYQASFKGVQRAIEEKAREHGVPVIYVDPRNTSRTCPVHNARIVYSNSSRVGKCSGGGELWHRDVAACYNLLLKARLGNGSNTPSPGGLVVDGSPVPSGSTATHDPMLIAREVWARWKSLEAIDKHELIRVSI

SEQ ID NO: 53379 - protein, 383 aa, Sporolactobacillus sp.
MIQKKAYTFRLYPTNEQVTFFHQCMGSARFLYNAMLGEFQSRRKAGVPPFPLPKVTDYKKSFPWMKTVDSLALCHAHRNLVQAFINHRDHPEHFGLPMFKKKGTFPWTYTTNNQKGTITIVGNKIKLPKLKRLVPIRLHRQVKGVIKRATVSRRANGQYSIAILVEEDVRELPKTGKSVGVDLGLLDFAALSNRNKLPNPHFSKPFERKLRREKRKLSRRIVKAKTLVQKDPNKNWRDCRNLEKQRLKVAKLYAKVNNRKTDFLHKRSTELVKSHDLLVVEDLPVKRLVRNHHLAKSIHDVSWSRFTDMLKYKSRWYGKAFIKIDRFFASSQICSACGHKDGKKALAIREWDCPQCGTHHDRDINAAINILNEGRKRIAASKT

SEQ ID NO: 53380 - protein, 468 aa, unknown
  TnpB Polypeptide
MVKEKNFTVVKCVVKNKELIEYFTQTALLSNNLTNVNIYHQRQWFFYTQNLYYEQNPKKDFKPYKYDSKLIDDLKEYMIKYNAKQILKGKKEVDFIKYGLDPYFLHYYFKETNQVDYNHSGLSAHTTQQITSKVSQTFKGFRKARIDFFKNPDKYETCPELPRYKKKNSMSNFYFTNQVTKIENGILKFPKTKLILPFTYKVDGKYIRMEVIRKYNEFEVRLIFEQDEKPQFKETDVVAAIDPGVTNLIAITTNKGKSLLVKDKKVKSINQFANKEIKRIATAQMKTGGLEHVIMSEQLRTVYKKRHRRIEHLFYILSNHILEFCLENNVSKLALGKNKGWKQNYDHGKKNNQNFIHIPYTNLYQKITDKLTKHGIEVIEQEESYTSQASALDLDHIPVYGDDVPENSFSGKRYGKHDRLYKTSNGITINADMNGSLNILRKAFPDVEIELNNLEYMKNPKVLKNMQA

SEQ ID NO: 53381 - protein, 397 aa, unknown
  TnpB Polypeptide
MNRCFQYKLYPTPEQESLFSDTLETLRHLYNNALAERIDAYKFEQRTLHYEEQANRLPALKKIAEPLAAVFSQVLQDCLKRLQKTYESFLRRVREGTAKPGFPRFKGIGRYRSFTYPQWGVGCSLEGNILHLSKIGDVPVRLHRPVQGTAKTCTISRKADGWYCSLSCEVEPESLECTGIDETCATPALWRDVGIDVGLENFATLSDDHDTIPNPRPLQKAQAKLRIAQRRLERRTRRDHHHKITSRQSQRRERARVLLAKAHQRVQRARLDFHHKTARDLVRQFDILYIESLNIRGMLKNHPLARAIADAGWGQFFLVLKQKAESAAKQVVEVRPRNTSQNCSGCGEYVPKALSCRTHTCPYCGLILHRDKNASGNIRKVGRDAACSRKRSAIAHA

SEQ ID NO: 53382 - protein, 387 aa, unknown
  TnpB Polypeptide
MNTVRIYPLNHLSVTQLQRLRDAQIEAAQVWNFCMQMHKTARLQHTPWPGRNELQKATKGRFVLHSQSVQMVVHAFLANIDTARKLRQTHPQMHMRYPYKEKRFYPVMWPAQAVSRENGRVVLPMGGGRKSLVLPLDLPEISGACTLVWNNGYELHVCVEIEQRETAPGDNHATVDLGEIHLAAVTTNTGKAMIVTGRGIRSLKRQRTMQIRSITKKQSKCQKYSRRWKKLQRAKNKQCKRAERRMRNQRHQATRKVINFCIKQKVGTLFIGNPHGVRNQNRGRYHNQRMSLWEYGKDISYLTHKSKHVHMVCFTGSERGTSSQCPACGHKHKPRNRQWNCNKCGFKGHRDLVGSINMHTLAFGEQVKFPRSFTYLRPGLLGKVVVG

SEQ ID NO: 53383 - protein, 370 aa, unknown
  TnpB Polypeptide
MRKSYKYKLQSQSNVIKIGNMLDDMWRIHVHILRLSRRYHRIFGKNLSVYRIKAHVTKLKKRTQPHWADLPSQVVQDVVLRYGKSQDAFLENIKDRKAGKTKRKVGRPKIKTRQKYNSMTFTQAGYRLEDNRIKINCIGTWFSFHKHREIQGTLKTITLKRDRCGDYWICFSCDAVEDSERKPMTGKSAGFDYGNKTFLTSDAGDKIASPQFLKQSLKMLRSLNKARSRKVKGSGNWYRACRALARQHRKVSRQRLDWQWKLATELCTEFDVLCFETLNLDGMKRLWGRKVSDHAFYQFLEILKKKCAKHDKTLVQISRWTATTKPISDCGYHNKELSLSDRQWICPECGSHHDRDVNAAMNIKRAGLAA

SEQ ID NO: 53384 - protein, 402 aa, unknown
  TnpB Polypeptide
VEYRRTAVIKLDTPEDADAYLRETVEQFKYCANTASEWCWHGDGGYHVTSKAKAERGLYDQLREDTELTANLVQKGIRQAVESIKSGVERLKNGQDTSCPTFTADTAIYDKRSATFYRDHVSLSTVDGRIECDYILPDDAENPPTKYVADEDYEFRRATLHRRDGEWYLHASMLKVEDDTDSTTGHRTVLGMDLGVNQLAVASTGRFWSADEFNHWKREYEKRRGDLQQCGTRAAHDTIAGVERKEDGRFEIFLHRVANEIVAEAVEHDCSQIVFENLTDIRENIPQASWQHLWAFRRLYKYVEYKAREQGVEAVQVDPRNTSKRCSTCGFTHDGNRHGEDFECQDCGYENHADYNAAKNIGLQYLRRRQNADDGGAPVDVRLNRGTLNVSGEYNPPASSEA

SEQ ID NO: 53385 - protein, 496 aa, unknown
  TnpB Polypeptide
VCELPLRATPRAVRAVLIRLDVGRQIYNACLQTALARLRTVRASPEWARARALPQHTEEQRTRRARAFARARKRYGLTDEALQRVALKHFRRSRWMGDHLGTHEVQKIGTRAYLAANRILVGHARSARFKGRGQFHSLEGKSNAAGIRWRGDHVEWHGLVLPALLDPEDPVLAHALTHPVKYVRIVRRRVRGIPRLYAQLVCRGRPHRKPTHRLGRGPVGVDLGPSTVAAVGPRRAILTPFCEPVVRGHRQIRVLQRRLDRQRRANNPGNYLPDGRVKPGPKTWRLSHRERAVVDRLAELHRREKAHRKTLHGQLANEVLRMGRVMHIEQTSVVSLQRTFGRSVSVRAPGMFVQILRRKAESAGGQVIDIPACAAKLSQICHGCGAIQKKPLRQRVHQCACGVEMQRDLYSAFLAAHTDGGGVLHAGRARRAWPGAEPLLRAAWRQALQPATGRPAPSTFGRPEACRSQSGSLAAEGIANAEARGDHPGRGRGGSP

SEQ ID NO: 53386 - protein, 355 aa, Acinetobacter sp.
MKTLKLRIKDKHCKVLDQLASEVNFVWNYVNDLSFKHLKRKSEFLSSYDIDKYTKGASKECNLHSQTIQAISAELVTRRKQFKKAKLKWRVSNKKSARRSLGWIPFKKVAIKYADGYVQYGKHQFKVWDSYGLSQYGVKTGSFVEDSRGRWYVCLVVDSPKQDKPTATKAIGIDLGLKDIATCSDGTVISNPKFYRKYEQKLGIAQRAKNKKRVRALHAKIANCRKDHLHKASTMLVRENALIVVGDLSAKKLVKTKMAKSVLDTGFSAFKTMLKYKCENASVLFEEVNEAYTTQICSSCMKISSNSPKGRVDLRIREWQCECGIIHDRDINSSKVILALGHKRLAVGIPHLANA

SEQ ID NO: 53387 - protein, 366 aa, unknown
  TnpB Polypeptide
MSRKPKGLQNTLQVRLYPTPEQGRLLMSHCQEYISTINVLASALDADVIPHGDTFSTKDFAASLPSCVKNQALRDARSVFKRSLELDCLPLLKKPICQWNNQNWHLEQGTLILPVCLDGKTQQIQIACADVALDGFPGILRIKKKQGKWVADITMTIPKPKPVEQDGVMGVDLGIKVPAVAYVSGNGSRFFGNGRYQRHMRRRFYARRKKLQKAKKARAVKKSQGKETRWMKDINHKLSRQIVNHAHEQGVGTIKVESLAGIRKGTTSTSRGAKARKNNRMKNSWSFYQLTAFITYKAERLGIKVEQVDPAYTSQECPACSARNKAQDRTYVCAACGWIGHRDMVGAINISRRAGLSDKRIGAVGA

SEQ ID NO: 53388 - protein, 356 aa, Enterococcus sp.
MKALKAYKYRLYPTSKQEEFIQKTFSCVRLVYNLMLQDRIDIYKEMRKNPQQTFKMPTPAKYKKQYPVLREVDSLALANAQVYLDRAFKNFYREKGMGFPKKKKKETVHSYTTNNQHGTVKILDNRYLKVPKLKSLIKMKVHRQPLGEIKSVTISMSASHNYYVSILCEAPIETKTKQQKMVGICSSREKFALISNGESFEKSYCSKHLKQKLRQEERKLNKRKMIALEKGVDLSQAKNYQKQKIKVAKIREKIANQRTDILNKITTELVSSYDVICIEKAHHSNERPPKHDRSELAWSLFLAKLLYKAQWYGKELICIESEEIETELSFSESTENSEYLRSQKILERGLSKRETL

SEQ ID NO: 53389 - protein, 313 aa, Lachnospiraceae sp.
MEKTAYKFRLYPDREQELLLRKTFGCCRFLYNRMLEDRIKQFRETGKTGHPTPAKYKAEYPWLKEVDSLALANVQLHLESAYRKYFRFHTGHPRFKSRKSCRKSYTTNMVNGNIRLKDGLLRLPKAGYVKIRCHRSVPDEYTLKSVTISLEETGKYYASLLYEYPSCRTRSCRMDIEEPKTLQIRFSADGRLIFSDGSQLEYPMYCRNSEERLEKQLKSLSRCREGSRNYAKQLDTLIRCREKVKNQKTDYLHKLSREIADCYDRVVSEAPARSGSYPDPKTGNHFSEDYNLSFLEMLRYKLTDQGKEFIIAK

SEQ ID NO: 53390 - protein, 375 aa, Haloimpatiens sp.
MIKALNIRLYPTQEQIILMHKHIGCMRFVYNWALAKQIDSYKLNSKKLSVADLGKQLTVLKNTAGYEWLYEVSNATLKESIRDLDKAYTNFFNGSGFPKFKSKKKSEPRFYSRYERIYFKDNFVNLEKIGKVKYKSDYDIDLTTITKFKNPRVHFNGRVWVLSVGIEDNIKTVKLNDFSLGIDLGISQLAITNIDNLDTRNVNKTNKVKKLSKKLKRIQRQCSRKYIMNKKGESYQKTRNIAKLEKKIKKLHSKLKNIRLNHIHQTTSKMVKAKPYRIVMEDLKVSNMMKNKHLSKAIAEQGFNIFINQIKYKCEKYGIKFVQVPTFYPSSKTCSHCGNIKKDLKLSDRVYKCKCGFTCDRDKNASYNLANYGLV

SEQ ID NO: 53391 - protein, 389 aa, unknown
  TnpB Polypeptide
VNTGDELMQLVRTIKLQLFLNDTEKDWLEQTLDSIKKGLNYTSQVAFENGGLSSKAKLQKIVYYHIREQFNLKAQMAVNVCTTVAGTYQSQKSNLKSNKSKKKDIVLTEFDNVKALYSYGRDYSFLKDGKIISINTVKKRIKIPFKVPIYFHKYLNDNWKFGAMEICKFDNKYFAHITVNKEIEEQPLELYDNVIGIDLGQNFLATLTDSKGYVKFYKGRYLKDIRAKYKHLRKQLSQKGTHNAHTKMNTINQREMRFMTDINHQVSRDIVNYAKQFNSIIVMEDLTGINLSCKVKRKNRYYRVSWAFNQLQELIEYKAKEVGLRVIYIDPAYTSQKCPKCGHTYKLNRDKKNHIFKCLACGYTANDDYIASQNIRDKGIEIRHLESIF

SEQ ID NO: 53392 - protein, 407 aa, Moorea sp.
LAAPSEHRRYEWKANKKSIGYFDQQNCLPDFKKCWPEYKELYSTSLPATLKRVDLAYNRFFQGLGGIPKYKPIRKYSGWTYPSKAGWKVNTDGKHGTLTLNDLGITIKMRGQAKHWGIPTTLTITYKPSVNAWYASITVKTETPDPKYGSKSDLTYEKILAYDLGTETAITAFNGSEFDEIVNQRFTKTLEPKVKAAGKEKRRRRAPNFKKGIKASKRWKKANKKESKLKRKIGLARIDWQHKVTSDLSSRYDIGVTEKLNTKGMTRRAKKGSKRKKQKAGLNKAILDVGFGTLNKMLTYKIELKGGIILQLPTKQLKPSQRCPKCGKIHKEWAELSNRYHTCDSCGFELDRDKTSAMVMFNAALGKQPGYGTDLDKRGFSSSTSKASKHTLINEATRKDEASKVAF

SEQ ID NO: 53393 - protein, 419 aa, Okeania sp.
MIITYCYKIKPTCEQSAKIDYWLELLRRHWNYANGQRLDWLNRTRCQLDRCSIVSCPIGEIPGKPDYYFQQSALKQTKILFPEYKEIYSEVQQINLQRLDKAWKRWLVPDNTGKRFGRPRFKKSGKLRSFCFSRVNHPKAAVKFDGKHIIISRFGAIPVIVHRPIPDGFTIKTATITKKVDGYYISFSLEDKSVPSLIPTDNIKTVIGIDVGLKEFLTTNTGETVAVPNFYRKAQSNLARKQRKVSGKKIGSNNWKKVQNRIARLHQHIARQREDFHLKTAHKLVKDCDLIAVEDLNIKGLARNTKLSKSIYDVAWGAFIEKLNAVAVKRGVHVIKVNPHNTSQNCSNCGQKVPKTLSVRTHSCTKCGIVLDRDENAARNILNKALCEVGIILPACGGLDVGQPEKQETSETWVQLSLF

SEQ ID NO: 53394 - protein, 229 aa, unknown
  TnpB Polypeptide
MIPSLKLENPDLRNVYSKVLQMVNYALWSNIKGLYALKKNGRKVGKLRFKGKGWYKTLNYNQSGFKIDQDHSILKLSKIGNGKIKLHRMIDGKIKGAIIKKFCNKWYAIVQVEQEPEQQTSDVKSVGIDLGLKAFAVDSAGYVIENPRFAEKSSDKLKKIQKKLSREKKGSNHRRKIVAKLGKAYEKINNQRNDFLHKLSRLYVDSYDTICVEYLDVKRLKEKGNCKGL

SEQ ID NO: 53395 - protein, 364 aa, Allochromatium sp.
MKLTLQTQLLPTPEQIEALEATLRAFNAAADWLAGEAFARRTANKIALQKLYYADLRSRFGLSAQMAVRCIAQVCEAYKRDKSIRPQFQPFAAMPFDQRLMSFKGPDRVSLLTLSGRIILPFIMGQYQQTRFKAAKGQSDLVRRQDGRWFLLVTVDLPDGTPLPSTDFIGVDLGVTNLATDSDGERHSGAEVEACRRHYHDQRRSLQQAAARRQRRGRRPKNIRRKLKSFAGREARFRKDVNHHLSKTLVAKAKDTERGIALENLKGIRDRTRFRKPQRAKMGGWAFFQLRQFITYKAKLAGVDVVIVDPRHTSRTCPVCGSVEKANRPSQSEFRCVACGHTDHADVNAARNIRSRAKALVNAA

SEQ ID NO: 53396 - protein, 477 aa, Allochromatium sp.
MDGFRFRCYPTEDQAQILRQWIGCQRFIYNAKVGEDRYFRRFAASALALTGTPIPIDQTYAQFKTDLTPFLADVPAVVLRNGAVRWKQAYQRFFKGLGGRPTIKTRHGRQSVWLTRELFAFEPIEAAPGHYRLLIGCGKFPVGKLAFTAHRAFEPPASLHISLDAGRWHVSFSNETATETPSETAIAERLQRLPIDQLQAATVGLDRGVATPVMTSDGQRLVASPAQQQRLAQKERRRKRWQRKLARRRQGGQNHAKARAQVARTYRYASDVRRDLAHKATRVLVDDPRYQVYALEALRVQSMTRRATPKPDPERPGHYLPNNAKAKSGLNRSILASGWGQFKTILHYKAARAGKLVVEVPPAYSSQECARCGHIHPDNRPSQARFVCQACAHHAHADHNAAQVIAARGARLVADGQVVEKPKKRCALKRTTVGPGEAEPAGLIPQTPVENALRRGRGNTTAPRSTKQEPRATSQRL

SEQ ID NO: 53397 - protein, 341 aa, unknown
  TnpB Polypeptide
VTWKQNGIKHDSEHSRLRLSKGFNLKNHRSDFILAEYETQPDVTVENIQQVRAVWNGDRWELHLVCKVEIPVEDVPGDNTAGIDLGINNYLAIAYDDGDTDRDYRSQPEVSKPALRHCLSVLHRKSMNFYDNPYELYPGNVLKQDKHYFTRDEYDTEGEDGPSKRALGAQQKLSRRKDHFLHTLAKHIVERCIDHEVGRIAIGDLSEIREDENGDSRSWGKRGNKKLHGWEFDRFTNLLEYKAEEYGILVDRKSERDTSKTCSCCGRKRDANRVKRGLYVCDSCDVVMNADVNVAVNIRRKITQNPPTGDMSNGRLARPVAYLFNQTSGRFAPSEQVGCKP

SEQ ID NO: 53398 - protein, 217 aa, Clostridium sp.
NPSGRYYVSLCCTDVDIEVFENTNNQIGLDLGIKEFCISSCGDFIENPKYLKKSLNKLAKLQSELSRKTIGSLNRNKARLKVARLQEHIANQRKDFLQKLSTKLIKENDIICIEDLQVKNMIKNHKLSRSISDVSWSEFIRQLEYKANWYGRKIVKVGKFFASSQICNKCGYKNEEVKDLSIREWICPSCNETHDRDINASINILKEGLRLITIQNK

SEQ ID NO: 53399 - protein, 202 aa, Caldanaerobacter sp.
LVNNIGIKPIVINGKVIKSINQYYNKKKAELMSYVGDRGTSNRIEKLTLKRNNKIKDLMHKISRFIVNWCKQYNIDTLVVGYNPKWKQEIELGKINNQNFVSIPYYQFINMLKYKCEEGGINLILVEESYTSGCSFLDGEEVSKENYDPSRRIKRGLFRSNKGILINADVNSAYNIIRKVFPEAFAEGIEGVGLHPVRLNVA

SEQ ID NO: 53400 - protein, 520 aa, Streptomyces sp.
LVGEHLGRLERADLAKRVGIGKVAKKDTRRAERKKALTAVSSSRWAGAMTRASEDQYQLGLRCLFDERVGLRQAIRAIGKGLAVPCGQRKGKVRGYPTQDERFTKQRRVQVLTARLNDVEARIEAGRPSIVVGGRRLAKIRHNLDQTQLTKAEWRKRWDAGRLFLTADGESGAPFGNYTITVDPETGEVTLVLPEPLRYLANAPRGRYRLGRTVRFSHRREEWLDRASANRAVRYDITFDPARTRWYLDASWSADTAVLPSPEEIRAFGERTLGIDLNADHLACFVLDPHGNPTGGPVTIPLQLTGPTSTRDGRLRDAISQLITIAREHQCAAIMVENLGFDDARQIGREIMGRGARGKKFRRTVAGIPTAKFRERLRSMAFHAGLVVIAVDPAYTSMWGERYWKPPLQQQTKTSVTRHHGAVVAIGRCGLGHRIRRRPGVTGTHQRMGDRRATDQTAFVPGPRGAASPPRTGRTPDPGGKTDLRRGDQPALFPDPQHRSEGHRTTCPDHGELADTGQQR

SEQ ID NO: 53401 - protein, 225 aa, unknown
  TnpB Polypeptide
MKLLDRKIERSRRVNNPDCYHEDGTIKKGARFKHPSNRQLRLHVRRQKAYRSLSEERQKLQGQLVNRIVSQARFIKIEDLSVKGLQRCSREIRINPKTNRPFSKKRFGKSIFRAAPSAFRNALQTRAHQLGIDFEVISPKDTKPSQYNHITQTFEKKSLSTRIYDLSEDVTAVQRDLYSAFLIGHIEKGHYEQEKLTQDFPVFYKLMKEFLHQPPKTGRLVWYLN

SEQ ID NO: 53402 - protein, 427 aa, unknown
  TnpB Polypeptide
MQLTERHLIKPNHNLYDLFDNLTFKAKNLYNVGLYLYRQSYFEYRNNPEQKALSWMDIDRNLRQQNHEDIRALPAKVANAVLKNLGENIASYWGLVRRKRTGESTQQPKLPHYLHKTKGRYPIAFNAQTFGKVRGTRDELILCPKGLCIPIPTKVEKPKQVRVVPKHGNFIIEVIYDIEEPVLNHTSNYAGIDLGVDNFATVTFSSGQKPLIVKGLELKSINQGYNRLIAKAQSSLPESQKTSKFIHRLWSRRSWILQSKIHQITAFLTTLFDEMNIETVFIGKNKNWKQELPFGKIVKQRFAYLPYETFIEQLRYKCQLRGISVITQEESYTSKASFLDNDNIPVYGEVENPTFSGRRTKRGLYRAGNGRLINADVNGAYNILRKGLGNLGKILRVENPTIQPVVVKGIGQKSNKELVRLYVTPNV

SEQ ID NO: 53403 - protein, 408 aa, unknown
  TnpB Polypeptide
MEINLTSKLRIVFQSENDRKSAFDTLIAYRDACNYVSQYIFNHDFVLKQSELQSALYHELRERFGLKSQMTQSVFKTVIANYKTVQTQLRKQRVWDGYKKDNHGKEIPNYINKDLTFLWQPIEFKRPQLDLVRNRDYSFKNNVLSMNTINGRIHVQIHGLLENPYFDGLWTLGTGKVVRSGKHWFFHVSASKEVPSFELTRLKHVVGIDRGLRQILTTYDEKGQTRFVNGAFIAKKRNHYAKLRARLQAKGTKSAKRRLRSLSGRESRWMSDVNHQLSKTLVNTYGKQTLFALEDLTGVTFNTVYSRRKENRYEHHSWSFYDLEQKLRYKAHLNESEIVLVDAHYTSQRCPKCGSIGKSNRDKNIHQYRCSNCGYSSNDDRVGAMNIYELGKWFVSGIDKPSFTLANE

SEQ ID NO: 53404 - protein, 420 aa, unknown
  TnpB Polypeptide
MILNHTYRLYPDNQQAQLLDEWLETLRVSYNYALREIKDWIASRKCPMDRCSLEFEYIMSADYPFPSYHQQQNNLPKAKKEFPRLKSVPSQVLQTNIRRLHDAWDFFRERGYGFPRFKKVGQMKSMLFPQFKTNPVTGWHIQLPKLGKVEINLHRPIPDGFVVRQVRVVKKAMGWFAVITLYSDLEIPDPSPHGHAIGVDAVDVGLLSYLATSDGFVEPGRKFFKTEQRRLKVLQRRLAKKKKRSKNYEKARKKVEKQHNHIALQRKDYQYKLAHKLCDMADTIFVEDIDFRIMAKGFLGKQTIDAGFGQFRSILKWVGKKRGVFVGEVDCRGTSQTCPNCRITVRKELSERIHSCPECKYEVDRDIASAQEICNRGIETYPGTLEKQEIGSQVEVSGAMCLDNWRRGAMPNREVGKPTA

SEQ ID NO: 53405 - protein, 372 aa, Candidate divison MSBL1 archaeon
MERELRMMVEKTIVCRILDPTERKEGLLVREYSNAQGYIRGETEDLYSATKQAMDKYVEKVQNEEYPLFLRNDTFTVEKAQDTEEFDYWAKIPISNVWGGIWVPIKPHEEIREDMEVHDSKIVWKEYGFELHLSVSFEVSSQTPESILSVDLGERVMATTVLSADNGSPRFYGREVRGVRRHYAWLRKRLQEKGLAKKVVEMSDKEKRKVEDILHNISRKIVDRAGENNSLIVIGDLKGMGNRDTEKGKRMNRIANSMPYWKLTGMIEYKAEKKGLRVVKVNERTTSKTCHKCGSENTSRPTQGRFDCKTCRLENYNADLNGAKNILQRFLAYMVGNGASVNRPITEAYSKKHKIEDLGKVLGSSLLTSETS

SEQ ID NO: 53406 - protein, 441 aa, Ruminococcus sp.
MYLTERHSIKRSKRNISLFERIDTLCYYSKNLYNATNYIITQANRISYKLRQGEILDSWEKHFIYKFNCGIKAYNDSRPTKKKLPYITESNSFIANAYFLSWYLKGTTEYKALYATCSQMCIQQLCKNWKAFYQELKTYKQGKITTFPHKPKYYDKETGRGWLLLTYQSISVSKDNRVTFPKFLGGLTLKTRHTNIKQVRIITRSNKIVVELVYDKEETTLQKDKSRILGIDLGVDNFATVVSNTDLQPIILNGRVIKSINQWYNKEKARLQAISKKQNNRYMTKRICKLTERRNNKVKNSLHKISRYIIEYAKAIDIGLIIVGNNKGWKQEVSLGKRINQTFVSIPYAMFIDMLTYKAKSEGIEVITTEESYTSGTSYLDNEAPTKENYNKSRRISRGLFLSNTGTSINADVNGAYQIMRKIIPEIPVKIGEKVTRVNVA

SEQ ID NO: 53407 - protein, 419 aa, Halovenus sp.
MEVRRTVPVTLDVDSTDAALLEDTVDTFLWCAQYVVDHAFRGEYVTTSKTTLEDKTYDDVREATDGFNGGLVQAARNKAAEACKSVVARWKNGKKASKPHMTAPHVVYDHRTATFYDDYVSLATTDGRIEADYVLPDKDSDTPHAEYLFSDEYETTGAELHWKHGEWQLHIHCKKEVESDTSAQATTTHGTVLGVDLGVNNLAVTSTGTFWTGDEFDHWRREYEKRRGDLQACGTRWAHKNMQAVGRKEEGRFKMTLHRIANELVAKACDHDCSVIAFENLTDIRERTGASWGHKWAFNRLYEYVAYKAAEYGINVAQVDPENTSRRCSHCGFTHPDNRNGESFKCQKCGYENHADYNAAKNIGLRYLRRNQTGGDEGEPLGVRLNSGMLNVNGEYKSPAEVSARTGVHAEESHPFTGG

SEQ ID NO: 53408 - protein, 275 aa, unknown
  TnpB Polypeptide
VFCFPRSVKKIRGRLRVYVHITVEGKAISKRRKDSTPRHYYGKGNIGCDIGTQTIAYTSNTEVGLENLAERGNSIQHVERQEALILRAMERSRRAMNPNHYNENGTVKKGHKQWNFSKRYQKLRQRHQELCRIAAENRALAIREQVNHLRSLGDCFITEPPNAKKLQKRANPENPVDKNGRNEAKKAIRKIHKKSLPRLPRRQKQSSFLNQPVGCMLRYRFYIVPVSTITHQIVTFQRNCHSECIIWQMGQKFKETGIPLTYCIVSIKLIHRSTN

SEQ ID NO: 53409 - protein, 445 aa, Caldanaerobius sp.
MKYSVFVCYNCTRRKICKAGVGMKCIKTVKFKIKITDKSFGDTIFIYNKALSYIINVVNNEWDFISTLSTAKEQLNYTEKLIHNTKKNEAKYDFDSKFYKFPSYLRRAATAEALGAVKSYRSNLENYFEKKAQYEAKGKILREKLPVLGITRYSFPVLYKDNMFERTGNNTAKIKVYKNNDWVWHDIEFKTKDLEHRDMTNFKEMNPALVKSGGKYYLHFTYEKEVKLKETPLKDRTIISVDMGLTNSAVCSAMKYDGTVIGRLFINQPIGKDRLLHKINKLAKAQRISGVGRKPNLWRKINNINSQIINDTAHKIIEFALRHNADVIVFEYLGKLKSKENYARKMRIKLQYWAKRKIQDKVCDMAHSYGIHVSWVNPKNTSALAFDRTGKVTRNGKKDICEFTTGKKYHADLNASYNIGARYFIREILNPLSERERLRVSGKSS

SEQ ID NO: 53410 - protein, 406 aa, unknown
  TnpB Polypeptide
MAEVRRTVVVKLDIGDRDATLLHETTEEYLWACNYVIQDAWQDDYKPTSKTKLHDRTYSDVRDQTRLQANLVQSARNRAAEAIKGVIARWKQGKQASQPHFTTPSVRYDKRSATFHGDHVSLSTVNGRIEAEYVLPPEGDNPHTKYLRNNDYEIAGATLQYRDTTDTFFLHIGTKADVESEIPTNSEGDAEHSTVLGVDLGIDQIAVTSTGMFWSGDYLTHRRREYERVRGDLQRTGTESAHRTIERMGDRETRWVEDYLHRISNAIVQEAVTHDCDTIAFEELTDIRDRMPGAKKFHAWAFRRLYDYVAYKTEAKGIDTKQVDPAYTSQRCSRCGTTLRENRPSQARFCCQKCGYEVNADYSAAKNIGFRLLRAGQKSPHGGATRHLALKSGTLNVNGGYSPADR

SEQ ID NO: 53411 - protein, 762 aa, unknown
  TnpB Polypeptide
MTGGSPTSGADPPPIRCSIRSVIRTFWRARARANAPDADDASGGRRCLAARYGEKRGGAKRPPLFSIRCAVAAVVVTLRSAAVAVVTVPLSVAPSLPCGRRLHCRSGGALPQWGALLQWGALPQWGAHCRSGGALPQWGALPQWGRTAAVGAHCRSGGRTAAVGGHCRSGAHCCSGAHCRSGGALPQWGALPQWGRTAAVGAHCRSGGALPQWGALPQRGALLQWEAHCRSGGALPQWGALRAVAVALPAPRAAPPPSPPRAPSERSLHAGGRGLTTAGNVIITAMKLGDRRPGARRPGNGLRASGWASVGPATSEAGAGGNRMRVIQAFRFELDPGREARIALAKHVGAARFAYNWGLARCLEAKERGKRIPSAADLHKDWNTWKRANAPWWVEVSKCAPQEAFRDLERAVRNWRNGRANFPRFKCKKALANNTARLTGHIRVAPRRVQLPRIGKVRTKERTDKLLELLQSEQARILSATVSQEADRWFVSLTCAVERPDPEPREVRGPEDVAGVDVGLTAFAVLSDGTRIAAPKPLEKAMRRLKRRSKQLSRKRKKTVGERDPETGEERTRTVFSRNYEKAVVRLARLHRRIRNIRRDFLHKVTTGLAKAKPVLVVEDLNVRGLARNGSLSRAILDVGWGAFRRMLEYKYAWYGGVLLIAPRDFPSTKRCSRCGRVGPALPLSRRVFHCAACGLEVDRDLNAACNLSAYGLTRRTGPTGSSPGRDACGDPSGGGTARTGRSPSDGSMKQEAARHAVHPSG

SEQ ID NO: 53412 - protein, 141 aa, Okeania sp.
NWKKAQLKIARLHGKVANIRKDALHKLTTYLAKNHGSVVIEDLNVSGMLRNHRLAKSIADQGFYEFRRQLEYKCQWYGSELVIVDRFFPSSKTCSNCGHVQDMPLHLRTYDCPECGRSIDRDLNASINLRDAVGSTVNACG

SEQ ID NO: 53413 - protein, 382 aa, Moorea sp.
VEKSWFSTNLKVVQNPSLPQIFSESFTSSVALSTDSGSTGQKSKKIRIFLDAQQRATVRKWFGVSRYVFNKTVKILQNGEIKANWKALKTGILHGLPEWCGTVPYQIKSIAIKDACTAVREGKKKSKKTGQINRVRFRSRKNPVQSCYIPKSAVSDKGVYHTKLGRLTFAETVPDQIGDCRLTSTNGNYYLTVPHKTTQIKTENQGIVVALDPGVRTFLTFFSETSVGKIGNGDFSRVQRLCSHLDCLLSKISKAKGKQKYRMRKAARRIVIKIKNLINELHHKAARFLVDNFDVILLPTFETSEMSKKGNRKIRSKTVRNLLSFAHYRFKEFLKHKAQETGKFVVDVCEAYTSKTVSWTGELVNIGGNKTIKSRIDGQVMD

SEQ ID NO: 53414 - protein, 283 aa, Enterococcus sp.
VVVRAKTDLTRRGITDWKQCNPKLVKRGKKYFLSFAYEKEVKLHKLKEKDTRILAIDLGLTNSAVGCVMDSDGTVLARLFIKQAKEKDHLFHLVNQLKKAQRQTRGAKCPRYWNAIKGLQTQMINDTAHQLIEFASKYNVHTIVFEYLGQMRTPKGMYGAKKLRFKLHYWRKTAIQNKVEEMAHYLGMRISRVLARGTSMYAYDGTGKVTRSDRKDLCEFPAGKPYHADLNASYNIGARFFIRAAIKPLSEKRRLALGAKVPEVLVRTEQTLSTLHQLRICVA

SEQ ID NO: 53415 - protein, 493 aa, unknown
  TnpB Polypeptide
  misc_feature (446)..(452): Xaa can be any naturally occurring amino acid
MPKGKPPKVFQGVHARLVFLKEGDEQTVLDLTRRFSGAMRFAYQRLLEGKTREELKRENGPLCALFGLNTRYADGAIEKAQAILDSAKELGNDPRKVVFGGRKLFEQLKRKHLSGKALLALKREWKEKRQGFLYSRGDAAKKGNANLRLESENGALWLRVNLGNGGHVQALVKTSHPQLNALRERVYASLPYNVTLQLKNGGVYAHFSWSEELPPSVHTKANGVLGIDVNAGPYHLALAVVSPDGNLTRYLTLSLEEVDRAPNRGAKELALWKVAHQVVAVAEEHGVAVATERLKYLRKSKKGDGSSRHFRRTQHRFAYRSLLAKIHSLARKRGVEVLEVNPQDTSTIGMLKYAPQLHLSKDVAAAFVIGRRALGFTERLPKGYEALLKDDTFLAHAQGFYQSRLQELQKLKETEKNPYLKRRLSRKIGKAKTALTLVSSLQGSPXXXXXXXLSPLKPILHLTTPTQGSWKGWKTGLGPSPGEGPERANARFK

SEQ ID NO: 53416 - protein, 378 aa, Bacillus sp.
MEVKRRMINKAYKFRIYPNKAQAILINKTIGCSRFVFNHFLSLWDNAYKETGKGLTYGTCSAKLPAMKKEFVWLKEVDSIAIQSSVRNLADAYTRFFKKQNSAPRFKSKKNNVQSYTTKQTNENIVVVGNKMKLPKLGLVRFAKSREVKGRILNATVRRNPSGKYFVSLLVETEVQELPKTHSYIGMDVGLKDFAILSDGTTYKNPKFFRSLEEKLAKAQRVLSRRMKGSSRWNKQRVRVARIHEYIANARKDYLDKISTEIIKNHDVIGIEDLQVSNMLKNHKLAKAISEVSWSQFRTLLEYKAKWYGKQVIPVSKTFASSQLCSCCGYQNKDVKNLNLREWDCPECNSHHDRDINASINLKNEALRLLTVGTTGIA

SEQ ID NO: 53417 - protein, 334 aa, unknown
  TnpB Polypeptide
MLRRTLRCVRLVYNKALDARTSGWYKRSRRISYKETLLMLTEWKKQDDLFFLNDVSSVPLQQGLRHLQTAFNNFFAGRAKYPNFNKKRNGGSAEFTKSAFKWKDGQVYLAKCKEPLAIRWSRQLPANCTPSIVTVSLDPSDRWQISIRFDDHRDLSLPTTDKQVGLDLGVTSLITTSDGDKIANPKHFKKLKKKLAKYQKALSRKQKGSNNRYKARLKVARVHAKIKDARRDFTHKLTTQLVRENQLIAFEDLAVKNLVKNHKLAQVISEANWAEIIRQIKYKSQWYNREAISIDKWFTSSKLCSVCLNRVESLPLNIREWDCLSCNAHHVRVA

SEQ ID NO: 53418 - protein, 385 aa, unknown
  TnpB Polypeptide
LRNYKFRLYPTVQQESRLQNNLNVCKWVYNKFVEKAQKSFLSRNDMNYILTELKQSEPWLYNYHSKMLQMVSTQLEGAEKANIELTKKGYKTGQLRFARYNEFRIFTYNQSGFKLNNNKLLLSKIGNIRIKKHRDTPDNIKQVIVTKSKSCKWYACLTCELVKVNPPKIDFTKAVGIDVGIKSFVYDSDGYQTPNPLNLKKMLKPLVRVQRKVSRRVKGSNNRLKTIRHLQRIHEKITNKRKDFQHKLSSTYANHYDVVFVEDLQLTNMVKNHKLAQNIMDSSWGTFLQKLEYKCKLLIKVPARNTTIDCSRCGSKVPKNLAVRIHSCNKCNLVIDRDYNASINILQKGLKIFNQNKLPQELREVTPVEISMRSMKQEDNTFRCW

SEQ ID NO: 53419 - protein, 383 aa, Domibacillus sp.
MLANKAYKFRIYPNKEQEILIAKTIGSSRFVFNHFLTKWNDAYKETGKGLTYNACSAQLTQLKKELVWLKEVDSIAIQSSLKNLADSYTRFFKKQNKAPRFKSKKNNVQSYTTKHTNGNIAIVDNKIKLPKLGLVKFAKSREVEGRILNATIRRHPSGKYFVSILVETEVKPLENTGASVGVDVGLKDVAILSDGTVYKNPKFFRSLEKKLVKEQKILSRRKERAMNRKCPLHEAKNYQKQKRKVARIHEKIVHARTDYLHKISTDIIKNHDVIGMEDLQVSNMLKNHKLAKAISEVSWSQFKTMLEYKSKWYGKQVVTVAKNFPSSQLCSCCGYKNKAVKNLALREWDCPECQTHHDRDINAGQNLKNEAIRLLTAGTAGLA

SEQ ID NO: 53420 - protein, 407 aa, Streptomyces sp.
MQLRYGFRLYPEPGQRIALARAFGCARVVFNDAVRAREDARAAGKPFPRASELSQKLITQAKQTPERAWLGEVSAVVLQQSLRDVEAAYRNFFASLKGEHKGAKAGAPRFKSRKDSRQSIRFTANARWSITPTGRLNLPKIGQVRVKWSRTLPVAPSSVTVIKDAAGRYFASFVIDTDPAADLERMPATDARVGIDLGLTHFAVLSDGTKIDSPRFLRRAEKKLKKAQRELSRKQKGSKNREKARLKVARAHAVVADARRDFHHQLSTQLIRENQAVAVEDLSVKGLARTRLAKSIHDAGWSQFVGMLAYKAARYGRTFVKIGRFTPTSQVCSTCGYPSGPKPLDVREWTCIACKTVHDRDHNAAKNVKQAAGLADSACGAPVRPELVLAQRDEAGSHGSPSDARAA

SEQ ID NO: 53421 - protein, 480 aa, Streptomyces sp.
MQLRYGFRLYPEPGQRIALARAFGCARVVFNDAVRAREDARAAGKPFPRASELSQKLITQAKQTPERAWLGEVSAVVLQQSLRDVEAAYRNFFASLKGEHKGAKAGAPRFKSRKDSRQSIRFTANARWSITPTGRLNLPKIGQVRVKWSRTLPVAPSSVTVIKDAAGRYFASFVIDTDPAADLERMPATDARVGIDLGLTHFAVLSDGTKIDSPRFLRRAEKKLKKAQRELSRKQKGSKNREKARLKVARAHAVVADARRDFHHQLSTQLIRENQAVAVEDLSVKGLARTRLAKSIHDAGWSQFVGMLAYKAARYGRTFVKIGRFTPTSQVCSTCGYPSGPKPLDVREWTCIACKTVHDRDHNAAKNVKQAAGLADSACGAPVRPELVLAQRDEAGSHGSPSDARAAQRHSIERAGQNLPPSGGRACQREVHREPPDQGGPGEVRGGSARDALDQGCRCRGHAARRDRLHRGEHGFDGRG

SEQ ID NO: 53422 - protein, 407 aa, Planktothrix sp.
MKARYRFRCYPTPSQKLALAKLFGCVRVVWNDALAFCVSEYKGGKKKPKNSELQKQFITQAKKLEEREWLSEVSSVPLQQSLNDLEQAYSNFFASCKGNRKGQRVKPPKFKKRKSKQSARFVKTGFSIKGKKVYLAKVGNLEVVWSRELPSEASSVTLIKDSADRYFLSFVVEIKLQILPESENSVGIDLGIKTFATLSNGQKIEASKPLKKRIQKLRKFAKQLSRKTKGSKRREKARKRLAKLHAKLSDTRTDFLHKLSTQIIRENQAIVLEDLNVSGLVKNRKLSRAISDLGWRTFRTFLESKSEKYGRDFRVINRWEPTSQQCSCCGFKIGKLDLSIREWICLNCGESHDRDVNAANNILVAGGLPETLNGRGDKQKTTNTGGSSQRGVNPPEFQQLSIFDLLK

SEQ ID NO: 53423 - protein, 390 aa, Cohnella sp.
MPFCCEKNERMCHNGYNWIKKKGGGVGLLVEKAFRYRIYPNVEQQTRIEQMFGCCRFVFNHFLSQWNDAYAATGKGLSYYACATQLPLLKQTREWLKVVDSIALQSAVRRLADSFDRFFKKQNQAPRFKTRKHPVQSYTTKFTNGNIAVIGNCLKLPKLGLVRFAKSREPGGRILSATIRRQATGKYFISLVCKVEVHPLPPSNTAIGIDLGLTSFAVTSEGQSFDHPRAFKQHEEKLALWQRRLSRRTPGGANYQKAKRKVARIHDKIANIRNHFLHQLSTQLIRENQAISIEDLSISSMLQNRKLAKSINDASWGEFVRQLTYKALWYGRTLKKADTYAPTSQRCHVCGEIDKAVKNLSVRTWQCRSCDAVHDRDENAAKNILLLTIE

SEQ ID NO: 53424 - protein, 479 aa, unknown
  TnpB Polypeptide
MASTIIRTENHGLATTAETREAMLRTLTAYRRVVRLCATIALTHWDELGALASHPRQVALEQLIHVTQQRPSVRYTLMRRVLGQMPSYLRRAALTAALGVVSSYLSNYANWLDKTPIARPAPVKGKRRAPLADDERDLGGRPPRLGFTNVYPPLYGGNMIKVGKDLKTVEIKLLGADGQWRFSAPLRVRGRLKRLPYRLDLSPSLVLKGAKASLACPVTVSKRSVLKKKDVGRVCAVDVGINTAVTAVVVDSAGAVIARTFLRTARHDAQRDALRDRIAHKQRATGQAGRGFCRTLYRRITGLSLDAARQLSSQLIAFAQAHGAQALVFEALKGWKPKGRGKAQRKRFHRFEHRALVAAVTLRAEELGLRLVDVFAGGTSRWAYDGSGKVTRDTKNAQRATFESGKQYDADLNAAQNIAARGLALLHGIKNPRKAKDPSLGVRMPLVLADVWAHARRMGAALTATGASKSDAPTIANPT

SEQ ID NO: 53425 - protein, 233 aa, unknown
  TnpB Polypeptide
MKSIATIKIKIPKKEFLINIIKEYSKCIQYISNKQFLNSKHTKYIKSKYRYLRGRLQSKGTQSSRKLLKKISGKEKRFMRQCNHEISKTIVNSCNIGDTIVMEDIKGIRGCRVSRKQRYWLNSWSFYQLRQFIEYKAKLNGNKIMLVNPRNTSKGCSKCGSLNTIRKSSSFHCLSCNYHLNADLNASFNLKFLGKFLTTKADVNQLHIPNVDSKAIFNVIVDDFRDKAITKIY

SEQ ID NO: 53426 - protein, 353 aa, Escherichia sp.
VKRLQAFKFQLRPGGQQECEMRRFAGACRFVFNRALARQNENHEAGNKYIPYGKMASWLVEWKNATETQWLKDSPSQPLQQSLKDLERAYKNFFRKRAAFPRFKKRGQNDAFRYPQGVKLDQENSRIFLPKLGWMRYRNSRQVTGVVKNVTVSQSCGKWYISIQTESEVSTPVHPSASMVGLDAGVAKLATLSDGTVFEPVNSFQKNQKTLARLQRQLSRKVKFSNNWQKQKRKIQRLHSRIANIRRDYLHKVTTTVSKNHAMIVIEDLKVSNMSKSAAGTVSQPGRNVRAKSGLNRSILDQGWYEMRRQLEYKQLWRGGQVLAVPPAYTSQRCACCGHTAKENRLSQSQFRC

SEQ ID NO: 53427 - protein, 419 aa, unknown
  TnpB Polypeptide
MQRAISLQINKHPEILKTITQYNKIVNEHITKSFELKTNSKNKLHKALYRETRNKYPNFPSALIQCARDNAIEMLNGNKYKKHTQKRNDSSIRFDLRTAKVFLKSGQLQLTTIEGRKKYKLNIPNHFAKYFEWKVKAVTLGVNKKRLKLKVIVEGNLPKQSINKEVLGIDLGINNFAVLSNKTFIKPKHIRNIKRRYAYLRKGLQSLGTRSAKRKLKSLSGRERRFMRDFNHCLSKRIVSMNYGSFALEGLKGIRNGRKGKVFNRMRSNWAYFQFRQFLTYKAEDIGKSVVLIDPRYTSQRCSKCGFADKSNRNKGAFHCTTCSFHNSSDLNASINISQIGKILFEQAVVNHPIVTTNEGVSSLTLLSLVTSSILWKGVVVIKDFLLQLYGILSKRQKRKSLPQRRDSHKKITAIQSNE

SEQ ID NO: 53428 - protein, 385 aa, Erysipelotrichaceae sp.
MIRKAYKYRIYPNKAQREYFAKVFGCVRFFYNKSLSDMNELYKNKGIYKNITPTSYKEDYPFLKEVDSLALCNAQINRNMAFKSFFKKQNAFPKYKSKRHDQSYTTNNQGSVKFSTNDRYISIPKCSRIRIKKHRDFYGNIKSITVSKTTDGKYYISLLVEEEAESINLMDNAIGLDLGIKDLIVDSNGNKYKNRKYLSKSQKKLAKEQRKLSHMEKGSNNRNKQRIKVARIHRRINNQRNDYLHKLSKKIIDENQIICIEDLKVKNMEQNHKLARSIIDASWSRFVSMLIYKASWYGNMIIKVPANYASSQLCSLCGYQNKDVKNLKIRKWTCPECGSVHDRDCNAAKNILSKGIEMLTKDGTHPDSLFMLDSLESSSKKPPLL

SEQ ID NO: 53429 - protein, 384 aa, unknown
  TnpB Polypeptide
MLQLLPAIDLLDGRCVRLRQGNYQDSTVFADDPVEMALRWQAEGAERLHLVDLDGAKAGRPVNSMIVRRIVDATGLPCQLGGGIRDEDSIRRSLGETGVDRVIIGTRALREPEWFQGMCRNYPGRLALGLDARDSMVAAEGWLEVSKVPVMELAQCFVGLPLAAVIYTNIANDGMMQGIESFVATSRGDLIKAPRFLLKVQSKLKLLQRRLKHQVKGSNNWLKLQDKIARLHEKVSNTRRDWHFKLAHYLCDLADNIFVEDINFVSWSRGIVRKQSLDSGIGSFINEILPFVAWKRGKYYLKVDKNGTSQECPNCGAITGKKALSERVHRCDSCGHIEPRDTASAKVIENRGKNAVGLTVLENARGGDLTGIDRLNQVDLVKNL

SEQ ID NO: 53430 - protein, 527 aa, unknown
  TnpB Polypeptide
MQTGRSYTAHFDDDKSRETYLTWSAAQMYVYNAKVQENNYFWRFHCKFWTPEPMPAPDQKYAHLVDFTETPWMKSVPSAVRGIGAYHWYQAQQRFMRGLARCPRTKRIKDADRQLSLTRPYFSIEKISWKWSRVVVGTKSKGAAFALRVRTHRPHEVPAMLTISMTRAGISVAFSYEEENVFPETQEEIAARLQGLSEAELEKKTLAWDWGAKRNLQLSDHTAYNIPTVQMERVRRKEVGAKRQQRRLAGMQEGSKNSKKQKSRIAKKREYERNVRKDFAHQVTHDLATREGIEVIACEKLNIKGMVKRPKPKYDENGKPVRVDTVVVSTQHAAEATLDQIRRDMIELVIKPTVPAHLLDENTKFYVNPTGRFVIGGPQADSGLTGRKIIVDTYGGSAPHGGGAFSGKDPTKVDRSAAYAARWVAKNVVAAGLARRCQVQLAYAIGVAQPVSVLVDTFGTGTVGDEKLEEAVKKVFDLRPTAIIRDLDLRKPIYRQLAAYGHMGREDLGVSWEKTDRVEALKAALGK

SEQ ID NO: 53431 - protein, 424 aa, Eubacterium sp.
MIVMKKMKELPYHIGLKVKIYPSNQQKHIIAVNDGAKRAVYNHLVACGNEKYRLSKTAECVPVYRDRLDYLSSVTGDVKNIKNALPYLWGEDVDEQAIANARQNYYTAWKNRKELHRGVPVFKKKSNEQSYQTNAHYYAKDTKDGRNSNVWFLDRLHVTLPKLGRIRIGGSRREIKEVIRRQERRDIRIGTITIHRDAVGEYWASFQIASETPFRKTLPQTGSNLGIDLNLLELVVDSNGDILENPRFLIQSKDKLAKEQRKLSRMAERAKKEGRKLSDCKNYQKQRKKAAYLNRKVARQREDYLHAYSRHEIENQDLIVAEDLKAGNLKRNHKLARAVSDAGWRKLLTMLQYKAELYGKIVILVPPKNTTQTCSHCGHIMSGDEKLTLDIREWDCPSCGTRHLRDVNAAINILNRGLKAVSQS

SEQ ID NO: 53432 - protein, 466 aa, unknown
  TnpB Polypeptide
MVRTIKLSYTTTPQAAKVIAQWRKAQSVVTRMAYNRVREGKKDKEILDLLRAMPQGRLDSWLTLSSLKRAKAIHRANPNKTVVFGGKHNLQLRAQGKITQDEWRAKRLLPLYFEGHGKSYGEQGGNHRFVLDIEHDTIWFYPKAKVAFPLQIKLGKKSNYRELLDGLQFRCTWLRDTPFTVSLTEDAICITWGNKAEPVQRKANPNRVMSLDLNPNRIGIAVLEQKDKECKLLHWAFYDYPELNRKLKLAPDHPDSLYRRNKRVYELSCIAKEVVALADRLQCGTVVTEHLNIGTEDHGKGRSFNRAVNNQWTRKGFILPLVRRLEHAGIQHVEVNPAYSSKVGNLLWGWPMFIPDPACAAVEIGRRFLQGDPKSSKRKDGGNQRKEERQAQASQDAEVRAEWKRVWNQLQPKSGDTPRCTLPALKQKFPEACPRPSPFKSPQSDVVRFEPARIAPGLRVCMRKDL

SEQ ID NO: 53433 - protein, 466 aa, unknown; identical to SEQ ID NO: 53432
  TnpB Polypeptide

SEQ ID NO: 53434 - protein, 393 aa, unknown
  TnpB Polypeptide
MSRFRAYPTPAQEAALLVHCAHARLVWNLAVEQQSYFVKGGVARPPGNAERMRQLTAAREANSWLDEGSSIVQQQALRDFDHAMSGFFNGTHGKPTWRKQNRHESFRIVQFKAEHSRRLNRRNAEVFVPKVGWVRFRMSRPVPDGVKSFRMSRDRAGRWHVAFAAIPQPLPGPGTGEIVGVDRGVVHVAALSDGTLFDYHRPDLDTTVKRLQRRLARAKRGSNRRTQLKARLAKAQARRADARKDMLETATTRIARNYDIIRLEKLNVRSMTRSAKGTIEQPGTNVKQKAGLNRSILDKGWGTFAQRLEHKAMGRVEYVPAAYTSQRCSECGHIAQENRESQAVFSCVACNHSDNADVNAARNIAAGPAVTARGDLGKTRSVNREPQQLAPTG

SEQ ID NO: 53435 - protein, 647 aa, unknown
  TnpB Polypeptide
LSALRLALDVSDPVQRDRLEGMFSAAHAIRRAVQRDARDRTHAYWAAHHERARGPATVRARVGLSRTSFEHAAYKHLDSAAHLRRFVTKALAMHLADDVWGATERHLFADSTGNRRGMPSISRYHDFQCLPGRARSHTKERKWETFRLHGTLDGHRVAYTDSCGKFFQPREMRPVFEATASWWSHTGPLAVVFVGLPQGPLVLPVRLPAAPANQPILEHHLADPGRWHKINIVRRQDPNGPGMWRYEAHLIVLVAPYVSSHTQIRRAAAARSATRSAGIDVNVSNITVASHVAGRDLRVSRVARTGDDKARGARWARRERRRLRALDRSRRAMNKAQYELSKRQQKRARKREAAGLPPVQVIPGGPRVQRADGKPVQAYRKDVLSRSYLHERAGLKADAASIAQARRGHARQVASEIVREHGYEFVVEDVRLRDWARVWGRSLAAFSPGLLLSAIAREASSIARLAGHVGGVARASTRTTALSQHCLCGARAKKTLADRVHVCSACGLHADRDAMSAALGACIVFGDRDVPASATLDRDLAATVHYDLRARLVLRATVPVSSKGRQDVPSESTAHSARDGSFIAGKGRTPGISSWGGWVARRIAGTAPHATLDETGSPCQTTPERARMRTRLFGSGLAYAIPLRDSS

SEQ ID NO: 53436 - protein, 382 aa, Escherichia sp.
MRRFAGACRFVFNRALALQNENHEAGNKYIPYGKMASWLVEWKNATETQWLKDAPSQPLQQSLKDLERAYKNFFQKRAAFPRFKKRGQNDAFRYPQGVKLDQENSRIFLPKLGWMRYRNSRQVTGVVKNVTVSQSCGKWYISIQTESEVSTPVHPSASMVGLDAGVAKLATLSDGTVFEPVNSFQKNQKTLARLQRQLSRKVKFSNNWQKQKCKIQRLHSRIANIRRDYLHKVTTTVSKNHAMIVIEDLKVSNMSKSAAGTVSQPGRNVRAKSGLNRTILDQGWYEMRRQLEYKQLWSGGQVLAVPPAYTSQRCACCGHTAKENRLSQSKFRCQVCGYTANADVNGARNILAAGHAVLACGEMVQSGRSLKQEPTEIIQATA

SEQ ID NO: 53437 - protein, 361 aa, Enterococcus sp.
VTPLSQAMTVKIKLKPTNAQTEFIQTSSLAYIEAVNLLVSEMIMAEKVTKKTSKDVDAPLNSAVKNQAIRDAKSVFQKAKKSHFKNIPLLKKPVIIWNNQNFTIGPSGIKMPFVIDGKSKKIEIMADIPEYERSLLKKACKISTLRITRKRAHYVAQIAIELPEKLNTATKIMGVDLGIKVPAVCCTEDNEVKFSGNGRMNKYIRRYHHSRRKKLGKAKKINALKKSKDKEQRWMKDQDHKISREIVDFAVNHHIGMIRLEKLANIRKQTRKSRKNNHSLSNWSFYRLASFIEYKAKLVGIKVEYVHPAYTSQKCPNCGHRHRAKNRKYDCSDCGYIGHRDIVGAKNIIDAPVLDGKSQVA

SEQ ID NO: 53438 - protein, 395 aa, unknown
  TnpB Polypeptide
MIKSIKVRLHPNNKQLTKLFQYSDCARFAYNWAINREQENHKHGNKFLSDNELRKEFTQLKKREDYKWLNHVSNNVPKQAIKDACNSYKLFFKGQCRYPKFKSKKRSKLAFYQDNVAIKFTDTHVKVEGFSMSRKRNKQQLNWIRLCEKGRVPTDCKYMNPRFTYDGLHWYVAVSIEMDGISDITTNDGVTDGVGIDLGVKDLAICSDGNKYQNINKTKRVKKLEKRKRMLQRSISRRYEYNRKGNSYCKTRNIIKRHKEFLKVIKRLTNIRRNHLHQTTSEIIKRKPSFICIEDLNVSGMMKNRHLSKAIKQQGLYEFRRQIEYKSDWNHIPVIIADRFFPSSKLCSCCGMIKKDLKLSDRIYRCDCGNIIDRDYQASLNLKNYGEAVLQQSIS

SEQ ID NO: 53439 - protein, 394 aa, unknown
  TnpB Polypeptide
LPFSSKSPALETPGFIRGEEAPSFLDFFKHSSYSEAVKLTLQIKLLPDSKQTSALLATMRRANGACDRISQIAREKKIFNQFKLHRASYREIKNTGLSAQVVVRCISKVADAYKLDRKSKRVFKPLGAITYDERILSYAKDRISLWSVDGRLKIPFVCHRPDWLPFVKGEADLITRKGKFFLFQTAEIPEENIKDVEEFLGVDFGLLHIATLSTGEKMSGKEIEQYRIKRQRVRSSLQSKGTRGSRRTLKRLSGKERTTARIVNHTIAKRIVEKAEGEGKGIALENLKGIRLRSVKKGRVFRTRVGRWSFFQLRAFLEYKAKLAGVPVVLVDPRYTSQRCSSCSALGSRNGESFKCSCGFSEHADINAARNIASLGLLVNQAEKSAMCPVLAHG

SEQ ID NO: 53440 - protein, 330 aa, Prochloron sp.
MRHYAIKVRIYPSNEQKIILAQHFGCARWWWNYALSYCIDTYKATGKGKSRADLNSMLPKLKKASETKWLKECYSQVFQATTLNLVTAYKNFFDGRARFPRFKSKKNKQSIQFPQNVKIDNGNLKFPGKVGVIKTKFDKRQIEGDIKTVTISMTPSGKYFASILTDKRGDYPKPSHEGKVAGIDLGVKDFAIVNDGDKTSKFANPKHLSKHEKNLSFKQKKLARKQKGSNTRNKARKIVARVHERISNTRQDYLHKLSKKLVDDNQVIVVENLNIKGMVRNHNLAKAISDAGWGMFVNFLSYKLEKEGKILVEIDRFSLVLKHVQIAFIK

SEQ ID NO: 53441 - protein, 421 aa, unknown
  TnpB Polypeptide
MFNEWFNTTNYIYNKTIETIKNGHKKNPISLRNLLVTDETRTKNILYNVNLKKLKELNNDKIILEKKINEKNKRINSDFLFIKEQLINDMIKDLKTKQKNIPLEKNNNINTWELKTPKNIREGAVNDVCKSYKTGFTNLKNGNIKFFNIKYRKNNKQEKSFLISKDMIKNKNGIIEIAPSYFKKEGISCKFKMGKRTIKKNKDLKINNDCRIVKQCENYYLIVPVPMIFEEKKTPLNYCGIDPGVRTFMTCFNNNGYSEYDYDINYLKKLDNKISLLKNKRINKRIKKRKLSKIERKKDHLIDQLHWITINDLLKKNDILFYGDIKSHDVVKNGKYKTLNRDMNNLKFFKFKQRLIFKAFEKQKMIFEVKEPYTTKTCSFCGVLNNPGKSKIYECHSCNKKMGRDINASKNMLLKGIINYL

SEQ ID NO: 53442 - protein, 378 aa, unknown
  TnpB Polypeptide
MFRAIKVRLYPNKTQEQTLNKVLGCYRFVYNHMLALKQKEYNDNKKSLGLAELTKYFHGTLLKDEQYAWLKEQNTKVMKPAINQMLSAYDKFFKQHNGFPKFKSKKDKESALFPLEAISKRNNFNDRKITLTKSLKGLKFRCSDLYFKRLQTYKEGIRSATLSKTKSGNYFLSILIDLPQEEVIKFRVTNKCVGIDLGVKDFVITSDGEVFENNHFFKKKEKQMKKLQRQLSKKVKGSNNRNKQRVRIAKAFEKLINQKIAYIHRVVNELLTYYDTVFMEDLNVKGMMKNHKLAKAIQEIGFYKFKQILEDKARNNNKKVVLVDRFYPSSKTCSNCGYKKRDLKLSDRFWTCPNCGEYHDRDLNAAVNILHEGERLIS

SEQ ID NO: 53443 - protein, 257 aa, unknown
  TnpB Polypeptide
VVIPFKSSEEIYVRRFIGWDSNELSLDGYEPSIGFIHVDLKPPQSIKILYGRKKAIAQSRGKRELYEKYVRRERNREKDFINKLSAGLRMLFQNTIHVFEDLDKEDLVSRKKREKNRRKRNARTPWRRIHRRMSEVALTASVDPRNTSRECPRCGHVVETQERQIFECPRCGLKMGRHKVASINIRRRYLEGKRGRKRRARRRGFPHSNEPEISMKVELWVGVTPSWNPVIWIPMKWDPEGDEAKGRGLDIKQYQAQ

SEQ ID NO: 53444 - protein, 291 aa, unknown
  TnpB Polypeptide
VELDNEVVRIIIRDKWYTLKLKHRRDYIKRFRGFRWKEVHVKYENSKLCVSVVFEFTYKPYMPRGIVALDVNLRMVTAYDGSDIRRYKTRFVDALSERKRAEELQSKYPKRWRYNEKILSRVRELHRKARNTVIDWCWKLAKQVVLKALRHNYAIALENLEGLRESVNDKSDKVVWKFTVFAYRRLQHSIISKALEHGVPLIIADPRNTSSTCPRCGDKLLYIHRLAVCKKCDFKADRDSVGAMNIWLRALQAYAGVPGSPLRAPVVKDETRRSGGTRHEGMKEIIRAIHS

SEQ ID NO: 53445 - protein, 492 aa, unknown
  TnpB Polypeptide
VTALGADETNDASCVTRGVVVPLDPSPAQERMLRSYCGASRFAYNWATDQVISNMRTRSAEREAGVSETDLTPSISWQRYSLEKAFNAAKADVAPWHRDVTCHSFYSGIKSAAKALENFTDSRAGSRKGQSMGFPKFKSRSKSKLSFTMTEVKRQSSWFKEDGHSIALILPKSPDDRDITRRCDQLKWIHTTTSTKRLARKVAEGTARILSVTISFTGGRWQASFSVRYNVFPTSTPTKFFGGSVGIDLGISHLATLSRPVPGLTDDDGHIANPRHLDAEMRRLHKLDRSIARCEKGSKNRAKLKARRAKLHGTIAKTRDRALHELTTKVAGGFETIAIEDLNVRAMTNKKHHLGRSLADASFGELRRQLTYKAHDRGATVVVIDRFFPSSKTCSSCSTAKATLSLATRTFECSSCGVRLDRDINAARNIAAEGARHLHCAQHNAQHVAGFRPETQNADPRTNKTNPSLDGEASAAMRAEPRSQSRRLTPSA

SEQ ID NO: 53446 - protein, 524 aa, unknown
  TnpB Polypeptide
VSALNITSSYQVRIVNCSVNLNDTVRIYQEALSYLIGIVNENWDAVKSITVGALEQQRYIEKLVHGNKNREAKYPEFDKKFYKYPSYLRRATITAAIGVVSSYQSNLANWENTDKQTAVPTLQVYRKSFPTFFRDDMFEVEGAPEKVKVPKNPKAKDKLTPEEKKIEKKKRQAAQLKNSQNEITALNDKHTVHLKVYHKNDWVWATVTLRKTDIAYLRKYWMHACASAPVLEKRFGKYSLRFSFEENIFLSKTPIKKQRICAVDLGLNTDATCCIMTADGTILARKFINFASDKDHLYHVLNRIKKFQRLHGSREAHNFWAYAKRINDELSKKIASAIVEFAVLYSADVIVFEHLNFKGKKASSKKQKIQMWRKNGIQHIAEHKAHRCGIRISHICVWGTSKLAFDGSGKVTRAQNNHSLATFESGKQYNADLNACYNIGARYFIREVTKPMSKKAWSQCKAKVPDIERRTQCTLYSLKQLHSLLSPSVATQQPGPICWDYTVLRELCGRLTPMWRPMPSGVVS

SEQ ID NO: 53447 - protein, 460 aa, unknown
  TnpB Polypeptide
MGQATRTTKLLLDLGNRRQGGTNTGKRAALDATVGVLNEARAFYIDFLLAHAGKLCERVPYYSEQHLEMRERAISANELLTWAEACTVETQDHPQPWGGWNFTQRFPDMPAIYRRSVIKDAIGKVRSYLSSLAHWEKSGKQKGKPGLPGARDHPTLYQGTCSLEQAEGKSYFVRLKVYDGKTWQWVNYPVVRSRYFEQRRCEEAWEHKSPILVLRPHSAEVHFPQTKEIAAKRVRESKLDPDLVTVAVDLNVKNLAVITVRQHEQIIETVFVSDAGFDQQRYRHLRRIAKKQWQSGKPVKGERSNQQLWRHVHRMNEDAAHKVARSIANVCARYPGCVLLFERLRKIEAKGGSKSRRMNRKQANQLRGKINQYSREKVFAQGMCTVEANPHGTSQFCSRCGQLGERFSYRAGSRIKVKWGKLFWCPHCRYEANADWNGSVNVQHSFFHELHWQPRGIRSG

SEQ ID NO: 53448 - protein, 237 aa, unknown
  TnpB Polypeptide
MKVGTQGKAVRAKANHYARTRTRLQHKGTRSAKRRMIALSGRERRFKLNTNHVIAKTIVNAHPNTLIGLEDLTGIRERTKRRKRRRKGKEVLPLTPKQRRANRHASKWAFAELHGIMTYKAALSGSSLVVKVDADYTSKACPVCGYIDKRNRPGNGLTFECQSKECRYRVRTGRAYRLHADLIGARNIAMRTCLIRQDWVRTGQLSVAPDVSDREAKAAHLSRYAELRWSPDASPLL

SEQ ID NO: 53449 - protein, 263 aa, Moorea sp.
VYRTIPVRANFSEEERVFWEFQCKQANSLLNCAIYYAKQKHYQWLEQSEAFTTYWRGDELKAGWKTYKCKVGYSELCKELKENAHYKGMAAQSAQQTLKSVAESLASYNQLVGFYYKGEAVRPLFPRYRKKGGYAAVTFPRQALTYKQGVFYPSVSFESKPELLTLITLDPPDFIDPDWVKEVTVRPCYGQLWIDWVIDDGKEPVSVNSKLDYSQALGIDHGGDNWLTGVTTLGKSFIIDGKKLKSMNQGYSRLVAKYKMGKP

SEQ ID NO: 53450 - protein, 445 aa, Bacteroidales sp.
MIPIAHRIELKPNNKQKTYFRKAFGCARLAYNWGLAEWKRMYEAGEKPNGREIRKRFNAIKKEQFPFCYEVTKCATDQPFANLQSAFDNFFRNLKEGKVAYPQFKKKRDNEGSFYLQSSEIHLSEFNQNSKAFKCLVHNEKHKHQYIHFPKLGWVKMMEHIRFNYAKINNACISQSGGHFFVSFSLQITEEEYKRTHPNVDLVDAGRKVGVDVGIKSALILSDGIAIDNPKPLKKNLRKIKRLSRQLSKRVHPKTKEERLQGAKKSNNYMKLSVRLAHAQGRVANIRRDFLHKVTTILTTHYGEIAIEDLNVKGMTKNHRLAQAVNDVSFGELRRQIEYKAATNGVRVLKVDRYYPSSKTCSVCGSVKKDLTLHDRTYRCDKCGAVLDRDYNASRNLLGQLVNHKIGTDYPESTPADLTALLSRFSVNGIATSKVETGKQQKSYV

SEQ ID NO: 53451 - protein, 281 aa, unknown
  TnpB Polypeptide
MVGRRLAILKMSSLMVTRSIYRYIGLVHGRLHRTLDGTIKTVTVSRHPDGKYFVSVLVDDGKANLESVPVDRAVGIDVGLTHFAITSDRSKFDNPTKFFVKRQRNLKRKQQKLSRKKKGSQNRKKARLAVAKLHSKIARCREDFLHKLSRKIVNENQVIAVENLNIKGRVKNHNLAKAISDVGWGMFCTMLKYKAESEGKQYIEIDGWFPSSKTCHVWLNRVDHLSLDVRAWTCKHCGTHHDRDVNAAINIRNEALRILALGTSASAWGGDVSLSGKTSVL

SEQ ID NO: 53452 - protein, 417 aa, Chloroflexi sp.
MRSAFGPRSGDHEFQAMRFALDPNDKQRGALASHSGAARYAYNLGLEWLIEAIERRKLDASESVPNNSFVTSRRAKRGGKRFGFPRFKCKGRSRDRFRLSGFFHVDKRWVQLPTLGRIRVHEDASKFMRHLESGRARITTATISRQADRWYVNFRVVRTKRAIERPPGSAVIGVDVGINALATLSSGQVVTGPRALAVGLRKLRRLSRAHSRKRLKSRNRRRFAQRLARCHARISSVRRDHLHKLSTYLAKNHGRIVIEDLNVQAMMSNRRLARSIADSGWGELSAMLEYKCRWYGSTLIQASRWFPSSKTCSSCGLIKDSLPLAVRVFDCPACGLTLDRDVNAAKNLAKWPEVAASASETQNACRGNVRPGVRRAGPDEAGTEQPIVASGSEPNAQALAFTADSLGPDEGRVARGI

SEQ ID NO: 53453 - protein, 548 aa, unknown
  TnpB Polypeptide
MAPTPAAGPVRKPRARKRPKGAPTHVRSWPLRPTGAQCGQVGTRFFTGVRVYNAVLGEFIGRSRAVKADPAWQAARELPRRTAAERKRRGAAFGAVQAAHGFTADAAQSFASSLRKLWVREHLPAQETQNLGARAFDAVRQWHVGKKGKPRFKNARRGLHSVAAKDGSGALRPNNDDVGRLVGLQWGAGLVIPIAPAAMGGRRGREQRAELGEIEALIAAGKVLSTRIVRTVVDGRDTYRMQLVCDGRPTRRHPIGDGRVSFDLGPSQVAITVQRSDGSWSGWVEPLADAIRLDTTRLRRAQRHLDRQHRAGSPECFRADGTHTWVRCGWQRSAAAVRTTRQVAELHRRLAEHRKTLHGALGNRLLGRGTDVACERLDYVSWQKNFPRSVRDRAPGLLVEMMRRKAESAGGEQLYEYNPRTTALSQTCLCGARKKKPLSQRVHHCECGIREDRDLFSAYLGLHVRTGVDGVDRLDLPSARQGWGHRQDVVESPKSGRSALARKRRGRRHPPSRRSVARIKARRVARAKMRQSRSTQTSTTDQPTAIAA

SEQ ID NO: 53454 - protein, 405 aa, unknown
  TnpB Polypeptide
MLIRSLVFRLKDPLPNEAKFLMEDFRLAVNNAIRLGVHSNVTSKFALSKLAYKDFRKEHPNMYSQHLVSSFEVAGSILKNHRRRLRKKLPAQVPFVRRLFMKAENQAYRLDRKNGIIDLPIRAGIHVKLELIVSDYHRKYLDDESLSLGSLTLLQDRVVVAIRKHAPKPYAPASVLSLDTNERSLDGVLAKEDRIAAVVRAEFPEVSVIQSVHHERRKRLQKKKSHDRRTAKRLCAREGMREHHRIDYRMHEVANTVLSFAEERKSMIVLEDLTGIKPRRNKKLNRRISMWPRRKIHQIIEYKAAWRGIPVVKVDPRYSSRKCPVCGRIQDSRKGTEFVCGCGWRMDRHINASINLLQTVASKKAAGGLRFDPGAFQHDVVMVLCGPGRAVRPEPNGTSNMRAAV

SEQ ID NO: 53455 - protein, 313 aa, unknown
  TnpB Polypeptide
LGLARPSARSAILYLAIRAIGKVVESYKVEKQHKHTFNPHGAIVYDSRILKFKFPDKISISTIQGREVIPFLFQNYRNLDMRRVAGQADLVYHDGIFYLVVCVDVPEPPEDDTKEFLGVDLGIINIASDNTGTQYAGNKLNSVRNRYYKLRKKLQKKNTKSAKRLLAKRKRKEKRFAKDVNHVISKQLVDKAKALGLGIALEDLKGIRDRITVKKAFRRRHASWSFFDLRTKIAYKAQLAGVKVVFVDPRNTSRMCSICGSISKKNRPNQSTFLCQVCGYSCNADLNASVNISVRARVPVNVPNVVCVETKAA

SEQ ID NO: 53456 - protein, 442 aa, unknown
  TnpB Polypeptide
MQIISSYGVELRKQNIPIRQTLEIYRSAVSYLIGIYVQVWEELAEIPDAKRRFNAAEHLVHTTKKNHACFDFDIRFPKMPSYLRRSAIQHALGTVSSYKTRLDLWEKTDGKSGKPKLVYENHAMPVFYRDVMYREGAEGKDEAYLKLYDGHDWKWFCVRLEHTDMEYLRKYWSGKKASAPTLEKRHQKYFLRFSYTEEVTLTKTPVKEQVICSVDLGINTDAVCTIMRADGTVLGRKFIDHPSEKDRMYRTLGRIRRSQREHGSAQTQGRWAYTKRLNTELGKKTAGAIVRYAEENHADVIVFEYLEMQGKISGKKKQKLHLWRKRDIQKCCEHQAHRKGMRVSRICAWNTSRLAYDGSGTVTRDRENHSLCTFQTGKRYNCDLSASYNIGARYFIRELLKPLPATERSLLEAKVPPVKRRTSCVYADLRKLHSEMERLKAA

SEQ ID NO: 53457 - protein, 387 aa, unknown
  TnpB Polypeptide
MIQKGFKYRIYPNQEQEQKIAQHLGCVRYIYNKALETKVKHYEKTGKSLSCFELTTGLLKQEKAEHEWLKGPYSQCLQMSLRNLDNAFTRFFKQKKGFPKFKAKHDSKQSCQFPQHVKIDFENSKICLPKIGWIKTKLSRQFNGKVKTTTLSRTSTGKYFVSILVETNEEIKLKKPVRKETSVGIDLGIKSYIVTSDGEEIQYPKFLRQSIDRLKILQSRASKHPKGGVRRRRAIRKVARLHEKIRNQRHDWLHKLSTKLISDNQTVCLEDLNVSSMLKNHCLAQSISDCSWGTFVEFLQYKAEWYGVNILKIGRFEPSSKMCSCCGCMKKDLNLSDRKWYCEECGVLHDRDVNAALNIKKFALLKQNSGSGRPGELQSANTSTLVE

SEQ ID NO: 53458 - protein, 387 aa, unknown
  TnpB Polypeptide
MTLKAFKYRLYPTPNQKQLLAQHFGHCRYVYNWGLNQKLQQYQKKGKSDSCITLINKVTELKKQSDTIWLKDVNAQALQMSLRNLDNAFTRFFREKKGFPKFKKRNNRQSFQCPQDCSINFDNELLAIPKFKGKNQIKIRVSRRFEGKIKTVTISKNPSGKYFASILVEVPEEVPQKPVVREDATIGIDLGLKDFATISTGEKIANPKHLKKTLSKVKYQHYKLSKTTKGSKRREKARRNLAKTHEKIKNQRDDFLHKLSHRLTHDSQVDTICMEDLNVQGMLKNNKLSQSISDVSWSRFVEFLKYKCDWYGKNLFQIGRFEPSSKMCTCGKLNNDLKLSDREWVCQSCEATHDRDVLAAQNIKRFGLIRLNSVPWEARESTLVETA

SEQ ID NO: 53459 - protein, 310 aa, unknown
  TnpB Polypeptide
MGDHAPRRTVPIKLDVPEQRRGDFHQTKDQFLHCANRTSEWAWRYDELCITTKSKAENALYDDLRDETYLPANLVQKGIRRAIEAVKGGVEKLKKGEKTSQPEFDSWSVVYDKRSATFNDDHATLSTPTGRVTAGYVLPPENEREDTPFGRYYESDDWDATSATLQYDEQEDTFYLRVTLKNSDYEVDGTERQEAESLDDHEKNGTVLGVDLNVTGAFAVTSTGAFIGSADYLNHKRDQYEQHRGRLQQTGTRSVHLTIKSIGNAFSEWSLDWLYNRANDLIAEAQDADVDGIIGGSGAIPRPLVIQGSY

SEQ ID NO: 53460 - protein, 206 aa, unknown
  TnpB Polypeptide
MVHKQRAKYVSIITKGHEKKHAVSKRLRDLSFHYANFVKDQCHKISRSIIDFCMEHQCGTLILGVNLLWKQKSNMNKINNQNFVSMPITLLRTMITYKALNAGIRIIEQEESYTSKADLIANDRIPTYGVDDKDASFSGKRIKRGLYRCSNGMILNADCHAAANIMRKAIPDIWKDTRDYTFLSAPDVYGFHKLNLKGIPVKGIAA

SEQ ID NO: 53461 - protein, 381 aa, unknown
  TnpB Polypeptide
MITVIRCPRTACNGRGLAAPNEEVRREEAYPVVIQTQLKLRLNKTQEAQLEEWLWHLTGVTNWAIRKIELDAKDGIYYSAFDFQNLLAGHSKKLDIPSHVLQAVLGNVRVSWSRCFKKLAKKPQLKGQRNKLTSIPFSDPIRSPIDNRITLLGLGSVRFHKQDIPEGPIKCGRIVKRASGWYLCLFIAADSKPIPHKSDGLVGIDPGFKHLLTLSTGEKIDHPRELEAGAQRLAQAQRGKNKKQTARLRERQANRRKDRNHKLSRQLVENHSEIYFSKDNYNAIAKKFGKSVTSSSHAQLRSMLAYKCTKSDRRYVEVASKNSTRTCSKCAALTGPVGWVGLKVRFWVCSGCGTEHDRDVNAALNTLLVGAGLAHEVGSNA

SEQ ID NO: 53462 - protein, 530 aa, unknown
  TnpB Polypeptide
LAEDEESFARGERVFVWGSAAVVDPAVDGQRVHRPTTPRLAWVLSVARGMLTGAMTRHTTFRFCLDPTVEQHEVLSRHAGASGFAFNQCLRMVKTALTQRKTDPDTDLPWTGFDLINAFNGWKKTDDAGRVFNVDSAGVAKLAVTGLAWRTQVCQQVFEEAAVDLGKGLKAWSDCRSGTRKGQRVGFPRFKKKTDAVASFRLRNKHPRARPPAIRVGDDDRPRSVTLPGIGVIGVHDNTRRLRRMLTNKRAKILFATISQHGGRWWVSLNVEAVDLHPDHRHPPRDHADAGGWVGIDRGLSAFLVAATADGAEVARITDAPKALRAGMVRQRRLSRSLSRKQRGSAHRRDAAAKLGRHHHRIANARRHFLHQVSNRLVKTHDRLVVEDLNVTGMLRNHRLAQAISDAGWAEFARQLRYKQAWRGGHFVTADCWFPSSKLCSACGAVRRDLTLADRVFACGCGHSADRDTNAAANLARWATRQDPHRSPDPQAGGRATNARRRDGADQHPTRAGETSPDDAGTDVQTAPAA

SEQ ID NO: 53463 - protein, 388 aa, Acidilobales sp.
MTTGDEGFLTLSIGVRVSPEPVVIELLHRYRDALNYAINKIIDNNLKTLKQIHDFLYKDLVERFNLPSRIAVDCYRDALTNVKSWRNNPKRGRRPLVKKLSMLLHPGSGYRVKEGYIEIIGGMRLRIIGWDRRYDDYKNREARLVYRRDMMILWISKRIPKPKKYTPVDVVGVDINEKKIVYGDEIINIKKDTAIDKAYKYIKLAEELQRRYSSSRYLVWRRRRGILRRIRSYHKKARNILIDWTRKISLEIIRLARELRYAVSREDLTNLIKSLRKLPKDHKTKLIIMGYSRIERWIDWQAEKHGVPYVKVDPNGTSSECPKCNYKGLEEVGYRRLRCPRCGFEADRDVIGKLNVRKRGLRKLGIYPRGGALTPLTAPQMTDVNPNR

SEQ ID NO: 53464 - protein, 403 aa, Nostoc sp.
MLYNLFMGEYTVRKLKIGNTQQMSDLASASGELYSRTVVSFWRTVRNKDLWLKPSSMMRWHNSNKLHAHSADAVVQSFYSSLKSWRTRRKADPNAHPPRRRRRFFKVQWKSSAIKVRNGKLHLSNGKGNAPLIVDWNWETPKLVEMGWDGKQYEIRACYAVSQTQTVETGTVVGIDLGEIHLAVAHDGEQTFILNGRLLRSKRQYQNKLKAKLASLIHQKKRGSKPKKRLVRSKQRQLAKVKNQIKDILHKQTSKLVSTLKSRGVQTLAIGDVRDIRQRINFGTKVNQKLHQWSHGETRAFLTYKSQRLGMKVEIQCERYSSQVCPSCGQRHKPKNRTYKCKCGFEFHRDGVGCVNIRRKYLGCFDVPVVGVMAAPIGLRFRPHLQCSSVQAVAMHSEIISSL

SEQ ID NO: 53465 - protein, 188 aa, Clostridium sp.
MIKAIKIRLLPTREQEQIMLKSIGCSRFSYNWALSRCNTLYKQGNTFVKTNNIIKLESQVKLIYRKLSNIRLNHIHQVTNKIVKMSPYRIVMEDLNTSGMMKNKHLSKAIQEQCFYEFIRQMKYKCKFNGIEFIQADKFYPSSKTCSCCGNLKKDLKLKDRIYKCDKCNLVIDRDLNASFNLSNYSKV

SEQ ID NO: 53466 - protein, 497 aa, Okeania sp.
MLLKYKYKLKPHKRQAVIISNWLSMARKQYNYRLAERLHWFEATRTPVNACPLNVSVVPVDRIYQNIPEFRVQTRDGRKKDDNGNPITKKGDKHPNIVNGYVLWETVQLANLGQTKQLFPEYKSMHSQVLQDVIQRVQTTMDNFIKPDKNGKTSGRPKFKGKHYYNSFSYPQLSNTNIVKNANGRYCINLPKIGLVPFVFNRPIPEGFKVKTGTVIRAADGLYISLTIEDQTVPVEVAEIQPTEDNSIGIDLGLLHYIVTSDGEFIEVPRFFRFSEHRLSKLQVRLAKKQKHSKTWKVLKRKIAKLHQLIARQRLDWQFKLAYHLFSDYQVIFLEDLQIANLVRRCRAKLGDNGQFLPNGQSAKSGLNKSLQDAAFGQFVQVLEYVAWKLGKRIIKVDPKGTSQNCWECLNKVSKSLSERWHSCSRCGQELDRDYNSATPLAPLPGGDGGGLDYYQHRGRTSPLLKQRSGFPGLKNPALSRKGNVGSMSSYHWNSCK

SEQ ID NO: 53467 - protein, 398 aa, Kribbellaceae sp.
MSRFRMYPTCAQQSALREQCAHARYVWNLALEQWSMWRRDKGPTPNFAEQCRQLTAARAAFDWLRAGSQTVQQQALRDFDHAVKNFYMGIHRRPTWRKAGRHEGFRIVGGQATRVVRHNRKWAAALVPKVGWVRFRLSRAIPVAKSYRITCDALGQWHIAFAVIPPAIPGPGTGSVVGIDRGIAVSAALSTGELLVCPGLSDSEEARLTRLQRRLARTTTKSKRHRSLRTAVARLTARARNRRKDWIEKTSTAIARRFDIVRVEDLHVSGMTRRPKPKPDPAHPDKFLSNRRRAKAALNRSILSSGWGALVRRLEDKAGGRVEIVNPAYTSQTCSTCGHRAPDSRESQAVFRCVNCGYQANADVNAAVNIAAGRAARARRETPPRISLKREPQLATFP

SEQ ID NO: 53468 - protein, 452 aa, unknown
  TnpB Polypeptide
MEKNVEQLIIKSNELRIKLEHFLQNYYNFENILLNIIIKNYNLYKEGKDVNDFGLLTFPQLILNILYYYNYESSEQLEYIKNKYKENQLWQELKETAKELNPHNLTYIIKRIKTVFDIYFTSLELYEQNPGLFQEMPKPPNTNKSKLENYVIELDKYSALSFARLEKENLIGINLSDRMVYVRVDKRQAKILMKIDRLYSAKLIYKNGELSLQISYLKKSDKTENKQIKNETENKAENEIKNVQVKYAGIDLGMRNLMAVFIDDTTTESLLIDGKPFRQYNEIELLMEQFHKIAKRVVEYLHLHGVTDLFISKNLANHKIAQIKFERLIEAIKYNAQKYGIRIRDDIDESFTSKVSCISGDIKKAQETHRLTNVSNGKRGKSTFHDKVINERFNADLNAAVNHIKVATGKSFEWLKDKLFKLKKPIKIKSEDEFRELIEKLKSSKEVKTNEA

SEQ ID NO: 53469 - protein, 411 aa, unknown
  TnpB Polypeptide
MVPRKITYRMYPTKQQAERLLELLGLHQRVYNTALEERIRMYRDSAQSLGFAAQCKGLTAWRKQCEALAAVNAQSLQVTLKRLDLAYAAFFRRVKAGETAGFPRFKAVERFSGWGYKTHGDGWRLHAGDKMQHGHVRLSGVGMIKLRGKARTPGEVKTAEVQHKGGKWYLSVTVECEPQRAGGTVAMGMDWGLETFATVCSGENDTLSVANPRFLDKPQRQKLKLLQQAVSRKKNKCTNNRRKSVALLSAESRRIADRRKDFLHKTSANLVKQYGLIATEQLSVKNMTANGGEYKKGLNRSILDTAPSTFLNLLKTKAEEAGSLWVEVPTRQVKPSQTCHRCGIQRKKLLSERTHRCSCGASCSRDENAARVMLNWALVGNVTGQELSEVRSRGSLPTLIQETPPIAALAV

SEQ ID NO: 53470 - protein, 278 aa, unknown
  TnpB Polypeptide
LGAKGFHVIKIGWVGYRKSRDIMGAIKNVTVSRRGEKWDVSIQTEYEVSLPASNPSEIGIDMGVKRFVTMSNGDFVEPLNPFKQEQEKLAKLQRKLARQKKGSRNSRKTKRKIARLHRYIADSRRDFLHKTSTKIAKNHSIVYVEDLKVSNMSASAGGTKESPGKNVRQKSGLNRSILDQGWYGFFRMLSYKLERRGGKLIKVDPKNTSRTCPRCGLVSAENRKSQATFACIGCGYRSNADEVGAINILRAGRARLACGMSGAVRPLSAGTQRDLLQH

SEQ ID NO: 53471 - protein, 365 aa, unknown
  TnpB Polypeptide
LANHQLGLRRAVRSIRTRLAVPVGGKQGRVHGYATQAERYAKQRRLQHLEGELAKVEDRLSSARVSVCRGGHRLAKLRHRLDHVDVELTEAEWQACWQARRWFLTADGDATKRWGNETIRVHPEQQWLELRLPTPMASLSNTPGRACTYRLACPVTFHHRRDEWAVQAATGPVRYDISYQPGRNRWYLDASWQTKATQPPAPDELRRSRALGVDLNADHLACWVLDSSGNPVGRPHTIPLYLDALSTSTRDGRLRVAIAALLRPARTNGCRSIVVEDLDFTDARLTGRETLGRGRRARCFRKTISGMPIRRFRSFLAGMAANADLWVIAVDPGWTSKWGQRYWLARSTGQPNPRSLSRAITRRRW

SEQ ID NO: 53472 - protein, 372 aa, Enterococcus sp.
VKKAHKIRIYPNNRQQIQFQKTFGCVRFYWNFLLDQRMTNYKMKKENAGYKEDKTTYATLKKMDEYAWLKEVEAQPLSQVTMDLNKAYKNTFKSNFGFPKFKSKKYSKKSYRTAMGMKVNDNYFYVSKVGWVKMAETLRFNGKLINVTISQTKSGKYFATFLVDAENLRKVKVNEFIGLDLGLTNFCITSEGEKIDNGKFYRSLEKRLVIEQRKLSRRLEVAKKHNRKLDECKNYQKQRVKVARIHEKIFNQRNNFLHQLSSRITDENQIICIEDLNVKGMVKNHKLAKSISDVSWSEFVRQLAYKCEWKGRTLVKVDRFYPSSQICSSCGHNDGKKELDIREWTCSNCGAHHDRDINASINIKTEGLSGIA

SEQ ID NO: 53473 - protein, 373 aa, Bacillus sp.
MLVNKAYKFRLYPNKEQAILIAKTIGCSRFVFNHFLAQWQETYKETGIGLTYHTCSSQLTQLKKEFVWLKEVDSIALQSSLKNLADSYVRFFKKQNNAPRFKSKKNKVQSYTTKHTNGNIAIAGNQIKLPKLGFVKFAKSREVEGRILNATIRRNSSGKYFVSILAETEVQPVEKTGSSVGVDVGLKDFAILSTGEVFSNPKWFRKMEEKLANAQRILSRRAKGSSNWHKQRIKVAKIHERMTNARTDYLQKISTEIIKNHDVIGIEDLQVSNMLKNHKLAKAISEVSWSQFRTMLEYKAKWYGKQVVAVSKTFASSQLCSCCGYQNKDVKNLNLRKWDCPSCGTHHDRDLNAGQNLKNEAIRLLTVGATGLA

SEQ ID NO: 53474 - protein, 416 aa, unknown
  TnpB Polypeptide
VPLRRSLVCDLSEPLSKPILALLAEFRLMVNRGVREALETGRTAKGSLTKFSRTLARERRVHGAHAITAVETALSLAAGHRRRLRRNPRVHVPYVRTPFLTADDATFHLNVDTGHLRLSLRNSEWAGLDLRLSDWHRRVLAGRRVKQLRLNENRAVLVFERDAPDPYEPQAVLALDTNERTLDGVLVEPELTKPVVVPYFDVATVQLRHFARRWKLARKKAHDRRVGRTLLSREGRRERRRVVQRLHLLTKLLVAEARERQAVVALEDLRLPRGGGRGRRLRRRLSSWPRRELHRQLEYKAEEQGVPVIKVDPRNTSKSCPRCGEVKERRSRVGRVFVCAKCGWRCDRQVNAGLNICRTVLREVLQGPSNSGLGGLRLDPDALPNDAMRLLYSPGDAGAHGRSGRDGSDRTAFPIG

SEQ ID NO: 53475 - protein, 509 aa, Bacillus sp.
MLKIRRKEIRKELKPMARTSKATYTIEFPLSIPVWQQHRLEKKFKIARMVYNSCLGEALKRHKAVKMDKQYRAWLRESKSKERDQQLAAIRLAYGFSEYGLHHFVKSVQRKFKEHIGSFEAQKLATRAFQAVEKLHYGKAKNVHFKSWKDDISVENKSNTTGLRYQDGCILWGNQPTKKNPKPKSWICMPIAPKANDAYAHLALMDRTKYVRLLKRDVRGKVRYFVQLIQEGYPPTKHNRKIADDETKRVGLDIGPSTIAISSEKAVELRELAPGCSMDGKELKRIQRKMDRSKRTTHPHHFDENGRIKKGRLTWNYSNRYEKLRQKRKELYRKIRVKRKMSHEKLANDILSMGSDIRVETMRFQSLQKRSKKTTRNKKNGKMNCKKRFGQSLANHAPAMLLTIIDRKLGYQGRVVKKIDTYAAKASQFNHITGEYTKKQLSERWNDVGMFRIQRDLYSAFLIENTNETLNSVDVDLCSAQWDRFVELHHREIARLKQSAGKTLRWFVA

SEQ ID NO: 53476 - protein, 385 aa, unknown
  TnpB Polypeptide
LLRSFKTEINPTDEQIIKINKTIGVCRFIYNFYIAHNKELYENGEKFISGRHFNVWLNNEYLPNNPDKRWIKEVSSKSIKKSVEDAYIAFKRFFSRKSKFPRFKKKNNSDVKMYFVKNNKTDCLSERHRIKVPTLGWVRLKEKGYIPTSKDGFIVRSGAISHKAGRYYISVLIDMPDIDNIQCNNFGIGIDLGLKEFAICSNGSIYHNINRTNNVKKVEKRLKREQRKLSRKVVVIKKGEACGENLVKQKLKVQKLYQRLTNIRTDYLNKTIHSIVKTKPAFIVIEDLNVRGMMKNRHLSKAVAQQKFFEFKTKLISKCKEYDIELRVVDRFYPSSKLCHNCGHVKRDLKLSDRTYKCSECGYIADRDINASLNLRDANTYTVVH

SEQ ID NO: 53477 - protein, 259 aa, Bacillus sp.
LPKLGFVRFVKSREVKGRIVNATVRRNPSGRYFVSLLVETEVQELPKTNSYIGIDVGLKDFAILSDGTTYKNPQFFRSLEEKLAKVQRVLSRRTKGFSSWNKQRVKVARIHEYMANARKDYLDKISTEIIKNHDVIGIEDLQVSNMLKNHKLAKAISEVSWSQFRAMLEYKAKWYGKQVIVVSKTFASSQLCSCCGYQNKDVKNLNLRKWDCPSCRTHHDKDINASMNLKNEAIRLLTARTAGGVQAPYLGAYKQIDLP

SEQ ID NO: 53478 - protein, 418 aa, unknown
  TnpB Polypeptide
MIITHCYRIQPTAEQEVALLHTLELLRRHWNYALGQRLDWLRQTRCQIDRCSLVSEPIGEISIRVDYYTQQADLKQTKVLFPEYKDIWAEAQQVNLQRLKKAWERWMVPDASGSRGGRPRFKKPGELRSFVYPRVNDKRAGAHLKDGVLKLSKVGEMPVIMHRPLPEGFVLKTCTIVRKADGWYCCISMQDDTVPNLLPLDEVQNAIGVDVGLKVFLSTSDGQTVPIQQTYRKAQAHLARQQRRLTRKSNKNSKNAIKQANRAARIHQRIQRQRKDFHYKIAHWLVKTYDLIAVEALNVKGLARTRLAKSILDAAWSEFITILEAVGVKSGVRVVKVSSYGTSQDCSGCGVKVPKDLSIRTHECPKCGLEIDRDVNAAVNILSRALSAVGLTVPGCRGLDVGQPMKQQVLEVTLRSSR

SEQ ID NO: 53479 - protein, 402 aa, Chloroflexaceae sp.
MIVLEMKAVVKPSQCAAIDDAIRTVQFIRNKALRLWMNAKREDRIDKYSLNKYCALLAKEFKFADELNSTARQASAERAWSAISRFYDNCKKGVKRKKVRNAAGYPKFQKNNRSVEYKHSGWKLSENRKKITFTDKKNIGTLKLKGTRDLNFYPLDQIKRVRIVRRADGYYVQFCINLDVREYAKPLEPSKKCVGLDVGLKIFYADSDGEMVETPKYYRQAEKRLNRLNRKKSKKFKGGQPQSNNYKKARKRYARKHLRVSRQRKGFVQREALRVIRSNDLVVYEDLNVKGMAKNSKLAKSINDAAWSIFRGWLEYFGYKYGKVIVAVAPHNTSQDCSSCGEKVPKSLSTRTHVCSHCGYAEDRDVNAAINILKKGLSTVGHTGTHAWGEIPSGLAGYVLPN

SEQ ID NO: 53480 - protein, 269 aa, Streptomyces sp.
VVPHAARHPHLRHRRQGRGRQVLRLLRHRHRPCRRPGADARDDRTIGIDLGLTLPQTPSGGTPIAVLSDGTKIDSPRFLRRAEKKLKKAQRELSRKQKGSKNRAKARLKVARAHAGVADARREFHHRLSTKLISENQGIAVEDLSVAGLARTKLAKSVRDAGWASFISMLSYKAERYGRTLIKIGRFTPTSRTCSTCGAVDGPKPLNVREWTCTACGTVHDRDHNAAINVKTAAGLAVSACGAPVRPGAIPAQREETGSRGFPTEPRAA

SEQ ID NO: 53481 - protein, 382 aa, Escherichia sp.
MRRFAGACRFVFNRALARQNENHEAGNKYIPYGKMASWLVEWKNATETQWLKDSPSQPLQQSLKDLERAYKNFFRKRAAFPRFKKRGQNDAFRYPQGVKLDQENSRIFLPKLGWMRYRNSRQVTGVVKNVTVSQSCGKWYISIQTESEVSTPVHPSASMIGLDAGVAKLATLSDGTVFGPVNSFQKNQKTLARLQRQLSRKVKFSNNWQKQKRKIQRLHSCIANIRRDYLHKVTTTVSKNHAMIVIEDLKVSNMSKSAAGTVSQPGRNVRAKSGLNRSILDQGWYEMHRQLEYKQLWRGGQVLAVPPAYTSQRCAYCGHTAKENRLSQSKFRCQVCGYTANADVNGARNILAAGHAVLACGEMVQSGRPLKQEPTEMIQATA

SEQ ID NO: 53482 - protein, 397 aa, unknown
  TnpB Polypeptide
MSRYRLLPTPAQEAVLRGHCGHARYVWNLAVEQHSHWRAGRTSAPGYLEQCRQLTQARAAHAWLAAGSQMVQQQALRDFAAAMAAFFDRRNPARRPTWRKAGCDEGFRVVGKRGRQWDVRRLSRKSGEVWVPKAGWVRFRWSRPVPSEAKSYRVTMDRAGRWHVAFAAIPGPVPAPGTGQVVGIDRGVAVSTGELFTVPGLTARERARVWRLERKLARCRRGSARRGRVRLALARLRARETDRRKDWAEKASTGIARRFDLIRVEDLTITNMTRSARGTRQEPGRNVSQKAGLNRGILRSGWGLLVRRVEEKAPGRVEKIDPRYTSQRCSACGRVDPKSRESQACFVCTACGYAGHADVNAARNIAAGHAVTARGGDGAARPVNREPHLLASLTGRE

SEQ ID NO: 53483 - protein, 540 aa, Streptomyces sp.
VRRKIQLAEGETERLACASASAFRGLDTVTGEVLGAEALAGRVGWLTSLVETLCTEVTAAHWNRPDLARLASGRDRSGARLPSNAWMAVRTLGWGASVPEGLYVPDRVCRVAEEQAGRALRSAWWRSEITDAVLATWPTGPDADPMRRTETEWAALRAACPDGQAVAASVLRARTRQVVAFHVAYGHLPVDVCALESAPSGGRQVVLAAADKQLCTLTRCPDDPARYGVLNVRLPVRPDPRTRADWHPAVIRFRLPPTIPLGAALHAPTLRLRSGRLRLDVAFTSAAPTTRAGGHTRAVAFDYGLNTLLTGGTLTLTGGAQPTVLTDGHPVFFRPDGVLAKADRLRLLGEQLWTKTVHLQALLDGRTMAGQWPEPLTTAKLAVLQAEHAAVSRRRTKLNEQLAKAAARFMVETARAAGATVIYLEDLRDMEARGKGRTLNTRLSSSVRGQIVAHTRHQAAAHGIAVVIVPARGTSKYCPRCLSVFRHHAAPDNPKPGWKWATCPDTDCGYSADRDVAAWQRIGARGLTHQRTTVLDRSSG

SEQ ID NO: 53484 - protein, 398 aa, unknown
  TnpB Polypeptide
MKRAVLLQTLATDSKNKQLGAFMDSAISEYNRLLSERERCNTFMQFHRKTLSASKQNTSFNVQVRCSLIRDAWKKKADKVNGLTVKFNIPRNCKTFNTKSNFFVRLGLYPRNRIAIPIKKNRNYQRFQGLIKDDWVCKTVGLTKDLQIVAYLFKEKDITQRKNILGIDVNAKHFAVSVISPEGKILYQTYLGKHIWVKRKKIMERRARLQTLNAVKKLEKLKHKERDFVKTNLGQVVREIIKLAIKYNADISIEKLGRFGVKGRRFNRTVMRIPFFKFRQILEQRCFDYNIQLNIVDSWHTSKWCSHCGALAKGHSSNYSLFKCKCGQVVNSDRKASLAVAIKSLLERKDTTNTSNSIQISKWRGSVNNLIRPNAFGDLRSVNHTSSTYGKPTSFSRG

SEQ ID NO: 53485 - protein, 552 aa, Coprococcus sp.
MHTLKLLLKTTKEDDIFIESVYRAVVDVHNILVSEGKKRLRMLFRDKRYQYAKTHYGEAAAEVQKLDKKIAALEAKIGGCQDDLSKKDLRKKLKPLKADRKQAEDARKRFSAELEESRNEYGTFENSMETFATRLNQKYKGILNSQQIQIEADRVWSGMSKVIFGDGKDIHYKKYRDFRTVCGKQNTTGIRFLKDVLSVSWLGHTIPIAYRKKLDDAAVNGTKNRDLAYKLASLSGEIKYCEILREEFKDGYHYYANLYIDGEAPKKLTPGKGRCGLDPGVSTLAVTAEKKIFLEELAPDYKKYDKAIFKLQRQANTLRRELNPQNYAEDGTVIRMKPGQKRIWHTSPLYEKIMQEIRVLYRKKSAYIRQSHSGLCNKLLAYSDVFLIEGMDFAALAKKAKETSRSQKKSVVTMADGTKKEIHKFKRKKRFGKSVNNRAPAMIIQILKRKCVQYGLVAQTTDTRTMKASQYDHTSGECTKHTLNDREVVLSDGTHVQRDLYSSFLHQHADAELKHPDREACIRDFPAFMKMHDQLIAEMKASGISMKQCFGF

SEQ ID NO: 53486 - protein, 543 aa, Coprococcus sp.
MKRYYCSTYVKKRDVSDEVNKRIADDLALFAAIKFENFSILNHASDKNSKVIIAGTPHVYLKDKYKVSDYFVTAVEGNVRMVRNSQKELLEMYIDDINADIKSLAKKEKDLNARLGSLKKMKASLILYTKNGGKKRSDIKNFKSSAISFKPDGTVSVGIGKHMTVYKNIWLFEHVYLDKKIRQIQRALDHVKKKRRRKEHKLLKFREQIETGRYSIYFGSRELMHKDIPKPQKDKMIKKKRQGSMTLSGRSDANNGNFMVSYDTKSHELSYRGSAASGRQDKDFHRKNFLPVGKVEFGYGQALIDRLIDEHQTPVSWTITDCGNAWRFDVCVTIKDDRKNDFYGNGCIAMDINWDRIAVTELDGEGSLLNKKVIPFKMEDLSSEQTGHQISNALEAVFAICCEKKKPLVAEDIGRTKRKQDLYSKTAKKNRRISMFASKKIRTLTESKSFKYSVDVTFINPAYTSQTGKVKYMRRFGMSIHEAAAYVIGRRGLGIIDRLPLIYRQQLKREHASLPRLTQWARAYKFTKAVQAAAMYQVDELPF

SEQ ID NO: 53487 - protein, 154 aa, Saccharothrix sp.
VQGSANRAKARLRVARVHARIADRRRDLLHKLTTRLVRENQLVVIEDLAVRNMLRNRSLAHAISDASWSDLRSMLEYKCDWYGRDLVVVDRWLPSSKTCSDCGHLMDTLPLGVREWTCPGCGVSHDRDVNAARNILAAGRAVTACGAGVRPTRR

SEQ ID NO: 53488 - protein, 250 aa, Saccharothrix sp.
MLAKMAEPLDIVWSRPLPEGAEPSTVTVSRDPAGRWHVSILVETTIIHAPPTDHVVGVDAGITSLVTLSTGDKITNPKHERRDRERLARAQRALARKEKGSANRVKARLRVARVHARIADRRRDLLHKLTTRLVRENQLVVIEDLAVRNMLRNGSLARAISDASWSDLRSMLEYKCDWYGRDLVVVDRWLPSSKTCSDCGYVLDTLPLHVREWTCDCGARHDRDVNAARNILAAGQAVTACGAGVRPTRR

SEQ ID NO: 53489 - protein, 402 aa, Saccharothrix sp.
MRTAYRCRAHPDQEQIAMLSRTFGCVRLVWNKALAERRRRHHAGSERTSYKETDAALTQWKRTEDLSFLSEVSSVPLQQTLRHQHAAFQNFFAARARYPRFKSRNGRQTAHYTRSAFRMRDGNLVLAKTAAPLAFVWSFDHVDLATLDPTMVVVSRDPDGRWFVTFAVDTDDPEPQPATGHAVGVDLGVKQFLVTSDGDQVANPRHLEARARNLARHQRRLARCQRGSNNRRKAKTRLARAHRKVRDARRDFLHRTTTNLVRSADVIAIEDLAVKNMVRNRRLARAISDTGWGEFRRQLDYKAARAGRTLVVVDRWYPSSKKCSVCGHVLAQLKLSVRHWTCPDCRTRHDRDLNAARNILAAGRAVARGDSGDACGADVRRQGPSLPLSAMKQETPIARCGA

SEQ ID NO: 53490 - protein, 463 aa, Saccharothrix sp.
VKVTRIAYSRNLNAGKYALLVEQARRLGRVRSEVWQRYGSVSGSRLSDRQIRDQWMAAGTAARFGVLANAWKETLRDAVGDITANRAAAKAHVRKVVSRRVVDVAERKRLFSALKTDTWAEDPFLSRLMRKHRKRGRNRTHNQIVIRSDQYRTFTLTGGGDSWLSVPGVERRQSVLIPLDTTVAPSGTLRLILRDKRVEVHYQIDAFSLRSSKRPAGGSEIGVDKGYTEVLTDSDGVHHGTELGRLLSSESDHRKVRNVRRAKIRSVAERDRGAGGHDKAQRIARHNLGTAKRDRRSSRWRQTVRTVTFRAVHAVVDKAALVAAEDLTRTFTGRVRRGRDVNRRLAAWTKGVTAEALMNVSERRGSALTLVNAAYTSQVVPCCDALGRRSGDRLHCTRCGVVWQADHAAAINVLHRVGDPDITLHTPYRRVGSIVRERADRRSDQTADPGLQSTSWAESELSE

SEQ ID NO: 53491 - protein, 388 aa, Saccharothrix sp.
MASVSVVKRAFRYRFYPTPGQEVELSRTFGCVRVVYNRALEARTAAWFGEQRRVNYVQTSALLTEWKKTDGLSFLNEVSSVPLQQSLRHLQTAFAAFWEKRSRYPPAGRWHVSILVETTVDHAPPVDRVVGVDAGITSLLTLSTGEKITNPRHERQDRERLARAQRALARKEKLSANRAKAQLRVARVHARIADRRRDLLHKLTTRLVQENQLVVIEDLAVRNMVRNRSLARAISDASWSQLRSMLEYKCDWYGRDLVVVDRWFPSSKTCSACGLLLDMLPLRVREWTCPGCGARHDRDVNAARNILAAGQAVTACRAGVRPTRRQSARHPVKPPSGEEAGTAGREPGGHSPLQGGEVVNAPGAPTSSPTPPHPPRSRPTRRTRPARG

SEQ ID NO: 53492 - protein, 575 aa, Saccharothrix sp.
VVSANAVGKALRHERVIFPMFVHTFDSVGCMGVVRPSRSIAASYVVPGPSGVSVRDRLRGLTVEDERVLRLLGRHLGSLASGDLKVRCADGSGHSAGRWAARKRELTSGSSSRWAGSITKSTHDQWALARRCRAAHVRALETGVAMIRHRLSLPVGAPGGKGAPGGYRSKHEWFVKSRRLAALADRLTAVQGDLGAGRVRVVRGGRRLLNTRHHLGEAGLSGQQWRARWEAARWFLSADGESGKRGGNETIRVTLDGEVSIRLPAPLAHLANARHGRYVLASSVEFRHRGGEWADQVGNDLAVAYRVHHDADRGRWYITASWQRPPTPAIPWDTARAAGVVGVDFNADHLACHRLDRHGNPVGGPHRFFFDLSGTAAHRDAQIRHALTRLLHWAEQTGVTAIAVEDLDFSTEKTREKHGRRKRFRQLISGMPTGKLKARLVSMAAVTGIAIVAVDPAYTSRWGDQHWRKPLTTGKRTMTRHDAAAVAIGRRALGHPIRRRTAPPHDDRSDRRGHRTAQTAPGDRRRDGNRPPTTDHAHRSVPPNGTRTRRPSTSTTVRDVRSDQQRVQDPLLLAD

SEQ ID NO: 53493 - protein, 177 aa, Saccharothrix sp.
VSSVSVVRRAFRFRFYPSAAQEVELLRTFGCVRLVYNRALEARTAAWFGEQRRVNYEQTSALLTEWKKTDGLGSLNEVSSVPLQQSLRHLQTAFTAFWEKRSHWYGRDLVVVDRWLPSSKTCSACGHLMDTLPLRVREWTCPGCGASHDRDVNAARNILAAGRAATACGAGVRPTRH

SEQ ID NO: 53494 - protein, 408 aa, Saccharothrix sp.
VFVKRAYKFLLRPTAKQVQALSEMLRDHCSLYNGALQERRDAYRHPSVTTVRYGDQSAQLKEIRAFDPERQGRWSCSSQQATLRRLDKAMRAFFRRVKAGRTPGYPRFKGVGHFDTVEFPKDGDGCRWDSAPHYRQTRVRLQGVGHIRVHRHRPVHGRVKTVSVKREGKRWYVILACDDVPDARLPATGSLVGIDMGTVHFFTDSNGNHEENPRFLKAMADVLAAAQRVLDAFPKRIRRRTRKHRAAARKVARLHSKIQRRRLDHHHKAANAVIAKHDVIGHEKLNTAGMTRAPAPKSDPDNAGSFLPNGAAAKAGLNRGILDAGWGLFFRILANKAESAGRRVIAVDARNTSRTCPPSAGGCGHVSAENRTTQAKFECVKCGFRENADRVGALNVLHRAGLALCAGA

SEQ ID NO: 53495 - protein, 431 aa, Saccharothrix sp.
MVGRISVKRAFKYRFYPSESQEHQLLRTFGCVRLVYNKALEARTISWYEQHRRVNYGDTSAMLTAWKKTQDLAFLNDVSCVPLQQCLRHLQGAFTSFWKKQARYPKYKSRKRSRASAEYTRAAFRWRDGRLTLAKMAEPLDIRWSRPLPEGAEPSTVTVSCDRAGRWHVSILVETTIEHLPPTTAEVGVDAGLTALVTLSTGEKITNPCHGKRDHARLARAQRALSRKQNGSNNRVKARLRTARVHARIGDRRRDFLHKLSTRLVRENQTVVVEDLNVRGMMKNRSLARAIGDASWAQLRSMLEYKTRWYGRALVIVDRWYPSTKTCSRCGHLLDRIPMGVREWTCPGCDTTHDRDVNAATNILAAGRAAAACGVGVGPTRRQSARHLTQPSPRGWKKQELPGVSLAESRPVGRGGRQARSAEISPSMRPA

SEQ ID NO: 53496 - protein, 454 aa, Saccharothrix sp.
MASVIQAFRFALDPASAQDAVLRSHCGGQRYAFNWGLARVKANLDQRAAERTYGTVADGLTPSVSWSAYSLRKAWNQAKDEVAPWWAENSKEAYSSGLVNLATAPGNWADCGTGRRKGRRLGFPGFKGKRSGLSCRFTTGAFGLTDRDRRHVKLPRIGLVRTHESTRELARHVERGTARIRSASVSHRAGRWFVAFSVEITRADPAPTRPDTTVGVDLGVTSLAVLSTGETVPNPRHLESALRELRRLQRRAARRVGPDRRTRRQPSARWRNTQARIGRLHTQVANARRDGLHKLSTRLVRTYGTVVVEDLNVSGMTRNRRLARHVAGVGMAEPRRQIEYKATWSGVNVHVADRWYPSSKTCSACGVVKAKLRLSERVYHCDACDLVLDRDLNAARNLAALAQRETSSPSCGATANEPDGNPRKTRTTRATGTTTGRPAPTDAGQRRRRKATAA

SEQ ID NO: 53497 - protein, 456 aa, Saccharothrix sp.
MGGGVVIHAYRFVLDPSPGQDDALRSHCGGRRYAFNWGLARVKANLGQREAEKSYGIPADRLTPSVSWSAYSLRKDWNRAKDAVAPWWAENSKEAYSSGLANLATALGDWADSRSGKRRGPRVGFPGFKGKRSGLSCRFTTGAFGLIDGDRRHVKLPRIGAVRTHESTRKLARHVERGAARIRSATVSHRAGRWFVSFSVEIARDDPAPTRPDSAVGVDLGVKSLAVLSTGETVPNPRHLETARRDLRRLQRQAARRVGPDKRTRRQPSQRWRTTQARIARLHTAVANARRDGLHKLSTRLVRTHGTVVLEDLNVSGMTKNRRLARHVAGVGMAELRRQIEYKAAWSGVRVHLADRWYPSSKTCSGCGAVKAKLRLSERTFRCDACGLVLDRDLNAARNLAALARRETSSPSCGATINEPAGNPRQTRATRATGTATGRPAPTGAGQRRHGNVSTA

SEQ ID NO: 53498 - protein, 467 aa, Saccharothrix sp.
MTEPKKKPLRTIDAPFVALGLSGVSIRDRLKGLTAEDENVLRLVGEHLGSLASRDLKVRCAAGLDHCTDTWAGRKRDLTAESSSRWAGSITKATHDQWALARRGQAAHLASLDAGIRTVRHRLSLPLGEKGDRKGSGGYRSRHEWFVKSRRLAALEQRHAAVLADREAGRVRVVRGGRKHLNTRHNLAAANLTEADWRQRWEASRWYLDAAWTRPVVQTIPLDTARANGMVGVDTNADHFAAYRLDSHGNPVGKPHRFFYDLSGTARHRDAQVRHAITRLLHRTTRCGVAAIGLENLDFTDEKTREKHGRKRKFRQLVSGIPTGNLKARLVSMAAEHGLAVVAVDPAYTSMWGAQHWQKPLATPRRTITRHDAASIAIGRRALGHPIRRRTAPPPHHRSDDAGHRTAQAGPGDRGREETRRPVTDRAHDARSRTGTTSRTRATSASTTVRDARSAGQWVQHSLLTTD

SEQ ID NO: 53499 - protein, 377 aa, Saccharothrix sp.
VVKRAFRYRFFPSVAQEVELLRTFGCVRVVYNRALEARTAAWYGEQRRVNYAQTSALLTEWKKTDALAFLNEVSAVPLQQPLRHLQAAFTAFWEKRSRYPRFKSRKRGRASVEYTRSAFRWRDGRLMLAKMAEPLDVVWSRPLPEGAEPSTVTVSRDPAGRWHVSILVETTIIHAPPTDHVVGVDAGITSLVTLSTGEKITNPKHERRDRERLACAQRTLARKEKGSANRVKARLRVARVHARIADRRRDLLHKLTTRLVRENQLVVIEDLAVRNMLRNRSLARAISDASWSELRSMLEYKCGWYGRDLVVVDRWLPSSKTCSDCGHLMDTLPLRVREWTCPGCGASHDRDVNAARNILAAGQAVTACGAGVRPTRH

SEQ ID NO: 53500 - protein, 428 aa, Saccharothrix sp.
VLSGRRYRVDFTSDQATFAENIGTTCRSVWNTALEQRRLYGARGSWISYREQARQLADAKASFPWLAQPPSHTLQQTLMDLDKACTTHGTWNVRWRSARSWSPSFRFPDPAQITVQPLNHNNAQVKLPKFGWVRIRWSRPLGGIRSATIRRESGRWWISILVADPDETPEIHAHPQRAVGVDRGVKTLAVTSCGEFYDQSYASPREIEHCKDLQRRVAGTEKGLNRRKAAVARLNRTLGRVRRRRQDFTTKVGRTMARGNSLVVFEALRIKNMTASAAGTPDQPGRRVRQKSGLNRAILDKGWHRLEAACRSAARRTGSRVVTINPAYTSITCSSCRHVDRRSRESQADFRCTACGYRCHADVNAAVNILTAGRAELGHETRERELGRANPDNRGRKAQRQPTAAQRFSPIGLVEIPRCIPREDVNRG

SEQ ID NO: 53501 - protein, 392 aa, Lechevalieria sp.
VSKTLVKRAFKYRFYPTDAQAAELSRTFGCVRLVYNKALEARAAAWTQNQRRITYGDTSAMLTAWKKTEELAFLGEVSSVPLQQTLRHLQSAFSHFFTRRARHPRFKSRKKSRASAEYTRSAFRWRDGRLVLAKMSEPLAIKWSRPLPVGAEPSTITVSRDSAGRWFVSILVETSVDHYLPTAGAVGIDAGLTTLVTLSTGEKVTNPRHERRDRQRLARAQRALARKQKGSANREKARRAVACVYARIADRRRDFLHKLSTRLVRENRTIVIEDLNVSGMLRGRQARAISDASWSQLRSMLEYKAAWYGRDVIAIDRWYPSSKICSACGTLTGSMPVSVRVWACRCGAIHDRDVNAAKNILAAGLAVTACGDGVGPTRHEPVRQPSQPPYQG

SEQ ID NO: 53502 - protein, 417 aa, Streptacidiphilus sp.
VHLRYAYRIYPTAGQRTALARTFGCARVVYNDALAARKEARKSGLPYPKSTELQKQVVTAAKKTAERAWLASVGVDPLIQSLRDLDTAYRNFFDSVSGKRQGRPVGLPRFKSRKDARQSLRFTRNGFRVRSNGKLNLAKIGDVRVKWSRALPAEPSSVTVVLDPSGRYHASFVVDVESDALPELDTEIGIDLGLTTYAVLSDGGVIDNPRFLRKAEKRLKAAQRELSRKAKGSKNRAKARRKVAKVHAKVADTRLDWLHKQTTKLIGENQAIYLEDLNVRGLGRGRLAKSVHDAGWSTFRRLLEEKAARYRRIVGVVHRAFPSSQLCSACGHRDGPKPLAVRAWACGSCGVLHDRDLNAARNILAAGQADRLNAPGGPVSPSVAIPRQARPVERGTHLRDLPRTGVRAAGAGGIPVL

SEQ ID NO: 53503 - protein, 377 aa, Tissierella sp.
MIKSIKIRLIPTFDQEILMKKSVGVARFSYNFGLAKWEELYKKGEKPTGYTIKEIFNNTIKKQEEYSWIKQVSSQITAQAFADLQDSFNSFFKGKTKYPNFKIKKKSRQIFYVRYDRMNIKNNTVNIEKIGRVKYKTNYTIPKLKTYINPRCHYDGKYWYLTFGFEQGENQVELNKDLSIGIDLGITNLAIVSHLDQPIKNINKSSKVKKLEKKLKRLQRKVSRKYEMNKNGKEFVKTNNIIKLEKQIKLIHRQLTNIRTNHIHQATNAIIKLKPYRVVMENLNITGMMKNKHLSKAIANQKLYEFKRQMKYKSQFNGIEFVQVDRFYPSSKTCSRCGNIKKDLKLKDRTYSCECGLNICRDKNASLNLSKYQLKLA

SEQ ID NO: 53504 - protein, 470 aa, unknown
  TnpB Polypeptide
VVRNDAKLAADLAQVTAVQPAAAGRRAGVTMPEFLVTGKSGRSRKEFLVQHNVVTAFRSWQERIAAANGESGNYVSQGWKRTIDASPPTYGEGDFINLGAVDKQYAVIENNPVADGEVVLRMVICGQWYRLIFSFNNKRFTEGKVTLPVIKIENNQPVFIFSVVTDNPIVQFSGDYAIGVDVGINDYATVVVRNSATGKIVRQTTLSQRVHSLWNSVRASERQVRALNKKADKLLYQRQAHMAAVDEAEFHREAASRKKRELAILAAQEIADLSHQYDNAVVAVEDLSWIRNTMQNGRWNRGAFTQWLTHYVSQNGGWVVAVNAANTSQVCHMCGAKVAHPKHKVSACLEHGVMDRDVNAAANIAARAVSRVEKARKTRAKNRKLQRKVQLKTPPTRETLKYPGCDRTKNAPTPKRKNRTSKGVNLSISPARVIVTTVLADCGTYGVAETSKAAINQDYITHKCRLCSLS

SEQ ID NO: 53505 - protein, 499 aa, unknown
  TnpB Polypeptide
MDLNGVLLDSASVMAELAAEVRDISAYATFVVRNDTKLGAGLTQPSAVQPAVAGRRAGVTMPGFLANGRTGKSRKEWLFRHRVVTEYRSWQERIAAANGESDKYVSQGWKRTVNASAPSYGEGTINLGAVDRSYAAVENNPFKDGEIILKLVVKGNWYRLIFPFDNTRFHEGKVTLPLIKIQDNQPVFIFTVVTDNPVVQFSGDYTVGVDVGINGYATVVVRNTKTGKIAYKTTLSQRVHSLWNSVRASERQVKQLNKKADKLIYQRQAHMSAIDEAQLHREAASRKKRELAIVAAQEIAYLSHSYGNAVVAIEDLGWVANTMQNGRWNRGAFTQWLSHYVAQNGGWVVAVNAANSSQVCHICNEQVTHPIHKVSLCPKHGVMDRDVNAAANIAARAVSKVEKARKTRAKNRKLQPQARLKTPIARASLKYPGRDRTKNAPTPKRKKHISKGVNLPISPARVNSTTVLADWDASGILETSKAAIKQGNVAYGCKLYSLN

SEQ ID NO: 53506 - protein, 456 aa, Carboxydothermus sp.
LYNIVRVVKTLKQIITIQARLFPKAEKNEVVDNLMRKWNSCKRYAYNRLLEGKARKELKKELQSIFALNSRYVDDAILEANEILHSIRELGENPRKVIFGGKALFYRLKSKHLSSKQRQKHKKEWEDKRKGTLFSRGDKTKQGNLNLRVIEEKGQFFLRINTGNREWLFIQLKSSHKKWRKFAEAMLNSCPYSVRLQRKNNKYYVYISFEEDLPCASIDFSNGAIGIDLNAFPSHIAWAEIKKDGNLKSFGEIPTPHLWDGRKEKRDYYAWVYANEIVKLALKKKKGIVIEKLAIKDKGYRGDYKGRKSRRIKHSFSYRKLINRIKTLAQRYGVAIREVSPAYTSVIGMLKYAPQFNLTKDTAAAYVIARRGLALREKIPLKYRELLKSLQSKSRSVSSLTEGRNEGTAVKGKTLPYKSWRVLRVALLTGALLDRPLYRDLSPLKRILVSGMGEGG

SEQ ID NO: 53507 - protein, 358 aa, Lactobacillus sp.
MNERYQNNKALPFLGKFKLNYLLKPLKKEYPFLKNSDSSSLQVVNEFLTQSWKNFFQDKTGQIGKPRFHSRKYLKKSYTGKSIIKTAGKRYLKIPKLGYVKTSKTGVLQNTKVKRYTVVLEPTGKYYLSLQAEIPEPEEYSLTDKQVGIDVGVADLAILSNGLKYPSFNSSYFEKKAKVWQRKYARRRHLAKLLVLQDRNKKVLCPRSLESFANWQKAQKSKAKCQAKAANQRRDYLHKLTTHLVKQYDVIAIEDLKTKNLQKNHHLAKSIANASWRMFRQMLEYKCKWYGKKLIAVDPKNTSRICSKCGYNSGAKPLEIREWTCSKCQTKHDRDINAAVNILHKATPTGQGLAMVTS

SEQ ID NO: 53508 - protein, 409 aa, Lactobacillus sp.
MFDIILKRKEGTNVLKGIKLRLYPNRTQQNQLEQMFGNDRFVWNQMLAMMNEHYQNNKALPFLGKFKLNYLLKPLKKEYPFLKNSDSSSLQVVNEFLTQSWKNFFQDKSGQIGKPRFHSRKYLKKSYTGKSFIKTAGKRYLKIPKLGYVKTSKTGVLQNTKIKRYTVLLEPTGKYYLSLQVEISEPEKYSLTGKQVGIDVGVADLAILSNGLKYPSFDSSYFEKKAKVWQRKYARRRHLAKLLVLQDRNKKVLCPRSLESFTNWQKAQKSKAKYQAKAANQRRDYLHKLTTHLVKQYDVIVIEDLKTKNLQKNHHLAKSIANASWRMFRQMLEYKCEWYGKKLIAVDPKNTSRICSKCGYNSGAKPLEIREWTCSKCQTKHDRDINAAVNILHKGSTKLNGQGLAMVTS

SEQ ID NO: 53509 - protein, 380 aa, Lactobacillus sp.
MPFAFPILNDYEAKLAETVVANDELLAKPKNIRDTYSFLRVKEIDSLALANAIQNYRKAWNHYRKIGHGIPTFHKKRSDWSYQTNCQYIKQEEAYLDNGTAKFIDAKHVKLPKLGVIRIAGLRKLIKERLLKHVPTRIGTVTIKKTAGDQFYLSMQLGSDITFAQKLPKTQSQIGIDLNLDNFLTDSNGAMVANPRFYRQAQKKLAHAQRVLSRRQRRVKQEGRNLRTAKNYQKHRLVVARLHDKIRRQREDFLQVLSTALIKKHDLVVAEELRSKNLLKNHALSQAISDVGWRRFLNMLAYKAKLYDKEFITIDPKYTTQRCHQCGTIMGQNGCRKLKLKDREWTCPMCQTYHIRDWNAAVNILEKGLGNWQNHKKQTA

SEQ ID NO: 53510 - protein, 405 aa, Lentzea sp.
LSFVRTAYKCRAYPTPEKAAVLSRTLGCVRLVWNKTLSERTRRYHTENAPTSHRGTSATLTTRRRGEELAFLSEVSCVPLQQTLRHQQAAFQNFFSGRTRYPRFKSRTARQSAHHTRSAFRMRDGSLVLAKTSSPLRFIWSFSHIDVTELDPTTVIASREPDGPWYVSFAMDVPKPAVPQPTSRAIGLDLGLATFLTTSDSVRIATPRNLARKARSLARHQRGLARCQRGSNNRHKAKAEVARTHRKVRNARRDFLHRTSTALVRSADMVAVEDLNVAGTVRNRRLSRAISDAGRGEFRRQLEYKCERAGRTLVVIDRWYPSSKTCSNCEYLLVESKLSARHWTCPSCRTRRDRDFNAAKNILAAGRAVARDAPGDACGADVRRQGSPLPRSVVEQEARGRSSGS

SEQ ID NO: 53511 - protein, 329 aa, unknown
  TnpB Polypeptide
LESAEKSLIERSKKGHKTGQLRFARYNEFRTFTYNQSGFKLNNNKLFLSKIGDIRIKRHRDTPDNIKQVSDKNKIMQMVCILTCELVKMNPPKINFTKVIGIDVGIKSFAYDSDEHNTPNPLNLKKMLKPLVRAQRKVSRRKKGSNNRLKTIQHLQRIHERIVNRRKDFQHKLSSTYANHYDVIFVEDLQLANMIKNHKLARSIMDSSWGAFLQKLEYKCKMMLKVPARDTTINCSRCDNKVPKSLAVRIHRCDKCNLIIDRDYNASINILQKGLEIFNLSAKAEYQTTAGTAGSNACRDFKEIYEAGSQHLLDVGSSQTIIRCTQQKI

SEQ ID NO: 53512 - protein, 440 aa, unknown
  TnpB Polypeptide
LRATYEALAQAPGQKDFGGHVRVNQAFRFELSPNAAQRRALAQHIGAARFAYNWGLERSRKALEEGKRLPSAAELHREWNRWKRENAPWWTEVSKCAPQEAFRDLEKALKNWRKGKSRFPRFKRKKLTPDNGARLTGSIRVFSRHIGLPRIGKVKSKEPTDKLLKLLEEGKARILSATLSREADRFYVSLTCEVERPDPKPKEVRSEDDVVGIDLGLSSFATLSDGTKIDPPKPLAKRLRLLKRRSKQFSRKEKGSNNSKKAALALARLHRKVKNLRRDFLHKFTTWLARTKPVVVVEDLNVKGLSRGPLSRFVADVGWGTFLRMLEYKAKWYGATLIVAPRSFPSTRLCSRCGHLQGRMPLSQRVFRCQACGLEMDRDLNAALNLKAYGLAHLMGPTASSAGSHACGDPSGGGTALLGWSTSHGSVKQEVAHRHHSLEG

SEQ ID NO: 53513 - protein, 537 aa, unknown
  TnpB Polypeptide
MKATIGFIPTKVKNSSNKAKKGKELIVPKLYTHSCAVGQTGCGKTTSYIYPNLNERISLNDGILVMDYKGKEHNAVKVFANRHNRLNDVVEIGKPWGESINIIKYMSEANLEDFIMGIIGLKDGKNDYWSSSGTNIGTACLNIIGKLENLIYEMKQINNQNSLIHNCFKTNLNSNNKDLGYLKGIPIVKNIKSLYEITASTDSLKLFGSNLDNLCSHIQDGIKNTIFTDDVDMELIDIHDKYKNILEAFCLLEDSIKKYYPSIETFVKDRSSSNTNLTSLLTAINKPLAAIATKDYLNNDNYLEKKLQGLNRHNKKLRRYQQSLSRKKKGSCNYNKQKIKVAKHHQKMVNIRTDFYHKESTRIVLESDKIMVENLNIKGMVKNKNMAKSISQQGWGQFITMLKYKSQWYGKTLIEVDRFYPSSKICSACKQYNSAIKREDQWVCQYCKVKHQRDENATKNLLEYEKYTKVGKIYIHNSYIEKNNSSKNQAELKNIKNKEKNLPASGGEDKTVEIYKTNNIPSNIIGNINETVNGNLH

SEQ ID NO: 53514 - protein, 374 aa, unknown
  TnpB Polypeptide
MKAHRALLIRLPKDKCNIDYIKRLITLTNLAYRDYEVWVPDLPKTIQHHLYGFKSYKNSLVFGTVPKRWFTRAWVPLKTVRVYGDGSMMGDRNALVVLDFRGNAIKLRQVCRNEPGYSIELTMPIWVIDRIKEGGVIKYAMIGLKDDKPYLALIVEREVAQYTPSEYRLVVDVNSWKYGISWGLIRNGRIVSYKQKGLNLGRYYGLYNEVVRLGRKYGELKRSGLHKTTEGRRLWKRIKAMHARLYAITRDKAYFLAGKLVGKALRYKASLVIDGMIEESRRGLLEEGLPRDVIRLLMSNLNRFVHQLETLAQWYGVPYKFRRLPSTVCPICQHELTQLPGRIMVCENCGFKAPRDLVPIHWALREHNYEFEQS

SEQ ID NO: 53515 - protein, 227 aa, Metallosphaera sp.
MKTFSWSRTWFSGRVKGLELGEPVIKEDKVHLPFRYKLPWFTPLDFLSIDSNLYTLDAYGMELKRGEIQSFASKHGRKGGKLMRKYSHRERNHVLDYVHKFVNKLLEMYPLTTIAVEKLNKQSMFQDADDKLSKKISRTVWRSIHRVLKYKAPLYGSLVKEVNPHLTSKSCPRCGRVSRKVGLFVVRGVVSPWTGNSTPLSTSSSRCAGFPTSFSLPVGVGGSGLPR

SEQ ID NO: 53516 - protein, 191 aa, Metallosphaera sp.
VIKEDKVHLPFRYRLPWFTPLDFLAVDSNLYTLDAYDGEKFVTFSLRELYSLKFGMELKRGRIKSFASKHGRKGKVLMEKYSHRERDSVLDYVHKFVNKLLEMYPVTTFAIEKLNKQEMFQDANDRFSKKISRTVWRSIHRVLKYKAPLYGSLVKEVNPHLTSKSCPRCGRVSRKVGLFVVRGVVSPWTGN

SEQ ID NO: 53517 - protein, 273 aa, Erysipelotrichaceae sp.
MLKLPHVKERIPCRRMEEGRLKEAKIVPYHDVFLIMLTYETKSVKACRQPKQVASIDLGVNNLAAIANNIGKRSLLFSGRVLKSIKEEESRTLSRLASRQTIGTEIKLKSSKRAKAIYRKNGLRTTDFLHKTANAIIQWYVENDIDTLVVGCNKEWKQNAELGSKNNRIFCRIPFYALRQKLKYRCEREGIRYIETEEAYTSKASFYDEDGFHADGLSGTRTTRGNYRRANGEILNADLNAAANIGRKVFPELFKTDKVDLRHIKRIVHPELA

SEQ ID NO: 53518 - protein, 313 aa, Streptomyces sp.
VGLPRFKSKRDSRQSLRFTRNGFRIRSNGKLNLAKIGDVRVKWSRALPADPSSVTILLDPSGRYHASFVVDVEPSHLPELDTEIGIDLGLTTYAVLSDGQVIDNPRFLRKAERRLKAAQRELSRKARGSKNRAKARRKVAKAHAKVADTRRDWLHKQTTRIIRETQAVYLEDLNVRGLGRGRLAKSVHDAGWSAFRRLLEEKAARYGRTVGIVPRAFPSSQLCSRCGHRDGPKPLAVREWTCGACGVLHNRDLNAARNILAAGQADRLNAPGGPVRPGVAIPRRARPDERGTHLGDLPRTGVRAAGAGGIPVL

SEQ ID NO: 53519 - protein, 529 aa, unknown
  TnpB Polypeptide
MPKGKPSRVFQGVHARLVFLKEGDERIVLDLMRRFSGAVRFAYQRLLEGKTREELKRENSPLCTLFALNTRYADGAIEKAQATLDSARELGQDPRKVVFGGRKLFEQLKRGHLSGKARERLRREWKERRQGLLYSRGDAAKKDNANLRLESRDGALWLRVNLGNGAHVRALVKTSHPQLETLRERVYASLPYNVTLQLKDGKVYAHFTWSEELPPPVHTRANGVLGIDVNANPYHLALAVVSPDGNLLRYLTLSLEEVDQAPNRGAKELALWKVAHQVVAVAEEHGVAVATEKLKYLRKSQRGDGSGRAFRRTQHRFAYRSLLEKVHSLARKRGVEVVEVNPQDTSTIGMLKYAPQLHLSKDVVAALVIGRRALGFAERLPKGYRVLLSDESFFTHVQGFYKDRLQELEKLEEAEKNPYLRRRLSRVMGKTRKAIFLLSSFSGPSGNQKASLQGSSGSWKGSTKGRNPSGANPWRVLRVGIFLPLLGLEVPRDLSRLKPILHFAPPIQGSWKGWKKGLGPHPGGGPEVR

SEQ ID NO: 53520 - protein, 371 aa, unknown
  TnpB Polypeptide
LERSYKFRLYPNREQEILIQKTFGCVRFVYNHFLDERIQQYSQAGKAPTRFQQDKSLTTLKNELEWLREPDKCALQNALKNLDSAYQNFFRRVKQGERSGFPHFKRKHDHHKSYKTNCNIKMFDEYVQLPKLGKVKCKISKRVDGRILSATVSQNSSGKYFVSLCCTDIESVLLPKTGAVVGIDLGIKSYAVTSDGTEFANPKYLHKSETKLIKLQRELSRKQKGSKRYEKARIRLARMHEHVSNQRLDNQHKISTKLIRENDVICIEDLVPSNMIKNHKLAKSISDVAWGEFKRQLKYKAEWYGKIVVVIDKFFPSSQLCSVCGEKWEGTKNLSVREWDCPNCGSHHDRDVNAAKNILNEGMRVLGEQVT

SEQ ID NO: 53521 - protein, 310 aa, unknown
  TnpB Polypeptide
LNEVSNATLKEAIRNLDKAYTNFYKKKANLPKFRSKKKSKLSFYSRYDKIKFYENNRVNLEKIGKVKYKSSYNIDFVKETSFKNPHVSYNGRCWILTFALDIENKIETLTNEVIGIDLGIKYLAICSDGVVYKNINKEITVRKLEKRLKRLQKQVSKKYEMNKKGECYVKTNNIKKLEKDIKRIYRRLKNIRLNHLHQTTADIVKTKPYRVVMEDLSISNMMKNKSIAKQVSNLGLYEFIRQMKYKCEWNGIEFIQVSRWYPSSKKCSNCGNIKKDLKLSDRIYKCDKCGLDIDRDFNASLNLMNYGLSH

SEQ ID NO: 53522 - protein, 437 aa, unknown
  TnpB Polypeptide
MINVRAVKRLETKLKRQSQRCQVFEIKLDKSHLSKKSLDHLYKIFIEAKWYYNYVLSNKNINDAETKIKQIPVKVGEKYETRDLEVLTAQMRQDIKSRTFGSLKALKQLKQNGRKVGWLKFKKRINSVPLRQLGRTFDLDFENSRIRIQGLKGWLRIRGLEQVSKEKEIANATLVRKCNDLYINVTTFDNKQERNIPGQAIGIDFGCETQLTLSDGTKLEFQIPVPKRLKKLDRKINRKQSSSGKKRPHSKKKRQDQTKRQKTYERLTNKKSDIRHKIVSVITKNYKFVVFQDENIHAWHSGNHGKKVQHSGIGAILKDLKYKSFTPIMVDKFFPSTQLCPCCGVKNKMPVSQRVYECECGFKGDRDFKSACCILKEGLKQIPMDRRNFKAGENVSSTHLNSISGIKVSKMRSENQESDGACSVVGHSEVKVAPVSV

SEQ ID NO: 53523 - protein, 432 aa, Natronomonas sp.
MSVMTTATKTLEATLAPPTAHKERRLQRTEATYRCALRDAFASGADTQTAVNDIVTGYDLSSYAKDALKQYVPQLRRTYDAEELAEDHPIRFTNRGWQLDHSPDRTHEFCWRVPQAGRGTSFWIPLRINPDQRELWDRLYDGDVSVGEFRLRQHSSSWTLHVTVEYEVEQPETPDDPMPVGFDVGESSLLVGCAVEQGAPVDPLFVDGGRARHLRKEMYTTLKRLQERGSAEWRIDERFTHYQHALTDIVEKASREAVEYARQFEDPVIVLEDLTYIRESLDYGKWMNRRLHSWAFARLQGRIEDKALDAGIPVEYVNAAYTSQTCHACGHVGERPEQAAFRCTNDDCWVTEYQADINAATNLAGRLDPWGESLPWKPAGDDSPRDGSACDSTTGHREASREPRQTTLSAYSSETSSRSEPSLVGSPAVHGG

SEQ ID NO: 53524 - protein, 339 aa, Aphanothece sp.
MQKAFKVRLQPNQKQQTQINKTMGCARFVYNRFLALRKELYETEKKTLNYNGCSQQLTLLKKELTWLGEVDKFALQNSLKNLETAYKNFFEGLKKTAKKIGFPKFKKKHGFKQSYKTNFTNNNIEIKEQYLKLPKLGWVKFNKSQEITGKLINVTVSHTKDGHYMASILCETEIDKHPDSTKELGLDLGLKSYVITHTGEEIENPKYYRKHLKKLKKAHKNLSKKQKGSSNRVKAKIKLARLSAQVTNLRDDFLHKLSTRLIKEYGIICIEDLRVQNMVKNHKLAQSIQDASWSKFVSMLEYKANWRSANNTESFSLFPFEPNLFMLWFCQFFGQGFKC

SEQ ID NO: 53525 - protein, 319 aa, Streptomyces sp.
VSRKLPLAEGETSRTACARGLLRTGVDEKTGELLSAAVPVSARRSNLGEALAWAAARWAVDQAITAGASVIYLEDLRSMEARGMGRTHNTRMSQAVRGQIVTRIRHLAAEVGIAVVTVPARNTSKHCPQCLAVLRHRKAPDRPTTPGWKWALCPACGWQGDRDIGAWQRIAARGLTHQTKTVTDRTSGAVVIRSVVDTLEVKAVITPAAVKTNRKVRSKTGPTRRHTTRPAPRRRRAPSPTRPPGPAGKRPEGHAHTDRPPLPRAAHRHQDVTTISTPTTGHRPRGAALGAGFHLHAHATPPRWTDPPPDTTSDVGSLS

SEQ ID NO: 53526 - protein, 499 aa, unknown
  TnpB Polypeptide
MTDDRGYDKLNKIMRITERMYNAGVRHCIRQLNELKKDVWYQYCLGQFFACKDEKESKRWGKEIFICAAAYQLTEYDLHTYFGRGKISGYEGGIGINIVQKTATVLYSAVKKAIFGKKIHFRKFEETFSFEDKKATSGIIYKDKTDTVTVCGTVFKLKPVRKSDIWIQEAMKYKVKYCRIIREPFGVHYRFFLQLVMEGIPPQKHAIGAGTMAIDPGVSTMTSYNGNRLSFKELASNVNQYHEKVIKEQNRLSKLTRINNPECYDDKGVHIKGMRIQYSKSMKKSKMRLRTAYRKQRVYVEQSNNNLANEWLEVSGSVVKIETMNYKGLQKKSSNTERQDKESVVTDKTGRKRNIRKFKRRKRFGGSILKHAPSGFLSTIKRKVTATCGIVIDVSASKLKASQYDHVSNAYEKVSLSDREKIIDGHIVQRDCYSSFIIFYATEENEPDREECLNGFTKFLICQDKLVEEMIHDNFNNPNFGTKLLNIKKQQLREEPAAA

SEQ ID NO: 53527 - protein, 371 aa, unknown
  TnpB Polypeptide
MILSKKARLYPSELQEQKLWQSAGTARFIYNWTLARQEENYKNGGKFISDKVLRKELTQLKKSELSWLNEVSNNVSKQAVKDACNAYKRFFKGLSGKPKFKSKRKGKKSFYNDNIKLKVKESKLVSIEKIGWIKTNEQLPAGVKYSNPGISYDNKYWYISVGVEQEEIKEDLTDISLGVDLGLKNLAICSNGTVYKNINKTYAVRKIEKRLKKLQRQVSRKYEQNKKGKEYVKTKNIIKLEKQIQQVDRRLANIRNNYLHQTTTSIVKTKPYRVVIEDLNVKGMMKNKHLSDAIRKQGFYEFRRQLGYKCKFRGIELVVADRFYPSSKTCSQCGKINKDLKLKDRVYSCSCGLSIDRDLNACINLSRYKLA

SEQ ID NO: 53528 - protein, 413 aa, unknown
  TnpB Polypeptide
MFAVVKRIERIRLYPTTRQAAALAVMLDVTRELYNALLQQRRDAYRLRKVTVTAKMQYAELTALRVDDGRLRAVYREAEDAVLHRLDLAVTAFFRRCKRGEIAGYPRFKGWRRWQQLEFPHGDRALRLDQVQQRVNIPGVGAVKLRKGRQVPTTYGRAWVIRRIDRWYACFECERAVRPLPPTGKVIGVDRGVHVLAALSDGRLIANAAVGEERKAATARLQRELESATVRDGAGRVINGREHRRMKARDRLARAREREANARRDYAHKVGRRIVNSADVIALEKLSLRAMTRSARGSVERAGRNVRAKAALNRVVLDSGFGLLRQMIVAKAEEAARTVVEVESRFSSQECSHCGHVASESRRRRRFCCAGCGYTNHADVNAALVIRGRAQLALKSEPYPAEEAGRRGQDAAA

SEQ ID NO: 53529 - protein, 390 aa, Massilia sp.
MVDNCCRTWMKLVYRYRVKSLAGLLNKQARTVNFVWNYCNDRQRDALRFGRRWHTGFDLIKLTTGCSKELGLHSGTVNDVCQQYAKSRSGSHRPYLRYRGRKSMGWVPLKGRELKREGNAFRFAGNTFRVFHSRALPEGKITDGTNFSRDRRGNWFLNIVLEVQAAPARLPVRAEGIDLGLKDLATLSDGSRIAAPHIYRASEAKLAMAQRARKKKRIAAIHAKIANRRHHYLHTCTSAVVGAFDYIVVGNINASALAKTGMAKSVYDVSWSSFRIQLAYKAVKHGAWFEEVNESFTTQICSDCGAVPDSRPKGIADLGSMFTEHAKEWRCCDCGAVHDRDLNAALNILRRGRATLAVGIPDVQVGEDVKSAPISLPPRAAPASWRPRAS

SEQ ID NO: 53530 - protein, 388 aa, Salmonella sp.
MKRAYKYRFYPTPGQVELLAQTFGCVRFVYNSILRWRTDAYYKRQEKIGYTQASARLTALKKEPEFAWLNDVSSVPLQQALRHQQAGLSNFFAGRARYPTFKSKRHKQAATLTDAAFKYRDDRLYMAKSKAPLDVRWSRPLPSVPSTVTVSRDAAGRYFVSCLCESEPASLPLTFSMVGIDVGLKDVFVTDSGFRSGNPRHTAKYAARLALLQRRLSKKAKGSKNRARARLKVARLHAKIADCRMDALHKATRKLINENQVVCVESLKVKNMLRNPSLSKAIADAGWSEFVRQLRYKGEWAGRSVVAIEQFFPSSKRCSRCGFTMKKMPLDVRKWHCPECGADHDRDINAARNIKAAGLAVLACGEPVIPEPLNAAQVRLRETRILAL

SEQ ID NO: 53531 - protein, 458 aa, Chroococcidiopsis sp.
MKQVTTTLKIKFLNLNHAKAQLFEQMTAECTALANELLKLKIEERQKLTTAKVVTPLRSALANQVIRQVKGLAGSKTKNYKVLPPEVNNQNWKLHKCGETYSVSFPTIQGTKRVPLEVVGNHWQPILEKLLAGGIQRGTLKLIKHRDKWYACLSVIQCVTEVQSTNRVGVDRGQNQIAVAATPQGKSLFFRGREVKHRRRKFQRLRHQLQKAGKYRAVKKLRRSETRWMSEVNHTISRRIVEFAIKHDADVVLEDLSGCRQTMRQTKKSRSDAGDSRHAWAYYDLELKIAYKLAQVGREVHIRPAAYTSKTSSYDGRLGRRDGHWFYAPTGVRCNSDWNAARNIAMWDGRTCSLEPQVLENGAFDNPRSIRFGEAKSGGTLFEGSVPSCELSAGSEGSATFSSLPCINIASQPETGNCNSMNTAEGRVEYVQLSLFDCTSSRARQENPTTFTNEAAAQ

SEQ ID NO: 53532 - protein, 604 aa, unknown
  TnpB Polypeptide
MRVAHSISQGPRCDAGATSVACGSPSPMVTGVTTSPTLSVSSVPASPRPPPRKRRASSTPASRPPTNAPTSTAKSPTSSAPTHSTSSSPTSPPGSTGAAPACVPFWNASSQALSLRLWWPTATGSAASPLTSSSSSAPSPRAASWFTVATTPRPASSPTTSSPSSPCLSRAITESVRRTTGASDANTKPQHASKRQKTDKPPPTRVRKIRLFPSPDEAATLRRWVGTARWTYNACLAAVKGGTPRTLAALRAACLNADSPLLQANPWAAETPYDVRDEALRDLLKAYDSTFAAKRPRFTMRFRSKKADAEAIVVHAKHWVHKRGVYAFLARMRAAEPLPDVLGYDARLVRERYGRYFLCVPLPAPAPVISGENQARAPRVVALDPGVRTFLTAYDPAGDAHEIGKGDVSRLHRLAHAADDLQSRWTLIRNGTASIFPVPEHYAHWSRADYRHRLVYRQKRAAARIRRRVRNLVDELHRQAARWLAREHDVVLLPVFDTQRMVRRSPARKLSSKSARGLVTWSHYRFRTHLLHKARELQCDVVLCNEAYTSKTCGACGHLHAALGGSKVFRCPSCGATADRDVHAARNILLRYMSTGPSASYVGA

SEQ ID NO: 53533 - protein, 138 aa, Burkholderia sp.
LHAKVTNARADFQHKLALDLVRRFDYIAVGNVSAVKLARTRMAKSVYDASWSSFRNKLRYKAIAHGATFEEVDESGSTQSCSSCGSKDSTTRPKGIAGLRIREWACSDCGVEHDRDTNAALNILRCGRASPGVGILCL

SEQ ID NO: 53534 - protein, 410 aa, Bacillus sp.
MAGKRKTIKQRNEELAKENKKIRNYGLKFRAFSTPKQHEQIIQTIGCARFTFNFFLGERQEVYHETKETLRSGEFKQSFNALKDHPMFNWLKKVDKFALECALEQVDDAFDRFFKGQNRYPKFRSKHKSKQSYSTKETNGNIALDFEKEQIKLPKLGWVNVKLSKKQRRLFKEQGFNGKIKGATVTVHSSGQTHISLKIEEVVPIENDIDWSLVSAENIMGCDLGLTHFLIDSNGNKIENPRYLKQYLKKLATLQRQLKNKKKGSSNYKKLQHNVAKLHLKISNLRKDFLHKQSRKLVNENQVIVLEDLNVKGLIKNKKLARSIADVSWSTFVTFVSYKAIWDNKKVVLINRFFASSKQCNGCKEKHTLLSLSDRIWVCPSCGAEHDRDRNAANNIKEEGIRILRTPVAS

SEQ ID NO: 53535 - protein, 300 aa, Nocardiopsis sp.
LERACREHGVRKVNFRAKGRWKPSFRFPDPKQIRVERLGRKWGQVKLPKLGWVRFRWSRPPRGTVRSATLSRQGAHWFLSLLCEDGQHTPDQHQVPDSVVGVDRGVMVAVATSDGDLFDPTFHTLKEAEREVRMRRRLSRQRKGSANRAKTKTALARLTGRVRDRRTDFNAQTAHVLCAKNSVVVLEKLNTANMTRSAKGTTDKPGRHVRQKAGLNRAILDKGWYGFKVACQNQARRTGTRIVEVNPAYTSQTCFECQHVDPRSRESQAKFRCTHCRHTDHADVNAAKNTKKRGWTNPDG

SEQ ID NO: 53536 - protein, 382 aa, Escherichia sp.
MRRFAGACRFVFNRALARQNENHEVGNKYIPYGKMASWLVEWKNATETQWLKDSPSQPLQQSLKDLERAYKNFFQNRAAFPRFKKRGQNDAFRYPQGVKLDQENSRIFLPKLGWMRYRNSRQVTGVVKNVTVSQSCGKWYISIQTESEVSTPVHPSASMIGLDAGVAKLATLSDGTVFEPVNSFQKNQKTLARLQRQLSRKVKFSNNGQKQKRKIQRLHSCIANIRRDYLHKVTTAVSKNHAMIVIEDLKVSNMSKSAAGTVSQPGRNVRAKSGLNRSILDQGWYEMRRQLEYKQLWRGGQVLAVPPAYTSQRCAYCGHTAKENRLSQSKFRCQVCGYTANADVNGARNILAAGHAVLACGEMVQSGRPLKQEPTEMIQATA

SEQ ID NO: 53537 - protein, 550 aa, Thermoanaerobacter sp.
VKNVSKVTKSVFLYGKPTQAKKEKIKEMEYLYTDLINTYIELLIKDKNLYLPIFLNNSKDSQIRQFEKNNRKQNRLNKLGSALGQNAIDHAVKELHNHFVRIRNYMYSLYFNKGDISNFVSSITLLNASICDLDPQKELLKNIERITNILNDIGNKTIKEKYQKQLEYYNELLNMLKTHTKQEIEEMKSIIRMTFFEELTARKLPYIKEAPIQLDTRLCEIEKAQNIKADYVIRVKTLERGKWIEIPLTTSKNSKRRLNQYKNGSPTIKILKNGLIKVAIPIAKKTHTYEYKEIIGVDAGETDLIHTSENKVYGSFKYLSEKYDKIVIPKLANRSKLRALMKKYKKELKSETNEQRKEKLRRKINNINKMLQGRKTLNRVLKSYNHAVQMEIARAVKEFINDIKNEKVLIVMEDLNILEFDRGKKRNKYDSNWAKGKLLQKLQETLDWNGKKYKEVEPAYTSQECPICHNVDKKNRNGKHFKCTYCGYESDADYVAALNIKARAEDKEIEEIVEKYRYNKKERHKAIKELIKNRHREYLDSAAQAQARAI

SEQ ID NO: 53538 - protein, 302 aa, Micromonospora sp.
VLEVNAWRRRRRDAPLSGYQELCRELATSGPGTFAELDSAGARSVLRRFSDAWFAAAKRRKDGDVSAGFPRRRRGLVPVRWHHGTFVLDGRRVRIPVGRGAAPLWVRLAREVPYPLEQVRSITLLCEGGRLFLDVSAEIPIATYPVGAGPDPGRVAGVDLGIIHPYAVTGPDGAGLLVSGRAIRAEHRMHLADTKARRRAVARRAPKPGQRGSRRWRKYRRRARMVEGRHRRRVRQAQHEAARSVVSWAVEQRIGELRVGDPRGVLDIEAGRRHNLRLRQWQVGSCRSSPTRPRCPVSRCVS

SEQ ID NO: 53539 - protein, 283 aa, Chroococcidiopsis sp.
MRDGGGKHSSRHSLKFADIKELRILPRNRCFYVEFVYKTNVIEVDVDPNNALGIDPGISNWLTCTSSVGTSFIVDGRHIKSLNRWYNKQVSTLKENKPQGFWSNRLAAITEKRNRQMRDAINKAARLVVNHCIEHRIGTIVFGWNQGQRQEIKLGKNNQSFVQIPTARLKERISQFCQQYGIRFVEIEEANTSAASFLDNDTLSKHGEKPTNWRASGKRVKRGLYRTANNWYVNCDAQAAANIIRKVSRTLGLDLSRLCRGALTRPQRIRLWSAKLKREVARL

SEQ ID NO: 53540 - protein, 378 aa, unknown
  TnpB Polypeptide
  misc_feature (200)..(200): Xaa can be any naturally occurring amino acid
  misc_feature (209)..(209): Xaa can be any naturally occurring amino acid
  misc_feature (229)..(229): Xaa can be any naturally occurring amino acid
VVHYTLKGGDNVKAYKYRIYPKKSEQIKIDETIEHCRLLYNRLIEERKLSYKKDSISLNKYAQIKTLPERKKYIPAYSNIYSQVLQNVCDRVDKSYKNFFRRVKEGKEKAGFPRYQGQNKYNSFTYPQRGYSIDGNILTLSKIGKVKIELHRPIGGVIKTCTIIRKNDKYYVCFSCEVESQILPDTGNIIGIDVGIKTFXVGSDGLEIXNKKVYKKASKNLKHLQRLVXKKKKGSNRRKVYVKKLAKAHELVANQRQDIVNKTVHKLINNYDVIVHEDLKIKNMVKNHKLASAISDVSWGKLFDSLESAAKTNANKQIIKVNPRNTSKRCSCCGNIKEILKLSERTYHCEICGFVLDRDLNAAINIKVAGIAQSGDSR

SEQ ID NO: 53541 - protein, 340 aa, unknown
  TnpB Polypeptide
MCYAASKLWNVCNYERRRYKELGLEKYPDWYYQKKAHKGELWYRQLPSQTAQETCKQLDKAWKSFYALKKTGGIKAPNPPRFKQDNIPITYMQMGIRHEKGSGQLRLSLSKDLKSYMEGTYGIHEKFLYLENKIFRNMDHIKQLRIYPPEDGKCDLIVIYEVKEPEPLSLNGHYLSMDLGIHNLMTCYDSGNGRSFILGRKYLSLERYFHKEISRVQSIWYAQQVENGIKYPRSSKHIKRLYRKKQNAVKDYLHKVTRWLAEYCKKERISWKSFFSEREFAALVYDKALEKKQRFSDMEKQLQSFAEKQEIFDVDILKQSIKEYISELNKILFRARNAYA

SEQ ID NO: 53542 - protein, 304 aa, Bacillus sp.
MMFLTKKIRLKPDEYQEKQLWKSAGTARWVYNWTLDRQNENYKQGNKFLSDNVLRKEITQLRKQEDFKWLNDVSNNVAKQAVKDACQAYKRFFKGVSKYPKFKSRKKSKPSFYNDNVKLKVKNSLVLIEKVGWVKTSEQLPMNVKYNNPRITFDGKYWYISVGMEQEINEIELNSHVVGIDLGIKALAVCSDGKVFKNINKTVEVKKIEKRLRRLQRRVSRKYEINKEGSRFVKTSNIIKNRKANTILTQTIIKHSKKSPSSNNKCNRENQTLQSCNGGLECNWNDEKSSFIKSNSQTRILRIY

SEQ ID NO: 53543 - protein, 340 aa, Nostoc sp.
MKISYQYKIKPTKEQAEKIDKTLEMLRCQYNYLLAQRFDWYEMNRCPVDRCPLICHLPELKEQPNYYNQKASLVQLKIDRLWYKEIHSQVLQEVPKKVELAIERWLKSDVNGKKSGRPRFKGKGQYKTFTYSQFKSHHFVNNRIMLSKIGNIKVIVHRLIPDSASGSDVGASGFDIKTVSVTKKADGYYVTLSLDGKTVPTTKPDFKANNIVGIDVGLIDFYVASDGSRVKAPKYLRKAERRLKSAQRKVSRRKKGSNRRKKAIKKLAIQHKKVADTRKDFHFKTAKKLLDKYDVVAVEKLNIKGLGLSWLAKSINDAGWGQFVTILSNKAENAGLKVIS

SEQ ID NO: 53544 - protein, 152 aa, Clostridioides sp.
  misc_feature (142)..(142): Xaa can be any naturally occurring amino acid
VKKAYKFRMYPNKKQQELINKTFGCCRFVYNKYLAKRIEVYKNDKETFTYKQCSSDLTNLKKELNWLKEPDKFSLQNALKDLDNAYKKFFKEKAGFPKFKSKKINRFSYKTNFTNGNIMYCGQYIKLPKLGMVKIRDKQVPXKSLKSVSKNN

SEQ ID NO: 53545 - protein, 368 aa, unknown
  TnpB Polypeptide
VNILKKSFKIRIYPNSEQKVLLEKTFGANRFIYNYFLNLNSKLYEFYKINLNFAKSCKALTELKKQKPWLKQVDCVSLQQTLRDLDNAYQNFFISKSNYPNFKKKQNKNSYRTTHIKINNRYITIPKVGMLRYRDNYKLEECNISKIYNVTISKTPSGNYYASISAEVDIIAFEKTNRSCGIDLGLKDFLIFDTGEKINNPKILKNLEKKYRKLAKAVSRKVYDSNNYKKARIKLAKFHEKVANIRKDFLHKLSTQLIKEYDIICIEDLCFKAFMRTDKAKSFQDVAQSEFVRMLEYKANWYGKTISKIDRFYPSSQLCSECGYKNPDLKNLDIREYDCPECGTHHDRDINAAINILREGLRILEENM

SEQ ID NO: 53546 - protein, 391 aa, unknown
  TnpB Polypeptide
MTNTKAFKYRLYPTKKQEQSLQQTLTTCRFLYNNALDQRITTYKNTQESVTYCDQANALVKQKNDYQKQVHSQVLQESLKRLDTSFSNFFRRIKQQKTGKKVKAGFPRFKPEQRYNSFCYPQSGFRLTNDSRRITLSKIGDVKLKYSRHTEGKIKTCRIVRDVDQWFVVLTCEQEVSEPLKSTKTIVGIDVGIKTFAFLSDGTQFENPRHTKNSEVKLAKVQRRLSRKVKGSQNRNQQRIEVGRVHRKTRRQREDFLHKLSRELVENYGCLVFEQLNIKGMVRNYKLAKHISDCAWRKLIEYTTYKAEEAGVEVRLVNPKNTTQMCSSCGKIVPKTLADRTHNCSHCGLVMDRDLNAAKNICRVGTTLSYAYGDLTTTQEHCVFEQVGSEK

SEQ ID NO: 53547 - protein, 416 aa, unknown
  TnpB Polypeptide
MQLVEQHCIKKSDPRYALIDAAAFQSKNLYNAALYEMRQAFIFQGVRLSYEEMDKRMQPHEAYKALPAKVAQQVLKQLAQTWEDFFAALASYNEDPSKFTGRPCLPRYKHKTEGRNLLVYTLQAISQGKRGLKRGMIKPSRLPISVKTQQDPTIIHQVRIVPRHGYYVVEIIYSKEPVQAHVDPSFCVAIDLGVTNLAAITSNRAGFIPRLVNGRTLKSINQWYNKRMRELTLYLPKAERERVTKQMERITTHRNRQVDHYLHAASKQIIDFLAKEGVGTIIVGKNPLWKQETRMGKRNNQNFVQIPHARFIDMLTYKAALVGIQVEVQEESYTSQTSFLDLDPIPIYKPNDDTAYTFSGKRIGRRNRLYRTKDGRIIGADVNGSYNILRKRKPDAFRAEGIAAYVVQPLRLAIAV

SEQ ID NO: 53548 - protein, 402 aa, unknown
  TnpB Polypeptide
VLVYQSYRYELKLNRRLVEQLRCCCGTARFAYNWGLAQQFLALHEGAEFPTAVSLHRQLNQQKQGGFSWMKSVSKWIPQNALRSLDVAWKNKRTRAFGAPRFKRRGQHDSFRVDKPVHVNGRYIQLPKLGRLRTKEPTTKLKGRILSATVSREADRWFCSIAVSRERPDPVPLQGAPVGIDLGIKTFAVLSDGACFHAPKPLKQHLRKIQRLSRQVSRKQQGSANWRKAVLRLAKQHRRVRNIRKDFLHKLTSDLTKTKQVICVEDLNVAGMMRNHKLARAISDLGWGEFKRQLQYKSEWYGGRVITIDRWFPSSKMCSCCGFKLEKLDLGTRVWTCPDRSAELDRDLNAALNILLEGCGKDLIEQYPEFQGNLRLWRSSKSTVSSSEDLGSRNQTSERSKI

SEQ ID NO: 53549 - protein, 434 aa, unknown
  TnpB Polypeptide
VDANIRSMEGFIAYRYRLYPTPAQAATLGRWGGCARAVWNAALEQRRTAYQMNAATVRYESQSGAELTDAKREHAWLREPHADVLQQALRDLDRAFERFFRGEARYPRFKRKGRERFRIQNRKRGRIEVRRVSRRWGEVRVPKLGWVRFRFSRRPVGEIRHLTVTRDTLGWHASVCCKREVAPRPAHPGPPVGIDRGVTATVALSTGELRRAPGLPRGQAERLRRLQRKAGRQETARRRRPPGERRRSDRHQRTLAAIARLRGREARIRNDFLHKLSTEIAKSHGIVAIERLDVRAMTRSARGTLSSPGVNVRAKAGLNRSLLAQGWGELRRQLAYKCKRALGRLIEVPAPYTSQTCSACGAVDPASRSGRHFECVTCGHRADADVNAALNILAAGQAVTAREALAAGRGDEPRTPRTELADVVSRARMPRIHA

SEQ ID NO: 53550 - protein, 334 aa, Streptomyces sp.
VEEDRGARLPERRLLRAAPAGPAAPSDGVHPLLRQASEVSEVQVEKKSRKSAEYTTSAFRFRDGRLTLAKMAEPLDIVWSRPLPKDAQPSTVTVSQDAAGRWYVSLLCEDPDIKPLPVTDTAIGVDAGLAHLLTLSTGEKIANPRHERRDRARLARTQRELARKEAGSANREKARRKVAGIHARIADRRRDHLHKLTTRLVRENQTIVIEDLTVRNLLKNGKLARAISDAAWREFRSMLEYKAAWYGREVIAVDRWFPSSRLCSNCGRLQNRMPLHVRTWTCDCGVTHDRDVNAARNTLAAGLAASACGAGVRPQRSTPGGQSATKQESLRREP

SEQ ID NO: 53551 - protein, 172 aa, Bacillus sp.
MESIGVDVGLKELFVASNGMKERNINKDAKVKKLLKRKKSAQRDMSRRFKKGVKIQSVGYEKAKTEHLRLSRKITNIRNNHIHQATANLVKTKPMRIVVEDLPISNLLKNKKLSKAFSFQKLNFFFQCLSYKCEKYGIAYVKADKWFASSKICSCCGVKYTTIQFNQKDSGV

SEQ ID NO: 53552 - protein, 413 aa, Janthinobacterium sp.
MERIQAYRFELRPTGDQERAMRRFAGSCRFIYNKALALQKENHAAGNKFISYVAMAKYLTAWRNSSETPWLSDTPCSSSQQALIDLDTAFKNFFEKRAGFPKFKRKGTGDAFRYASSKEFKLDEGNDRIFLPKLGWMRYRNSREVIGELRNVTISKSCGKWFASILTRREVESPVPKAATAIGIDVGIARFATLSDGGFIAPLNSFKKHQQRLARYQRRMGRKIKFSSNWKKANARVQKIHRDIANARKDFLHKNTTTISRVHALVCIEDLQVRNMSRSSKGTIEQPGKKVSQKSGLNRAILDQGWGEFRRQLDYKMAWNGGMFLAVPPHHTSQTCPTCRHISKDNRQTQAKFLCVECGYKNHADVVGAINIVERGHRLLACGEMAQSGHLKKQEPTEARGNSSRRAVEISIL

SEQ ID NO: 53553 - protein, 365 aa, unknown
  TnpB Polypeptide
VINLSNKNHITIHHIKLYKPTKTKEEQLNKLLKNWNKTIRSALKIVKHWGFTAYTKSHKHTYRVSRNNFNLPSQVAVEANRKAVETYKSAKNAEFHRQVEVSLVNKKGFKLIKKDNDRYIAKIPIEGRKSIYCPLAFGKYQLNKIKNPNFKLKTAKLYNYNNEWYIDLIMEYKQPKIKTDTILGIDLGIVKLATFSIIDKQENVLHQECISGKELRFKRMRYKNKRKAKARSSGSKTTSLIAENRLCKELNFKIANRIVELADKHNSLIVFEDLKNIRKNVTNNNTLNNYEKNSWAFYQLKQLVKHKADLKGIPYQDINPKDTSQNCSVCGEKGFRLNQNRFLCDNLHLQNADYNASINIAKKAI

SEQ ID NO: 53554 - protein, 418 aa, unknown
  TnpB Polypeptide
MRRKKKETENPIPTIIRAHKIRIYPNKHNQEVFQKYYDYQRSVWNRAIDERNAQYKIYKEMKATGLYTQKELNKNYFPNTNNLRKMEKFDWEDNFYCRIREIQFDNLCQAWNNYFNPNMPNHQKPKYKKKKDVETHKKLSLRRVRTKGKWLLLPKSHKSKPEYRFTKIKMAEELRFNGRVAEDFTVSVENNKWYVTITVEEPLEEKVAISKQSTGIDVNVGSIDYLKKNELEKEYGKFYLLTKSLLRQYDKIKFYSKVIAKKRNKNPYYKYSKSYKEVIAKLNNAYTKAYNIQEANLNNIVKYFFTNYSRIVIEDLDVNSMKMNKRLCKSLHRNAFGRFKQKMINKSVEYNVEFIVANRFFPSTQTCSECSHVKTGDEKLFLWGDKYGNNHDTYVCYNCGTIQDRTENAILNLTNYKE

SEQ ID NO: 53555 - protein, 389 aa, Clostridium sp.
MKKLKKAYKIEIKPTEEQITKIHQTIGVNRFIYNFYIAHNKEVYEKEKRFISGMDFSKWLNNKYIPNHPDKAWIKEVSSKATKQAIMNGEKAFKKFFKGESGFPKFKKKKNQDVKAYFPKNNKADWTIERHRVKVPTLGWVRLKEFGYIPVNSIVKSGTVSQKADRYFVSILVEKAIKVDNKPYSEGIGVDLGLKNFAICNNGLTKKNINKTKIVKKEEKKLKREQRKLSRKYESLKLRNKKEKGEATRQNIQKQIVKVQKLHQRLTNIRTDYINKTVNELIKQKPSFITIEDLNVSGMMKNRHLAKAISGQKFYEFRIKLISKVKQNGIEIRIVDRFYPSSKMCSCCGAYKKDLKLSDRVYKCSCGISIDRDLNASINLANAKEYKIA

SEQ ID NO: 53556 - protein, 467 aa, Burkholderia sp.
MTQPQLLRSSTLYATPSSLSALRAVCDAMAFVRADLWQRYGALGTVGKSASDIRKEVTAGGWYANLAVDGTIRAETTKDVVNDILTYKAAACAKVRQAIAKHTPDADERKRLFGLLRADMWLEDRYLHRMMRKHFRHGVSKCDNQFIVRSDKHESRIVGGRLTVTIRIAKQYGEPIVLTTTSSGKNVDLTGCNLRVILKGGSAEIHYATENAAGRPCGTAEIGVDKGYTEAFTDSDGAHHGETFGAVVTAYSDQVSKTGKARNKLHALEKKHRAAGRTAQADRVKANNLGRLKLQARRERTQKRLRTIAYQAAHAIVDKAAVVGSEDLSAPIKGKVQWRKYNRRMSAWAKGVLARALEEVCTQRGATHVVVNAAYTSQMDSFTGLLEGRRAGDKFYCANGDVLQADFNAARNVRARIHDRDITRYMRHQQVKAILLARSSGATERHEASVGRRRLRQRSADKSTAQL

SEQ ID NO: 53557 - protein, 404 aa, Escherichia sp.
  misc_feature (271)..(324): Xaa can be any naturally occurring amino acid
VKRLQAFKFQLRPGGQQEREMRRFAGACRFVFNRALALQNENHEAGNKYIPYGKMASWLVEWKNATETQWLKDAPSQPLQQSLKELERAYKNFFRKRAAFPRFKKRGQNDAFRYPQGVKLDQENSRIFLPKLGWMRYLNSRQVTGVVKNVTVSQSCGKWYISIQTESEVSTPVHPSASMVGLDAGVAKLATLSDGTVFEPVNSFQKNQKKLARLQRQLSRKVKFSNNWQKQKRKIQRLHSCTANIRRDYLHKVTTTVSKNHAMIVIEDLKXXXXXXXXXXXXXXXXXXXXXXXXXXXXXXXXXXXXXXXXXXXXXXXXXXXXXXLAVPPAYTSQRCACCGHTAKENRLSQSKFRCQVCGYTANADVNGARNILAAGHAVLACGEMVQSGRSLKQEPTEMIQATA

SEQ ID NO: 53558 - protein, 318 aa, Burkholderia sp.
LKDLERAYKSFFVRRAAFPKFKKRGQRDSFRYPDPKQIKLDQANGRIFLPKLGWLRYRNSRNVQGEVRNATVSLSAGKWFVSIQTAREVEQPVPQASRAVGIDLGIARFATLSDGSYLAPLNSFRRHEARLRRAQRAMSRKTKFSHNWKKAKARIQRIHARIGNARRDYLHKATTTISQNHAMVCIEDLQVRNMSRSAAGSADAPGKNVRAKSGLNKAILDQGWYEFRRQLDYKLAWRGGWLIVVPPRNTSRTCPACDHVSAENRQTQVRFACVACGFEENADVVGAINILARGHRVAACGEPAQSGCSVKQEPAKAI

SEQ ID NO: 53559 - protein, 369 aa, unknown
  TnpB Polypeptide
MLQTLMVRLDPSPEQHKMLCETMKRFNEACNHIAETVFALHSANKVEVQKTVYYPIREEFGLSAQLTILAIRKVCEAYKRDKSIKPEFRLDGAIVYDQRVLSWKGLEKVSLVTLNGRQTIPVRIGEYQRARMDRIRGQADLILVKNVFYLCVVVEAPEASPYDPVGVIGVDLGIKNLAVDSDGEVHSSQQIQETRTRSDSLKARLQHCGTKSAKRHLKKLSGRMTRFAKDTNHRISKILITKAKGTRSLISLEDLEGIRNRTTVRKSQRRNHHSWSFAQLRQFMTYKAAIAGVPLVFIDPAYTSKECPICHHVSQSNRLTRDDFCCTCCGFSGPADNVAALNIRARVAVNLPIVSRLFAQAQVTPFTGW

SEQ ID NO: 53560 - protein, 541 aa, Streptomyces sp.
LVTRQFGHRARLALSPTEVSKADARAHAARTLWNLLHAWWQMMPKDQRTLANADAAIRQARQALDFLAVLPAQAAQAVLKTYFQAWKNCWEGRARAPEFKARFRTRMSIDIPQGRDLHVVRVHRRWGMVNLPKIGRVKFRWTKDLPAGRHAGTENRITGARLIKDALGWHIAFRVTTGEATPEPHTGPEVGIDVGVTVPLALSDGTTYEHGQWLTEQEQAKLLRLEQRAAHRKQHREPGERTSRRLQHTFDQIAQLRAKAKRRAADWQHQTTTAIARTYGTVAVEALTITNMVTSARGTVEVPGKNVAQKAGLNRAIVAEAWGRTVTMLAYKTARHGGALVKVPAPGTSRRCSACGCTTPGGRESQAVFVCKNPDCGWSGNADHNAARNILHLYRIGLAAIPAAGRAVVRRARRVASSPPPQGRWESPSRACEGGRALQNQVMYTYEGAWEAHEGLRVIGSRFYEGKARSHRIVGESLGWEPFLGEEVLVGPDGQELDLFHSLFYRIALRPAVSVCRGAGAVPYLFCRTGVGFQWSADPPP

SEQ ID NO: 53561 - protein, 402 aa, Streptomyces sp.
LSPTEVSKADARAHAARTLWNLLHAWWQMMPKDQRTLANADAAIRQARQALDFLAVLPAQAAQAVLKTYFQAWKNCWEGRARAPEFKARFRTRMSIDIPQGRDLHVVRVHRRWGMVNLPKIGRVKFRWTKDLPAGRHAGTENRITGARLIKDALGWHIAFRVTTGEATPEPHTGPEVGIDVGVTVPLALSDGTTYEHGQWLTEQEQAKLLRLEQRAAHRKQHREPGERTSRRLQHTFDQIAQLRAKAKRRAADWQHQTTTAIARTYGTVAVEALTITNMVTSARGTVEVPGKNVAQKAGLNRAIVAEAWGRTVTMLAYKTARHGGALVKVPAPGTSRRCSACGCTTPGGRESQAVFVCKNPDCGWSGNADHNAARNILHLYRIGLAAIPAAGRAVVRRARRV

SEQ ID NO: 53562 - protein, 449 aa, Brasilonema sp.
MKAADAGFILRCHTSYKIVYNFVRGGERTMLSLTYEYKAMPTNEQIQQIEHTLTVCRKVWNFALRERKDWLNSRKCPINSCSIISEYITPADVPYPNYYEQANALTRAKAEFPELATVHSQVLQQVLRKLETAFVDMSRKKMGFPRFKNKYRMRSFVYPQLGKGQVLKDNQIKLPQLGWMEYVKSREIPNGFKVKQVRVVRKASGYFLMLTLECDVNVPDTVASGHPRGIDLGLDKFAATSDGELIERPRFLNTLHRKLKLLQRRLKNKQKGSNNRHKLNRKIARLHQRISDTRKNWHFKLAHKLCNDAGMMFVEDIDFRTWAKGMLGKHTLDAGFGQFVEILKWVCWKRGVYFDKVHKDYTSQVCPQCDTHTGKKELKDRIHSCQSCGYTTHRDVASAQVIRNRGVNALGRSVEENACGDGLAGTGNRLVKSQRSKKKGGEARLKPAS

SEQ ID NO: 53563 - protein, 230 aa, unknown
  TnpB Polypeptide
MYLTVKQQVKHLSKDDYYTIKELCHIAKNLTNEAIYNVRQYYFTEGKFLNYEKNYALLKSSGNYKLLNSNMAQQILKEVDSSFKSFFGLLKLAKNGKFAFKDCKLPHYLPKDGYTTLVIGFVRLKGNKLILPFSNSFKKSHKSIEITIPPILIDKKVKEIRILPKANARFFEIQYICETECIQRNLNKQNALALDLGINNLVTAVSNTGKSFIIDAKPPHARDFSRELGG

SEQ ID NO: 53564 - protein, 200 aa, Oscillatoriales sp.
MSLNGQVNLTQWRVKLRRNDALFAIQRFFSNCKVKKPGKKGYPQFKKHTRSVEYKTSGWKLSTDKKCLNFTDGFAAGTFKLLGSRDLHFYAPTEIKRVRVVRRADGYYAQFCINQSRTEEVIPTGKTIGIDVGLNHFYTNSNGETMTNPNYLRKSEKALKRVQKRVSRKKKGSSNRRKVINKLGRKHLKVSRQPIRLRSG

SEQ ID NO: 53565 - protein, 486 aa, Oscillatoriales sp.
MATLTYCKGLPTPANELNELGFTDFEMFLEGYAPIFRAASIETVNHLLLNTEFKKSDWNTHLQQTYGINKRHANGVISATKGRVDGAKEYRILHVKTLEGKIKSINAWLKKAERKLVLARKFYAKKKWQNSKTGCNFPIACSLQHKSTNWQNLRFQIHNKKRRLTLLANKLEHLKVKPIKVFVPHGDIFAVGSKDESFGNQVSQWNGNKITFRVPKCLESRFGKAVSSEVGDFNRNINRLPEREAKTWHFYRKNGKWVIAVQFTPKPVNQVSKNRMYGCIGIDMNPGSIGWAYVDPEGNLKVKGQIPLRMGLPNGKQQAQIVNACLQLAIRAVEFQCPVVCEELDFSTKKQSLGEKGRKYARMLSGWAYSEFYKQLSSILSNRGIELIVVNPAYSSIIGLVKYLRMYGLASDESAALVIARRAMKLNEKIPRSLTAYSEVNSEKHVWSEWNQLNKKIKRSATISRRCDYYSVSKWSFLVNLDIGEA

SEQ ID NO: 53566 - protein, 426 aa, unknown
  TnpB Polypeptide
MEYSPRFRLLPTEEQRETLDWTRNTVRQVYNHGLYRFNQLDESNGTVKQRVTQIRDELPELKQDWTDLQDVYSKVLQTHIERIARNISNLGKLKKKGYNVGSLNWKKPREFRSFTYNQSGFKLDHKSGPNGRGVLYLSKIGWVPIRLHRDILEDAEISEVTVKKEPTGAWYASFCIEVEEPEKPPVESLSVDDCVGIDLGVLNFVHDSNGIVVDRLDLSDDRERLEREQRALSRKEYESNNWGKQRQRVAKVHSRMSEKKWDFKNKIAHYYTTENSAVFLEDLKIKGMLESPQNARKKAESGWRDLITIFKHHGRKNGCYVVTVKPENTTLDCASCGKSVYKPLWVREHSCPTCGFELDRDWNAALNVLNRGLSKIGVVHSEETPVETATAVSTDGGEYSSMVVDASRVTEAGSTALKEATRSVAE

SEQ ID NO: 53567 - protein, 370 aa, Chlamydiae sp.
MKRTISIKLKVKSTQDTGKLLALKDAFTSACNQVVPFAMENRCWNRVALHNFCYTEVRKKSSLGSQMVCNAIFATCKAYKNRNINKSEEMPKIQFRKNSSVHFDKRTYSIKGNVLSLYTLEGRIKVEMKMGEFQQKYFSEGIPKEAELICRKGKWYFNLVLDLPDPELGQGQTMLGVDLGENNVVAMSSGKLVNGGEIRYRKDQYLGIRRRLQSNGSQSARQLLKRISGKEARWMRHVNHQLSNETIKEANKIGANVLILEDLKNIRQRIRGSKRMRTRLHRWSFAQFQTLLEYKAQAHGLGVMYINPAYTSQTCSSCGYLGERHRHRFTCNCGNQRHSDLNASRTLCRFALSADRATCAVNRTHVAAKR

SEQ ID NO: 53568 - protein, 403 aa, Streptomonospora sp.
MYRAYKFLLRPTSRQCAALEQMLADHRRLYNAALQERRDAYTHPSRTRIRYGGQSAQLKDIRTTDPDGQGRWSFSSQQATLRRSDQAFQAFFRRKKNGDTPGYPRFKGAGRFDTVDFPKDGDGCRWDSAPHERVTRVRLQGVGHVRVHRHHEVEGRVKTVSVKRDRFYLILACDRVPAQPLEPTGAVAGIDMGVASFATTSEGEHVPNPRFLQAAADELGAAQRHLARFPKKTGHANRTRKHRTARDKVSRLHAKVARQRRDHHHKTALDLIRRFDVIGYESLNTAGMAKKPAPRPAPERPSAFLPNGAAAKAGLNKSVLDAGWGVFLGILVYKAESAGRGLVPVSARNTSRTCPREDCGHAHADNRPTQAEFRCTRCGHTDHADRVGALNAAIRAGLVLPLA

SEQ ID NO: 53569 - protein, 168 aa, Bacillus sp.
MAMGNGRQNKFMKRKFRSVRKKLGEAKKLNALRQLDDKEQRWMQDQDHKVSRVIVDFATDNNISVIRLEQLTNIRQTARTSRKNEKNLHTWSFHRLAQFIEYKATLVGIKVEYVDPSYTSQTCPKCSEKNKAQDRKYKCQCGFEKHRDIVGAMNIRYATVVDGNSQSA

SEQ ID NO: 53570 - protein, 398 aa, Chloroflexus sp.
MREPAVEVSMMLTYKYLLRPNNHQSDRLAFLLEQHRIVYNHALQQRINIYKETGECIGYDTQCKHFRDIRRENPDTLRLVNASSLQRTLRRLDRTYTSFFRRLQSGEKVGFPRFKARSRFNTMEYTYGDGCKLRTSKRKYVFLYVQNVGEIRICYHRAIPEDTRINHARITRRNGRWYVSLSITLSATPVQRTPTGKPVGVDVGLRRIAALSTGELIENPRWLRNNLARLRRLQRHASRQVKGSRRQHTTYQRIARLYEKIENQRRDYLHKISQGIVKKYALIAVEDLKLTFMNRSRHLARASYDAGFGIFRRMLEYKAESAGIPLIAVSPVNTSQACSGCGRIVPKDVSVRVHQCLHCGLTLDRDVNAARNILMLALQNPPGRGGQPITWADMPSVG

SEQ ID NO: 53571 - protein, 369 aa, unknown
  TnpB Polypeptide
MKTLKLRIKDKHSNVLNQMASEVNFVWNYVNDLGFKHLKRKGEFLSAYDIAKYTKGTSKECNLHSQTVQAITEELVTRRKQFKKAKLKWRVSNKKSARRSLGWIPFKKVAIKYADGYVQYDKHQFKLWDSYGLSKYTVKTGSFVEDSRGRWYVCLVVDSPKQNKPTATKAIGIDLGLKDIATCSDGTVISNPKFYRKYEKKLGIAQRARNKKRVRALHAKIANCRKDHLHKTSSILVKNNAMIVIGNLSAKKLVKTKMAKSVLDAGFSAFKTMLKYKCENAGVLFEEVNEAYTTQTCSCCSSRCSSPKGRAGLGIREWQCMECGTLHDRDVNSALNILALGHERLAVGISVLKDGEDVNVVVNKGESYE

SEQ ID NO: 53572 - protein, 257 aa, unknown
  TnpB Polypeptide
LNSGKTSTAEAALVKGEAGEGSLLRAVRQGDLRHQFPADHREDLLQLAAVLRGEAGHDAVHDLRHIVGGDVVVIDILLGDLQMELPAVRGGLDLADVALFHQTVYLIGGVGRGDAHEGGELVHRRPPQRHDALHAEGLHRGETGFPVLKPAEDLLIKVKLEFGVYFVKSLMQHGASPSCGMKKSKLSIPILTEKGKSSPDGGGTVFPYRPLWVFSAFVQNPQSGKNMMWNHKLALHIADTSWGEIRRQLTYKADWYG

SEQ ID NO: 53573 - protein, 362 aa, unknown
  TnpB Polypeptide
VEEIFKDIPAKRIGSQGYVDWRALQKGDLPQTKVERPWYADIYSQVLQDCVLRLDKTFERFIFGDTNGKRSGRPRFKSRSRYRSFTYPQIKQDCIEGNRITLPKIGEVKIILHRPLPDGFKIKTATVIHKADGWYVTLSLQDDTVPVLSPDIDRTRAVAFRDFTKVVGIDVGLKDFLVTSDEDVVPIPQFQRKSERRRKVLNKALSRKKRKGTKRRQSSGKRLSKHYQKVARQRKDFHYNIANRLLEKYDVIAHEDLNIKGLAKTHLSKSILDAGWGNFIEIVSRKAENAGKTTVAVNPSGTTQNCSNCGTKVPKTLKDRVHQCTCGLEICRDLNAAINIKNLGAGLPLSKAQRLLSDSRTG

SEQ ID NO: 53574 - protein, 229 aa, unknown
  TnpB Polypeptide
LPKGCTLKVAVVSREIDGKYYVGIDCQIDEVEHYLRLDTNKAIGFDYSSTHFVVDSNGNEYNMPHFYRDKLDEIKKLKKKLNNSVPESNNYYRKQKELIKLYSKITRRRKDYLNKLSSSIIKNYDYICVEDIDLNALSKRNVLKNATRDNSFGEFVKMLEYKASDNGKRLIKVDRWYPSSKTCHVCGYVYKALDIETKSWRCPECSTLHDRDINAAINIKNEGLKHVNR

SEQ ID NO: 53575 - protein, 232 aa, Bacillus sp.
MTKHNKAYKFRLYPTEEQANLIRKTFGCVRFVYNKMLAERKKVYEKYKENKEELKKQKFPTPAKYKVKYEWLKEVDSLALANAQLNLQTAYKNFFSGQSDFPTFKSKKSRKSYTTNRVNGNIMLFHGYIKLPKLKLVRLKQHREIPQNHIIKSCTISLTPTGKYYVSVLTEYEKEIVQKEVESVVGLDFAMAELYVSSEDEKANYPRFYRQMLNRLAKAQRVLARRVKGSVR

SEQ ID NO: 53576 - protein, 606 aa, Bacillus sp.
VKLLIFRQLFKNKDVTDLKNPSPWFKSLFGYQATSGEKVTVESSLGVPTVYRCINILANSVAMLPFQVFKKTSKGRERDKMHQVSFVLEKRPNPYQSPFKFKHLVETHRNTWGNAYINIHWGVDGRPKELWVLNPAVTTPTVDLKTNKLWYFTSLPDGTPVKIPDDDIIHLTTLSTDGLKGKPPIQIARESIGSSQAAQKFKGKFYTNGAAHSGLLKTQQALGKEAKDVLRDAWEEANTGLNNAQRIAILDAGLEFEKVGMPLKDAQFIEGMKFDKAEIANIFNIPLHMINELDRATFSNIEQQALDFIQNTLSPILIQYEEEFSYKSFSFNEQKRYYLKFNFYANYERLVIGKKVVHIQSIGEVKTSQQLPRNKKPSNPRVTFDGRHWWISVGFQEDFALQELTNESIGVDVGLKELFVASNGMKERNINKDAKVKKLLKRKKSAQRDMSRRFKKGVKIQSAGYEKAKTEHLRLSRKITNIRNNHIHQATAKLVKTKPMRIVVEDLSISNLLKNKKLSKAFSFQKLNFFFQCLSYKCEKYGIEYVKADKWFASSKICSCCGVKYDHSVQPEGQWSLKIREWCCVGCNSHHDRDVNAAINLSRWVK

SEQ ID NO: 53577 - protein, 333 aa, Cyanobacteria sp.
MYAIKRELQLNNKEVSQMRGMAGFKRLVYNLGLELLKESWTVPNRKMSDSKRIDTIKKVFTSVTMKKPENKWMKKYPSTIYQSAFVDLKNAVSRWRKGLGGFPKKKSKKKGDSVLEAQKIPPVLHPLVRVGVDLGVKCLATVSDGTSYTMPLTTKRAKTKLSKMQWRNRNKVLGNKKLKIKASNKAKKYYVNLSRQHLKVANIRQDVIQKMTTDISRRAYIIRIEDLNVAGMMANHKLAEAVSNNCFYEIRRQLIYKQTHYGTHVELVDRWYPSSKTCSKCSHVQDIKLADRVFNCQKCGHSLLRDANASINLEKAPIDRVRRASPELTPVDK

SEQ ID NO: 53578 - protein, 370 aa, Limnoraphis sp.
  misc_feature (370)..(370): Xaa can be any naturally occurring amino acid
MQRAFKTKLKLNNKQKTVMAQHAGYSRWVWNWALAMWNEAYKQGLKPSTNKLKKFYTVYQFAFMHLGEAFSRFFQGIAKHPKFKKKGKNDSFTLDNCGKVMRFSGRRLKLPFIGWVFTYEPLPEVQTKRVTISRVADSWYISIAYEFEPEQTVKSRVYLGVDVGVKVLATCSDGTVFVNPAAHKKAQKNLARLQRELSRKQKGSNNRNKARLKLAKAYQRVANIRSRKQKGSNNRNKARLKLAKAYQRVANIRKVSIHKLTSWLCKNHAVIGLEDLNVSGMLKNHKLAGAIADSALYEIRRQVEYKSEWYGSRVVFADRFYPSTKTCSSCGHVQEIALKERVFNCNNCGVSIDRDLNASLNLEGYAEGFX

SEQ ID NO: 53579 - protein, 328 aa, unknown
  TnpB Polypeptide
MLISYKYRAYPDATVEPRLHAALDTCRWLYNTLLEECNTARENGFTPTMRGSQARIVTLKDENPALKEVYSKVLQMVNYTLWSNIRALSQSKKKGRKIGKLRFKSAFRYRTLTYNQSGFKIDREHSAITFSKIGTVLFTMHRPYTVPVKGVLITRSGDRWYVIIQAEQEVSRSKREGRSAGIDLGLNAFAVDSDGAVIENPRFYEHSLDRIKKIQQSIARKQRFSRNWTKAKSRLEKVYEHITNQKNDFLHKLSRQYVDTYATICVEDLNIKYLKENSKSRGLRRSIHSASWGRFFSYLSYKLQVLVRTSFRSIPVIRRRCARTVEAS

SEQ ID NO: 53580 - protein, 431 aa, unknown
  TnpB Polypeptide
VRQPTSSATANTGRRYRAYPTPEQARRLTGWGHSCRAVWNLALEQRQYLYRHRGYTLRAVEQSVQLTRARAELPWLADLPAQSAQQVLRQLDRAYDNWWNPQHPAGLPTFKKRRDRLVVPFPGQAVTVRKLNRKWAQVRLPKIGWVRLRLSRPLGGAVRNATVRRDGLGWHISFGIAAATEPAVPNGLPGCGVDFGVACSAYVSDEPSPRLLPPTLTEGEQRRLLGLERRKARQVRWAKRHNHGRYSRRLRRTIAQIAALKARQTRRRLDFTHKLTTDLAKSHGWVGIEDLRVKAMTRSAKGTIEQPGSNVRQKAGLNRGILDNAPYERRRQLAYKAPRFGSELRLVPAPGTSQTCSACGHRDPESRPGCGRVFACTACGHQAHADHNAAVVIEARARRAGGTVINSTRSHPRVARPTRSRMREPLGKRVA

SEQ ID NO: 53581 - protein, 228 aa, unknown
  TnpB Polypeptide
VKQKRAHYKKLRQDLQKKQTPSSRRRLKAIGQREHRWMNDVNHCLSKALALGHPQGTLFVLEDLKGIRSATERIRTKDRYVSVSWSYYDLEQKLRYKAMRNRSTVIAVDPAFTSQICPVCGHRDKKNRRHEKHQFCCKSCGYTSNDDRIAAMNLQRMGKEYLLKTQVPENGTAPVEHASPGRVQSITPRCAASPDAPAEGSGFFTPKVGDDRLLPPGRHKLANLFVSS

SEQ ID NO: 53582 - protein, 402 aa, unknown
  TnpB Polypeptide
MKTNLAHTIRLNPTKSQETFFKKACGCARVAYNYGLAEYKKLLDAKEKPNIFEIKKKFNQDKKTLFPWMSETNKDANQRPFTNLKSAFTRFFKKQSKFPKFHKKGVKDSFYISNDKFSVEGNRFTIPRLGWVKGTEELRFKGKIMSAVVKRKSSYWFIVISVETETSFIACNNQAAVGIDLGVNTLATLSNGLKVESSKPLKKKLARLKRLQRNLSRKVKGSGNRKKQQLKLSKLHYEIACIRKDGLDKLTTSLCHNFKIICIEDLNVKGMLKNHCLARAISDAGFGEFKRQLTYKSKLYGNTVVMVDRFYPSSKTCSVCGYKKETLSLSERDFHCECCGNIIDRDLNAAINILNEGLRILNKIGAVSPELTPMDKKALIDSDINETILAEVGISECSLLNT

SEQ ID NO: 53583 - protein, 436 aa, unknown
  TnpB Polypeptide
MSKVKTPSYIVNRRLLTTESDGLYIDKKMRIIERLYNAGVKYCKSRLTEVRNDLWYQYSLSQYQESKTDKDRKIWSAEIFMVAERYGLSEYSIHEYLGKGKVFSYHHGIGINIVQKTGTQLYSGVKKALFGKKLHFRKYCSTRSFEDKKANNGIIYHEKTGSVSIMGHEVQLKPIRYSDHYLQEAMFSKIKYCRILRLPFGNQYRYFVQFVMEGSAPKKLIPGDLKIGLDPGVSTMTAYTGDKLHFIELSKEIDRYTKQILHLQRVYDHKMRVNNPSCFNDNGTFIKGAKILHTKGMLRTMMQLKTMYRKRSTYVKQSNNYNANSLIEEGIYIITEPMNYKALQKRSKNSVRQEKSSEVTDKNGTVKTVHKYKRRKRFGHSVLIHSPSAFMHDLQSKAIKYGGTVTYVNIKTYRASQYDHVTDTYKNAASQNDQNL

SEQ ID NO: 53584 - protein, 424 aa, Unicellular sp.
MKLAERHIIKKGHKFWAEIDELSWQSKNLYNAANYIIRQNFIYGHGYLTYNQMDSLMKQTPQYKALPAKVSQQVLRGLEKNWQSFFRGLSEYKENSEKFLGKPKIPGYKDTEKGRNLLVYTIQAMSKVSLRKGLIKLSKTTISFPTRVEKSIAEVRIVPKCDCYVIEVIYEATEQFLKPSLGARSLAPCEGAGSHRNNKIAAIDLGVDNLMAVTSNQPGFIPLLINGKPLKSLNQFYNKRRSFLQSLLKGNRQSSQKIRRLTRCRNQKVDDYLHKASCYLVNLLIAEEITTLVIGYNPGWKQEIELGKVNNQKFVTIPHGRLIEMITYKCQKEGIKVIITEESYTSVSNFLNLDPLPVYGEETGKPIFTGKRIKRGLYKTDQGFLVQADVIGSYNILRKAFPNVFNRYGIERCVVHPRRINLSK

SEQ ID NO: 53585 - protein, 376 aa, unknown
  TnpB Polypeptide
MIRAYRFRLYPNRLQEEALRHHLWLSKELWNRMLDYSKSKYKREGKFASKKELRDMVKHQGLFSQVAQELVDRLVDATFRFIRMKKNREDCGFPRFKSFDRLKSLCYPQMGFRIVGDCLKVTPFGEIKLKLHRSVKGKLKTLVLKRESSGKWFAIFTSEEESVVSWPNQGEKVGIDLGLSKLAVVSDGSIIANPRHIKKHERKIALLGRRLSKKKKGSCNRYNAKVKLARAYEKLANSRLDFLHKTSSSLVRKYSMISLENLNIKGMAQEKFGKQINDAGWGMLAGMLCYKAESAGCRIIFVNPEGTTQQCSRCGIVVPKTLADRVHNCPSCGLVLDRDLNAAHNILKRSTVGHTETEACEVSPKGVTMKQEAHTF

SEQ ID NO: 53586 - protein, 369 aa, unknown
  TnpB Polypeptide
MEYAYKFRIYPTTEQEDLILRTFGCVRFVYNYYLDLRIQAYRSTGKSPTRFEQDKDLTQLKRQKETSWLREVDKCALQNALKHLDSAYKNFYGGIKQGHRVGYPRFKSKKSRHQSYQTNSNIKVLDKAVQLPKLGRVKCRISKKVNGHILSATVSRSPSGKYFVSLCCTEVDISPLPSTGTATGLDMGIKSFAVTSDGVVYPNHKYLSKSEKKLARLQRQLSRKTKGSNRWEKTRLQVARLHEHVTNQRKDMLHKLSTDLVRQYDVICLEDLAAKNMVRNHRLAKNIADASWGEFRRQLEYKAAWYGKRVVTIDRFFPSSQLCSSCGTQWSGAKDLSVRRWECPTCGALNDRDLNAAKNILNEGLRLLA

SEQ ID NO: 53587 - protein, 376 aa, unknown
  TnpB Polypeptide
MITYNAKITGTPEDMKLIMDLMDEYRIIVNKASKVQFKNGFKSITEIHRAFYYSARGEHLGFPSQMVIKAEQESLSSYRAIKSNKHKITKPFEKKNLSLRLDKRIYSKTNNKNEIKITTKEGRKKFSIILYPKLQELMDKYEYVDPLIFVRDNKLMISLAFDTSIEMQKESLCLGVDLGIRRVAACSDGRLIIDKKFNAEKRKLRYNKRKLQSKGTKSARKHLNKLKHKERNKNKNQTHLVVNEILKTNANIISLENLKGIKAKKYKKQNKNAISQVPFFELRRILTYKAENMGKHVCLVSPAYTSQIDNVSGIKEGERKGCRFYAKSGLVYDADINAAINIARRSKHPISNGNFLDGQGEVKRPIACKSLLLERT

SEQ ID NO: 53588 - protein, 389 aa, unknown
  TnpB Polypeptide
VDRTIRIPLKPTKEQADALDETMIQFTKSFNTVCRTGWEQRNGNAYTLHRLTYRDCKTALPNLVSDLHIQARQKAAEAVKSAISREKKGLKTRCPQSLLCPPRYNLHTFTLNWEKGIVNLATTKGRVKVVFNLPQYAKYAIGYPTATADLLYRRNSFYLHVVVALPDVEFVSNGKAIGVDLGVTRPAVSSDNRFHGDRHMKEVVKRIFRLRRELQAKGTKSAKRHLRILAGREQRFRRDCDHVISSSIVRDIDAGTTIVLENLTNIRNRVKIYHGEASRRLHSWSFLQLRSFLEYKAEAIGCQVVRIDPRKTSQRCSRCGFIYRGNRRSQSEFLCRKCGFHLNADLQASRNIRDKYLVGWSISPSDALLSTSVSSHPSPTAWVGTSWRL

SEQ ID NO: 53589 - protein, 385 aa, Streptomyces sp.
VKVVAQVKLLPASAYDVDALAATLRACNRAANRASEVAFAKDLKRRDVLQEKVYYALRADFDLGAQPAVRVVKKVCDAYATLRANLKAGNYGPEGSKRRLKVESKPIRFREDAAQPFDDRILTWNLDQRTVSIWTLAGRIKGIPFVCSPEAMKLLASCKGESDLVMRDGMFFLIATIDIPEPDPYEPAGWLGVDLGIVNIATTSDGEIMAGRRLNRYRKRHLELRRKLQAKRTKSAKRVLKRIRRREARHSANTNHIIAKKLVATAERTSRGIALEDLGGIRARVTARKDQRARLHSWAFAQLGAFVEYKARRAGVPVVRVDPRNTSRQCSRCWHTHRSNRIDQARFACRSCGVILHADHNGSRNIAHRGDAAWQRGAVKRPSTA

SEQ ID NO: 53590 - protein, 511 aa, Bacillus sp.
MFRTHVPWWKEVNTVYRSYKIQIHPQHELFEYCDSLCFKAKNLYNITNYYIRQVYTSVRKEIRNENQLQVLRDIETHLPQMNDIRLKSYEKAKARPRKVDKKGKIIEPKLKLFKMPTQEKSFIGYTFVEALFKVMNQIDYTSMPSQSNQQTMRKVYDDWKSYFEASKKYKLNPASFSGKPKIPKYKPKNGRTTCYLTNQITEIKDGNILKLPGTHLQLNVGKISLSEGKLQQVRIVPSYGRYVLEIVFKGEQEKEIKRTDKQKNEFIFTPRRVIGIDLGVDNLATIVDNTGLKPLLIKGTGLKSTNQYYNKLRAKYMCIIRNGKGPKEGIYNTNRLISLDRKRNNRVMDFLHKASAKVVEVALERTIDTIIIGRNVGWKSGAEMKKSDKQTFIQIPYATFIEMIRFKAERQGIQVIDREESYTSKSSFLDQDPIPTFGDEIHPNFSGYRCSRAFYKIKGSKVLIHADVNGAFNIVRKHVKDAFEGLERKHFLQAPKKIIIMRKKAKLKALA

SEQ ID NO: 53591 - protein, 363 aa, Bacillus sp.
MMRTYKFRIEPTKDQRQKIDETLMYCRRLYNACLEQRITAYKGCGISLSYYTQKKELPQLKTACPEYKTVHSQVLQNVVERLDKAFQSFFQRIVKGEKKPGFPRFKGSNRYHSFTYPQSGFSLNGKYMKLSKIGNIRIKLHRQITGKIKTCTVVSKNGKYFVCLSCDGESWECLDSKNMVGVDLGIKNLATTSAGHFFPPPQFLRKSERELKRLQRIVSKRKKGSKRRKKAVGLLAKKHEYIANQRKNNAHQVSRQLVNQYAVIAFEDLKIKNMLKNHHLAKSIADAGWYQLINYTTYKAESAGKRVVLVDPKNTSQECSNCHEMVNKALGERVHDCPFCGFECDRDVNASINILHRAIELLL

SEQ ID NO: 53592 - protein, 471 aa, Bacillus sp.
MATPKERTPSFVATIRLKMDSKKEKQLLVLSDCARQLYNACLGECLNRLRKIQGTELYKETIQLSKTSEADVEKRRVNFKNLNETFGFTDSSIQSFGTKTKNDSKFIAEHLGTHVCQKISTRAFKATQKYAFKLAKKVRFKRKGEFVSVEGKNNKTFLTYSNGYVFVGKTLTLKCLLDPKDQWMQHALQQKIKYCRIIKKEVKGKNRFYVQLILEGFPYRKYELGKEEIGLDIGPSTIAIVGESKAELKEFCEEVVLIDKEKRRINRKMDRQRRANNPSNYQTNGTVKKGKKKWVHSNRYIHTRSEHRELERGIKEVRKQLHGRDTNQILQYAFSIQTEKLSYKAFQKMFGKSIGRKAPSMFLNMLKRKVKSRGGEFREFPTYSSKLSQTCHCGMIKKKSLKERWHKCGCGVVAQRDLYRAFLARYVTISNRVNIKKAKKEWIQFSHVLDECVSKLESIKTERKFISTFGI

SEQ ID NO: 53593 - protein, 507 aa, Bacillus sp.
MFLLDKEVKAMYCSYKVQIHPEHDLFNYCDSLCFKAKNLYNITNYYIRQIYTSLKKEIRNENQLHVLMDIETYLPQMNEIRLKSFAKAKAKPKKADKNGKINEPKLKLFEMPTQEKSFMGYFFLEALFKVMKQIDYTSMPSQSNQQTMKKVYDDWKSYFEASKKYKIHPEGFSGKPKIPKYKPKNGRTTCYLTNQITEIKEGILKLPGTSLSLTLGKIAHFEGNLQQIRIVPSYGRYVIEIIIKDESEKEIKRTDKQKNKFVFTPSRVMGIDLGVDNLATIVDNTGLRPLLIKGTGLKSTNQYYNKLRAKYMCIIRNGKGPKEGIFTTDRLISLDRKRNNRIMDFLHKASAKVVEIALERTIDTIIIGRNIGWKLEVEMKKSNKQTFIQIPHATFIEMIRYKAERQGIQVIDREESYTSKSSFLDNDPIPTFGDGTDTEFSGYRCSRAFYKIKGSKVIIHADVNGAFNIVRKYVKDAFKGLERKQFLQAPKKINIMEKKHAKLKAAA

SEQ ID NO: 53594 - protein, 377 aa, Vulcanisaeta sp.
MIARRAVLIRLPKDKCDIKYMRRLMALSNLAHRGFEIWVTDIPKNIQHQLYSFKNYTESLVFGSVPKRWFVRAWVPLKTLRVYGDGSMKGDKGAPVVLDFRSSVIRLRQVCRSEPGFVVEVPMPRWVIERVNEGGDIKFAMIGLKDDKPYLALVAERVVEPYVPSGYGLVVDVNAWSNGVAYGIVNPSNRIAEYSPLRPNLRLIDMWYHKAEKLSKKLGKLKRLGLGSTPGAKRLWREIKALRRKVYAYLRDFAQKRARELALKALRLRAEVLIDDMIEESRRELIEEGLPTGLRKVYLAETRRFVKLLTTQLQWYGVPYRFERLPSKVCPVCQHELTQEEGRTMVCTNCGFKAPRDKIPMYWAMKLGMTTSPPYKG

SEQ ID NO: 53595 - protein, 218 aa, Bacillus sp.
  misc_feature (179)..(210): Xaa can be any naturally occurring amino acid
MTKHNKAYKFRLYPTEKQAYLIRKTFGCVRFVYNKMLAERKEVYETYKENKEELKKQKFPTPAKYKVEYEWLKEVDSLALANAQLNLQTAYENFFSGQHDFPTFKSRKSRKSYTTNRVNGNIMLFHGYIKLPKLKMVRLKQHREIPQNHIIKSCTISMTPTGKYYVSVLTEYEKEIVQXXXXXXXXXXXXXXXXXXXXXXXXXXXXXXXXTSQWLNCT

SEQ ID NO: 53596 - protein, 398 aa, Streptomyces sp.
VTTSHVKRAFKYRFSPTDAQAAELSRTFGCVRKVYNMALAARTEAWTQQERVNYNATSALLTAWKKTEELSFLNDVSSVPLQQCLRHLQVAFTNFFGKRAKYPRFKSRKKSRRSAEYTTSGFRFRDGKLTLAKMAEPLDIVWSRPLPEGSKPSTVTVSQDAAGRWFVSMLCEDPGVQPLPVNENAVGIDVGLDHLLTLSTGEKIANPRHERQDRARLARAQRELSRKAKGDGANRAKARRKVARVHARITDRRRDHLHKLTTRLVRENQTLVIEDLTVRNMVKNRSLARAISDAAWSEFRSMLEYKAQWYGREVIAVDRFFPSSKLCSTCGALQEKMPLSVRTWTCDCGTTHDRDVNAAKNLLAAGRAVAACGAGVRPQRSSPDGQSAMKQEASRREP

SEQ ID NO: 53597 - protein, 488 aa, Mycobacteroides sp.
LLVARFEIPEGWTAQAYRFALDPTPTQLRGLASHAGAARFAHNHMLALVKAVMDQRSAERSYGIGEDRLTPVLGWSLPALRKAWNQRKPLCAPWWAENSKEAYNTGLDGLARGLDAWSASRRGQRAGRAVGFPRFKTSRAPRSVRFTTGVIRIEADRRHVTLPRLGAVRTHESTRKLARRIEAGTARILSATVRQDSAGRWHCAVQVIVAARARPAHAQRSSHAVVGVDVGVKADSLLVIATSDGVEVERIAAPKSLSAAQARLRALQRRAARQHGRYDPATKTKHVPSKRWRRTQDRIGRTHAHAAAVRRDVLHKATTALAQQHQVVVVETLNAAGMRAKGGSRKRGLNRALADAALAEIRRMLGYKTRWYGSHLVEADRYFPSSKTCTACGRRKPNLTLADRIFECDDCGMRIDRDLGAAINLARLGVPTVLGEQSPAGSGPVAGRGATRETEPAPAGNAAGYETSTPHHRPVDQTGTASPQGEAA

SEQ ID NO: 53598 - protein, 424 aa, Acinetobacter sp.
MKINKAYKFRLEPNAEQELVLNKLLGSARFVWNQILAVSFEMLANNERINKVNLVNKIPELRKKPECAFLENSSNGVSLQQKVRDLGDAWGKFFNKKEQAKLKQKPFRAKKPRFFKLSDGGEVQLRPLMPRFKKKSDGYDSIRIVQFGRYCWVKGNQVKLPNDIGVVKFRKSQNIVGEIKNVTISKHVGKWYVSFGAENTVEAPVHPSKSAVGIDLGVKKLITTSSGQVFDPINSFKANQVKLARLQRKLRKKNKFSQNWKKLNLKINTLHHHIANIRHDYLHKVTTTLSKNHAMIVVEDLKVANMSKSAKGSIEKKGKNVKAKSGLNKSILDQGWSMLVNMLVYKQQWRGGLLVKVDPKYTSQTCSSCGHVFSCVECSFGENADINASRNILAVGHTVLSVEGGCGKGRLAKQKASEIREEVT

SEQ ID NO: 53599 - protein, 519 aa, Actinoplanes sp.
MGAADRHRVVAAIRGWNSAGSHTADQALEAGHRPARQPDRVHRRDRAPRPVRSLRRDEQGRLGMKAIQAYRFALDLTPSQERDAYAHAGAARVAHNWALARVKAVMDQRAAERSYGVPDEQLTPLLSWSLAGLRRAWNAAKRDVAPWWTEVSKEAFNTGLDGLARGLTNWFNSRRSRRAGRPVGFPRFKSRRRTTPSVRFTTGAIRVESDRMHVVMPRLGRLKLHESARKLVRRVENGTARIMSATVRRDSGRWHVSFTVEVERADRTPARPGSVVGVDVGIKHLAVLSTGALIDNPRHLVAAQARLRVLGRALSRKSGPDRSAGRRPSKRWDRAASRLGRAHARVAHLRRDGLHKLASGLARTYATVVIEDLEVTGMLANRRLARHIADAGFAEIRRQLAYKMTWNGGLLLIADRWYPSSKTCSACGAVKTKLALSERVYTCESCDLVIDRDRNASLNLAALAAGIDTAGSGPVAARGADQKTRVRGQVALKREPGSASAGKTGTVLSQGRTTNRVFA

SEQ ID NO: 53600 - protein, 412 aa, unknown
  TnpB Polypeptide
MRGKTTPVKVVPRGEYMLTLKAQGILVEGSPNELREELYMTRKAMQYVVDALWELDKVPSTNQSHQMFYKLLRRQCFRAHQVKQIYKYGRALVKSAKDNSGKKPVLKKLSVRLDKYDAWVDLENQIVIAKLRNRVFKIKLLHRRDYIRKFMGRKWYEVIISIDKRGKIWVAIPFRWMYRPYRPRRLISLDINLRKIVVYNGGSVRRINTRFTEALYLKHLAEKMQKRHSYAWRRNEKWLEIIRALHRRSRNIVIDWCRKFAKYTVLKARRTKSAIVLEDLEKLWFSSSQKSKTLADKLSRLAYRKLQLAIITKAIEYNVPIVFVDSRNTSSTCPRCGAKLSYNHRLAICRSCGFMSDRDKVGAMNIYLKAIQALAPRLGLWGTHPMTNETQAKGGLLKHEPMTNHIHSYTNI

SEQ ID NO: 53601 - protein, 392 aa, unknown
  TnpB Polypeptide
MIIYEFKLYGTQEQYQAINECIKVSQFMRNKALKKWMDSKDSEQKENRYSLNGLSKTLAKEFDFVKALNSSARQAGAERAWSSIKRFYDKKARYPKFQHDNRSVEFKISGWKLSDDYKKLTIKSCDVGTLKMKGTRDLQSFSTDKIKRVRLLRRADGYYVQFCINAERKIKHAFTGKAVGIDVGLNSFLTDSNGEPIDNPRFLRKSEKRLKRFQRRFSKKKDGSENKKEARGKLARLHLKVSRQRKDFAIKTARQVITNSDFVGIEDLRISNMVKNRKLAKSISDASWRAFRTWLEYFGEICGVRVVAVSPAYTSQMCSSCGALVKKGLECRVHECSCGCVMDRDENAAKNILTKALRLWGTQIHKTLLERSPLHREVLMQVVSLKEESAGL

SEQ ID NO: 53602 - protein, 557 aa, unknown
  TnpB Polypeptide
MVWSQGTTISVKVPVDWDAMTNRTQQRLRQIVGRDTRVVHAFLGIIEEHENQLVIGYDQDRIDDGKLDQLTMTALRVKSGYSQRTTVPHDFKARFPRISQNEMTECRQTAVALYESYLKLRTKKGMTASRPASISRDRRIPRWVFSQRFRLIEKETVASRWWLDIRDSLDSVMEGRTYHDRLRIPLKMSPFHLNQIRKGEVKAVQLFTDRKRKWWVTIAVRVSLDESPEGKLPVAILGIDLGIEKAACSTLLTPEKTRETRYFIQREKIKVIKKYDRLVADLQREIHARRNEGLPYGRVGERLQQLCSKREDIAREYDRVLVRQILDYILELSQKYTLHVAIGRLKNIRVRARRGNYKGPEFRKMIHSWAFTRITDSLERGLAQLGWKVHGKNARFRAVPEAWTSIICWKCGAKGVRPKQNYFRCPSCGHRTNADRNGSINIAARILMLTKSLHSVRGLGLWTRVLDRTRRAQPKARGKSSRGKSLLSTREQSSGSGESAAVHSVQFDLTSSGDGTGESDHDPAVGRTVETLAVAGSDEPVSGQEKEARSTGGIPSQ

SEQ ID NO: 53603 - protein, 357 aa, unknown
  TnpB Polypeptide
MKDIINLEGEINYKLLKAQVAQQCLKQLDKNVKSYVKSIKDWKKHKEKYRGMPHFPSYKGNVNQLVYTNQCASIKDGFINLSKDLKLFIPQWNKYKERLTAFQQIRILPLLDKTFDIEIVYNVKDVINERLDNDRYASIDLGIDNLVTLVMDKDKPLLFNGRSVKSKNQWFNKEISKLKSALPKGKRTSKRIRTLYSKRNRQMPDTFHKMSRYIVNILIKNGIGNIVVGYNRGWKDSIQIGKRNNQTFVSIPYDLLIGYLTYKCELCGIKVIITEESYTSKCDALANEEIGKHSVYLGKRVKRGLYCSSIGKLVNADVNGALNIMRKVIGDSPYIKEIIDSGLLFNPMRVKTHKGNY

SEQ ID NO: 53604 - protein, 389 aa, unknown
  TnpB Polypeptide
MGHRETVGQAIQYNTIKVRLYPSVNQKELFQKTFGCCRYIWNQMLSDHERFYLETDVHFIPTPAKYKKSAPFLSKVDNQALIQEHNKLSQAFRNFFRNPGAFGYPRFKRKKDDRDTFTACNQFFGRSATIYITQNAVRMTKVGLVRAVFPRRPRSGWRLTRITVERTRTDKYYGYLLYACPVRPPQPVTPTEETTVGLNYSVSRFYVADDGTAADPPRWLRQSQDKLCQIQRQLCRMQKGSKNYQEMVQKYRLLHEHIANQRRDFLHKESRRIANEWDAVCVRSDSLTALAAKTGGGCILDTGFGMFREMLRYKLERQGKSLLLVDRFRPTTKVCSVCGYVNEDLPAEALRWRCPVCGTEHRRERNAAANVKAIGLGRYRTETAAGGIG

SEQ ID NO: 53605 - protein, 263 aa, unknown
  TnpB Polypeptide
MEVLLEPGIRLRSVTLAVDTVAIAYSKQTPMVQCNGMMGIDRNLNNITAADSLGNILFQDLSRITMVKSASRQTIARFKRDDSRIRRRIAGKYGRIEKNRTQWIFHNATKKLVSHATRNHLGIVLEKITGIRRLYHRGNGQSRYYHARLNSWSYYELERQVVYKASWNGLRVIHVNPKGTSGKCSVCGDQMVFSKESRTLHCSTCGYAVDRDVNAACNILSAGLRFSLKGLSDEAMKGNPMTTVISRVDDSQSSLVTEDSTEP

SEQ ID NO: 53606 - protein, 471 aa, Andreesenia sp.
MVLTEEVRELETVVKTVKQHSYSLDNNALKELKLIGERYRCVKNYVYSRYSGINSIVLIKRDRDIRDEWVKTKFAEQWKLPARYWKLALSEAVSNIKSSWSNIKLRVKSAVNKNKKLSKQELHYIRYILKADELYQRILQNKSIQIPEAIKLYRLDTGYLNSLIRRLTRKYKGKVPYSNTDTFSIDTGLYSYGDGQIRISSTKKGKRVTVKLKDRNIYDRTMTVKFKDNRIELHCPLKIAKKKHGYQNIIGIDKGYRTLFAVSGKTTYGENLNNYLSEETERLKEVNSARNRFYALKNRYLSEGNYAAAQNIELNNLGKIKYNRKKAKHDQRVKSYINHSINGLIKNEEPGEIVMEDLSFASWNDRFPKSVKRKLSRWIKGYIKARLEFKCEYNSIKYTYINPAYTSQICSKCGEFGARSGEVFNCTNCGTIDADINASLNILKRRDDSEIKLHTDYRKVKEILQARIDRQ

SEQ ID NO: 53607 - protein, 394 aa, Saccharopolyspora sp.
MSRYRLLPTGAQEAVLLTHCAHARFVWNLAVEQHAHWRPGRLSAPGYNEQARQLTEARAEFAWLRAGSVTVQQQALRDFHQALANFCAGTHRRPMWRKAGRNEGFRQVGVRPEHVQKLNRRLGQVWVPKIGWVRFRRSRNVPDSVRSYRVTKDVSGRWHIAFAAKPDPIPSPGNGRVVGVDRGVMVSAALSTGEMLRCPGSTIGEERRLRALQRRLARCVPGSNRRKRVKAEIAKLKAREADRRKVWVEKTSTDLARRFDVLRVEELNIQNMTRSAKGTADRPGSKVRQKAGLNRGILAHGWGMLVARLAEKAVGRVEKVKAGYTSQQCSDCGHVASESRKSQAVFRCVSCGFSCNADVNAACNIAAGRAVTARGDLAVGRSANREPQLATSTA

SEQ ID NO: 53608 - protein, 256 aa, Saccharopolyspora sp.
LRSPARKSGLKTLVDHRQGESSLLLRDGKWFIIATCDVAEEPRFEPVEGIGVDRGINNLAITSDAANCSGRRLNRYRRWQAKKKAEIQAGNTRSAARLLKKRAKREARHDAHMNHKIAKDVVAVAQRTERGIALEELGGIRERVTVRRDQRATQSSWPFARLGDYVAYKARRVGVPVIEVDAHYTSQHCPRCGHTERANRPNRDFFSCRRCGLAGSADVVAGVNVRDRARSAWVFVNMPDRTGYRCVCDPSRHSQR

SEQ ID NO: 53609 - protein, 418 aa, Saccharopolyspora sp.
VGDRGTGSDAGPRAPVRQARPQVVGVVSSEPVQRLHIPCAAGRVPAFAVASAHVVVVVVFRGVGGCGERRYGTSVHRHPVGAHVRRAYKFLLRPTSKQQQALREMLADHRALYNAALQERRDAYRHTSQTRIRYGDQSSQLKAIRAFAPERQGRWSFSSQQATLRRLDKAFAAFFRRVKAGQEPGYPRFKGAGRFDSVEFPKDGDGCRWDSTPHDTQTRVRLQGIGHIRVHQHRPVQGRVKTISVKRVGDRWFVVLSCDDVPAQPLPATGRMVGIDMGVAHFATTSDGEHFPNPRYAREAADELAEAQRELDHFPKRVRAANRSKKHGAAAHKVARLHGKTRRQRLDHHHKTALVLVRAHDVIAVEDLNIAGMTRAPKPQPDPDQPGACQRCGHTANADVVGSVNILSRAGLVLSDTA

SEQ ID NO: 53610 - protein, 478 aa, Saccharopolyspora sp.
MLTGRRYRLKLSTAQAAQCEEFGNICRAVWNTALEQRREYRRRGAWMNYNEQAGQLADAKTEHDWLQTVPSHILQQALKDLDRACRDHGTFRVKWRGKQRWNPSLRFPMGKLIEVERLNKRWGRAKLPKLGWVQFRMTRQLGGAVRSATVSRDGRDWFVSFLVDDGAITPERHAAPHSGVGVDRGVAAAVATSDGKLIDRDFVSPGADERYRGLRQKLSRQKRGSANRKKTLGKMRRLKRRERDRRADFCSQVAAELTDRNALVVLEDLRTRNMTRSASGTAGEPGRNVAQKSGLNRAILDKGWHKFELALRNAARYTGSEIVKVPAAYTSQTCAVCRAVDPESRESQAVFRCTQCGHTAHADVNAAKNILAAGRAVTACGDLAVRRSVKQEPQPALALVGIPGFSRRKDVKYSPERWSAAPSVSRRNTAVACATGVIRPAARSPSTQEAMRCSHGLPLAAAFSAPASVIPMSTRPGW

SEQ ID NO: 53611 - protein, 405 aa, Saccharopolyspora sp.
MLTGRRYRLKLTTAQAAQCEEFGNICRAVWNTALEQRREYRRRGAWMNYNEQAGQLADAKTEHDWLQTVPSHILQQALKDLDRACRDHGTFRVKWRGKQRWNPSLRFPMGKLIEVERLNKRWGRAKLPKLGWVQFRMTRQLGGAVRSATVSRDGQDWFVSFLVDDGAITPERHAAPHSGVGVDRGVAAAVATSDGKLIDRDFVSPGEDERYRGLQQKLSRQKRGSANRKKTLGKMRRLKRRERDRRADFCSQVAAELTDRNALVVLEDLRTRNMTRSASGTAGEPGRNVAQKSGLNRAILDKGWHKLELALGNAARYTGSEIVKVPAAYTSQTCAVCRAVDPESRESQAVFRCTQCGHTAHADVNAAKNILAAGRAVTACGDLAVRRSVKQEPQPALALVGIPRL

SEQ ID NO: 53612 - protein, 385 aa, Saccharopolyspora sp.
MNIVVQVKLEPDARQVSVLESTLCALNKQANKVSEVAFDRDVKRNYDLRKLTYNDLREAGIGSQAAQHIIKKVCDAYVTLKANIKAGNLGKQGSERRVKAESKPISFRLDSAHPYDARNLSFALEKKTISLWTVEGRMKNIPFTGSEKDLARLARFKRGECDLMRRDGMWLLAVTVDIPEAERYEPTGFIGVDLGIVNIATASSGYQAAGRGLNRYRKRQIALRAKLQAKQTKAAKRRLKARARKEARHVKNINHCISKTIVTEAKRTGRGISLEELQGIRERVRLRKPERVTLHSWSFDQLGQFIVYKANMAGVPVVYVDPAYTSQMCADCGYTDKKNRVSRGSFTCRSCGHAQHADRNASRNIAQRGNAVWNAGRESRVPVGA

SEQ ID NO: 53613 - protein, 432 aa, Saccharopolyspora sp.
VAFAQHWVPVLRHGNQVLVEHAEAMPSRPVRNSLCSAMKPTVYDHGVQLRYGFRLYPTPDQQATLAQAFGCARVVFNDAIRARQVAYAEGLPAPKSAELSKTLITEAKKTPDRSWLGTVSAVVLQQALRDAERAFKNFFDSISGKRKGRKMGAPRLKTRRDRRQTARFTANARWSITPGGKLRLPKIGDIPVRWSRALPSMPSSVTVIKDAAGRYFASFVIDTDPEPIIDDSPEIGVDLGLGHFAVLSDGGENHRTEVLAQSGEETQTGTAKPLPHRERQPKSGQGQDHGGSRSCAGRRRTPRVPPPALHASDSREPSDRGGRPGGIGTGTHPPGQVRTRRRMVGVRGDAGVQGPVVRAQGGPDRQVRTHQSGVLELRRQRRTQTAARAHLAMPGVLGASGQGHQRGGQRREGRWTGGDSLRSARKPRTCSG

SEQ ID NO: 53614 - protein, 461 aa, Saccharopolyspora sp.
MSVVLQAYRFALDPNPVQEAGLRSHCGAQRFAFNWGLGKVKANSEQRKAEASYGLDGDELTPPVGWSAYGLRKDWNQAKDTVAPWWQENSKEAYSSGLSNLATALKNWGDSKKGNRKGRKLGFPRFKGKRSGLSCRFTTGSFGLADHDRRHVKLPRIGVVRTHESTRKLARRVDTGAARIRSATVSYRAGRWFVSFSVEITRNDPAPAQPGVTVGVDLGIKSLAVLSTGEVIDNPKHLEVALRELRRLQRQASRRIGPDHRSGQKPSNRWRKTQARIATLHTTVANARRDGLHKLTTWLVRTFGAIVLEDLNVAGMTRNRRLARQVAGVGMAELRRQVEYKASWAGLRVHIAYRWDPSSKTCSDCGAVRTKLHLSDRIFTCPSCGMSMDRDLDAAQNLANLVDATTSSPSCGATENEPDGNPHKTRTTRAADIATGRPAPNSAGQRRHRKVPTHDTLSHVS

SEQ ID NO: 53615 - protein, 396 aa, unknown
  TnpB Polypeptide
MISYKFPIYPNTEIQQKIEMNLELCRQLYNTFLETLNTPRLDGHKWRKYDTQKLIVQIKQDRPEYKQIHSKVLQMVNYTLWSNIKGLSELNKKGFKIGRLRFKGKGWYKTLNYNQSGFKLDVEHGTIEFSKIGMIKCNYLREIKGEIKGVVLKRQSNTKYFAIIQTEQEKQPLSKTEKSIGIDVGISSFAVDSDGNSFENPKFIDQTLQKIKKEQRKLSKKKKGSQNRHKQKLKLAKLHEKVVNQRKDYLHKISRYYINKYDTICVEDLQIFRMTKAGERDHRSRKTLHRHILDASWGQFMNYLEYKAENADKQVIFINPKNTTQRCSQCGQIVQKELSDRLHECPFCKVILNRDYNASLNILKAGVGHSSVPTELKPLHSYSSHEVITGQVLTMT

SEQ ID NO: 53616 - protein, 405 aa, unknown
  TnpB Polypeptide
MLDKQFNIKYNKNMQSYKFKIQPNKEQKEKLDIMFGCSRFVWNYFLDLNNKIYLEAKEKDLKKKHLNYYDCANKLTFLKKDNDWLKKSNSQSLQQTLKDLDTAYNKFFQKKSGFPNFKSKKNNQSFRIPQFFTVKENRSCFPKFKQGIKTIIHREILGNIKFATVSKTKTGKYFVSITTDYEVKKKRISDNNVGIDLGIKDFAVCSDGKKYNLKINEKNIKFLHKQISKKKKGSQNRKKAILKLAKRYEKIDNIKQDFQHKLSDKICKENRLIAIEDLNIKGMVKNHCLAKSISNQSWYSFVTKLKYKSIRYGGKVERTNRFYASSKTCFVCGYINQDLKLKDREWECPRCNKKLDRDINASQNILAQVLRELNLKDGRNARLKPVELSLVDEAMKQEAIWSLAR

SEQ ID NO: 53617 - protein, 340 aa, unknown
  TnpB Polypeptide
MGRNELRQLALDLRKRNPEFQALHSQVAQQVAERFYQARQRFFEGLANKPKKKKAHRYLSLVYPQSGWRLSNIRQVGQGENTEKKKRARLYLSKIGFFTVVVHRDFPSGRVSQVCVKLYPSGRMYVVFLVEEEASNQERAAVGGPRRAVAVDLGIARLATLSDGRFLENPGPLERSLGRIRLLQRSLSKKKFLSKNWFKVKRRLAKEYEYVKDFRRDLFFKLGALLAEEYDILVLEDLNVVDLIQKGGTRKRRLRLYDCAFSELRRILGWQFQKRGGAVLAVPAYNSSRECFQCGGINQSLTLKDRVFRCPHCGFTLDRDLNACLVLLKRAGWVPPAWCA

SEQ ID NO: 53618 - protein, 567 aa, Streptomyces sp.
MARQRGGKRVLRAIAPAFTVAAPSGARIRDRLRVDGADEKVLTLVGQHLGRHRRADLAERVAIGLVPVKEARRAGRKKKLTAVSSSRRAGAMTRASEDQYQLSMRCLYDQRAGLRRAIKKIARRLAVPCEQRTGRVRGYQDRGERFQKQRRLQALKVRLAVVEQRIAEGRPSVVVGGRRLAKLRHHLNQARLTAKEWRERWEAARLFLTADGESGAPHGNYTITVDPADGSVTIVLPEPLRHLANAPRGRYRLACTATFHHRRPEWLDRVTANQAVRYDIVRDPVRGRWYLDASWSAAMTVLSSLQEIRAAGGRMLGVDLNADHLAVCVLDPHGNPVGEPLTVPLELTGPAARRDGRLRAAVSTLIKIARMHGCMGIVVENLGFTDARQTGRETMGRGRRGKAFRRTVAGIPTARFRERLRGMACHQGLVVVAVDPAYTSRWGAQHWRAPLGDQSKSTVTRHHGAAVAIGRRGLGQRIRRRPGVTAPDQRIGQRRATGQTASTPRPRGTTSPPRTTGTPHQGGKTCRSRSDQLAPLPAPRTVRGAPGARRLPPGPEHAGLTNAGQQC

SEQ ID NO: 53619 - protein, 564 aa, unknown
  TnpB Polypeptide
MEPYILTINADKRYYLSEDNLEGGKDLIETIGLFNDYKMDLYNQLFDSRFHSKGPLAGQTYSRYLKGKYSVNDYYACAIYGAASGTVSSQWERNVMNIRSLNDQIKVKQGKIASAQKDLDKKRQIKASIVTYVKTGKWNKPYPQCKLKVSGKTIVTYQRKKVPLDCYERTIEADIRFLKKKLSNLKFGLDRSKKKLEKMAKKLKKIVFGSRVFYSKKDQPDTDIKQWKKEFNERRHHSMSLPGRHTSKVGNFLAAYDLKERTLTIRCMNGRKCVFKDFQLVRYQDVFLSKFDVSPKERESICYNFKIEKDEYGRTYIIPSVTMSLPVEGQNCGFSNGCVSVDLNVDHVAVSNIDARGYRLESFTVPFDLKGKTSGQISDILGRKMSIIGAYCEKVKKCLVMEDLDTTGSKSRLQYGSKLRNRKISSFAYKKMTESIRAQGYKRNFAVYKVPPEYTSQIGKMRYMRQMGLSIHEAASYVIGLVGMGKTELLGLPLELEELLPESAPQDLKKRWAMVSRAFKNIRTHAFYQRVTPADWSGRKKKGLKNYAAILKEKDDLSPIPSKA

SEQ ID NO: 53620 - protein, 373 aa, unknown
  TnpB Polypeptide
MEDYARGYKYRIYPTKEQETKFAQTFGNVRVVFNYFLGVRQKAWKEEQRSVGYVETSSLLTQLKRQPEFTWLNLSDSMSLQESLRDLDNGFQHFFTGDANYPKFKSKHNAKKSYRTRNQNNGVRIEGNKIHLPKVGWVKIKLSRIPNGVILNATISKTSTGKYFVSLCVREGWNNVLKRNNGGEVGVDVGVKTFYVDSNGNVVENPRTFTKFQRKLARAQRRHARRKDGSHRKQKARVAVAVVHEEIANIRRDFQHKESTKLVSDNQVIGIEDLNVAGTLKNHRLAKHIADVSWSSFFRMLKYKSVLYGCDLVQVGRFYASSQTCSVCGEKNPEVKNLDVRAWDCPHCGAHHDRDRNAAINILHKAKEILAKS

SEQ ID NO: 53621 - protein, 377 aa, unknown
  TnpB Polypeptide
MSKEFGLNLMPLAFKPGIHKPAAIITFTPLYHKNYMYSESCLCCMKKTYQFRIYPNKNQEVVMNRTLSTCRHLYNDSLGERKRQAELNELERTFGVCPWGKPQWIEYKDQQNALPLTKTSYQKEVFSQVLQNVLKRVDRSFKNFFNGFGYPRFQGRDRYNSFTFPQSGFKIKSGKLILSKIGSIKIVMHRPIEGKIKTCTIKKDIDQWYVTFSCEIEDPIPVEIKTETGIDVGLSSLITMSNGQQIKPPEFLRESEDKLTQEQKRLSRKKKGSGKRKRQRIIVAKVHRKIRNQRTDFAHKTAKTLVDTYDLIKFEDLQIRNMMQNHHLAKSISDAGWYQLMTLTKSKAGYAGKVVEFVNAHHRIAVVVIIQSRKPYP

SEQ ID NO: 53622 - protein, 413 aa, unknown
  TnpB Polypeptide
MKYRYFQYRLKPTEEQRKTLESYGSATRWVWNYFLELNKKEYEEHKKFVFRNEMLNLLPKLKKEQTWLKEVPSQALEQKLVDLEKAIKNCYRNKFGFPKFKTKKHRSDSFRIPQSSGEAKHIKCTKRAIRIPKLGWVKWIKHRPLKGQIKLITIKQNGQHWYVSVLCEQEDDVLMNEVNSVIGLDFGLRSFVTDSTGNRIESPKIYQKKLKELKKRQGKLSRCMKGSNRRNKQRLRVAKLHQKIKNIRKDFLHKLSRTIAKSWDVVGIEDLNIKGIGKNRHLSKSIFDSGWGFFIRCLEYKMREKGGYLVKIDRFYPSSKICSHCGQIKPMPLHVRTYKCDCGFVCDRDTNAALNIQHEAINIISRTGTVRIQARGDTSGGDVEYAMAYAISSHVSMNREKFLSTGKEAVLYY

SEQ ID NO: 53623 - protein, 488 aa, unknown
  TnpB Polypeptide
MKRANTFEVVPQTENDKECLLRLLDASASLWNELTYERRQNYFGDGDVWDTSEYRGRYNGVVGARLFNRSRARTAKRGGRSSPSRRKAEYANPPSYWGNEEDGRELRTYIRCNQYTIEWGKRSRLEIPVGQELKDEYGLGYHERLRLEVRGNPKWDGKQGRLELEYDEVSDTFRAFQPVTVPDSRLDSPLASEEAALDVGANNLVACSTTTGNQYLYDGRELFGRFRETTDEIARLQSKLREGRYSSNRIRRLYRQRTKRRDHAQNALVRDLVERLYDEGVATVYVGDLTDVLEAHWSVRVNEKTHNFWAFKKFIHRLACVCEEYGISLETESEAWTSQTCPECGDHESSPRGYADVSMWLRGGHADLTASETFLRGKQQLRNQADGTARAIRVGRPRLVGETIPSRKSQRSAHEPASCLRGSVAEPSTEILASAGRNRTARPYKIVGRGSSNVRDHGETGLSRRKNRTMVWVLHGNKQGVREFRAGI

SEQ ID NO: 53624 - protein, 543 aa, Streptomyces sp.
MGELRDLASPFVASGPSGVAVRTRFKKLTPDDGKVLRLMGGHLGSLASKDLKARCRDGLEHSAETWAGRKRGLTALSSSRWAGSITKATHDQWALARRCQLAHIQNLEAGIRTIEQRLSQPVGQKGAKRAPGGYRSRREWHAKSRRLRVLEDRLSAARADREAGVVHVVRGGKQLARTRHHLDEAGFTKGEWRRGWEAERWFCQADGESGKRYGNETIRISPEGEVSIKLPAPLAYLANAPYGRYVLACRVVFAHRGGEWADRVAADRAVAYRIHLDTGRDRWYLTASWQTPVTPAIPIEAALAHGVIGVDMNADHLAAWQLDVHGNPTGAPRRFFYDLSGTAEHRDAQVRHALTRLLYWARDCGVRAIAVEDLDFAAEKTREKHGRKKRFRQLISGMPTGKLRARLSSMAVQTGVVVIAVDPAYTSRWGAQHWQKPLTSTTRKTTRHDAAAVAIGRRAQGHPIRRRTAPPPAHRSDEQGHRTVQADRRVPGCEGTRPRIPGPRTRSVGAGRGANAGNQNAQHRPGRSAEHEFWQQDSLPLSL

SEQ ID NO: 53625 - protein, 459 aa, Streptomyces sp.
  misc_feature (459)..(459): Xaa can be any naturally occurring amino acid
VAVRTRFKKLTPDDGKVLRLMGGHLGSLASKDLKARCRDGLEHSAETWAGRKRGLTALSSSRWAGSITKATHDQWALARRCQLAHIQNLEAGIRTIEQRLSQPVGQKGAKRAPGGYRSRREWHAKSRRLRVLEDRLSAARADREAGVVHVVRGGKQLARTRHHLDEAGFTKGEWRRGWEAERWFCQADGESGKRYGNETIRISPEGEVSIKLPAPLAYLANAPYGRYVLACRVVFAHRGGEWADRVAADRAVAYRIHLDTGRDRWYLTASWQTPVTPAIPIEAALAHGVIGVDMNADHLAAWQLDVHGNPTGAPRRFFYDLSGTAEHRDAQVRHALTRLLYWARDCGVRAIAVEDLDFAAEKTREKHGRKKRFRQLISGMPTGKLRARLSSMAVQTGVVVIAVDPAYTSRWGAQHWQKPLTSTTRKTTRHDAAAVAIGRRAQGHPIRRRTAPPPAHRSX

SEQ ID NO: 53626 - protein, 263 aa, Bacillus sp.
  misc_feature (254)..(255): Xaa can be any naturally occurring amino acid
IRFPKTSIKLNIGKLFGYIENLKEVRISPAYGKFRVEIVTEQSEPAAEHVDNNRYMSIDLGINNIATIITNIGTKPVLVKGNVIKSINQYYNKQKAHLLGILRHGKEPKEGPHTSNRLERLHEKRFLKIKDFFHKISYRIIHFAVQHEISMIVIGKNTLWKQKSDMGKQQNQSFCHIPHNQLIEMITYKANRQGIAVQVVEESYTSKASFLDNDEIPTYGEEDIPVFSGKRIKRGLYRTKQNKLLNADVNGSYXXQLCQLHSC

SEQ ID NO: 53627 - protein, 389 aa, unknown
  TnpB Polypeptide
MAYKTEINPTFEQIQRINQTIGVCRFIYNFYLAHNKQVYEKEKCFLSGMEFSKWLNNEFIPNNAEYSWIKDVSSKAVKQSIMNGEKAYRRFFKEQSKFPKFKKKNNQNVKIYFPKNNKTDWVIERHRIKIPTIGWVRLKEFGYIPINSKVTSGTVSQRAGRYYVSVLVEEDIQIQNNNTNTNQGIGIDLGIADFAIVSNLEEPYKNINKTIKVKKLEKKLKREQTKLSRKYESLKLRSKNKGKGDVTRQNIQKQVVRVQKLHQRLANIRGDYNNKVISEVVKTKPQYITIEDLNVSGMMKNRHLARAIAQQNFSSFRTKLQYKCYVNGIELRIVGRFYPSSKTCSKCGTIDKDLKLSDRTYICTGCGYVIDRDKNASINLANAKTYKIA

SEQ ID NO: 53628 - protein, 328 aa, unknown
  TnpB Polypeptide
MALSKTFPHILSTPEAIRDQAISDIIASRKSVYTNRQRGNTSGAWSTFNYRTKRDTHQMVRVPSRNWGIHSSGFFADIYHASKLKSRESLPRRLQCDSKILKDRLGRFFFCFPETVKPAHTSKAPDPSKHCTIALDPGVRTFMTGYDADGFVVEHGAGDISKIRNLCLSYDRLVSKMHGGATKHKQRCNMRKAALRIQRKIRTRIDDSHRRLSKWLCKNYRAVIIPTFGVSGMIKKKKRNIGSRTARAMCNWSHFRFRQTLMAKSREYPWCRVLETQEPYTSKTCGQCGQLNQKLGSKKTFVCPSCGYKGDRDVNATRMFLVALLHCE

SEQ ID NO: 53629 - protein, 352 aa, unknown
  TnpB Polypeptide
MLETVKQQYEDTGTFPGKYDLTSHFKGRGGEHVPATTVQTLADRLSKSLKRFLACQALTTRVGFPRFKGANRWHSLQLRQYGKDVSLHEDTKHLIVPAKLGKSLKIKVHRPIEGTPKTVHLVLRADGHWYALIVCETVPQTEHPPSTCTHPDIGIDVGLKVFLADSEGNVVENPRFYRTSQKTLRRKQRQLCRRKKGSHRRRKAAKNVAKTHLKIARQRRDFHFKVAKPYTEQYHRIAVEDLNIGGMVKNHHLAKSISDASWGTFLNMLEAKAENAGHQVIRVNPRFTTQACSHCGERIPKSLSVRTHMCTSCGFVADRDVNAAKNMLLKARAWPSGTVSNGSPVELRSPQL

SEQ ID NO: 53630 - protein, 415 aa, unknown
  TnpB Polypeptide
MNEMSYFIGVKVRIYPSNEQKRMIAKNDSAARFIYNRLVSRSKELYQLSKVNLYCRPVADRIDYLNSLGSNLTDFKALYPFLEDKDIDSLAIMNAKQNYLTAWNNFKKNKNSGVPVFHKKGYSKSYQTNAQYNKAAKCISDGNVHLLDKEHIKLPKLGSVKFKGSDVFVRLFNRKCETRIGTITVSMDNCGDYFVSFQVASVSPFHKTLPVVGKGAGIDVNVKNLYTDSDGNEIQNQKYYSREQKKLAKMQRKLARRKERARKIEKPLRDAKNYQKQRVKVAALLRKISKRRNNYLNVVSKRLVESQDYIFAENIKSGNLMKNHKLARLIADVSWNKLLNMLEYKSEFYGRLFKKVPTKNTTQMCHICGYINTGKSKLTLDVRSWICPNCGTFHNRDNNSAINIKNLGIQMYLQV

SEQ ID NO: 53631 - protein, 300 aa, unknown
  TnpB Polypeptide
MQQTITAKLQILVNSSDKQIICNTMKAYSDACNYVSEYIYKTHNLSRYSVQEDAYYQVREAFGLRSQMAVSCVRTVIAKYKTILENQKEWIKPLFRLPQLDLVWNRDYSLNVKNDIFSVNTLNGRIKVSFYKNDFEQYFSDDCKFGTAKLVNKHGKFYLHIPVTYEISELKKSDISNVVGVDRGIRFLAVTYDSKGKSVFYDGNIVKQKRAHYKALRKQLQQVGTPSSRRRIKAIGQRENRWMQDVNHQVSKALVEANPDGTMFVIEDLTGIRSATERVKVKNRYISVSWSYYDLEQKLS

SEQ ID NO: 53632 - protein, 402 aa, unknown
  TnpB Polypeptide
MKALLKAFKTEIAPTIEQKEKIIRSIGIARFLYNQYIAYNKKLYRMYQRGLLDSHQKHFMSANEFDKYVNHKLKIELSWINECGSKARKKALVNAEAAFKKFFNGLAGFPQFKKKSNHDVKLYFPKNNKGDWAIWRHKLMVPTLKQVRLKEFGYLPVGAVVINGMVSYVAGRFYVSVVVDIDEKSKYNKDLKTSYRTATDGIGIDLGIKDLAVVSNGRKFKNINKSSKVKRLEKRLRREQRRLSRKYESKKKKGGKIATASANIEKQKLKVQKLHQRIDEIRKDYENKVIQEIVKQKPRFITVEDLNVKGMMKNRHLAKAVAAQRFNCLLTKLKRKAEIIGIEVHMVDRFYPSSKTCHVCGHIHKGLKLTDRVYVCPECGYTEDRDFNASLNLRDAKKYRIA

SEQ ID NO: 53633 - protein, 435 aa, unknown
  TnpB Polypeptide
MKQIITAKLKLHTTPAQFRALRQTQLTYRDALNYVSGYAFAHGKMSHAVDLQDGTYAAIRTRFGLPAQMACSVPRQVGATYKTLWTKVKTNVAARAAGKTKKHYRGLDTVPRFISPTLTYQFGKDYSFKTDRRVSLLTLDGRVILPYSGYARHVSLIQQGARIGAAKLWYDKPRQQFYLLVSLEIAVADPSPEAHQRLVGVDVGQRYLAAATDTQNRTRFFPGKEARAQADHYARLRKRLQQKGTRSATRRLIVIAGRERRLKQDRNHVISRQIVDAYPHSLIGLEDLTHIRERTNRGHRQKATEKQRRANRHTSQWAFAELQGYVAYKALLAGSMTVKVDAYKTSQACPRCGYTAADNRPSKGLLFSCQACRLVIHADLVGARNVALRTLLARQDWVRTGVLSERPDVSDAEAKAVRRRRYTELRWSPDTSPRA

SEQ ID NO: 53634 - protein, 402 aa, Actinomadura sp.
MARQVRRAFKYRFYPTEEQAAELSRTFGCVRLVYNKALEERTLAWYGERRRVSYVQSSAALAQWKKTPGLAFLSEVPCVPLQQALRHLQTAFANFFAKRAAYPRFKSRKRSRASAEYTRSAFTWREGRLTLAKMTAPLDIRWSRPLPQGAEPTTVTVSRDSAGRWFVSLLCQDTITAAPATGAAVGIDAGIASLVTLSTGEKITNPQHERRDCARLAKAQRDLSRKAPGSANREKARRKVARVHARIADRRRDFLHKLSTRLVRENQTVVIEDLAVANLLKNHRLARAISDVAWRELRRMLEYKCAWYGRDLVVVDRWFPSSKLCGTCGTVRARLPLDVREWTCGCGAVHDRDVNAARNILAAGLAVTACGDGVRPQRDTSRTGHSSAKQETQRATTGISRL

SEQ ID NO: 53635 - protein, 229 aa, Escherichia sp.
MKRAYKYRFYPTPDQVELLAKTFGCVRFVYNSILRWRTDAYYERQVKIGYIQANARLTALKKEPEFVWLNDVSCVPLQQSLRHQQTAFSNFFAGRAAYPAFKSKRHKQAAELTASAFKYRDGKLYMAKSKTPLDVRWSRPLPSVPSTVTISKDAAGRYFVSCLCEFEPVSLPITASTVGIDVGLHDLFVTDTGFKTGNPRHTAKYAKQLALLQRRFPESEEHDPQPEAV

SEQ ID NO: 53636 - protein, 265 aa, unknown
  TnpB Polypeptide
VSKTGELLSYQTINLHHLLGLLQNSKDHQEWILAHQIVDLAIQKGKAIAIENLKKLKKGMRGDGKAKLRKILHQWNAKKFLQKLKSIAMLKRVEVIEVNPAYTSVIGMLKYVPQLNIDKDIVGAYIKEDMPENYEKLLKDWTYLEFALKKYEKREKELGELIEKESNEYKRNALKSELRSVENSKKLLTNLIQSLQSEPGSCEGANGRNPEQEETKKVSQSAWQVLKVALLFPILGKVLPRDLSPLKPVLVEGVWDRVRSRFVPL

SEQ ID NO: 53637 - protein, 379 aa, unknown
  TnpB Polypeptide
MKANKYKLKPTLDQMEKLAQNFGCARFIYNFALSKKSELWKSDGTNISRFELQTLLAKMKKEEATEWLKQAHSQVLQSSLMHLDNSFKNFFKKRSKYPKYKNKHGKQSIQYPQGVKIEGNKIYLPKLGWVKAVIHREAEGKIKTVTVSKDCTGMYFASVLVDDGLKKPKAIKNIKSHVGLDAGIKDFVTISDGKKIKNKKFLDKKLKNLKRKQRKLSKTAKGSVRRSKARNLLAQVHKKVKNARDDFHHKVSLKLAVENQAVSIEDLSISKMVKTKYLARYLSDIGWNSFVEKLKYKLEDRGCTLIKIGKFFPSTKTCSKCNFVQEGITLSKRSWDCDNCGKKHDRDLNASINIDNQGVIKLKAEGFTVSARGGLRKTA

SEQ ID NO: 53638 - protein, 454 aa, Okeania sp.
MYGCQQNLISPNHELKAVLEFICCESNKLTNCGIYYGRQIYLKTHKIIGKFDLEKEYKSNQHYQVIYSQAAQQILRSVAESFKSFKQLSKKYKQGELTDRPKLPKYSRKKGGLALVTYPKQALRLTGNQIRIPLGRKVKQWFGFDSFYLSMPSNLMFNDIKELRILPRNQCFYAEFIYEIEGQKVELNYDYVLGIDPGLNNWLTAVSNVGMSLIIDGKNLKYVNRWYNKQVSIIKDGKRLGFWSKRLAKITEKRNRQMKDAVNKAARMVINHCLDNQIGVIVFGWNKEQKKESNLGKKTNQSFVSIPTAKLKERIAQLCSQYGIKFIETEESYTSKASFLDNDWLPIFGEKPVCVAFRRKGWQPSGKRRKRGLYQTGHHQYINTDANGAANIIRKAIQCGLGKSPGLNQEVSTTLNFDLSRVSRGVLTRPQKLKFWSAKKTRSNAVLTHCAVSF

SEQ ID NO: 53639 - protein, 381 aa, Nostocaceae sp.
MIVREAKLLNGTKEQYQAVDDAIRTAQFIRNKAVRYWMDNQGVGKADLYKLCKTLAKEFAFALKLNSAARQASAERAWATISSFYTRCKNQEKKKGYPKFKKHCRSVEYKVSGWKLSSDCMSINFTDGFEVGALSLFCNKETREDLHRLKINRVRVVRRADGYYAQFCFDADRKESGKYTGNVVGLDLGLKFFTKDQNDNAVIYPQFLSKSERRLKKAQKRLSKKFVKGNSPQSNNYHKARLRLGKVHLKIQRQRKDWSLKLARCVVHSNDVVVYEDLQVANMVKNHTLAKSISDASWYQFTQWLDYYGKIWDKAVVAVSPVYTSQDCSSCGHRVKKSLSTRTHSCPKCNVEICRDMNAAINILKKGMKMLGIEWNSGKPL

SEQ ID NO: 53640 - protein, 159 aa, Burkholderia sp.
MTGSVDERQKSWRKHKRHIAKLHAKVANARADFQHKLALDLVRRFDYIAVGNVSAVKLARTRMAKSVYDASWSSFRNTLRYKAMAHGVTFEEVDESGSTQSCSSCGSKDSTTRPKGIAGLRIREWACSDCGVEHDRDTNAALNILRCGRASPGVGILSL

SEQ ID NO: 53641 - protein, 313 aa, Burkholderia sp.
MILVYRYRVKSLNGLLNKQSRAVNYVWNFCNDTQKHALKWGKKWPTGFDLNVLTTGSSKELGIHSGTVNATCEQYAKSRSQHRRPYLRYRGRKSLGWVPLKGRDLKREGDAFRFAGNTFRVFNSRPLPEGKIKDGTNFAQDARGNWFLNIAIEMPDVQARPIRSGVGIDLGLKDFATLSTGEKLPNDRFGRRAAEKLAKAQAAYREAARQGRECACRFPTQARARSGAAFRLHRGWQRICRQTCQNQDGEERLRRILVVLPKHAPLQGDGARSHVRGSRRKRFDPVLFVVRIERQHDAAERYRGTANKRVGLQ

SEQ ID NO: 53642 - protein, 355 aa, unknown
  TnpB Polypeptide
MTSAGGLPGTVPRTGGIRAGRPPLLVRLDRDVPYPPEQVRSVTLGFDAGRLYLDVTAEVPVTAYPQGTGPDPARVAGVDLGIIHPYAAAGPDGRLLVSGRAIRAECRQHLRDRKGRTRAAARRAPKPGQQRSRRWRRQRRRQRTAEARHLRRVRQAQHEAAKTVVSWAVEHRVGTLAVGDPRGVLNLQAGRRHNQRTRDWRVGHLISALRDKAEAAGIALRLVDERGTSSTCPSCSRRVPKPAGRDFRCPHCGHTGHRDLIAAANIAARNGGGTMIPAPSESAGITHRRAGKHLPGVHPARRDPRRRPPSRPPAHGPLAGTGPPPTATTQRGVARPHREEPASPPATRRTYRQVH

SEQ ID NO: 53643 - protein, 382 aa, unknown
  TnpB Polypeptide
MFDEWYNRLMKKNKAIKYRIYPNKEQQSLILKTFDCSRFVYNYMLEKSIKDYENGESFCTRNSFNYLLTSLKKEFLWLKEADSTALTSANDNLATAFSYFFKKNNNFPKFRKKKFSGSYTTKCVNGNIFLLDKGIKLPKLGKVKASLHRMPKKDWKLKSATVPQSSDGKFYVSVLFEYESDINYQVDINNAIGLDYASNGLFVDSNGRRGTNHRFYRESHNKLAKARRRLSRMKGSKKDEPKSNNYIKQLRKTNKIHRHIANQRMDNLHKISTEIANQYDIVCVEDLNMTAIGNKGFKNGKATYDNGYGMFLDMLEYKLSDRGKTLVKVDRFYPSSQLCSCCGNRKKLELSERKYICTCGLEIDRDLNAAINIKNEGLRLLA

SEQ ID NO: 53644 - protein, 403 aa, unknown
  TnpB Polypeptide
MTVKSWFSIKQVTANNNNSQTFFPALTEGTVSSTTVTKTRRIRIYPTQQQKKLFKQWFGVGRKVYNTCINHFNKKDIKVNGWMKMSTLVLHSLTEEYIKIVPCQIKNMAVKDSYTSWMTNCKKTKKSGKPFKLSYKSRKNPVQSCYIPKTAVSESGIYHTLSGKLKFSEREWLKNDICDCRLIYDHGRWYLSVPQKIATMPTENQGGIVALDPGVRNFLTYFSEDGRFGWLGVHAFDRILRLNLKRDHLLSKLALTKDKRKKGKLKRTLNRTFHRVQDLVDELHWKCINYLVHNFSVIVFPPFEVKGMTKKGRKLRKSIVRSMLSLRFFEFKERLKQKCKECGVVYIEQNESYTSKTNSFTGELITNLGGKEWFMYDGIKVHRDLNGARNILIRAMRDSSAAG

SEQ ID NO: 53645 - protein, 417 aa, Oscillatoriales sp.
MITAYKYKLRPNKAQAHQLDKWLELLRRQYNYRLAERFNWYESTRCSINFCSLVSCSIAQIVEQPEYYRQKKDLLNTKQLFPEYKEIHSQVLQNCIERVKKAFDRYIKADKSGNRLGKPRFKCRGRYRSFTYPQMKQNCLKSNRITLPKIGDVKIILHRPIPDGFKIKTGQIVKAADGYYVTLVLQDESVPAISPDINTDLSVGIDMGLKHFLITSESETVPIPQYARKAEKRKKHLNKSVSRKNKGSNRRHKSVKRLANYHQKVTRQRKDFHFKTSKQLLDRYDVIAYENLNIKGLTRTRMSKSILDAGWGQFLSILIVKAENAGRITIAVNPYGTSQNCSNCGKKVPKTIADRWHSCHICGLELDRDINAAINIKNIAVGRTVIKAQCVTEPIGGVAEKPTLYSSASYGWESSQS

SEQ ID NO: 53646 - protein, 434 aa, Okeania sp.
VLVIEAKLKGGQNQYKVLDEMILTGQFIRNSCLRYWMDNKDVKRNDLQKLCSVLAKDSNFPWVKKLNSQARQASADRAWQSIQRFYKNCRLKLPGKKAVRPRDDDSRKRSDPAPPTGARERRPREGTRTKRGYPKFKKFTRSVEYKTTGYKLSPDRKKIEFKDGFKAGVFELWTSRNLVWYSEQQISRVRVVRRADGYYCQFLVNVERKEAHNFEGNVVGIDLGLNAFYTDSDGKAVDNPKYLRKSERRLKKLQRRVSRRYEKGKKPQSNNYHKARKQLARANLKISRQRKDHAIKTARALIQSNDLVVYEDLKVSNLVKNHHLAKSISDASWYQFTTWLEYYAKLRGIVCVAVPPHFTSQNCSNCGQTVKKSLSVRTHKCPHCGYIADRDHNAARNILAKGLEMLGAIVNSTEGHSEPGGNPKATGESDLWSA

SEQ ID NO: 53647 - protein, 483 aa, unknown
  TnpB Polypeptide
VKILKITVKAMLIDISDEHKNIIDNLMTVFCSAIRFSFKRLLENMKHGELEKLVAVKYQLNIRQAKDAVENARQTITSQKELVKMYYDNFTKKVKTIEKQLDNAKISDKKRIALLSKLDKRKRKQDYWKNFIDTNTIPSVVFGTKEMFLRRCKGLISKEEWQDLRSNRFYSRGDKTKNGNPNLRIVIINGESFLEISTLEKTSTNRAIKIQVPIYLPRKVSKSTGCINGRDYKGMIVDYLQTGEAYQVEMLRRNGNYYCHITIDENKINNFNVQYTGHIGLIGIDTNPDGFALTMISRDGNYKWHRYLVQHELLFARSDRRKNLCGELVKQVINIAKETQCGVAIEDLKFIDDSDVSRKFARIKHQFIYKTLLEMLEVACIREGIEITKVKPQFTSKIGLYKYCHQYGMVVHNGAAMVIARRAYGFKEKVSKLLKDKLISYQESFNKKKEWSKWAIINNILKKKGGVKPDFWLTNRKQLLGIA

SEQ ID NO: 53648 - protein, 405 aa, Flavobacteriaceae sp.
MFVLIRKAYKYKLKTNPSLEDTLNEFSGANRFVWNKALFLNKKRLERHEKKDRKLIRYNDLAGLLKLWKQSDEWGFLKGIHSQTLQQTLKDLDKAFKDAFDPKQPLKRFPVFKKKEIVSGFRFPQGIKIHCNRVYLPKIGWVRYFNSKKIEGIIKNATVSKRNGKWFVSIQVEQEIKVFSKKPKNEVGIDLGIKKNVVLSDGRILEGARSFKKQRGRLAKSQRHLSRKMKFSSNWKKQKSKITKIHEKIANVRNDRLHWMSNRLSNEYNVIYLEALKVRNMSKSASGTLENPGRNVSAKRGLNREILDQGWGEFRRQLSYKQEWSNGWLQAVDPKYTSQKCSQASCGYTAKENRKSQSVFHCRKCGYEENADVNASKNILAVGQTVFACGGNSLEFPLKQEPLAA

SEQ ID NO: 53649 - protein, 413 aa, unknown
  TnpB Polypeptide
VFGCQQVLINDNKQLTNILEFICSEANKLTNCGIYYARQVWFKIRKYLGKFDLINEYKRNSHYQVLHSQAAQQTLLAVRESFKSYYELDKKFRNGELEFRPKLPNYRKKDGLAVVSYPKQALKLIDNSLQIPLGLTVGRWFGLKNFSVTMPPNLKFEDIKELRILPRNRRFYLEFVYKLESEKANVDFNKVLGIDHGLDNWLTCISNVDTSIIVDGKHLKSLNQFYNKQVSTIKEKKPQGFWSNKLAAITEKRNRQMRDAVNKAARLMINHCLVHQIGTIVFGWNQRQKDSSSMSKINNQKFVSIPTAKLKNRIAQLCEQYGLRFVETEESYTSKASFVDNDFLPTFGEKTEGWKSSGKRTHRGLFRTKFNQYINADANGAANILRKVSTTLDLDLSEVSSGALTTPLRIALW

SEQ ID NO: 53650 - protein, 667 aa, unknown
  TnpB Polypeptide
MKPPDIDIPVYKTVKHSLRAILKNPEETHERILSAVLTGHKLVQHASQFIKLYFIHCYDHEKPFPVLDTKFVKCVMKTIGVKDTNQGRPPNADTVALMDTLKVFHDAYYAHYLHENITYSSLDNMLTYLADGVVTVLETNIKQHFVEYVERFVNVVMDKKECLENLKTKEEKHEFVSSLRRYKVSLIENRNKELPAQLLHHASFVVPQRPFQKKSLWYDIVCSPQDYLPCMFYMMRFVEAKDQTIYNVFPIRSEIIPKYVPLDTATIAMLLLKDGACVNGISKGYLLKNGNMKANEDAIWASFFRTELRCFRKKHYQFDHRILTDGEGVSILLIRRGHDGKKARVKDNHEAYLDDLTSQERVVYQQKRKVAIDPNMDDIIFCSGESLKGEMEHFRYTRNQRRKETKNKKYRKIHEELKKTTVIEDKTVQQWETELSKHNKKTLSFDRFLAYVKDKNAITQKLMAFYQQRIFRQLKWYGFINRQKTEARMVRRFRSIYGAPSETVIYIGDWEQYKYRKYKEPSIGKGIRNVFRKAGYQVMLVDEFRTSCRCYKCHGLCETFRKCPNPKPWKCEETTTRHGLLMCQTCSGLWNRDVNSSLNILRIVEDTLAEKGRPEYLQREKKQDGGATSATGGEKSPVKQGRKPSLSHTPKLSRGCEASTLRVQNLH

SEQ ID NO: 53651 - protein, 551 aa, unknown
  TnpB Polypeptide
MIVGMRTCKQAARVAVASGGAHLPGKPRADGTVAASRYVDVGSDFEVHRAAVESVSVLFDLYDGDADAYAATGSPGEKLPTGWTVTAAKFEVEWPAEEDRAALVRSHFGARRFAFNWGLAKVKGDLDAKAVDPGHESVDWDLGSLRKVWNQAKDTVAPWWATNSKEAYSAGLADLAQALTNWSDSKNGKRKGRRVGFPRFKSGRRDPGRVRFTTGTMRVESDRRTITVPVIGGLRSKENTRRVQRHVASGRARILNMTLSQRWGRLFVSIGYALRTPETARAVTSPTVRAGMDLGVRTLATVATVDTTTGEQTLTEYPNPAPLKATLTARRRAGRQLSRCIPGSRGWTEAKAKLVRLDRRCVHLRREATHRLTTELAGAYGHLVIEDLDVAAMKRSMGRRAFRRSVSDAAMGLVKPQLAYKTGRFGGMLTMADRWFPSSQIHHGCIQPDGTPCRLTGKGQIDEKLVCPQTGEVVDRDRNAALNLRDWPDHASCGPVGTTAPSAPGPTGPSVGTGHGADVGSSGARGASVRPRPRGAGSGEAKTQTPQGDAA

SEQ ID NO: 53652 - protein, 405 aa, Aphanizomenon sp.
VLRKVVQVRLYPNQEQQTLLARTFGCSRWWWNYALNKSIESYKETGKGLGQLALNALLPKLKKEKDTQWLADCYSQVLQATTLHLTTAYKNFFDQRAGFPKFKSKHGKQSIQYPQNVRIVDGNVKLPGNIGIVKAKIHRPIEGKIKTVTISKTPSGKYLASILTEVEGEHPTATEGKIYGLDLGLKHFAVVTDGEKTSKYENPQHIAKHEKNLKRKQKKLARKQKGSNSRNKYAQLVAKVYERISNSRQDFLHKLSHKLVSDSQAVIVENLHVKGMVRNQNLAKAISDCAWGMFINFLAYKLERQGGKLVEIERFFPSSQICSHCFYQVSKMPLDVREWTCPHCGTHHDSDGNAAQNIRTEGIRILKADGSAVSAVGGEVRPKMGRKSHLRHSPVSTEAPTKLKL

SEQ ID NO: 53653 - protein, 333 aa, Enterococcus sp.
MLKAFRFRIYPSECQKQWLIRNFGCVRFTYNHLLHARQASYKKTGVIDYTLTPASLKKEYLFLKEADSLALANAQLNLDRAFRNYFKGRAGFPKLKSKKNMWQSYTTNNQSHTIYLKGDQLKLPKQKELFKVNLHRPVEGKIRSATVSARYNEQFYVSLLCEVLPVDRSGSNKRIEIAYDPEKLVKTSFPVQIPVPPFDQTAKRLEIAKRKLVIKGKSAQQRKEPVYRAKNYQKQKRKVMDLYLKQKCQKEDYLEKISGLIIREYDYLFIEESPAHFTSADFSLYDWHKLLMKLQYKAKWYNKTVCLIDQKGFSSPFLGRSQKRERISRLSGF

SEQ ID NO: 53654 - protein, 326 aa, unknown
  TnpB Polypeptide
VRGNLRTQRYLTKSKKFSPTTSRNSLNSHRMNQLSSRVYQNALIDLKDAFSRYRSGKAGHPRFASRRDGQSFTVDSSNGKVLLSAGKTIKIPTLGTFRLYEPLECGYVSQTFTISKEGNRWFVSFCVDAQRLPVQQPEGSVGIDVGVKSLVPLSNSQVFDAPKPLKQAKTKLARLQGKASRQIKGSNNQRKTYNKIRRLARTIACIRKDFLHKLTTYLAKTFKLIKIEDLNVRGLLANHKLVRAISDLGFYEFRRQLEYKCKMYGASLVLIDRWFPSSKICANCGHKKDLPLAERIYNCPAGGVLIDRDLNASLNILNWEPKAIGG

SEQ ID NO: 53655 - protein, 514 aa, Kibdelosporangium sp.
MPRPQISPDRVTQSHKRSTTVESVHPVPVQSLTDTSSAATDAGDAVTEFQAYRFALDPTPRQVRELARHCGAARVAFNWGLGLVKAVTDQRAAEISYGIPPGALTPTLSWTLPALRRAWNRTKDLVAPWWRECSKEAYSTGLAQLSTALRNWTESKSGNRKGRRVGFPRFKAKRRSGMSCRFTTGAIRVEADRHHVTLPRLGRIKTFESTRKLARRLESGTARILSATIRFQTGRWWCAFTCEVQRLMRCPAQAGTVVGLDIGITHLAVLSQPVPGLTDADGMVRNPRHMAAAQRRLRRNSRRVSRRRGPDQSTRQKPSQRWRVANRRRNRVHHRVVNLRRDGLHKLTTGLARSVAVIVIEDLHVAGMLRNRRLARSIADAGFGEIRRQLDYKIRWSGGHLVVADRWYPSSKTCSDCGAVKPKLPLHVRVFRCDVCGHTVDRDVNAARNLAALAAAINSTGAGVAGNLEAQPALNGRGADQKSPPGGAGAVSYTPELTHFATVGHGTFRSRLFG

SEQ ID NO: 53656 - protein, 407 aa, Methanophagales sp.
LKVLRTEQIWIKGNENIKELCHLSKNIYNEANYVIRQEFFKTKRWIRYNELYKLLKRSENYRKLPAQTAQQILKIVDRNWKSFFNAMNAWKEHPEKFNEMPRPPKYKKKNGIFMLIFTNQQVKIKEEQLIFPKVVGLRLHTRIKEGIKEVRIIPKGVGYVVEIVYEKEVDVVERDKSRIAGIDLGVRNLVTIANNIGEEPIVVKGGVVKSINQFFNKEMARLQHIYAKQGIKKSKRMERLSVKRERKLRDFFHKASKFVAEWCASHNIGRLVIGYNKEWKQGVNLGKKNNQNFVQIPFLMLIQQIKYKAEERGIEVLLVEEDHTSKCSFLDGEPMEHREYIGKRERGLFRSGKRIINADVNAAYNIIRKAIPKAFEADGIEGVGLHPVRWTKYEIAQSILGHSTRNA

SEQ ID NO: 53657 - protein, 443 aa, Sarcina sp.
MYMADTTVLSKDRYPGLFGHLEGSAELSKCLYNAALFRIRQVFTGWDKEDRSENEKEVFREIAVMKEVYPDIKAGRVLSYRALDAVMRANRNPDFFAGLPMQTAQRILKEAVSTFKGWLSAVKGYKKAPGRFTGRPRMPKYLKNGVHTFYISSQDAVLYPVYRDIDTPDSCADRTEGPACRGYAGMELKLPLIRERLYLPHIHRDSVLKEVQVKPYYGKIMLVLVLETEEVSVSASRPHAAGIDLGTDNIAAIVSTDHASRIYKGGAVLSENRSFHKKRARADMMHKISTDIIRYCVEHGVGTLVIGTNRGWKQGADMGKANDQNFVSVPHDRLRKMIGYKAAKEGILIVEQEESYTSKADITAMDPMPVYGEEKGEPVFSGKRTARGLYACSRGYSVNADCNAAANILRKAVPGAWEGTEDFRFLAHPETMGFKALQRARTA

SEQ ID NO: 53658 - protein, 440 aa, unknown
  TnpB Polypeptide
MMRSEWLTRTLWYVSITMSTMAIISSLLGCTRSNPRICGALVAVRLLRTNIGQIKNCFKLSSMISYKYKLYRTKKTRHLDKMLREACYVWNHALALQKRYYKLYHKYIPRFMMHHHFAKRYKPILLNSHTVREILDRLDITYKRFFKHDAKRPPKFKKMVEFSSFVFKDNGYSLSGNEFVINKIKKSFKFSLSRPYDGKVKRVSVKRNKLGEYFIILCLDKQAEPYGKSHDGASVGIDFGLKKYMTLSDGREIDNPQFLKADLQELRRRSRNLSKCKKGSNNRKRKKMELERLYRDIVNKRSDFQWKLAHELCKRYDLICLEDLNLEVMAKRWGRKMSDLAHGDFVVKLEHVAKKYGVKVHKIDRFFPSSRLCTCGYKNDKLSLGDRIWTCPSCGAVHPRDLFAAENILRQGIAELGSGSKSPKHSQGRSHVNNPTIPCK

SEQ ID NO: 53659 - protein, 442 aa, unknown
  TnpB Polypeptide
MKQRQKRPTPEEPQRVTKAVTHIRLLEVNPGKLAALDALAPVYLKLCQQYVTFFCTDEAPNKFRDPVFATPLSERWHRVAIQQAAGLAQSWRTNKQQACQDYLDDLLEYQEQQANGKLDPQAKKPVWKEWDVPTLRQMCIQANANVITLESSQDSHFDYWLKISTLEFRKQLLVPVKLADYHRRALEGKTINSSVQLNKRDGTWWLTLSSEEMVPVQAVPDASVVGIDVGIANFLTTSTGKHYGTFHGKLRERQKRDREKRRRKAKLRKCLEKKGVQKLPSTSSKSGQRLIRHVRQEINRAVNDCFAEHLDTQFAYEHLSVATMKQKARAMNAYMRASNLAHIPKQIAWNAAKRGVSVTRVKSAYSSQECSVCHYADKANRPDQQTFCCVVCSHRTHADMNAATNIERRVGDTELRACKDRKVIKALLISRHQAWKKQNGWP

SEQ ID NO: 53660 - protein, 368 aa, unknown
  TnpB Polypeptide
VLTLNKSFKVRIYPNQEQQILINKTFGCVRYLYNFMLNLKQKLYQNFNLSLSYNNMSKILTELKKHKLWLCEVDAKALQQCLKDLNAAYINLFNGAGYPNFKSKRSKNSYRTVSRISLDQDNKMIRIPKIGWIKFKNKTNFNGLTKINNITISKTPSGKYFASISAEVDITTFAKTKKNCGIDLGLKDFCILNDGTKFENPKFLMRSEKRFRLLQKSLSRKVYGSKNYEKARIKLAKFHEHIANCRKDYLHKISIQLVKEYDIICTETLQVKNMTKNHKLAKAISDVGWSKFCQQLKYKCLWYDKQFIQINTYFASSQICSNCGYKNSGIKNLDVREWTCPECNKYHDRDINAATNILNQGLNIFKNI

SEQ ID NO: 53661 - protein, 410 aa, Nocardiopsis sp.
VAGKTVKRAFTYRFHPTPAQAAELSRTFGCVRLVCDKALAARTRAWYQRRERVNCNATPAVLTAWKRTGELSFLTEVSSVPLQQTLRHLQGAFAGFFAGRARSPRFTSRKKSRASAEYTPSAFRYRHGRLTPAKRADPLDTVWSRPLPEGARPSTVTVSRDGAGRWFVSPLCEDTVHADPAPREVVGVDAGITCLVTLSTGEKVTNPRHERADRARLAKAQRELARKAEGSANRDRARKKAARVHARISDRRRDFLHKLTTRLVRENQVVVIEDLTVRTMVKNGKLARAISDAEWRELRSMLEYKCDWRGRELVVVDRFLPSTRLCSAADCGYVNGKMALNVREWTCARCGAVHDRDVNAARNLEAAGLAAVACGAGVRPQRESSRTGRPAVKQEGRGATRDGALAPSRR

SEQ ID NO: 53662 - protein, 371 aa, unknown
  TnpB Polypeptide
MRIYPTDIQKQKINITLGHSRFIYNKMLERNKTVYARRGGHLNYYAMQNLLPEMKSYYPWLKEADSQALQQACKDLNTAYDKFFHKQAGLPKFHSRKGRQSYRTTQTRSMAVKQNRVKVPCLGWVESSDKRDWGNDYHICYETISRETDGRYYVSVTYKYETADTETRIYGKALGLDYKSDGLYADSEGNIADMPHYFRQSQKQLKRLQRQLSKRQGYRKGEKQSNNFKKLLKRIGRLQSHIVNQRKDYLQKLSTEITNQYDVICIEDLDMRAMANKSFGNGKATNDNGYGMFVAMLGYKLFERGKHLVKVDRWYPSSQLCQCGYKNPVTRDLSVRKIICPVCGRTYDRDFNAAINIRNEGLRLLRQQSAA

SEQ ID NO: 53663 - protein, 485 aa, unknown
  TnpB Polypeptide
MKRKNQLITSVKIGIDNEKLSKSTRQRLRQIMGRDTRIIKKYLHIIECHKYDLVSKIELKRTKKSKKGSNVNNEKKFRFTIDKGKLDLLTATTEHRPIVPHDFKAYFPRISLNEMKECRDTACGIYLGHLESKSKQENSGKPNINKPLPRSIGYRRFKLNIDSYIVSLMDSMDSNLGINSNNHKKIRHQYLDLPLKISSYHRTQLQKGDIKSLRIKRVKQKYLAIFSIKQTRFSGEHLANKKNLPIAVLGIDLGIKQDVAISVLTKYGIVQQQFITSNLIRNTKKSLTKLERRYSNIKNSIAKDKSNSNNDVDGKLKLIRDIGNKRSRLKFEINHQLTAELIYFIKYVAVYFDLYIGLGKLKGIRKSAIKGKATKNHRKRIHRWAYSQFTDLLEYKLHKIRPIIRFAKVSEAYTSQTCWKCAQRGNRPKQDYFVCRNSSCGWRGHADFNGATNIAKRAASYFDLTPNLKPFFMTNGESGLSPVST

SEQ ID NO: 53664 - protein, 443 aa, unknown
  TnpB Polypeptide
MLDYMCLQASKLWNIANYERINYESLGLESEPDWFDQKKRLKTNEHYKMLLAQSSQDLLKDLDLAWKSYHVLNSNNKAANKPSFKKYGQHSVVKFAYHSIKLIDNSVLRISLPAGIKRIALSKYQKSDNYIYIKLKRKIVGIKSVSISHLRPGTFKISISYEMDEPKYKQDNGRHIGIDLGVANLFAVYDNNGSSFIINGSSFKNTIYYFSKKIAHYQKILKASYLHNDASKAYSSQRIRSLYKTRHGRINYLIHATTRRIVNYCKENDISIVVVGDMKGIKNNCSFGHVSKQQFYSVAFARIVKVLQYKLDIIGVRLVKVDEAYSSQCPPDSISVSKQCRVKHRRKKRGLYKYKGQIYNSDCLGAFNILRIYYQNKNESIRSLDYRFISNPKNECIPVTMDFFDYFPCLDMKYLVGVAGRNYPSGDDLMIFLHEHLKLSAEA

SEQ ID NO: 53665 - protein, 229 aa, unknown
  TnpB Polypeptide
MSRYRLYPAPAQEDKLRGHCAHARFAWNLAVEQRQWWRPGRRPAPGFAEMCRQLSEARAENPRLAAGSVIVQQQALRDFDQAMRNFFNGTHRMPSWRKKDRPEGFRIVALRPGHVRRLNRRNGEVLVPKVGWVRFRWSRQVPQSRSCRVTLDRAGRWHVAFAAIPAPVAGPGTGEVVGIDRGIAVTLALSDGTTFQAPELTPGRSLARKLSRADAAPPVGGRPGRRWHG

SEQ ID NO: 53666 - protein, 432 aa, unknown
  TnpB Polypeptide
MSINIIGKTVRKCIVLNNLDLTSAKTSILNSFFSEYSQALNWHCLQIPIAVSSTDLHHLTYSNIRKISSLPSDIIQEARKDIWMSRKSFIKKGYNGTFKFKSCFIRLNKRWFRLIKSKKGNPCFKITYSPRKSFVIPIRIDRQFQRFNSFIDNGWTFDNISLLKDGRVSVVLEKEFEKPEINQRYIVGVDIGSSTLACVSIFDAKSSKVVKQLYFGRDVAKRQRRYLERRTYLQSLADKGSHIAIQHLKRLKHKQSDFVKTRSGQITKEIINLAKQYDAYISIEKLKDLRGRKGQFNKKANRKINKIPYGKFKEFLKSNCEMFQIPLYEVDAYHTSKWCPRCGALNIGHQSGNYALYKCNCGLVVNSDRKASLAVAIKSVLERSKTHSLTNLSSIQISKIRVPVNGLLRSDDVGMKVAVQHNYQHMESHLAS

SEQ ID NO: 53667 - protein, 207 aa, Microcoleus sp.
LIERPRFLKTLQRKLSLLQRRLKHKKKGSNNRHKLNRKIARLHQRIADTRKDWHFKRAVQLCDNAGMVFVEDIDFRVWAKGMFGKHTLDAGFGQFVSILEWMCSKRGVYFDQVNSYYTSQICPQCDTHTGPKQLSDRIHECPHCDYTTHRDVAAAQVIRNRGLVQLSEGGRLLDVKENACGDGLTGTGNSLVKNPRSRKKKAFWRGF

SEQ ID NO: 53668 - protein, 265 aa, Vibrio sp.
LRVDKYPTFKKKRSNQSAEFTKSAFKYRDGQLFIAKSKQPLNVRWSRELPSEPTTITISKDSAGRYFVSCLCRFEPKPLPIIKNTVCIDLGLKDLVITSDGFKSGNPHHTKRYAKKLAKAQRILSKKKKGSANFQKSRKKVARIQAKIADCRRDFTHKLTTQLINENQVISCESLSIKNMLKNRKLSKAIADANWSELVRQLTYKASWYGRTLVQIDKWYPSSKRCNYCGHVIDSLPLHVRSWQCPECLTQLDRYLLHKITSPKY

SEQ ID NO: 53669 - protein, 442 aa, unknown
  TnpB Polypeptide
MDVHPEYTVPSMSNIVVIAHRPNYNERMQRLQAFKFEIRPNGEQQRNMRRFAGACRFVFNKALALQKANHEAGEKFIGYVAMAKHLTAWRNGEETPWLKDAPVHPLQQTLRDLDRAYTNFFAKRAAFPRFKKKGREGGFRYPDPKQIKLDQANNRIFLPKLGWMRYRKSRELVGVVKNVTVSASGGTWFVSIQTEREVAEPIHPATSLIGVDMGVANFAALSTGEIIAPVGALKAHAQRLARYQRAMSRKKKFSSNWTKAKARIQTLHTRIGNIRRDHLHKLSTTLSKNHAGIVIEDLQVRNMSTSASGTVEQPGHNVRAKAGLNRSILDQGWFEFRRQLEYKQAWRGGIVVAVNPRNTSRTCPACGHVAKENRPTQSRFECVECGHTAHADVNAAINILAAGHAVMACGGDVSPYTHLGARKAAPMKQEPTEVTHAAQKAA

SEQ ID NO: 53670 - protein, 477 aa, unknown
  TnpB Polypeptide
LGDRGQGGDARSGASGGACQPDRCAGASGPSVEGPHRTRARAGVGVSAPVGGGVVVAVVFRRLGRLCLGVDGARLHRAPMGCGGVVRRACVFGLRPTARQHIALAACIESHRELYSAAVQERRDGWAHSKTRINYGDQSAQLTGIGGVRPDQAVWSFCSQQATLRRLNKAFAGFFGRVKRGEKAGYPRFKGKARFDSVEWPKDGDGARWLPEHRRVYLQGIGPVKVHVHRTVEGRVKTIQVKRQGRRWMLVPSCADVATNPLPGTGRRAGIDVGIASFATTSDGEHIDNPRWGRAAAARLAAAQQRLQRAQRRSRNRDRKRQVVAARHRKIANQRKDFHHKQARVFVAGYELLVVEDLQIANMLRRANPVPDPDNPGAYLANGARAKSGLSRSISDAGWGGFVSVLRAKAEEAGRTWIEVDPRHTSDRCEACGHAAAENRVTQADFRCQRCSHRAQADEMAARNILRAGLALHAQAA

SEQ ID NO: 53671 - protein, 448 aa, Moorea sp.
VKTSTKVIRTDKWKLNPSYKQKELFEETLKVYRQACRYLIGIVYVHWSDLGGLTAEQLTPAVEKLMHETAKRPNIKYPQFNKAFYKFPSYYRRAAIAFAAGQVSSFVTRYREWQSGNRKKRSSKPPKLNAEAGCYPVLYKGQCYKLHGFNQVEIKVFDGKNWVWTIVQIAGLRERHQVTTNKMMSPSLIFNDKYCHLSVPFTCRPEKRKPEANVTAVDLGINTTATVAVVTHDGTVIHCDFIHLGRDIDCRDKRLKSVSRRASKTMGKGGKLHKGFCSNTYQKCQRINNQISHVVSKRIVEIADKFNSEAIVFENLKGWKPKGGRKRSNLRQRFHGWLKAKIRNFTEMKWAELGGKVIEIVAAYTSKLAFDGSGTVKRNSKKYSLATFPSGKRFNADLNGAYNIGARGVFKLTRRNGEEGRSSKRPGRPPGSWACLCDLWTSSSSKLA

SEQ ID NO: 53672 - protein, 347 aa, unknown
  TnpB Polypeptide
MVKVFRYRVKSLNGLLNKQSRAVNFVWNFCNDTQKFALKWHKRWPTGFDLNKLTTGSGKELGLHAGTINATCEQYAKSRAQKKRPYLRYRGKKSLGWVPFKGRDLKPEGNAFRFHGNTFRAFYSRPLPEGKIKDGSCFARDARGRWFLNVVIEVADTAPREIKTGVGIDLGLKDFAALSTGQKIANPRPYRTLEAKLGQAQRARKRRQVTALHAKIANQRTDFLHKEALKLVQQFDYIAVGNVNASRLAKTHLAKSVLDAGWSSFRQMLRYKAIERGAWFEEVDERMSTQVCSACACASGPKGVADLGIRDWVCAECGSRHDRDQNSALNILLRSGHRTPVVGIPVL

SEQ ID NO: 53673 - protein, 226 aa, Microbispora sp.
MRATRATACEVPEPELIEPDGFLGVDLGIANIATTSDGAVHVGRHLNQVRHRNRRLRARLQSKGTKSAKRLLRKLSGWEAGFAADVNHRISISIVTEAERTFRPFGPFQTLDVIGLKTAYHVAAGTPDPNVQAFAAALKEQYIDKGKLGTTTGGASTPTEPGRHPAVSGPAMDDGASRDRVRETRGTASTAKAGRPRGRHLTRSASPPGPSPASRQASSPAPSSRW

SEQ ID NO: 53674 - protein, 543 aa, unknown
  TnpB Polypeptide
MSKSENEKWIATIPSQSSANNRKIDLVSDLLVPYSELSVRFLKDIDLRFVRDNELSKYTKAKSYQTEEEFDALLVNCHKRYQKPIADGREPTRSLKEQLEDLHKYAVQTPLSARFVQACYAQTIETYLSWLTNLEDVIRSYLTNSSVSEKDEFFLVSCYRINKNHFWYSKELSLDWHQTNDGKLLIPAKQNKANVTLPVSDDILFFMRRLMKQARKRIRFPRLKQLKTLKLDEKVATLEASQNATHFDYFLKLSTLEKGKPIYLPLNRNPYLDECLTKGDKKPFVQLRLDGKKCVISAIVEYDKAPLRPSDSSLGLDFGMVSMFTTSDGEQHGLTSFAKLKIWDEELLALTKEIQKQGIKFKSNERYVQLQNRIQSYFKNEICRILNKLAKKNVGVFVVEQLDFRASGLSRRMNRLIGRTYRSIVKAKLARLEEQFGIQIVSVNPAYTSQECSRCHYVSKNNRKSQKQFICGHCYLHCNADVNAGRVINQRRSLISEFPVYAKKSTSSAIRCQVREASEECHRCYCFNNELSVSNVSLAESSL

SEQ ID NO: 53675 - protein, 351 aa, unknown
  TnpB Polypeptide
MIVRTLKLRLTKKQEALVNSWLWNLTGLWNFAVKKIEHDAQDKVYHSGFDCQNWIADHSKRMEIPSHTMQGIISQAYNAWQRCFKKLAKKPRLKGQRNKLNSIPFPDPIRSPKDHRISLPGLGKVRYHKQELPGAKIKCGRIIKRVSGWYVALWLDCDHAFPVQSTDKAVGIDPGFKTLLTLSDGTKFENPRELHKGAKRLAQSQRGNRKKLTARLLERQANRRNDRNHKISRKLVEQYKTICYSDDNFKSMAKRFGKSVSEAGLSNLIGMLYYKGHIGGRNIIPVNSFRTTMRCASCGSFNGPRGIQNLGVRQWDCACGAHLDRDINAAQNVLFAALGTSVERGERKHVA

SEQ ID NO: 53676 - protein, 476 aa, unknown
  TnpB Polypeptide
MQTYKAYKFRLYPTPQQRDYFNRCIGCGRFVYNWALSLRINAYKNNGTTLSIRKDISPQIPKLKEENPFLKDVDAKGLIGELSRLDEAYQKFFKGTNGYPRFKRKSNTGSYTTQLTKNSINQTRGFVNIPKIGSVKCIFHRQIEGTVKENPYITIKRTTTGEFYIFIFSEISVPETPKEMATSENTIGVDLGLKDFAILDDGTKFHKIETDEKLGKRKKYLQRMLEKKVGSKKGQKKSNNYLKLQRKIAKLDEKVARRRKQYQYEVASAIVEKDCRYIAMEDLNVQGLSASGRSKQKLSHEEYLKLSKKEKKKYNRKKNKGLNKSILNAGFYLFKTKLKFKALQQGKEVVEVGRFYASSQTCSNCGAKNKNVKNLKIREWVCSECGTHHDRDVNAAKNIRNEAIRIKNNCETTHKNLRRCNPKVKSVETITNEKTETVGVNSMVIEPETQSIDVINQKIDVDTTSANMAEKISMKR

SEQ ID NO: 53677 - protein, 426 aa, unknown
  TnpB Polypeptide
MTFCAHKIRLCTIATDRGYFDRCAGTARYSNNWCLNVDQAYYALNGETLSDFDLRKLWNAHRKAMLPWTYEITKHAADSGIDHYCAARKNWFGSLKKRKANPKQALHFHKPKLKTKHCSKKSFTIYGYGTDFHIEDDRLIVPKLGPVRMAEHVRFPGKIKSVTISAQGGHWFASFLVELSEDYVYPHRCETQAVVGIDLGLNAQLTLSTGKKLPNPKFYRRHERKLKKAHRALSRTKKGSRNREKARRRLNNIYAQLNDLRTDHLHQLTTPVVRQFLWIGVEDLAVANLMKNHSLARALADASFGEIRRQLQYKTEWAGSHLVVADRYYPSSKLCSVCGYKHDALRLSDREWTCPRCGTLHDRDINASQNLESVARGSRDTQNACVTAPPETERRRSRRKTCVSKDARAAVPIQECCTPSTSVDKL

SEQ ID NO: 53678 - protein, 387 aa, Lachnospiraceae sp.
MRRLLKSFRTEIDPTEEQKHKINKTIGTCRYIYNFYIAHNKALHDRGEKFMSGKAFSVWLNNEYIPNHPDKLWIKEAYSKAVKHSMEDAYTAFTRFFKHQSCFPRFKKKSRSDVKMYFVKNNPKDCSCERHRMNIPTLGWVRFKEKGYIPTTKDGWVIKSGTVSIKAGRYYVSVLVDIHEHKLTVNFTQGIGIDLGLKDFAIISNGRAYKNINKSAKIKQLEKQLRRGQRSLSQKYENFKKGESTQKNIQKQMLKVQKIHQRINNIRTDYINKTIAEIVKTKPSFITIEDLNVRGMMKNRHLSKAVSSQKFYEFKAKLKIKCGDKGIELRVVDRFYPSSKLCHCCGSIKKDLKLSDRIYKCDCGYIEDRDFNASLNLRDATTYEIAL

SEQ ID NO: 53679 - protein, 422 aa, unknown
  TnpB Polypeptide
MLITYQYRLNPTPEQAAVMALWGELLRRHWNYALGQRLDWLRRTRSQIDRCSIVSEPIGEVPERVDYYLQASELRQTKELFPEYKAIYADCQQQNLMRLDKAWKRWMIPDKTGRRGGKPRFKQRGDSCSFTFPRVNHPKAGAHLIGDTLKLSKIGEIKVILHRPIPDGFELKQATVLPKADGWYVSLSLEDGTIPDAMPVDEIKSVVGIDVGLEKFLVTSDGQAVEIPQYYRKAQQQLARQQRQLSRRQKGSKNYDRQANKVARLHLHVARQRKEFHYQVAHWLCAHYDLIAFELLNIKGLARTRLAKSVLDAAWGSFLNILQAVAVKRGKVAVGEDPNGTSQDCSSCGETVKKTLAERVHSCPNCGINIDRDLNAAINILNRVIKPLGLTVSGCGGYSDTSPKKQQLSIVRLGSPFYTACG

SEQ ID NO: 53680 - protein, 277 aa, unknown
  TnpB Polypeptide
VKLGDQPGYPRFKGKRFFNSFTYPQSGFRLTGDKLTLSKIGACRLRLSRDIQGTIKSCTIKRQADGWFVIFAVEESQSCFIPKTGDATGIDVGLENFATLANGEVIENPRFLKQAQGAIKIAQRKVSKKKRRGANRNKARGILARKHLKVANQRADFFHKLSNQLIAEYDVIAVEDLHIKGLVKNHCLAKAISDAAWGTFIQILSAKAANAGRKVVKVAAAYTSQNCSECGNRVRKSLSQREHRCIACGFVAHRDHNAAINIQRRADALVRVNVVTH

SEQ ID NO: 53681 - protein, 189 aa, Methylacidiphilales sp.
SDGKVFSNPKAYRRMSKRLKRSQRRVSRKVKGSNNRKKAVKRLAKLHAKVSNIRKDAIHKLTHHLAKNHSEVRIEDLHVKAFLKNHKLAGAIADCGMYEFKRQLEYKTEKFQGKLILVDRFFPSSQICSNCGLHRHKMPLKNRVYICPNCGYKADRDLNAARNIDRWFEDIYVPERSESANLARPGFRA

SEQ ID NO: 53682 - protein, 426 aa, Methylacidiphilales sp.
MYRAIKVRIYPTDAQETYLSQCFGNTRWLWNYMLNVTSTTYKETGKGLSKVAMDKLLPGLKKEYEWLGLAYSQVLQRVTFNLSSAFVNFFEGRAKYPNFKSKHGKQSIQYPQNVKLIAEDSVIKFPGNLGLIKTVFHKQLPDANFATGILPGGKIRAKFTTVTISRNADGRYYASILFNQEDTPVVAIREAIGVDLGLKDFAITSEGSKYELPKKQLAKLEKNRKRKQKKLAKKADKASNKRRKAKRLVAKVSSKIARVREDFLHKLSRKIAYENQVICVEDLAVKNMVKNRNLAKAISDQGWGMFQTMLKYKAEKFGHTYIEIGRFFPSSQLCSETLLPIPMLQKGYDSLSVRFVDCQHCNKQHDRDINAAINIRNEGLRILALGTSASALGGDVRPKSSGRKKSTKVEAIPNELGSLHCTARSV

SEQ ID NO: 53683 - protein, 378 aa, Campylobacterales sp.
VLKAYKYRIYPTASQTILIEKHFGSTRFLYNYFLDYRQKEYAKGNKKVGYLVTQAELTKLKHQEEYQWLNECGSQSLQMALRDLDSSFTKFFKKQGGYPKFHSKKNTHQSFTAPQNVKVANNKVYLPKFVKDGIKTKLHRAIPDDAILKQATISRQNNQYFISILIDDNIPIPKLIKAKTAVGLDMGITHQLITSDGVKYPNEKHYVKSQKKLLTLQRRLSKKQKGSNNRNKAKLSVQKLHTKITNQRKDNLHKVSNEITNQYDIICLETLNIKGMVKNRRLSKAIADVAWGEFIRQLEYKASWRGKTVIKIDQWFPSSQICSYCGASTGKKTLNIRKFNCPECKKKDIDRDVNAAVNIRNYGLGQLDNRNTAGTVEI

SEQ ID NO: 53684 - protein, 317 aa, Streptomyces sp.
VSIRLPAPLAHLANAPHGRYVLAGRAVFRHREEEWADRIAASRAVAYRIHYDPDRGRWYVTAAWQIPPVQAVPLEAVRAGGLAGVDLNADHLAAWRLDRHGNPVGDPRRFDYTLTGTAGHRDAQVRHALIRLLHWAKRHGLALAIEDLDFAMEKTREKHGRRKRFRKLLSGLPTAKLRARLVSMAAELGVPVVAVDPAYTSRWGAQHWQKPLTSQNRKPTRHDAAAVAIGRRALGHPVRRRTAPPPHDRSDRAGHRTVQTASGGPGREGPRPRLPGPRTRSAGAGRGAKAGDQCAHNRSGRTAEHESWHQDSLPLSL

SEQ ID NO: 53685 - protein, 389 aa, unknown
  TnpB Polypeptide
MKSYKIEIHLSDEQKIKLKQMQGTVRYLYNEYIETNKNLYELSQLGVSDIKFMSGMSFDKYVNNTLSKQPNMSWIKECGSKSRKKAIMNAELAYKNFFKLGKGFPKWKKRGNNVSIYLPANNKTSFKVYRHKIKIPIFKEVLLKEFGYIKEDSIISSATISKVATKYYISILTKDENKTEKLKLSNSGVGLDLGIKETVVCSDGVIYKNINKTDKIKKIEKKMRKEQRALSRKFESLKIRKKGGETVTKKNIEKNILSVQKINAKLARIRTEYIRFIVNRIIKTRVSYIVIEDLNLRGMMKNRHLSKAIQQQKLYYFRQFLIQQCKKYGIEVRIVSRWFPSSKTCNNCGQIKKDLRLSDRIYKCNCGYEEDRDLNASYNLRDCNEYKIA

SEQ ID NO: 53686 - protein, 404 aa, unknown
  TnpB Polypeptide
MRKEVLITKLVEKHKVYKSHPSYSKLDEMSRKANNLYNQCVYFAKHSDDLSEDLKNLDKIMKSFPDAHDNYRSFGYARCAQQVLRLFQQNLRSYFAAINDYKKNPANYTGRPRFPKFRKSGERFQVIFTNQSAKLDDRCVNIASRVFENKLSIKLRTHSAKKICQVVFAPRNNYFLVCVIYEVDPIISKNTNKLAAIDIGLSNLATVTFSEEDDPILYRSDLTKINHDFNRLTSNYVSILKKTQNKDTSKRRKRYSEKYSGLVEDRLHKISRAIINDLSHRGVSTVIVGKNTGQKINNKLKNFVQVPLFRLIEMVKYKAELAGITFIQVNESYTSGTSFLDNELPTKEYYNKSRRKYRGLFLSNDSKRINADVNASFQIMKKVYREFTHTNSVKYANPIVKTIC

SEQ ID NO: 53687 - protein, 402 aa, unknown
  TnpB Polypeptide
VQLIKTVVLKIYNYGDELDALIDSYTKGMNYVSELVHDHGKPMGSGKIQKLVYDDVRSIGLKSQMACNICRQVAGTYKTLQEQVKIEQAEWQLIQYKPTNVTFSYQRDFTITKEQISITTLEGRKKYPLHMYKNAEQYFDGSWEYAASKLVKHKDGYYFHLSVSKEIADPVPLTASSTFMGVDVGMNWLAVANTTDNKNKFFCGGIAKDVRSKYKGMRRRLQAKGTRSAKRMLKYLSGKERRLMANMNHIVSKQIVQFALQNEVTCIGLEDLTGIRQNTQYKCKKKNRYHKSSWPYYQLQFMIDYKAKQSGIGIEYIDPDYTSQTCPRCYHVDKASRKGLMFTCTCCGYQLHSDLVGARNIELRTRNSRYSLELQGCEVSHPDECPEFLQSLKPLPQKLVEF

SEQ ID NO: 53688 - protein, 402 aa, unknown; identical to SEQ ID NO: 53687
  TnpB Polypeptide

SEQ ID NO: 53689 - protein, 381 aa, unknown
  TnpB Polypeptide
MRLRSWKFRLYPSRQQENLLGNYLEACKNLWNALLEYSKKYYEETGKFPTRNQLNALTKGTPLFSQVAQNAADRLAKSMRGMVARKRAGMKAGFPRFKPIERMKSFTYPQFGFKIDEHLELSGIGTIQVKKHREINGKIKTLTIKRSPSGKWFAVFTSEMEEKPIPAKEGAAVGMDLGIGHFAYFSDGELIENPRHLKYAEEKLKKAQRGLAKKKKGSKNRRNAKFRAAIAYENLSNQRRDFLHKASRKLADRYSFIAMEGLNTTEMAKGFLAKSILDCGWAEFSSMLAYKAEEAGCEVVLVNPVNTTSECSGCGSVHKKLLAERWHECACGASMHRDLNAAINILRRATLGHSGSNASGEGTHTHQKWASSFNERGSPGL

SEQ ID NO: 53690 - protein, 331 aa, Fusibacter sp.
  misc_feature (39)..(39): Xaa can be any naturally occurring amino acid
  misc_feature (90)..(90): Xaa can be any naturally occurring amino acid
  misc_feature (107)..(107): Xaa can be any naturally occurring amino acid
MLSDKIEHYEKMKQKLNNTPAQYKKEYEWLKEVDSLALXNVQINLQTAYNNFFRKPKVGFPKFKSKRNNKKSYTTNYVNGNIKLENGCIXLPKLKAVKIKQHRSIPXDYKLKSVTVSKTPTGKYFASVLFEYEQEIKAVQPKTLLGLDFSMKELFVSSDGISAEYPRYYRKSLDKLKREQRKLSLCQKGSKNRNKQRIKVAKIHEKVTNQRKDFLHKQSKQITNAVDAVCIEDLNMKGMSQALNFGKSVMDNGFGMFVSMLDYKLMEQGKQLIKIDKWFPSSKMCSECGKVKNTLLLSERTYHCEDCGMTMDRDYNASINIKNEGMRILLA

SEQ ID NO: 53691 - protein, 363 aa, Fusibacter sp.
LNKAFKFRIYPNSEQEVLIGKTFGCVGFIYNKMLDDKIEYYKRTNQKLKNTPAQYKAEFEWLREVDSLALANAQMNLQTAYNNFFRKPKTGFPKFKSKRNNNKSYTTNFVNGNIKLENGCIVLPKLKAVKIKQHRAIPKEYKLKAVTVSQTATGKYFASILYEYEVTIETVQPKTFLGLDFSMKALFASSDGISAEYPRYYRQSLEQLKREQKKLSLCQKGSKNRNKQRIKVAKIHEKVKNQRKDFLHKQSKQIADAVDAVCIEDLDMKVMSQALNFGKSVMDNGFGMFVSMLNYKLMEQGKHLVKIDKWFPSSKKCSVCGIVKKTLLLSERTYHCEDCGMTMDRDYNASINIKTEGIRLLLG

SEQ ID NO: 53692 - protein, 458 aa, Firmicutes sp.
  misc_feature (109)..(158): Xaa can be any naturally occurring amino acid
MTIIIEHRDLHRSVHGSMGGVLPVTRRKKRWRLSNMLINRAYRYELDPNTHERILLAKHAGTARFAYNWGLARRIALWESEKKSTNAIEQHRELNVLKKVDLPWMYEVXXXXXXXXXXXXXXXXXXXXXXXXXXXXXXXXXXXXXXXXXXXXXXXXXXLPWMYEVSKCAPQEALRDLDRAFQNFFRGLKTGRKVGFPKFKKKGRHDSFRLTGAIHVFERHIQMPRFGKIRVKEATEVQGRILSATVRREADRWFVSLAVEMEICDPIQVQGPAAGIDVGLSHFATIVSGSESVKIADPKPLNRYFKLLRRRQRRHSRKQKGSRNRKKSALQLARLHRRVRNIRQDFLHKLTTELAKTKSVIVVEDLNVSGMLQNACLARHIADVGWGEFRRQLEYKTKWYGSRLVVANRFYPSSKTCSACGAVQEKMPLSIREWTCPACGTHHDRDINAAKNLLTLAG

SEQ ID NO: 53693 - protein, 424 aa, Nostoc sp.
MLDVLKVRIYPNKEQELSLAKSFGCSRFVWNFYLNKTNTQYQDTGKRMTYCQMAKDLTQLKKLTDYEWLLFPTAAVLQQSLKNLETAFKNFFSKRTGFPKFKSKHSKQSIRFPESCSIKSGSLKLPKLGLVKASLSKSVNGKIKSVTVSKTSTDKYFAAILFETDKLATTKQGKISGIDLGLNSLVTVFDGETCYKVDPIKPTRKYAKRLRIRHKALSRKVKGSKNRRKAIKVVAKVNEKISNTRQDFLHKLSRKLVDDNQVIVAENLCVKGLARTKLAKSIHDAGFGMLLNFISYKLDREGGKFVQVDRFFPSTKLCSCCGHKNDLLNLSIREWICLNCQATHDRDENASRNLRAEGIRILLTLSEAEGLTNTAGHAEIQACGETVRLVSTCTKKRQCGLGVSPSIATAVRVSEKQESPATLR

SEQ ID NO: 53694 - protein, 375 aa, unknown
  TnpB Polypeptide
MQLSETVKVYPTEYQKTLITQTMTEYIDTVNSLVSEAVSGHSIAKTTTADVSADLPSALLNQCIRDAKSIVKKHYKYCRKAVLKNRSLAKRGSAIRTKAPNLPILKKHCCYINNQNYKVKNNCIEFPVMIDGKSKRISVFVKLTDRQKALFSDAKFGTMRIVIKNHTLVAQIVYEVAEPELKLDGNVMGIDLGIKCPAVSYCSEGSVKFYGNGRKNKYMRRHYAYLRKKLQTSKKINAVKRINDKEQRIMRDIDHKISHDIVETAVAHNVKVIKLEHLQNIRSTTRKSRKNNHSLHTWSFYRLAQFIEYKAKLAGISVEYVDSSYTSQRCPICGSVHHADDRNYTCECGFHIHRDLLGAMNICNSTEFVGNRQTA

SEQ ID NO: 53695 - protein, 399 aa, unknown
  TnpB Polypeptide
MSRYRLYPTPEQRAVLRDHCGHARYVWNMAVEQHAHWHPGRASAPGYLEQCRQLTAARAAHPWLAAGSQTVQQQALRDFTQAMAAFFDPDNPAGRPSWRKAGRNEGFRITGRRGRHWDVRRMSGKVGQVWVPKAGWVRFRLSRPVPLGAKSYRVTMDRAGRWHIAFAAIPGPIPAPGNGQAVGIDRGVTVSAALSTGELLHAPGLTGPERRRVRHLQRKLARARRGSNRRGQVKRAIARLRARESDRRKDWAEKASTDIARRFDLIRVEDLQIGAMTRSAKGTAGDPGRNVRAKASLNREILRSGWGLLVRRLADKAPGRVEKIAPAYTSQRCSACGQVDGNSRESQARFACTACGYACNADVNAAQNIAAGHAVTARGGFRDAGPGNREPQLLASQRT

SEQ ID NO: 53696 - protein, 395 aa, unknown
  TnpB Polypeptide
MSAVNKVVSGEDLNWYSKNALKQYVPNLLDEDTYDAKQLADDHPIRYANTAAVFDHDEDRHHEICWEIPLPGRGTNFWIPLQLNPEQEEWWHALIDDEDDSVWPDELRLQCNGSRWVLHVTANYEVEDAHSCSCESDDMTPVVIDVGESKLLVGCALRDDTPVDPLFVDGGRVRHLRQKQASAEDRLKPRYASKLLDDLVWGRWQDAIEDEVEKASHRAVEYASQFENPVIILEYLDGITDEDIGKYWNRRLGKWLFSRLQSCIEEKAAERGIPVEYVHPHHTSKVCHACQHIGYRPHQGTFRCTNDACWVSEYQADLNAAANIANRLHPWGESLPWKSAGDDSPRSGGQWQAHQDTSPSEGLPSERRASDDKASSSSPTRGAGAEPETGDAYTS

SEQ ID NO: 53697 - protein, 501 aa, Halorubrum sp.
  misc_feature (226)..(282): Xaa can be any naturally occurring amino acid
MEDSRLKPRSSGRGYSRQLLHQPHSMGLPDIPRPVVDFNIDIHITSYEHSPMLETTRTYRAKIVNHQQVSGDLDQCGFSASKLWNVARYYTQGRWDDDGEIPDDGELKSELKEHERYSDLHSQSSQRVLEELAESFTSWYKARQRGDEDANPPGYRKHGDEHPRSTVTWKQKGIKHDSKHDQLRLSKGFNLKTHRSDFILAEYETRPDVQVENIQQVRAVWNGDRXXXXXXXXXXXXXXXXXXXXXXXXXXXXXXXXXXXXXXXXXXXXXXXXXXXXXXXXXNYLAIAYDDGDAELYPGNVLKQDKHYFTRDEYDTEGENGPSKRAFRARQKLSRRKDHFLHALAKHVVEQCIDHEVCRIAVGDLSEIREDEKGESRNWGKRGNKKLHGWEFDRFTRLLEYKAEEHGILVDRTSERDTSKTCSCCGRKRDANRVERGLYICASCGATMNADVNGAVNIRRKITQNLPTEDMSNGRLARPVAFLFNQTSGSFHPREQVDCKP

SEQ ID NO: 53698 - protein, 434 aa, Chlorogloeopsis sp.
MAYVVTHSTKWYYQYMLLTYQYKLNPTPQQVVTMETWGELLRRHYNYALGQRLDWLNRTRSQIDRCSLISEPIGEVPQKVDYYTQASDLKQTKELFPEYKNIYADCQQQNLVRLDKAWKQWLMSDKNGKRGGRPRFKKRGDICSFTFPRVNCAKAGAHLVRNILKLSKIGEIEVILHRPIPDGFEIKQATILKKADGWYVSFSLLDKTVPEPIPVDEIKTATGIDVGLEKFLTTADGQSVEVPQYYRKAQSVLVRQQRKLARKTKGSKNYQKQSNKVAKLHLHVARQRKEFHYQVAHWLVKSYDLIVFENLNIKGLARTRLAKSILDVAWGAFLQTMQAVAVRRGKHCLGVDPRGTSINCSGCGARVEKTLAVRVHSCSCGLTIDRDWNSAVNLLKHGSVGLPIPVCGGLDISQPVKQKVSFVNLRCSRYTACS

SEQ ID NO: 53699 - protein, 422 aa, unknown
  TnpB Polypeptide
MLTSTKVKLYPDKRQQVLLEKHFGGCRFVSNYFLSKRDEYYIANRGAEKSSLNYFGTQSMLIELKKEYPLLYEINSQSLQMSVRFLDSAFKNLFHGYAEHPKFKRSGKNDCFAVPQHIMIEGNSVCFPNFSESIYFRCSEGKLCRVKKVNHIVITKDVGDYYCLIIKETGEQLPEKVSISVGNSVGIDLGVEKFATLSDGTIIGNPRFMERVENRIRRLQRQLLKRRKGSNKRRNPILKLQKKYRKLSSMHEDFLDKVSTAIAKRHDTIVLEDINVRGMVQNQHVSKGLADASFYAFRRRLEWKAHKYGENIILIGGFDPSSKLCANCESVKHDMKLSERVYRCATCGLVIHRDYNASKNIRRIGLVNVGLVRSEFTPVEIATSCLYGIYPYRQIWVAEAGGSVREGGVARIVHIHTLFGEC

SEQ ID NO: 53700 - protein, 437 aa, Streptomyces sp.
MSRFRLGPTGEQKVLLTEHCRHARFVWNLAVEQHAWWTPRRGPAPGFVQQARQLTEARAESRWLAAGAQMVQQQALRDFAQAMTAFFAGTHRRPTWRKAGVHEGFRIVAVQARDVRRLSRRTGAVRVPKVGWVRFRWSRRPPRAKSYRITRDRAGRWHLAFAALPTPIAAPGSGATIGVDRGVAVSAALSNGELLRCPTPTPSESARLVRLQRRLSKAEGGSGRRRRIRCAIARLKARQADRRKDWLEKTSTSLARSYDRIAFEALDVVAMTRRAQGTGHAPRTGVAAKAGLNRSIRLHAWGGLVERTKDKAPGRVVLVPAAYTSRRCSVCGHVAAGNRESQATFACRNCGHRGHADVNAAVNIDAAVNTATAAGRAVVLRGEGTRVTGPMSREPQRDLSSFLGETSGNPPLAGWRTSNRDYLHTGLAEGGEGRRVR

SEQ ID NO: 53701 - protein, 423 aa, unknown
  TnpB Polypeptide
MTEITLVTSSLLYKDKNEQLYNYFNDITPLFSFLVRRTIHHLNNDLNGENISKYRTRLKQEYQLTNRFAKAIVTTSKNTLKASTALGDYLHSTYATKIKKVNAKIIKTKAILNNPKTKKHRIKNLKIKLFWFQMKKNKLIQLQNNGPKPMLTFGTKKLLNNNKDLFLKKRDNQIVYIGDKNEHLGNQQFKLFYDKKRNKFTYKVRLENQYIKDSKYIYGEFIIKDNKAKKEILKTLKSPKSNPLSFRIIKRNEILQLQIMYRISSESKTRYSNGVIGVDFNKGFVTISEIDQKGKLLNLDRIDYIHKGKAGVTKNSMLHLVKDLVDFAILSGKDIVIEDLKSLNKNKKEKSERKHYNRMINTLKFGKFREFLETRCNKLGVGLSLVKPYNTSKIANNKYCYDMKLNIHSGASYVIARRFYNLD

SEQ ID NO: 53702 - protein, 418 aa, unknown
  TnpB Polypeptide
MMLFIMLKRYRYRAYPTPGQVEPIARLFGCVRTAYNDALAYCRDTYETTGKKPSAAQLSLRLTEIKRTEDRAWLMQVAAAPLQQSLRDLEEAYKAFFDSVRGKRKGKQKARLPRFKKRSHKQSARFTRNAFRVRETTHGVGFVRLSKIGEIRFASSRPLPSEPSSVTLIRERDGSYYVSFVVETAPRAVVEPSAYAMGVDMGLNHLAIGVSSSGERLIVENPRALRRAEKHLAHLQRQLSRKQEGSRRREKQRIRVAKAYAKVRNTRNHYAHQVANKIVDENQVIALEDLNVKALARTKLAKSVTDASWGLLRRLIEEKATERGRSVVYADRFAPTSQTCSVCGAPGGRKPLSVREWLCDTCGARLDRDLNAAANIMLAAGLAESLNAQERNVRRVLARAVTVDTVNPPKTTRLTPRG

SEQ ID NO: 53703 - protein, 436 aa, unknown
  TnpB Polypeptide
MFEAVKVALDPTPAQERLMLSHAGAARFAYNAGLAHVKAAIEAGEKPEWSSYSLQHWWVENRDTLAVDSDGAIWWRENSKEAYRSGLRWLAEALSNWSKSRKGKRKGRRVGFPKFKSKDRETPRFAYSTSGPSEGGLIKGDAKALWLPRIGRVHCMENVTVRVDGAKVLNMTISRRGGRWYAALTVERDEPTVKQAPKGGAVGIDLGVKALATLSDGTVIPNPHHLQADEQRLKRAQQALSRKMKGSKRRAKARERVARIHNRIANRRSDTLHKLTTRLAQTYSDICIEDLNVAGMMKNHHLAKAVQDASFYELRHQLEYKTARTGAVLRVVDRWYPSSKTCSNCGSVKAKLSLDERVYRCENCGLVMDRDLNAAINIKVAGSAPETLNAHGGTVRRGNHHGCATLVPVKCEPSSGASSVRLGAGGRKTTLQATTN

SEQ ID NO: 53704 - protein, 176 aa, unknown
  TnpB Polypeptide
MALRRLKSINHHYNKRFAKLQSHLKKTRNRKWSNRLQRLTDRRNARIGDYLHKATRKITDICVQKDISKVVVGDVTKSLNQINLGKKTNQNFVNLSLGQFIEKLRYKLELHGITLEVIDESYTSKASFVDGDTLPPKKTHTFSGKRVKRGLYRSQNGTAINADVNGAYNMKEKLLP

SEQ ID NO: 53705 - protein, 386 aa, Ktedonobacter sp.
MSKQAYKFRLYPTRKQEAMLTWTLDRARELYNAALQERRDAYRMAGKSLNYYDQANQLPEIKDIREEYNGIHSQVLQDVLRRVEKAFKRFFARWKSGETPGYPRFQGRNRYDSFTYPQGGSSLTADNRVCLSKIGSIKVKLHREIKGTIKTCTIKREGDAWYAVFACEVEAEPLPENHHAVGIDLGLLHFATLSDGSTIENPGHYRRAEKHLKKGQEALSWKKRGSHRRKKAVKCIAKAHRKVANQRRDFLHKQSRKLVNAYGTIVFEEVQPANMSKRPKPKQDENGTYLPNGAAAKGGLNKSINDAGWSQFVQFCTYKAARAGRNVVQVNPRYTSQVCSGCGQIRKKELSERWHSCECGAELDRDHNAAINILALGRRVQAAQAS

SEQ ID NO: 53706 - protein, 544 aa, Moorea sp.
MRTMAQSGARKPQEGLDSLTQQIFSVLEKLQSLTDCTVTPSVIAESVATNNETTLPGKSLTSTRSSQKRKSSKTSGQDSITKGKGLEPYWNELCAEISSQLLLPVETGSPDLGLNSLSTWSVSTVEKSWFSTNLKAVQNPNLPQIFSLSFTYSLARSTDLGNTVRKSKKIRVFLNPEQRTLVRQWFGVSRYVFNKTVKILQKGDVKANWKAIKTGILNDLPEWCKSVPYQIKSIAIKDACTAVREAKKKYKKTFEINRVKFRSRKNPRQSCYIPKSAVSEKGVYHTKLGEISYAESLPSNIGDCRLTSQNGDYYLVVPHEATKYKTENQGRVVALDPGVRTFITFFSETSVGKIGHGDFSRVQRLCQHLDKLLSKISKAKRGQKRRMRKAARRMIIRVQNLINELHHKTARLLVDNFDVILLPTFETSQMSKKGKRKIRSKTVRNMLNFAHYRFKEFLKHKANEAGKIVVDVCEAYTSKTVSWTGEVINIGGSKIIQSKVDGRTMDRDINGARGIFLRALGDTPWLRNQLALVSQNPPLVDFGS

SEQ ID NO: 53707 - protein, 368 aa, unknown
  TnpB Polypeptide
MEMLLSHKTSIKISQEYSNIIGHMCYAASKLWNICNYERRHYKELGLEKYPDWYYQKKAHKGNLWYKQLPSQTAQETCKQLDKAWRSFYVLKKTGGIKDPNPPRFKQDNIPVTYMQMGIRHEKGSDQLRLSLSKDLKSYMEETYGIHEKFLYLENKIFRNMDHIKQLRIYPPENGKCDLIVIYEIEEPEQISQNGHYLSIDLGLHNLMTCYDSGNGRAFILGRKYLSLERFSLSIKRKSNGLVSYHRLVVRFGIRHRPDYRQPVGQNVPDIPDIPILVRHILQHPYPEIGNRHRQAGNRTPPRRRRPECTSPAYRSHPRLSSPPTAAPRGRAYWPESDKSGPHGSRRARNISRGCRTPYNRDGGISSK

SEQ ID NO: 53708 - protein, 445 aa, unknown
  TnpB Polypeptide
MKTQKATSESSKSHYRAERIVIRQGHEAFKASAYCCQIARRIKNATHYLIRNQVKDNGKPLSHSDADKWLKKNNAELYQKIPSAMSQRTTQICGQEWSGFYGAIKDFAKNPTRYKARPKPPKYAYRASTLHIGRNGFKAEDGVLIFAGAVLPNIKTSFTFSQNWNEITENTIAQEVRIIPNGNSFTIELIYNAIKLQQTGDFCLLLDKSRQAGIDLGINNLIALASDQPGIRPVLINGKPLKSINAWYNKRAAKLRSQKKYSHLKPISNKRYNRVRDCLHKASRYVVDYCVSNNIGTLVIGHNDGWKQDINIGKVNNQKFVNIPHSILIEQIQYKAYSAGITVIVREESYTSKASALDNDDIPTYGDSHIVAFSGYRAKRGLYKSTLGMLNADINAALNILRKETGKALDVLACRGCVSQPILITLGKPNVINIKRKATRLPKAA

SEQ ID NO: 53709 - protein, 417 aa, unknown
  TnpB Polypeptide
MDRTVRIQLHPTPEQAHALHETLQQFTQAFNAVCRYGWQHREKNGVKLHHATYYDTKASCPGLVSDHLIQARVKATEVLKSAFTWKAKHEANYQKKVARAKKRGKPVPKFQPMKCPQSVLCPVRYNEKTFSLNWQKQDMRLSTSRGKISIAFTVPEFSCKYQDYPVATADLLYRKGKWWVHVVVSVPEPVLSPNDEIIGIDLGLNRPAVTSNRRFLGSPYWKEVERRRFRLKRKLQSKGTKSAKRHLMKLSGKQRRFRRDADHVLSKRLVQHTPPGATLVFENLTNIRESSHMGRGKQNKNVQNKRKLHSWTFAQLYDFTTYKAQERGIQVVKIDPRHTSQTCSRCGYQHRSNRRSQSLFLCRQCGYQLNADLNASYNIREKYLASLAQESTPVLSGSPVKRPIVSTLRSQGQASCL

SEQ ID NO: 53710 - protein, 326 aa, unknown
  TnpB Polypeptide
VVCHIHLEIKPREEEPQSIIAFDINENTVAVSRVDIIATIDKIASWNRQYVTPELYMIRTDFGRLAKRYERVRNTIIERLKPGFALPSGKYVNITNTREFRKRVKHLRERVRKVGRVRYVANELTRIPAIIITEDLGDNPQESMIEDVMKDELRHRIKQTPFKSIERAVGDKALERGSRIFRVSAYRNSRVCPIHFTRLEKTDDWHTLYCPKGHYVHRDYASVMNMLWKTTPEAWTKAFWWNMKKDMNWREYEDKSNPLVPHEIVKHIHTALKTFTASEQSPAMPARAKPMNPARGANEGWARKPMNRPKGTHALQGGKEVGRVLN

SEQ ID NO: 53711 - protein, 402 aa, unknown
  TnpB Polypeptide
MKRIIKGYKFSILPTEEQKTFFAKSFGCSRFVFNYFLNARKNYFLKNGKGIGYNDTAKLLIELKGNEDTAWLNEVNSQSLQQSLRQLDVSYQRFFKKIARFPSFKSKYDKQSFNVPQHFTFKNGDLTIPKLKDPIKVNQHRQFGENYNICFLTISKTKTNKYFVSFIVEEDFVSNVKKTNKSIGIDLGLIDLMTFSDGKKISNPRIAKKYRKKLEYQQRQHSKKTKKGENRERARIKLAKTYEKITNVKLDYAHKLTTDIVKNNAIICMEDLSISNMMKDHRKARSIQEVSWYEIVRQLKYKSDWNNRKFIQVDRYFPSSKTCNDCGYINQSLREGDREWNCPICNIHHDRDYNASLNILKQGLSGLGIKSDGKQKCGEALRIVSGKTERVIKSMNHDTHSL

SEQ ID NO: 53712 - protein, 400 aa, unknown
  TnpB Polypeptide
VYLTETTVVKPSDRQLYKACDELCFKSKNLYNAILYIQRQNYQEGKKYISAWDMDKLLRTQNNFDFYEMNTGVSNYVIQQLDENYDSYFSKLESRNEGKHNQKVSPPHYKDPIKGRNVATFPKGTLLKRTYNKEGLIHLSKTNIKFKSKIPLEQIHHVKVVPKNGYYKLQVVYTVEEAKQVVSENYAAIDLGLNNLATVVTNVSSPMIINGRPLKSINHHWNKKKAKYQSKLSKGVKTSKKIKSETNKRTRRVDDYLHKASRALVNELIKQSISKVVIGYNDGWKKNIKLGKRNHQNFIQIPHSRFVKMIIYKCMLAGIEVVVQEESYTSKCSFLDNESVEKHDSYMGKRVKRGLFMSSNGTLINADVNGAYNILKKHLGIEINTLDLVQVCSIPKVLKF

SEQ ID NO: 53713 - protein, 394 aa, unknown
  TnpB Polypeptide
VLKRLKVRLYPSQEQEILMYKTAGCCRFVYNHFLAHAKEHKDFNFAEYSRKLTALKKDEKYTFLQEVHSTPLQQVLRHLNTAFSRFFSKEAQYPVFKKKFVNDRFTYSTGLHLNKSAVKIFLPKIGYMKFKCSKKYLKLLKTHEFRTCTVKLVTGKWYVSILIEDNTVPQPAVIPSKIVGIDLGIKKYLVMSSGQCVSAPNILNKLKEIDRLKSYLSMKKKGSNASKKLQLKIKRKQQYLNDLKEDFLNKLVDWVIKNHDCVILEDLNIRNMIKKLGERKKTFNRLMTMIPMYEFRKKLEYKAMLAGKYCVAVNPAYTSRTCSSCEHVDKMNRKSQSEFECTRCGFSANADLNAAFNIHNLGLNALIAAGHAVKSAYEKANLSAVLPSSFGFSA

SEQ ID NO: 53714 - protein, 755 aa, unknown
  TnpB Polypeptide
VLKFLKVRLYPSQEQEILMYKTAGCCRFVYNFFLAHAKEHKDFNYNEYCKKLTALKKDEKYSFLQEVPSQPLQQSLKHLDVSFKRFFKKQSSFPVFKKKFVKDRFTYPEGVRLNPSFTKIFLPKIGNMKFKTSKKYLKLLKTHEFRTCTAMVEAGKWYISILVEDNTVPQPAVKINKTVGIDLGVKKYLVMSTGQSISAPDIINKLKEIDSLKSYLSRKKKGSNASKKLQLKIQTNQKHFNDLKTDFLNKLVDYIIKNHDCVILEDLNIRKMIKHKGDWKSTFNRLMTMIPMYAFRRKLQYKAMLAGKYCVAVNPAYTSRTCSSCEHVDKMNRKSQSEFECTRCGFSANADLNAAFNIHNLGLNALIAAGHAVKSAQITASELVKANLSAVSPSSFGFSAKRNHSSLWRGGSQNKNFANYIFWRLTKTPVLVVKLDTKENEIIIGCNEDGYQVFSPSAAAPITRDFKQVKELVKEEKLKPNKPEIHKALKLAKQIVSKSDGKVYLTLFDDEDFVDIHFTHKADKSGNIFRIMVYEDRFLLRYTYEEKYSFVEIKTYKEIFLYVHLMVNKQEIISFDKFKKQLGAVLDNMPVGQFSITPTSFYVQPYIEGTDVRQILVSFGRNNNAFITSNFYYGAKILPDSQLNKAFSKVEGIFKEQNENKKVFLKALPILEEAISIYKHLIGKIKVYFSQQEYNKNGFVQIAIYPLANSDEEAFTLRFNANGIIDITNDGASISELHHELLNSHFRLYKKGVTN

SEQ ID NO: 53715 - protein, 402 aa, Escherichia sp.
VKRLQAFKFQLRPAGQQEREMRRFAGACRFVFNRALARQNENHEAGNKYIPYGKMASWLVEWKNATETQWLKDSPSQPLQQSLKDLERAYKNFFRKRAAFPRFKKRGQNDAFRYPQGVKLDQENSRIFLPKLGWMRYRNSRQVTGVVKNVTGSQSCGKWYISIQTESEVSTPVHPSASMVGLDAGVAKLATLSDGTVFEPVNSFQKNQKKLARLQRQLSRKVKFSNNWQKQKRKIQRLHSCTANIRRDYLHKVTTTVSKNHAMIVIEDLKVSNMSKSAAGTVSQPGRNVRAKSGLNRSILDQGWYEMRRQLEYKQLWRGGQVLAVPPAYTSQRCACCGHTAKENRLSQSKFRCQVCGYTANADVNGARNILAAGHAVLACGEMVQSGHSLKQEPTEMIQATA

SEQ ID NO: 53716 - protein, 426 aa, Candidate divison MSBL1 archaeon
MRYSYNRLCENKPKSEIETGLKEKFPEINSRYRRGGYFRARANHGSAKELARSGELESPEKVVFGGRENLKRRERGEIANEEWRRLRNRQVFCRGDKSKGGNLNLRFVEKDGRLHLRVNVGDYKWIKIPAYLPPEARARVLKGEEAYGVRILREDGDYGLRVNFEEDHEPEVGFEKGRVGVDFNHQEIDLAATDEHGQFKGGKTIECSGLTSARGGKREWLVGNYAKEVVDYAKYRNRGLVVEDLDDVARGKPNQHEFVHAKFLEAVKRRAEREGVEVCEVNPEYTSVIGRWKYPSSHHITSHQASALVIARRGKGVHEKLRGLKTLAFEAMEAGEGEEDVPSRRVHSWSLWSLIGDLPSRKGAEHADPEPRPRRPSGRVSRRESRGMESPGASAPAERSSGGGGPPEGETVTPGSGPPTRSRVVA

SEQ ID NO: 53717 - protein, 276 aa, Arthrobacter sp.
VKFRLTYRYQDAEQGTSARAVHHNGRWHVSITTPPRPRIPACTGAEVGIDVGVKNTVATSDGTFIQAPSWTPGEQRRFLALQRRLARQEKGSKRRVKTIAQLAGLRRTLNDRRTNWIEQTTAALARMYDLAAVEDLKITNMVRRPAPRPDPDIPGSFLPNNARAKAGLNRAILASCWGKFTTRLADKMTVIRVNPGNTSRQCQCQSCKATSARNRESQAVFICIECGHEAHADTNAAQNILGRVINTNPETPGDRTQRSRQRAASTALLPAAQPAA

SEQ ID NO: 53718 - protein, 368 aa, unknown
  TnpB Polypeptide
MKRIIKRRNIRIFPTEDQKEMFSKTFGCYRFVYNELLSDRKENKEQKRTLLELKEEFPFLKEVDASCLQQSLNDLMRAFKNRKNNPSFFKYPKYKAKKGRQTFRYTNQKFTILKHNEIKLCKIGNIKTKKIDLPKNSRVLSATFIQTSTGKYYVSICFETDVSDLPKTGKKAGFDLGLQHFLISSDNTKYENPKFNRLIRNKINHQQRKLSKMRTKLKKAGLDLNTCKNYQKQKKILNKMYEHAKNQRKDFQNKLSSKLVKEYDYLAFENIDIVSIFKEHRFAESISDASWGMFLGMISYKCNWYNKEFIKIDRFQPTSSICSKCGAKHKELVSDLRIREWTCPDCGAHHDRDINAAKNILNCALSQA

SEQ ID NO: 53719 - protein, 432 aa, unknown
  TnpB Polypeptide
MRVLQAYRFALDPSLRIEAACRAHVGARRFAFNWGLGLVKDRLAARRRGEPVTVPYTLAALRREWNQQKAVVAPWWPEHSKEAYSAGLDALARALRNHRESRQGTRKGRRIGFPGFRKKGRGRQSVRFTTGAIRVEDRTHIVLPRLGVIRTHEPTTALLARVRDGRARILSATLAWEGARWYVSFTCDVARAERRPARPDVAVGVDAGLRDLAVLSTGERIPAPRPLRAAARQVARANRALARRKPGSHHWARTKHKLTKLHARCGHIRRDALHKLTRHLATTYGTVVVETLNIAGMMQGRLARSVADAGMAEIRRQLDYKHTWYGSTLIRAPQRYPSSKRCAQCGAVKATLPWWVRVFRCEGCGAELDRDDNAAQNLVALVAAVAGSGPETQTARGRDVRPGTIGRTRMKREAGSRLPHQTGTPTPQGVGA

SEQ ID NO: 53720 - protein, 375 aa, Caldivirga sp.
LVFLLLLLRRAVAVELEVARGLNRLLYSVETMYLNIVREVVAYAVKHNITNPTQLHRLFYSKYRQEYPSLNSQLVIQAIRQSSEIAKSFIEKRRRGLVGKSYPEVKAVSIRFVETTWNYEQFTSSIAPVRITISLLGGRREVWLRLHKRFWLYWWRVLTGEAELAGTLIVKRRLNRWYAVFIFELKPREEKPQSVVSFDINENTVAVGRVDIETTVNKVAKWNKQYLTPQLYTIKTDFGRLARRYGRIRDAITEGLKPLYALPNGKYVNIADTREFRKRVKHLRERGRKIGRIRHVANELTKTPAIIITEELGENPQESMINGIGRDELRHRIKQTPFKALEKAVEDKALERGSRIFHVSAYRNSRACPMHFVKL

SEQ ID NO: 53721 - protein, 736 aa, Streptomyces sp.
VIRAPRSSARPIGSLLSGTSRFSPESSLGARNSLSFLRCLRACALIITRRTYASGSSAEPTLRHATYTCSSVVWTRSSAACCSPVRRNAVRINRGQRPTTKLWNSASRACFRSPMSTSSMTEGVRGHRIPLPHRREILRGSHRNISTAPASNITPLTRNASAYPAVSLAFGQGARSFGAGVNARSCGAGRGKPNRLQGGSASRRDGGEAGLEQVWQLGVDGGRWLTVPGGRPGLVTRAGDVGRWCGRSGNVRSRFTVMARFRMYPTGEQAGVMLGHCAHARYVWNLAVEQHTHWRRGRRAAPGFAEQCRQLTEARRDNAWLAAGNADVQQQALRDFAKAKNARFTSGFGEPTWRRKHVHEGFRVIGTDRVPEFEADGSPRLNAKTGKQVMGRSVVVQKLNRRWARVKVPGCGWVRFRLSRNGKGSRPPQAKTFRVTFRNGQWHIAFAVVPVPVEGPGTGEVIGIDRGVAITAALSDGRKLNCPQLTVKERARVRKHQRRAARAPKGSERKSAEYAKAARIKAREADRRKDWCEKTSTMLARNYDLVRFEKLNIKNMTRSARGTTEQPGQKVAQKAGLNRAILAQGWGLLRQRTGHKAPGRVEDVPAPYTSLRCSACGWIDKNSRKSQAEFCCSSCGFTCNADTNAANNVAAGQGGIPRPRRTAGAGGVTTATGRSNTREPQPIWAGIPLFQEGEDVKCRTSPSRRRTRPRSPTTPTAAAAASAAPRSAPRRPGTPR

SEQ ID NO: 53722 - protein, 369 aa, Singulisphaera sp.
MKLTLQTQLFPDKIHAAPLKATVERFNEAAEWLAGEAFAIKVSNKTELQKTHYALLRERFGLSAQMAVRCIAQVCEAYKRDKTKRPHFRKHAAMPFDPRMMSFKEADRVSLLTLEGRVVVPFVMGKYQAERFTNAKGQADLVLRKDGKWYLLVTVDVAVGAPIPTTDFLGIDLGIANIATDSDGNEHSGRPVERTRRKHNLQRKRLGKRNTRGAKKKLKRVAGKEARFRKHQNHVISKTLVEVAKGTGRGLAVEDLSGIRDRLPAWGKDARNRLSTWSFGQLVAFLSYKATLAGVPLVQVDPRNTSRTCHECGHCCRENRTSQAKFLCVSCGHRANADQNAARNIRAQATRKMALELAGVNSQPESPAL

SEQ ID NO: 53723 - protein, 470 aa, unknown
  TnpB Polypeptide
VVKRTNTFTVRPLSNYGEQVLRKLLDASAALWNEINFQRLMRYNDEDGFEGDVWDADTGRLEGKYKGVLGASTAQQVIAKNSEAWRGFFRLKDQYHDKSNTSVADHPEPPGFRGNEDDGRVLKGVVRKDAYTVEWGDRSRLEIVVGETLRDRHNSPRSRLRLEIVGDPNWPDYEKQGQLDLWYDETDGTFRASQPVTVSDETRVTPLADETAALDIGANNLVACTTTTDQQYLYEGRELFQRFRETTREIARLQSKLKDERYSSKRIRRLYRTRTCRRDHAQEALCRDLLERLYAEGVDTVYIGGLTDVLETHWSVETNAKTHNFWSFKKFTERLVCTAEEYGISVEVRSEGWTSQVCPQCGSTERTTRHQDTLTCPCGFEGHADLTASETFLRRHQNSKSSDWRMRRFASRQRHTEQAVRPMARPVRFQWDDHEWSGTPHPHERPNEQRTNPSTVHRDGNIASGETQTG

SEQ ID NO: 53724 - protein, 383 aa, unknown
  TnpB Polypeptide
VKLVVQVKLLPDAVQEAALWETLKLCNRAANYASRRAHESGIKAKVSLQRLVYGDLKAMGLSAQPAIHCARKVAGAYATLKANLAAGNYGRKGSKRRTRVENSPVRFRKDAAQPFDDRCLSWQMDARTVSIWTVQGRMRGVPFVGSFDQVKMLAEHRQGESDLVRRGGNWYLNATCEVPEADEYTPDGFLGVDLGIANIATTSDGRVHSGGRINSVRHRHRRLRRRLQRKGTKSAKRVLRRLSGRERRFAADTNHRISKRIVTEAQRTSRGIALEDLGGIRERVRLRKPQRVTLHSWSFAQLGSYIAYKAKRAGVPVEYVDPAYTSQGCSACGHTDKGNRPDQAAFRCMSCGFAEHADVNAARNISSRGVAGWAVSHAADDAA

SEQ ID NO: 53725 - protein, 413 aa, Thermogladius sp.
VRGGEPVVVEALKTRALPEGSYDHLLEFLRLYRDAVQLLVDRIWSINEKLSRRKLHRLFYSDLVRLGFRAHHAKEIYVYAKSIVESAKSNGGRKPVLRKLSARVDKYDYKLDPDDMALTLKLHSGNEVKLRLVTPRERLGRYMDWSNYELVVKYEGNGFWVSVYFRRSIKPLKPKTVMAVDLNFDNVTIALFALDGRLTGLKRFKTPHRKILTHRIWVERIQRRYPKSWRFIKGVRKAIERHGKKIKNISWDYSHKLGDLVAELALKYRSVIILENLDELRENNKKGKEFNKRLGLWFYRRIQFCVEYEARERSLEVVEIDPRGTSSKCPRCGGKLAEYGYRVLKCGKCGFIGDRDVTATLNIYMKYASKSKYSRCGVSGVAPNAPKPGENPSGMRGNQDDAVTSSHINSYES

SEQ ID NO: 53726 - protein, 427 aa, Escherichia sp.
MHQENTMLPRRISVSLFIDQSIIWPVKRLQAFKFQLRPGGQQEREMRRFAGACRFVFNRALALQNENHEAGNKYIPYGKMASWLVEWKNATETQWLKDSLSQPLQQSLKGLERAYKNFFQKRAAFPRFKKRGQNDAFRYPQGVKLDQENSRIFLPKLGWMRYRNSRQVTGVVKNVTVSQSCGKWYISIQTESEVSTPVHPSASMVGLDAGVAKLATLSDGTVFEPVNSFQKNQKTPARLQRQLSRRVKFSNNWQKQKRKIQRLHSCIANIRRDYLHKVTTTVSKNHAMIVIEDLKVSNMSKSAAGTVSQPGRNVRAKSGLNRSILDQGWYEMRRQLEYKQLWRGGQVLAVPPAYTSQRCACCGHTAKENRLSQSKFRCQVCGYTANADVNGARNILAAGHAVLACGEMVQSGRPLKQEPTEMIQATA

SEQ ID NO: 53727 - protein, 419 aa, unknown
  TnpB Polypeptide
MRRKKKETENHIPTITRSHKIRIYPNKHNQEVFQRYYDYQRSIWNRAIDERNAQYKIYKEMKATGLYTQKKLNKNYFPHTNNLRKKMKKFDWEDNFYCRVRDVQFDNLCQAWDNFFNPNMPNHKKPKYKKKKDVENHKTLALRNVRTKGKWLFLPKSQKAKPEYRFTKIKMAQELRFNGKITSDFFVSVKNNKWYVTITVETLLEEKLAISKQSTGIDVNVGSIDYLKKDSLSKEYGKFYLLPKSLLIQYDKIKFYSRAIAKKRNKNPYYKYSKSYYETITKLNNAYTKAYNIQEANLNNIVKYFFDNYNRIVIEDLDVNSMKMNKRLCKSLHRNAFGRFKQKMIDKAGEYNVAFVLADRYFPSTQTCSECGHVKTGDEKLFLWGDKYGNDHNTYVCYNCGTIQDRTANAILNLDHYGK

SEQ ID NO: 53728 - protein, 486 aa, Streptomyces sp.
VKKFTPRPGFTLRAHKLALDPNATASRRLHSHAGAARAAYNWAIAHVTASWWQRRAEQSYGIPEEQLTEWRSWSLPSLRKAFNEAKHTDPRFAGWWQENSKEAYNTGLAGASAAFDNYAKSKSGKRKGPKMGIPRFKQKRKARLTCKFTTGTIRIEPDGRHVTLPRIGTIRLHENCAGLRALIDAGHLRILSATACLHRGRWLVSLQVEQKHQLRKVSRPDAAVGIDLGIKTLAVLADSDGVLGEEPNPRHLEGTQKQLRHANRTVSRRQGPDRRTGQQASKRWEKANQARNKIHHRVANLREDTLHKMTTRLASEYGTVVVEDLNVAAMGKNRRLSRHVADAAFGEIRRQLTYKTRLHGTRLVVADRWFPSSKTCSRCGAVKAKLPLSVRVFECDNCGLVLDRDANAGHNLVTLAARTTGTGVAGDLDPALQAESKPRGADRKTRTTRPRRNAQAGRAGGTIPGPRAGKETGDRRQATRTQLALW

SEQ ID NO: 53729 - protein, 305 aa, Bacillus sp.
INAQVPKQASKDFDTARKNSFKKYKNGFHTSYKSKKDLIQGFYANYERLIIGKKVVHIQSIGEVKTSQQLPRNKKTSNPRVTFDGRHWWICLGFEESFEFQELTHESIGVDVGLKELFVASNGMKERNINKDAKVKKLLKRKKSAQRDMSRRFKNGVKIQSAGYEKAKAEHLRLSRKITNIRNNHIHQATATLVKTKPMRIVVEDLSISNLLKNKKLSKALSFQKLNFFFQCLSYKCEKYGIEYVKADKWFASSKICSCCGVKYDHSVQPEGQWSLKIREWRCVPCNSHHDRDVNASINLSRWVK

SEQ ID NO: 53730 - protein, 417 aa, Lactobacillus sp.
MAKTMSQLPYHYGVKIRVFPSTEQKRLIKRNSDASRFIYNQMNGMNNDLFWLKQVKIPITIVLDRIADLTERLKRPSTAISNSHGWLNHPDFDSLMKANAIKNYKTAWKLFHQVHQTGTPKFHKRSYTQTYQTSCLYSAKVTVPTMSNGSVRLNDTHHLQLPKLGRLRFKGFPSKLLSRADDVRVGTTTVSMDTVGHYFVSLQLGSAYPFVAKQRVTKSKIGIDLNLDNFLTDSNGQVIANPRYYRTIKGRLAKAQRKLSRRARRAKKSQRRLSGSKNYQKQRLLVAKLQLKVANQRKNFLHHVSTALIKNHDLVVAEELRSKNMLRNHALAMSISDVGWRTLLNMLAYKAELYGRKFLTINPRNTTQTCSDCGHVLTGKNKLTLADRKWTCPNCGVFHVRDHNAAKNILAKGLELL

SEQ ID NO: 53731 - protein, 420 aa, Aphanothece sp.
MLIREAKLLNGTKEQYLALDEAIRTAQFIRNKAVRYWMNNQDVSKATLYSLCKDLAKEFCFAKKLNSSARQASAERAWASISSFYTRCKKKEKKKGYPKFKKNTRSVEYKVSGWKLSDDCMNIAFTDGFEIGSLSLYCNFETREDLFRLKINRVRVVKRADGYYAQFCFDTERKEQGNYTGNAIGLDLGLKYFYKDQNDNAVVSPRYLSKSEKRLKKAQKRLSRKFNKDKKPQSNNYHRARKRLGKIHLKVQRQRKDWAIKQARCVVHSNDVIVYEDLKVLNMVKNHHLAKSISDASWYQFTTWLDYYGKIWDKAVVSVSPNYTSQDCSNCCHRVKKSLSTRTHSCPNCEIEICRDTNAAINILKKGMNVLGIQWNNSTFGQKETAEKSGTLEETFASTIDRKLEIVSDVDESRIRISSL

SEQ ID NO: 53732 - protein, 445 aa, unknown
  TnpB Polypeptide
MPDFLVSGKSGRSRKEMLVQHCVVTEYRSWQERVNAANGESAKYISQGWKRTVDASAPSYGGDYVNLGAVNKQYAAIENDPFADGEIVLKVVIQGSWYRLIFDFDNKRFTEGKVTLPVIKVENGEPVFIFTVVTDNPVVQFSGDYTIGVDVGVNNYATVVVRDTKTGRIVHETTLSQRVHSLWNSVRMSERQVRDLRKKAATLLRDRQERMSALDEAQLHREAASRKKRELAILAAQEIAYLSHVWGNAVVAVEDLGWVANTMQNGRWNRGELVRWVTHYVSQNGGWVVAVNPSHTSQLCYKCGEKVAHPTHELSVCVEHGVVDRDVNAAANIAARAVPRVAKARVTRAKNRKLQPQTALRTPVARNSLKYPGRDRTKNKPTPKRKNYRLVSKGVILPSCPARAQAPCLEARVLADRGACGALGTSRAALKQGNMAYKCRLCSLI

SEQ ID NO: 53733 - protein, 402 aa, unknown
  TnpB Polypeptide
VELTYRYRLYPTKTQQERIQKTCGCARFVYNHLLAQRTSTYRESLSWENNELKLDELIARNAFLKEIDASALDWAKKQLEGAYTKFFGMEKKEDRYRQESFMRSQRDPEYELLETDLAGYPRFKRKKSGTQSYSTSSERILIEQERDYALKRVVLPGIGKVKLKLHRPFPEGAKPLYYTVLKKASGTFFLLVHLQFPDVPRRENLRHPMGIVFDPSHLAVRSDEQKVRFRHEDPATRKKMQKAKRTLDRRVPGSKGYEEAYRRLAKIHEKRTNQRWDSQHKEARKITNDADSFFVETPAVRVRKPKWSVMPGMGRLIWDESWFKFSEMIRYKSVLDGKFYAQLPGTEIYRTCSMCLNSVPTIHKQDLWRCPICGGSMKSELNAARNLGVMGIKYLEMIRDVE

SEQ ID NO: 53734 - protein, 438 aa, unknown
  TnpB Polypeptide
MLSLKVKIKLDYNQQVIVETMSNEHRLLYNYLLQSIKESSKTFKELNQIYKNYRNDNCLTINSKSAQNTCISFINNIKSFYALHKKDKSVQFPYKFKSYKYFKSFMFDYNKGDGGFILKNNQLMINLFGNKKTRESKDLIIDLPKYVTNKINDNNIKTLTFTKEDNGDYYLVFIYGESNSNKIINKDFLSIDLGYSQLVTCYSNKIDNFSVENLKLKKLQKRIEYLQSYKDSKKKHSNSYNKINKSFKRVKKKQVNKLKDFQHKLSTKIISICKENQIGNLIVGDIQVKKVIFNKINDLKKQIKQAKLDNDVFKEACLTLALQTEYKKQKINGLSKSTTLGRFKTFLEYKSIKEGMEFHSINEAFTSQQNCITDEIMYSSNLSNRSVEVKPGVVIDRDLNSAINIAKKCKVTWLDHQMDFNLSKMYLNVHANELVKYE

SEQ ID NO: 53735 - protein, 438 aa, unknown; identical to SEQ ID NO: 53734
  TnpB Polypeptide

SEQ ID NO: 53736 - protein, 200 aa, unknown
  TnpB Polypeptide
VCFSCADVPIQPLPPTGQETGIDLGLEVFATLSDGTRIFHPGWYRKAERALKTAQRRVSHRKRGSNRRRKAVALLAKAHQRVRRQRQDVHHKTALALVRENDTIYNEDLQTANMLKNHHLAKSIQDAGWRAFLSILSAKAAGAGRRVIAVPPAYTSQRCSGCGIMVQKGLSVRWHACPDCVPGLRARTAEPACIGTRTRQ

SEQ ID NO: 53737 - protein, 300 aa, Meiothermus sp.
LKRGERFFLRVSTGKRGQYKWLPLSVPVHLASKLTHVYGDAKLFQRGKDWFVMLLLRIPHTSTVRDGDPVVIGVDLGVVRLMTAATPDGVKSWNGLPVRHRRERYVALRKRLQRHRRTDRVRAQSGKERRWMHDLNHKLSRELVDMARSYPNAVLAFERLDGIRDRVRGSKKFNRMMSSWAFRDLVDKVRYKAEAAGVGVAFVDPRKTSQTCHRCGHATRSNRANQAIFRCVACGFQTNADWNAATNIAAAGLRALRQGPTDTARSEQSEQASSSLTVPDGVKVCETQVLHTDSNLVSPT

SEQ ID NO: 53738 - protein, 394 aa, unknown
  TnpB Polypeptide
LQVVRAFRVELDPNNKQRTALLRHAGTARFAWNWGLARRIEEYERAGRSCSAIDQHRQLNALKKREFPWMYEVSKCAPQEALRNLDSAFRAFFRRVKAGEKPGFPRFKSRNRGVGGFRLTGSIAIGASSVSLPKLGTIRTKESGRLPVGRRGTASVTERAGRWFVSVVIEQELSAPVNVGHPVGVDLGINHLAVTSDGQVFANPRALARRLKKLRQLQRAHARKTKGGANRKKSQKKIARLHYRVSCVRRDALHKVTTELAKNHGMIAIEDLNVRGMVKNHCLARAISDVGFAEFRRQLEYKCGWYGSRLVVVGRFFPSSKTCSSCGCIKETLALSERVFRCEECGLEVDRDLNAAKNLLLAASSAESLNACGAGRQRPAVKQESNAACLAQAG

SEQ ID NO: 53739 - protein, 405 aa, unknown
  TnpB Polypeptide
MELIRAYKTELKLNNVQITNCTDHINAARFAWNWGLACRIEAYKEHGETLNAISLHRELNTLKKTDFAWMYSVSKCAPQEALRDLDKAYTNFFEHRARYPRFKKRKGNPGKKSFRLTGAIRVFEDYIQLPRLGKLRLKENGYIPLDAHILSATVSEKAGRWFVSIQVKEEVNIPINTGEVAGVDLGIKTMAYISDGTVFENPKALTRYERKLKRAQRKVSRRIKGSNNRIKAIKELQIIHKQINNIRTDAIHKATSYLAKTKSVIVLEDLNVSGMMKNHHLAKAIADVGLHEFRRQMEYKCQLYGSEPVFADRFFPSSKMCSQCGHIKTDLTLSQRMFICNECGFTLDRDYNASLNLRQVAASSTDTLKTPVGVDGSGLFNIRASETILDESGNKHYLGTGVLNG

SEQ ID NO: 53740 - protein, 430 aa, unknown
  TnpB Polypeptide
LLGFIYQKRDNLEKKMAQEVWRTEVMEVKPYPALSILCHQTKNLYNRAMFVLKQHYKKSKKWLTYQQLDRQLKMEECYRFLPAHTAQHTLKLLARNWKSFAKASREFQANPAAFLGKPRPPRYKPKNGQQVAIFTNQQARIDENQTLLFQKISFTIKTRLKKTVKLKEVRVIPRGIGYTVELVYSKLVPEVEVLGTNIGAIDLGVHNLITYVDNIQSRPIVVKDEGKGIKSIIRFYLKEVKKLQRKYAQQQKPNLKQQKMLEYGKRFHQLRETKRRKVKNWVHQMSSKFVKLWVQTGIQRVYIGYNPHWKQQVQLRKKTTQMFVTLPFDRFIHALKYKAEEQGIVVERIEEDYTSKCSFLDNEYPQQQPNYLGRRIKRGLFKSAKGFLINADVNGAYNILLKGDPQALPIRSVGGVVGYVVYPLRWSFEL

SEQ ID NO: 53741 - protein, 711 aa, Actinomadura sp.
VPVSVVRLPLVVPDEATRVRVERLFAAAWQVKRALRRDARARVDAYHAATSRRAALSAVPGKAAAEWRDELGLSRAGLERAAYRHLDASGHLKHHLSKAVAMHIADEVWAGVERHLFPDATGRRHGRPRRGSWWGFTRIPGRARSHTRPRKWETLRLHGTLDGHLTTYRNPALPAELSPVQAAALAGQPTPVLSSPGRAGRSRGRTGRRTAVRHEQVRGISVLAQPRRMPAPVPPAARGKALWWEHNGPLAIVYSGGPAGARGELVLPVRLPQGAGQWPHLLYALGDPECWHKVDLVRRATARGWVYEAHLMILKPAYIPPATRARRVAAPQGRRGGVDGNVSNLATVSFPASPDPAQARQLDVAPSVVSTRLTLSPAERGDLERAVRKARGRQRALERSRRAANAAQYELSKRQRKRQKRRAERGLPARQVPVPGGARRARADGVPLQSPRRDTLSRSHQRIRARHARAAAKATKARAGRARQVAGALVGVHGPHLVIEDCDIRTWQRRWGAACARFTPGLLIAALARECAATGGRLLRASTFTTALSQHCLCGHRTPKTLAERAHRCDGAGGCGLTGDRDLVAAALAAFITFTDPDDPHTARVDYRASRHAIGVHGLSTGPQGALTASTDTLDTPAPPGHPGTPATPARPPRRREWKNDQVASARRTRQRAVPTPDETRPADKRGGHAGQVQPPTRLSGGSTKDPPDRP

SEQ ID NO: 53742 - protein, 432 aa, unknown
  TnpB Polypeptide
LAPSSHCRRARSGRSSIPRGKTLPLRAGRDLEPVVRPRNQNSRMSRYRLAPTAAQETVLLRHCGDARFVWNLAVEQHSHWRPGLKSAPRYLEQCRQLTCARADNPWLSQGSQMVQQQSLRDFDQAVRNFFAGTHRKPTWRKARRDEGFRIVAVKPERIRKLNRNRAEVLVPKCGWVRFRLSRAVPDGVKSFRANRDTAGRWHVAFAAIPEPVPGPDTGEVIGIDRGVAVTLALSDGHTYRAPAPASVARLQRKLARAKRGSSRRLKVRQQLARAQARNADARKDWAEKSSTDIARRYDVIRIEDLKVRNMTRSAWGSAEAPGRGVQQKAGLNRSILASAWSLFATRLEDKAAGRVEKINPAYTSQTCSQCKVIDREARESQAVFRCRACGYCGNADVNAARNIAAGHAVTARGRSPLGGRLNREPQLGLLAS

SEQ ID NO: 53743 - protein, 396 aa, unknown
  TnpB Polypeptide
MSRYRLLPSPDQQLVLRDHCGHARFIWNLAVEQHQHWHPGRRGAPGYLEQCRQLTAARAEYPWLAAGSQMVQQQALRDFAQALKAFFDPQNPAGRPSWRKAGRDEGFRIVGRRGRQWDVRRLSRKTGEVWIPKVGWVRFRWSRPVPPGVKSYRVTMDRAGRWHVAFAAIPEPILAPLNGEVVGIDRGVAVSAALSTGELLHVPGLTARERTRIRRLERKLARAKRGSKRRKQVRLAIARLRARETDRRKDWAEKTSTAIARRFDVIRVEDLQIRNMTRSARGTRENPGRNVVTKAGLNREILASGWGLLVRRLKEKAPGRVEKIKPVFTSQRCSACGYVDGKSRESQARFACTACGFACNADVNAARNIAAGHVVTARGGLRDTGPVNREPQLLAS

SEQ ID NO: 53744 - protein, 392 aa, unknown
  TnpB Polypeptide
MRRAYVFRLRPTSRQHTALAGCVEAHRELYNAALQERRDAWSHSKSRIYYGDQSAQLSGIRSVRPDQAVWSFSSQQATLRRLNKAFDGFFRRVKRGEKAGYPRFKSKARFGSVEWPKDGDGARWLPKRRRVYLQGIGEVKVHLHRQVQGRVKTIQIKRQGRRWLLVLSCDDVPTNPLPATGRQAGIDVGIVSFATTSDGQHVDNPRWGRAAAGRLAAQQRLQRAKRRSKNRDRKRETMAARHRKIANQRKDFHHKQARDLVARYDLLVVEDLQIANMLRRAKPVADPDNPGQYVANGARAKSGLSRSISDAGWGRFISILCAKAEEAGRAWIEVDPRHTSDRCEKCGDAVPENRVTQVEFRCAACGHGPIQADEHAARNLLGAGLALHAQAA

SEQ ID NO: 53745 - protein, 315 aa, unknown
  TnpB Polypeptide
MSLGGVGQTHVPHLHLQSVRQIIGEFCEAVHATRQLWRNDHPEANYPWCKPTYRDVVYTNQAARVRNGKLVLPHGQAGTPHIPLSIALPGRLMEVRLQMGNVLLVCEIPDEPRPQQTVIGVDLGMNTLIAATDSKKAILISRCETRATVQWRNKCLAQIQQAQSTRVKDSRRWRRLQRHKARMLAKAHRRIRDITHKATCQVADAFPGATCHIGKPFNDAAQKMSHRQAQHVSEAFSSQTCPVCGERNTCQCIYRCKKCHFTMPRDAVGSTNILCIGKYGTLVSGCRVPNTMRFILVRILARARCLPGHGARCSG

SEQ ID NO: 53746 - protein, 290 aa, Okeania sp.
MKQIKTISCKLKVSPELAKEMNATMVEYANACQYVHLNSDKKLTNNVAVQALMYDTVREKFHLSAQTTIHAIRRVCSNRKTSRTNHIKKELTFAPTSVDYDSRTFSLDTRKWIVSLKLLTKRTKIELLIGNYQRGILKGSKPKSAILSRRKDGSYYINIHIDNIAPEPTNTDKVIGIDLGRTDIATTSEDESWSGKKITNKRNHYSQMRAVLEQKAAKGTRSSRRRCRQLQQRLSGKERRFQKHINHQITTYLVKKAATNKTAIAIEDLTNIRTRINQQRRSKKERRLSK

SEQ ID NO: 53747 - protein, 367 aa, Paenibacillus sp.
MFGNEVHRVLIYKAYKYRIYPNREQQHYFANVFGAVRFIYNKMLSDKIKHYQITATMLHTKPAGYKKDFPWLREIDSLALTNAQLHLDQAYKQFFQKNTMGFPRFKSKKTHTDRFTTNNQKGTIAIEDGMLKIPKLKSRIRIQIHRPFSGRVKSCTISKTPSGKYFASIRVETESTPLPLAAKKIGVDLGLKSFAVTSEGEVIANPKHLRKSEQRLKMLNKNVSRKKKGSHNRFKAKLRLAKLHEKIANQRKDFLHKTSTRMIHENQVIVMEDLRVKNMLQNHKLAKAISEVSWRLFRELLTYKAKWYDRQLIIAPPNYASSQLCSCCGYKNAEVKNLAVREWSCPECHTEHDRDRNAASNLLKLAM

SEQ ID NO: 53748 - protein, 485 aa, Anaerotruncus sp.
MSRYERTDSFILTLEADIPDRTFIEKYFRVMDQIYNGCLDVALKRLHKLQMDPEYQDLVRDKTIKDRSKKIRQKQLEYGYTEYQLHEKAAEMKHHFSDIVGIDECQKQATKAFRAAEKLRFHEADHVRHHSRYDDTSVEGKSRNSALNYRNGLMYIGRNHKYEVIMKPNDRYAMEAIRNNRLKYVRLLRKTVRGKTRYFVQLVLRGKPPKKHEYGSDTVVTGLDIGVSTVAEVSRRHVQLHELAPDIPAIDAEIRKISRSMDRSRRTTNPSNYNPNGTIRKGIKLQWTYSSRYDRLRKKRKELYRKRAVLMRMSHEMLANEILERSTTVICETMNYRALQKRSKDMTRNAKNGRINRKSRFGKALANHAPSMFERILDQKLHYIGKELIHTDTAKIRASQINHVTGEMIKKDLSVRSFEIDGNTVQRDLYSAFITGHTLYSSEDSMKPDTVDYESCANDFESFIFLQNKELERLTSEKKLSWYIS

SEQ ID NO: 53749 - protein, 446 aa, Anaerotruncus sp.
MDQKDLFSWCDTMCRKAKLLSNAATFRLRQHYTAYGKEDADLQSAQLDVEKEILRTIALTGMAAPGRQIGYAFLEKLMRVNQNPDFFGGLPMQAAQHVLKMRTGDFSSWTAACRAYKKNPALFTGKPKMPHYIKGDKATVCFTNQDCRLNYKDGTPYLKLPMTDAVVLLGRVPSQGRMKEVKVVPFYEKFRIFVTFEEPANTGLPQGTHAGAADLGIDNIAAFVSNDGSPSILYKGGYLKSRNQWCNKQMAVCRSALMEGHDPKEYRYPTTKMMQSLGRNRTLQMRDELHKISSEIIRQCRIRHIRYLVIGRNKFWKQKTDMSKQSSQNFVQIPLYSLIRMIRYKAERVGIVVIEQEESYTSKASFLDRDDIPVYGKNDAGVSFSGNRIKRGLYRSKNGTEINADLNGAANILRKAMPLAFAGITDFSFLQNIRVVKFEDFHDCMA

SEQ ID NO: 53750 - protein, 430 aa, unknown
  TnpB Polypeptide
MKNISYKKSHICSRTGKEKSMGKIVKTMKLRIDTDEAADRLFRELTERYASACNEISQYMFDHEFPMNFVELKNVMYHQLRDRYGLKSQMTLSSFKTVIARYKTVQTQLADRPFRYKDADGEWQSIDRTLEWLWRTIHFRRPQADLVRGRDYSFVKNGTKLSINTLKKRVKVSFHVSEVFQPYFDGSWSFGTGKLVSLKGRWYFHIPMTKTTPDTFDRTNPEQLVGIDRGLRFLAVTYDEQEKSHFINGKDLMKKRDTFANVRAELQSKGSRSAKRALKRISGRENRWMTDVNHQITKTLVTEYGPETLFVLEDLKGVSFEEENLSKRSKTQRRQTRSWAFYQLEQLFTYKAKEIGADVIKVSPAYTSQRCPKCGRIHKENRHREIHEYICDVCGYRSNDDRVGAMNLFELGLRYVSGDRYPSFKIEEHP

SEQ ID NO: 53751 - protein, 349 aa, unknown
  TnpB Polypeptide
MGDHVRDGEHMNCTKGYKFRMYPTSEQQTQIKKTLGATRYVYNLFLAYRQSLYELQQKSVSMYDTFKLLTLLKNAEPNRAWLKQIDSKALQLSLNNLDRSYRNFFAKRSKYPRFKSRHHHRQTYSTDINVSIIGDRIKLPKLGLVKFVRSRKLIAGRIIKATVTHTASDKYFVSIVVKGEECRLPNDGGEIGIDVGIKSFCTDIFGRVVDNPRPLKKLSKRLKTEQCRLSKKQRGSRNREKQRIKLARVHERIADIRLDFLHKLTTKLCRENQTIAVESLNIVGMLKNHKLAGAISDTSWGEFFRQLDYKSRRYGCTVLKVPTAYPSSQTCIFWLKHDHNTVGHTEINA

SEQ ID NO: 53752 - protein, 418 aa, unknown
  TnpB Polypeptide
MLLSKKTSIKVSQEYANVIGHMCYAASKLWNVCNYERQHYKEMGMEKYPDWYYQKKSHREDLWYKQLPSQTAQEVCKLLDKAWKSFYALKRSGGIENPRPPRFKQESIPITYMQMGIVHEWDTEKVRLSLPKALKRYMEETYQIHENFLYLENKIFRGMDQIKQLRIYPPEKGECKVIVVYEISEREELSQNGHYLSVDLGLHNLMTCYDSGNGNTFILGRRYLALERYFHKEIARVQAQWYGQQSVKEIKHPVTSKHIRRLYQKKQNSVTDYLHKITRYFAKYCREQGITCVVAGDIRNIRKGKDLGHRTNQKFHNLPYNRLYSMMEYKLKMYGIRFVRQEESYTSQCSPLSPEVEKRYAQPCNRKQRGLYRDRNRKYNADAVGAYNILRKYLSVSGEKKELSVTGLKTPEIIKVAV

SEQ ID NO: 53753 - protein, 417 aa, unknown
  TnpB Polypeptide
MSNKTKSKNNQELFYQVVLSYKVRHNHPLKTFLTECKDKLNISIDIIWNSIEWSKKSKAKLPKSNEFKRNLRNKLLENWSYASHYIDGIIKTAYSILESWVSNYKRGYRTKTKPKVERLFVRVKSTLIKYDKEKGEIRLTIKPRKDYLTLNIKDEWFFDKIKDLSIGEIILKENEAFLTFKDNLNYSDKDIIVGVDSNLKSLDLFHPIGGWTRVDLTELHRVKEVYDKKIDFLKKLLKKCPLRIMRKIERLFERRRNRVKDFLHKLTTQLSRLFHNAIFVFEDLNKRKMYKNKYHNRRIDRANWNSIIQKISYKTIVILVNPAYTSTTCPVCGSKMKSQEGQVVYCPECSNSFNRQLVGCLNIFKRSLKKIKEIMGGFGVTTTGAEVSFGKLMTSNPNVVYCVDYNGKYLIRVVKCR

SEQ ID NO: 53754 - protein, 390 aa, unknown
  TnpB Polypeptide
MNKAYRFRLLPTEQQAELLNKWEGHCRWLWNYFLDLEQKEYAANKKFIWRYDLINLIPELKKQHEWLKEAPSQSLQQIGTSMDIALKRLKSCNGFPKFKKKNTRNGQILIPNQIANKKDASIVADKSHIQLPKIGKIKWIQHRDIIGVIKSVSITRDVDRWFASILVELPEVEKLLVDPSTATSIGIDLGIKHFIVDSNGKKVDSPKFLQQKIARLKRYQRQVSRKQKGSNNRNKARLKLAKWHLDIANARKDWLHKLSNEIVNTNDIICVEDLKTKELMTRKSTKSLNRQISDQGWGMFLNMLRYKCEHRGKTFSQIGQYAPSSKTCSSCGYKMSVMSLKIRDWICPQCSATHDRDVNAALNILWWGLMATPNTAGTAGINACGDTTAH

SEQ ID NO: 53755 - protein, 218 aa, unknown
  TnpB Polypeptide
MEPSGKYFASLLYEGYSCENQAAEPDYSTATILGIDYAMQGMAVFSEKIEMEEAGFFRKNEKRLAREQRKLSRCVRGSHNYELQKKKVARCHEKIRNQRRDYLHKLSRKIADSFDAVAVEDIDMKAMGQCLHFGKSVQDNGYGMFREMLDYKLAWKGKKMVKVDRFFPSSKKCCKCGRIKKELKLSERVYHCECGNKMDRDRNAAINIREEARRMLTA

SEQ ID NO: 53756 - protein, 415 aa, Mycobacteroides sp.
MVVKRCVKYPLSPSPAQVEVLDRQAAAARALWNLIHAHHTFFESSHRWPSWADSDAAIRQARKDIDWLAVLPAQAAQQVLKAYRQAWSNYWNGTHGRPSWKTRRARRAVDVPQARDLNVTRLNGKWVSVAIPKVGAVKMRWHRDMPERVTGARAVREASGWMLVIRGENHMITPRARRADRGSVGIDRGVTHTLALSDGSFIDQGATLAPGERKRLYRLERHAARQRAAKPRGHKASRRLRRTYAQIGGLKARQARRRYDFAHQASSGLVNSGVARLMVEDLRVANMTRSARGTSEAPGVNVKQKSGLNRAILDQGWTQILTLLTYKADQAGARVIRVRPHGTSQTCHRCGSTVEGQRENQAVFRCADPVCGWTGNADTNAAIVIKQRGQEVALQDVEPNAIRQAVKRQNPKTAA

SEQ ID NO: 53757 - protein, 327 aa, unknown
  TnpB Polypeptide
MYGRKIELALPEMFGNSGRVLREAAALAAAKKINLTFRIDSQKLHVTIDPQDLPNHPERRSPVTAVAGRALGIDLNPEFVGLSVVSNTVDPSKLSETTLLDHQLVQVAKGGTLSAELVRETLAAICNRAIGMCRKWGANLIIFEKGLGKLRSGGRNRSLNRLLNFWTRSLLVNMMKRKAGLAGITVVEVWGGYSSTIGNLAFEAPDACASAAEIGRRGLALSARKKDVLPVFEEGWLSGRWKDQTLPVECGSWKELHQAIKTAKIGYRRPHPTPSDPDTVCGGYAVRRLKHRHRPGLVYLARDRVSDGAIKRLCVGRNFSHPTHQSG

SEQ ID NO: 53758 - protein, 463 aa, Blastococcus sp.
VWAAVLLLNRWRRQRGDRPLVGYQELCRELAAAGEGTFGELSTVGARSVLRAYSDAWMSAARRRRAGDETARFPRRRRGLVPVRFYAGTFTVDGGRVRLPVARGRPPLWVRLARPLPYPDGQVRSVRLTCAGRRLFLEVTAEVPVTVHPAGAGPDPARVAGVDLGIIHPYAALAPRGGEGGRDAALLVSGRALRAEHRLHLAEAKARTRAAARRAPAPGRRGSRRWKQFRRRTRALEGRHRRRLAQARHEAAKAVVSWAVAQRIGTLAVGDPRGVLGRDAGRRQNKAVRDWAVGDLLRALADKAEQSGIVVEMVDERGTSSTCPACAARVAKPRGRVFHCRRCRFTGHRDLVGAANIAARASASAGAASGGSVVTGSPPVTTHRRAGRHLPGAGRSRRDPRRGLISRPPGRPIPTDPVVRGGGSIWPAVARPGTGPGSGESLAGTRREDQAPPHRGEPCLTRH

SEQ ID NO: 53759 - protein, 503 aa, unknown
  TnpB Polypeptide
MRKGLGLSPPVGEVLGGMTQGGTIPRFVLTGGDLDPLRALREEIERRLSDNWRIVRLRLLPTEVEHESLMGIGLTCVKLYNEVNYEKRQAFFKGELTRDKMCEIDRKYYYKYNEVLGVNAQAVIQKNDEAWKSFFELLKLKNQGKLPPHIRKISPPGYWKDRFTGKKEIHIFIRSDRYHLEPVDENGGYLVLEDFGLRIRYAGRIRWEGKQGRLEIIYVNGKWYAYVPIEVGREPPKSNRKGYVKPNHRDRKGRIVNPRSIRQRDPIGDEKAFIDMGLNNLFAVVTTNGYVLLVKGGSIKSEYYWWKREIATYQAVRDLLMNAGLPAWVYYHERYLEALHTRDERLRHLYRTSIRFLAETLWSRGVRKLYIGYPIMLSQDSGNEYNTNIWWYRKIVLWIADVFREYGIEVEVVPEYYTSRECSVCGEVHDDGRVYRGLYICNKTGKKVNADVNAAINMARRQGYKVKITRKIESYIVTHNGVKPLNPHRRANTRDPEVRNPAL

SEQ ID NO: 53760 - protein, 365 aa, Thermus sp.
MRPCVSPKGYLEERRDAYRKAGRTVGFYEQKRWLPQIRAELPEYNRIHSQVLQDVVQRVDRAFQGFFRRVKAGQKAGYPRFKGKGRYDSFTFPQAGTTGVKLQGGGKRVLLHGIGSVKVKLHRPLQGTVKTATLKREGEHWYIVFVCEVEPRPLPPNDQAIGIDLGTNPNFLITSDGEMVEAPRYYQKAQEKLATAQRSCSRKRKGSYRYKQARKRVAKLHRKIANQRKDFHHKLARRLVNNYGTIVHEDLNILGLARSRTAKGVLDAGWAQFLAILAYKAEGHRVSGKVLAGRRVVGVDPRHTSQDCPVCGHREKRPLWVREFTCPACGASLHRDVAAAINILARARTEPAESVIPHEPRSPAF

SEQ ID NO: 53761 - protein, 282 aa, Streptomyces sp.
LGRATFGGKFTSRCTWLFSSLNSTSLHSKVPSTVTVIKDAAGRYFASFVVETGPETLPDVEPVVGIDLGLGHFAVLSYGTKIDAPRFLRRAEKKLKREQKRLSRKAKGSNNRTKARVKVARAHAQVADARRDFHHQLSTRIIRENQAIAVEDLAVKGLARTRLAKSVHDAGWSAFVAMLEYKAVKFGRSFHRIGRFEPTSQVCCVCGVKDGPKPLHVRIWECGACGSVLDRDINAAVNVAKAAGLAVSACRAQVRPVPVPAQRGEAGTHRNGQTTVVGIPAL

SEQ ID NO: 53762 - protein, 204 aa, Oscillatoriales sp.
VGLKEFYTDSDGHVEPNPKFYRKSEKQLKFRQRRVSRKKKGSANRKKAINRLGRVHLKISRQREEHAKKLARCVIQSNDLVAYENLRIKNLVKNHCLAKSINDAGWYQFRKWLEYFGVKFGRVTVAVNPAYTSQKCSNCGAIVKKSLSVRTHACECGFVMDRDWNAAINILKLALSTVGHTGTWVLNPNALGDSTSTLTLRNPV

SEQ ID NO: 53763 - protein, 536 aa, unknown
  TnpB Polypeptide
MSDKEYKKLLKQYHKLSDRHILVVETDMPYPDVLKVVALSDKIRKAGNELVSLMRKNYDQLMRTKKYRKLLKLYGNTEDKDKLKALANQLNDMQKSYNVTWDLCRTSMIPIGKKYSIDAVFALTKAEDIWRGMEKCLYDNGKITHFSKYGELPCIRAKQINRGIPMFVEDGKLRFKLRKMQFGIHVNDRFQSDEVNAVLSYLENPDKMDADAVNTLIEEACCIDTYRPCYATLVPRLIRGKYRVYLHLTIEGKAKPKYDRFGNPRHKYGKGMIGADIGTQTVAYTSDTEVGLKNLSERGNSIQTSERKERLYYRAMDRSRRATNPQNYNPDGTIKKGKKTWKYSNHYKKLKAKHAELCRINAVNRQLAINEDANYLRSLGDTFVTEPKNASKLMKRAKKTTVNSKGKFNKKKRFGKSIKNRCPSGFQTTVEKKFKVTGGAYIEVSNNYRASQYDHTADDYIKKKLSDRLYRLRDGTLVQRDWYSSFLLYCYDYRTQDIDKDKCITDFGRCYDKEKALIAWIKANHIKILNSGIKVA

SEQ ID NO: 53764 - protein, 441 aa, unknown
  TnpB Polypeptide
MKVKRTGRFKVKKSHPDYELIKIHTIEAKEIYNYANYIIRQIYFKNSENHEYSMEFIHEYPELNEDFEIYLKENNQFTSTFYRIICNFSSIKEHSLNSKMVQNVVDTLKRDWKSYWKLLKLKANGKYDKPVRIPKYKRKYSTVEYNSQTISKTKLKNGYVGTAGMKEGFKIPKFYKEYNCKSARVLWKNNELYMEIIYEKEITENNKNEKVASIDLGGKILMAVAYNFNRRGICISANMLRSFNHYYNKIIGIMSSLLPKGIKISNAIKNLWRKREEQIRNLLGYYSNRLIEEFKTLEITKLIIGKNKEQKQEIDLHSKLENRNFCMFPFNKLIEILRYKCEENGIECIEQEESYTSKASFLDNDFIPVYGEENREYEFSGWRNGRIYKIKGKNQKIHADYNGAFNIMRKAGTELIEKVNFLNNNWIFPVGKYKVKNLNYN

SEQ ID NO: 53765 - protein, 389 aa, Cupriavidus sp.
MLATAHTPTVTRVLRLRIKDKHAAWLRAQAREVNFVWNYANELSARVFERERRFIGAYELQRYTDGATKAGLGLHSHTVQEIGQEYCRRRKQFKKAKLRWRVSGGARRSLGWVPFKTGALKYGHGQVRFNGRWLSLWDSYGLSRYDLRAGNFSEDARGRWYLNVTVKVPVAARSEGRASVGIDLGLKDFAATSDGQVIEAKRFYRRYEAALGKAQRARKKKRVASLQAKIKNCRKDFLHKQSTALVRQYGAIFIGNVNASALAQTNMAKSVLDAGWSAFRTMLQYKCDSAGVWFEEVDERYSTQTCSCCEARTGPTGRPALGVREWTCSVCQASHERDVNAAKNILRWGVAGIAQTFSITAERAEMNKAPSPDDARAGRGPLVEGISVL

SEQ ID NO: 53766 - protein, 416 aa, Anabaena sp.
MQLVEQRIIKKSHQAWEQIDVMSFAAKNLWNAANYCIRQSFLYGHGVPSDNQMDKLMQPTQQYKALPAKVAQQVLRLLDKSWKGYFAAIALYKSDNTGFTGRPKIPGYKPKDGRCVLIFSEQSTSKKVFQDSGQIKLSNIDYCFDTHIEQSQYCQSRIVPKIDHYVLEIVYEVNEHELASQNTQNIAAIDLGIDNLMAMTSNVPGFQPVLVNGRPVKSINQFFNKKRATLQRRSQVITSQRIQHLTTKRNLKVKNYLHRASSYVIQLLKHLGVTKLVIGENPDWKRGVNIGGKNNQSFVSIPHGQLIDMLTYKGKEVGIEVIVREESYTSQSSFLDGDFIPEYGSKPKNWQPSGRRIFRGLYRTKAGRLCNADVNASYNILVKEFPHAFQTGNREVLVDPIRVNLSGFKAKSLTPF

SEQ ID NO: 53767 - protein, 411 aa, unknown
  TnpB Polypeptide
MITQQVEKHVIKKNHPYYSMFCEYTHLVKNLYNHANYLVRKEFTETGKWLRAYDLDPLLRRDRDYPDYRNMPVAQSAQQTLQLLDSNWKAFFRSIKDWSKNKDKYSGKPRLPKYKPKDGRMVFILTNQQLRQKDDLLCFPKSFKGFTMKLRCVRLDNFEKINQIRIIPHNQIFCVEIVYSIAINDTLLPDNGRYMSVDLGLDNLATVVTNTGLNPIIVNGKGLKSNNQYYNKQQAYYQSIAKSMNDKFYTNRLYRLTQKRNFKIEDSLHKISRFIVDSAISNNIHTIVIGNNKNWKQSISLGNRTNQAFVSIPHKKLIDKIIYKARNVGVDVILTEESYTSGTSFLDEELPQKEFYNKKRRIYRGLFISNQGIRINADINAAYQIMKKVFPNEFSDGIEGAVLHPVRVDII

SEQ ID NO: 53768 - protein, 396 aa, unknown
  TnpB Polypeptide
MSSDEGVLTRTVVLKVSPEGDINFSKWKTATNLVLKWLLKNKDKWSKNKNGESTISLNTVQQVWYKELREKFGFTSYQAIACIRQAIAKSWMNNPNKGREPRLRKDVIWLKIDDIKEVTKEYVKTSSYGKLIVEGYPKTFDEVNGWKRGEARLVKQGDEYYLHISYEKETKLPKPSSNAIAVDINVREVVYGDEKHERRDKTPVEDLMKKREYVSTLQKKYPSWRSLKRVLLRIRGVYKNIHNALVDWARKEAIRIVNYAKKLGKDTIILEDLNGLNKRQPGLKKSWRERFQYMAYYTLQSWISWEGFKHGIAVIKVPPRYTSTRCPYDGEEMVEVGHRTFRCKKCGFQADRDSIARLNLLRRGSSDAPHSHHSEGSVRPQSGGTYEPHLKRTIAL

SEQ ID NO: 53769 - protein, 283 aa, Caldilineaceae sp.
VAFGHGSAEAVQRRQAGPVCVVRGPVPERGQERHHPHEQGTGCLGCLQEGIEEGQASARRVGFPRYRKRGKHMAFTPTNGRNTIRVGGNRVRIPAIGWVRMTEPLCFAGDILSATVSLEADRWFIALQVDTGEPEPPRRPGPTVGIDMGIQVLATLWDGDERTKILNPRPLQEALAELRRIDQAISRSLKVPGKHRTSHRREALYARRRRQHARVSHLRNDHHHRTTTAIAKRGDTVKVESLHIAGMQRNRRLGRAFGDAGLGEFVRQLGVQVRLVRHRVPAH

SEQ ID NO: 53770 - protein, 515 aa, Clostridiaceae sp.
MCKGGQMHTIRFKLETTAYHEEALEKRFHALSHVHNVMVKHAKKLLKQLKFHKGYQEFRRQYSQLKEDKEMPTEEKQRRREQLSGAMKEIRKKMGLSDAGFQSYLKVCGKRFSKCLSSQQVQKEASRVWAGARKVLFSDGKDIHFKKYMDFDTIAGKTNTNGVQFDKDTLSITWLGLTVPCRQPRKPADAIYTAESLDHKISYCEIVRKMFPDGWHYYVTVYLDGDAPVKHKCSQDAARNCMGIDPGVSAMAGVSGTTAVLEELAPGCHEYARKIARLQVKMDHSRRLSNPEKYDQDGRVKKGCKGKWVYSNTYRKDRRRLKSLFRQKAAYTKQSHRELINRLLDDSLHFIVEDMSYKALQKRSKKTERQEKASDVTQKDGTTKKVYKYKRKKRFGKSLNSRSPALFLSFLEQKALLCGGSFVKVKTKSYKASQYDHTTDSYVKVPLSQRSKAIGGHDVQRDLYSAFLIRNSNETYDHPDRARCIRDFDGFLDMQSRLLADMKSRQMSMKQCFGF

SEQ ID NO: 53771 - protein, 409 aa, Streptomyces sp.
VIVMQLRYSFRVYPNTVQQAALARAFGCARVVFNDAVRAREDARKGGQPFPTAGQLSTRLITQAKRTPERAWLGEVSAVVLQQSLRDAETAYRNFFASLKGTRKGPKLGPPRFKSRKSRQSIRFTANARWSITVSGRLNLPKIGAVRMKWSRTLPATPTSVTVIKDAAGRFFASFVIDTDPAADQARMPETDRTIGIDLGLTHFAVLSDGTKIDSPRFLRRAEKKLKKTQRELSRKQKGSKNCAKARLKVARAHAEVADARREFHHQLSTRLISENQGIAVEDLSVVGLARTRLAKSVHDAGWAQFIGMLAYKAQRYGRTLVMIGRFEPTSQTCAACGVTDGPKPLNVREWTCTACGSVHDRDINAARNIKTAAGLAVTACGAPVRPGAIPAQREETGSPGFPTGSRAA

SEQ ID NO: 53772 - protein, 592 aa, unknown
  TnpB Polypeptide
MQNTTVCEWYTDKIKCINDRIWYPENIVENDDIKYPFNSEIINFKSFANNFPDKSQDLITNQKQKTYNEIKNQLTKRYYDMLIGLMTKTVADTYNYLQKTDNIKKFDDYEKLIQSTKEINSNKSLSREQKFKQTKSLIEKESGIVKGKISIPTDFISITNKYISKQNKSKDNMNKAIRLINVSIHSYKTKICVNDKQKTKLLQWFDTATKVYNKCVDLYNSKDPNFTSNYMTAKQYVFKKVFVNKKKETPYDILTYEVKCFFENLSSCYSNLSNNNINKFELKHKNTNKNQTITISKNGMRTTGIYPNLLGKIPDFSKHININKFDCDCKLTYDKLSGNFYVYIPQYIKNEKIESRKPICAIDPGEKVPFTYYSLNDYGFIGNDIRIKILARESKIRQLQRLLNKSITKNGNKMNKSKLKKKIGKEYQKIKGIVNELHKKSALYFCRNYDTILIPKFETQSMICDKQIAKNKIKQKYEEIKTENKDDKKVLCEKLKEYKRHRRLNGRVKFVLQQLSHYKFKQHLFAKAKEYGCLCVEVTEEFTSQLCTVCGDCSKSFIGRTKRCITCKSEINRDVNGSRNILLKNISGFLKS

SEQ ID NO: 53773 - protein, 658 aa, Rhodococcus sp.
LSRRERCTRHRRHRSRIPRAREVLPPASVKLPPSRENRNDRPAHACMSSCPQEVHRSTDSTIPRPVAPTVGVNGPCCECVHRSRDARSDDGAARSDGRRVRAEAHGATVRSRAVARRMRDRVRHRRRPRHRGDVARSSCPRIVDVVVRELQWGRSAGATASQCAHPRWGTGGRGDRGVRGARPRGRGRRCALDRGDAHRASSLPAFPGRRRCQTRDRTGRRRGCRRRAGFDNHAAAPPAADRRCRSARAAVATNRAAFVGRAAFHVDGAAAWSVDVCRDGARSTVRRLTTLSSAQARSFGCARVVFNDALRARQEAYAAGVKISDTDVQKQVVTEAKKTPQRAWLAEVASVVLVQACQDARRAYRNWFDSLSGKRKGRKIGAPRFRSRKDNRQTIRLTRNGFSIRDNRKLYIAKVGEVKVAWSRELPSEPSSVSIIKDAAGRYFASFVVETTDEPLPECDTEVGIDLGLAAFAVLSDGKVIESPRFFRRAERRLRRAQQSLSRKEKGSKNSAKARIRVAKAHAEVSDARRDWAHKHSTAIVRENQAVFVEDLCVKGVARTRLAKSVHDAGWGMFTRMLEEKAARYGRVFVKVDRWFPSSQLCSACGRVDGPKPLSVRVWTCQGCGVVHDRDVNAARNILAAGRAERRNACGETVSLPA

SEQ ID NO: 53774 - protein, 447 aa, Planomonospora sp.
VIDGAWEVFRVLTGRRYRLEFDAGQKLLAERIAAVCRSAWNTALEQRRAYRRRGAFIGYAEQCRQLAEAKKEFPWLAEAPAQVLQQTLKDLDQACRRHGTWKVRWKSKTRQAPSLRFPTPKHIPVEVINRRWARVFLPKLGWVRFRLSRPLGGAVRSATVSRDGEHWFISFLVEDGQRAPQVHARPDAVVGVDRGVVTAAVTSDGEFFDRRHATAFGVSSSEPPEESMAARADDRGYLSAGEAERYVRLQRRLARAEKGSARRARVVCALGAIMGRVRRRRADFTAQVAHRLTRDYAHIVLEDLKVRGMTASASGTAAAPGARVAQKSGLNRAILDKGWYGLEVALRSAARYTGSVVSAVPAAYTSRTCSVAACGRVDAKSRESQALFRCTACGYVEHADVNAAKCIKAREQAAGPVVSGRGDFGGARVGEASSARSTARGAPRAAA

SEQ ID NO: 53775 - protein, 368 aa, unknown
  TnpB Polypeptide
VRKINRAVKIRIYPNKEQITQIEKTIGCSRFLYNRMLADKIRYYQEEKKMLKNTPAGYKKEYPWLKEVDSLALANVQLNLEGAFRKFFREPGVGFPHYKSKKHSRKSYTTNMVNGNICLQDGFLKLPKMQPVKIKLHRIIPEGWKLKSVTMSREPSGKYFASLLFDCENQTVEKRQAEKFLGIDFAMHGMCVFSTGERAGYPMFYRNAEKKLAREQRKLSRCEKGSRNYQKQKKKVALYHEKIKNQRKDFQHKLSHSLAEDYDAVCVEDLNLKGIAGGLHFGKGIQDNGYGQFLSMLGYKLEERGKYLIKVDRYFASSKICSVCGHKKKELALSERIYLCECGNRMDRDVNAAVNILKEGKRIYKKCA

SEQ ID NO: 53776 - protein, 425 aa, unknown
  TnpB Polypeptide
LKRVEKHIIKSNHEWFEYCDTVTNNSRCLFNSAQFVQRQGFFYGHGTQSQSKLDKMFQQHEAYKAMPSKVSQLVLKQSADSWVAYFTALKAYAKDSSKFTGKPKPPGYALNRNLVKFNNQAVGKREFGKGLIVPSMSSIQLPVKPGRKFSDLCEVRIVPKTACFVIEVVYDFPSTLVSNISGLAAAIDIGLDNLATIVFSDGKTQPIIVNGKPLKSANQFYNKQIARFKGELPQQVYTSRRIENIIRNRNQFVESYLHQSSRLVVNQLLAAGVTEVAIGKNEQWKTKINLGKRTNQKFVQVPHARFIEMLTYKLEAVGIRVVVGEESYTSRASFLDWDNIPTYTPSSNEKHTFSGKRVTRSWYVSNDGYRIGADVNGAYNIGKKVIPTAFDALKSIVQRDRGCLVVHPRRLTPMFERVRATIGVA

SEQ ID NO: 53777 - protein, 559 aa, unknown
  TnpB Polypeptide
VQRGELVDEAGDVVDQVGVTGGGEAGAARHEVLEHHDVAVLDDGGVPDVGDPHRGACRDVAVEAGLGDAETDRVDEAALTLVEGCELHEHRRGPSGGIAVVGDAEAHAAGRPRVRVEHLDGAHRRVERRAHPRRGELLAAAGRHQRVVGRFGCSWCHRWCLGFAVMRRCRTFRFLLSPTVRQRAALESLLGLQCELYNAALEERRGAWRWEHRSVSYVEQCRTLTQLRASRPEVLAGGVRVCRGTLKRLDWAFAGFFRRCQAGERPGYPRFRPRSRWDSLQYEDRCGWRLDASSRRLRLQGVGHIKVRLHRPVRGTPKAITVRREGRRWWVSIRCVDVPAEPLAPTGHQVGIDLGVGVLVATSDGVLYANPRHGQRGAQRLARAQQDLASKQRGSQHRRRARERVAATHRYIRDCRTDDAHQLSRRLVNDYDLIVHEQLAIPNLVRRPAPRPDETGGYERNGATAKHGLNRCIHDAGWGQLLAMISYKAESAGRAVIAVDPRNTSRTCADCGHVSAGNRRGAVFKCQACGHEAHADTNAARNILRAGRAQQHHAAQGRN

SEQ ID NO: 53778 - protein, 367 aa, Pseudoalteromonas sp.
MKERAYKYRIYPTSEQVELLERTFGCVRFVYNSILKWRTDTFYNEQTKVNYSASSSKLTELKKEPELSWLNDVSCVPLQQSLRHQQTAFKNFFEGRAKYPTFKKKRSKQSAEFTKSAFKYRDGQLYIAKSKQPLNIRWSRELPSEPTTITISKDSAGRYFVSCLCRFKPKPLPISKNTVGIDLGLKDLVITSDGLKSGNPHHTKRYAKKLAKAQRILSKKMKGSANFHKARKKVARIQAKIADCRRDFTHKLTSQLIKENQLISCESLSVKNMIKNRKLAKAIADANWSELVRQLAYKADWYGRTLVQVDKWYPSSKRCNCCGHVVDSLPLHVRSWDCPSCESQLDRDLNAALNIKAVGQTVLACGA

SEQ ID NO: 53779 - protein, 544 aa, unknown
  TnpB Polypeptide
MAEKIIRSYKYRIYPTKSQTKKMELWLKLCALMYNFFINITEITYTKYGKQLSMYDLTSFIPRLRKGNETLKNVYSTLFYDVAKKVSNNYKKFFRKWQNKKKNNHPPKFKDVNKYCSFTYLNMQGVKIKNGYLWLSKIGDVKIVMHRPLPAEGKVISCTIKRYPTGKWFALFLCEMPAPEQRKGNSIVGIDLGLNFFAVFSDGTEIPNRRFFKNSQRKFAKAQRRMAKSKKGTFEYEKWRRIAAKIKVRSVNQRNDFFHKLSNEIIKKYDIIAVENLRIRQMMKNHKLANSIADASWKTFIHILKNKALSKGARVIQVDPANTSRTCSSCGTETDIKLGEQTFVCPNCGLILGRDHNAALNIKRLAAQSLGEIPESPKGNADIHILLLHQKSVSNKKTQKQGISKNSKKKIVNPSINKKSTEQLILYIIEKYEEKTALTRKMLRNLVYFCDINCFRQHGKTITESEYKKTEFGPLSLKVSSVISDLQKNKVIKENFYVCDGSLIKFYTASIPSDTSVFSSEQRRIIDQTIAEYSYLDKETVSYC

SEQ ID NO: 53780 - protein, 388 aa, unknown
  TnpB Polypeptide
MKDTRFNRSQTIAAYPLAVQEPGLTLIFGHCRKVFNLLLGINNYRWQLVAQGKASWKDFDELDDELTKIKSLPEYAYLYEAPAQTLQQEVKHLKRAISGAIKHTARAPNFKRKDAYRQSFTVTNQEGAIVYRGSKAYFKCPKLKKLCGNELIRLAEKPRFDCKIMSYTVIKEGDDWRVVIHFDFAADPRKCQHPDSVCGVDVGIKNPAVCSDGTVLELPDTSKEEAKIRYYQSKMDRSRHVNGRNRPVSKRFKKFQKKRRAIEKRITNKRKDAIHKFTHTVTNSHGTVVVETLDITRMMRSLPGRGARRACKRAMLGEILRQLKYKALHCVEAAWNYPSSQICSRCGHRHKMPLDQRTYVCPHCGLVIDRDLNAAINLANYISQPGQG

SEQ ID NO: 53781 - protein, 418 aa, Halorhabdus sp.
MVNLVTTRTITATLTNDRDGVVRDLDSLARSGSKIWNVARWTAGRIWDETGEIPDEGPLKSYMKNQPCWRDLNAQSSQAIVEELAGAFQSWFEQDDPDANPPGYRKHGDERPRSTITFKEDGFKLDTKHHQVRLSKGTNLKDGWSDFVLCEYDTGPDADLTAVEDVQQVRIVWTGDHWELHFVCKVAIDTADSSGEKTAGVDLGICNTAAVSVGDETLLYPGNALKEDAHYFRQEEYDTEGENGPSAHAEWARQKKSRRQNHFLHAVSKDIVEQCADRAVGTIAIGHPKDIREDEDWGRHGNKRLHDWAFETILSHIEYKAEERGIDVERVDEYELATSVTCCECGIKADSNRVERGLYVCENCELVANSDLNAAENMRATVTPSPAEDRSNGCLAQPSVRLFDKSTGRIAPQEQVCP

SEQ ID NO: 53782 - protein, 182 aa, Okeania sp.
MKTAIITKKADGYYVSFSLEDKSVPSLIPKNNIKTAVGIDLGLKEFLTTNTGETVSVPKFYRKSQSNLARKQKKVSRKEIGSNNWRAAQNRIARLHQHIARQREDSHLKTAHKLVKEYDLIAVEDLNIKGLAKNTKLSKSIYDVAWGAFIEKLNAVAVKRGFHVSRGEWPFARTPSQHITKL

SEQ ID NO: 53783 - protein, 372 aa, Clostridioides sp.
VIAVKKAYKFRMYPNKKQQELINKTFGCCRFVYNKYLAKRIDVYKNDKETFTYKQCSSDLTNLKKELKWLKEPDKFSLQNALKDLDNAYKKFFKEKAGFPKFKSKKINRFSYKTNFTNGNIMYCGQHIKLPKLGMVKIRDKQVPKGRILNATISKEPSGRYYVSLCCIDVDIEVFENTNNHIGLDLGIKEFCISSCGEFIENPKYLKKSLNKLAKLQRELSRKTIGSLNRNKARLKVARLQEHIANQRNDFLQKLSTKLIKENDIICIEDLQVKNMIRNRKLSRLISDVSWSEFIRQLEYKANWYGRQIVKVGKFFASSQICNKCGYKNEEVKNLNIREWICPSCNETHDRDINASINILKEGLRLITIQNK

SEQ ID NO: 53784 - protein, 244 aa, unknown
  TnpB Polypeptide
LKLPKIGQVKLKLHKPVPKEYKLKSVTISQTPSGKYYASILFEYENQVQQKEMQLFLGLDFSMHELYCDSNGNKPAYPRYYMMTEKKLAQEQRRLSKMQKDSNNRNKQRIKVARLHEKISNQRKDFLHKQSRQIANAYDCVCIEDLNMKAMSQSLNFGKSISDNGWGMFTTFLKYKLEEQGKKLIKVDKFFASSQICSVCGYKNTKTKDLALRDWDCPKCGAHHDRDMNAAINIRNEGIRLVIA

SEQ ID NO: 53785 - protein, 476 aa, unknown
  TnpB Polypeptide
MRRNNRDVRAYKVKHSLDVTHLLAMFRFLLQKAIDMIWENAEWKQEIVENSYIIRFSGKGYKKKLERTIKCLKIQGKKFVVYEDTKRKSCMIKVFYVATRLVPKFPNDKDFKRALRNRLLKFWRNKTAYASHYVDSAIRTAYWILQSWKENYLDGRFKKRKPKVKKLFARIKNSLFFWNGKMLRLTVVPREQYLVFDLSNAWFIERIRGWKLGEIILKENELILMFSKEKKEIPPQGIIAWDSNKYSLDGFGDIGCIKIDIKQLYTIHITYHNIRRKLQQLLRRAPKTARKLLKKYNKRERSRVEDFINKITTQISREFGEYVHCFEKLRKRGMFNWSKKHNRDISIINWRTIKQKLEYKVIELKEINPKYSTKTCSRCGSRNTTIKNGEVICRDCGLWIDRQLNASINLFLRAKKLKPSPKVWEKVVVPKLRMCPVGVGVNGVKPNDLPSMNPEGAEGDETQVPEQSFSIKINYN

SEQ ID NO: 53786 - protein, 336 aa, unknown
  TnpB Polypeptide
LAANLAVRACARVGANRLAAKQKGRPVKQFRPTSADYDARIFAFRERDWAVSLTTTDGREHIKLDVGNYQRGKLKGHKPTSAQLCKHRDGKYYIHIQLKDDAPTPIKSSNVIGVDFGRTDIAVTSNGDKWDGEQLTKTRDRYARVRASLQKKASTRTRSTRRRARRILVRLSGRERRFQAWLNHNISKYIILVALSSNALVAIEDLTGIRERTNQQPRSKTERRRSNSWSFYQLRLFLEYKGLQSGVEVVAVSPRYTSQTCHKCLHIHPEQDFSYRSGKRFKCGHCGWKGDADENGSQVIKLVGAAFVNPLGGSILSCNLLDHIRATQSPRLLAVR

SEQ ID NO: 53787 - protein, 387 aa, unknown
  TnpB Polypeptide
MIKSIKIRLKPNNKQVTKLFQNAGCARFAYNWAIVKQRENYEQGNKFLSDNELRKEFTQLKKQKAYQWLNNISNDITKQAIKDACTSYKRFFKSQSKYPHLKTKKLSRPSFYQDNVKIQFTSSHVKVEKISTSRKQNKQKLNWIKLCEKERVPTNCKYLNPRFTYDGLHWYVSVGIEIPDDVNHSLEDGIGIDLGIKELAVCSDGNVYRNINKTQKVKKLEKRKRRLQRSVSRRYEKNKKGVNYCKTSNIIKREKELLKVVKRLTNIRQNHLHQTTSDIVKRKPSFICMENLNVRGMMKNKHLSKAIQEQGFYEFKRQIEYNISVIIADRFFPSSKLCSSCGHVKHDLKLSDRTYRCDCGNTIDRDFQASLNLKAYGENVLKQQSIN

SEQ ID NO: 53788 - protein, 407 aa, unknown
  TnpB Polypeptide
MELRNYKYRLYPSRKQVGRLYSQFDLCCELYNTLLERCKKEYKSEGTSLSTKSKMCQIIKEVKDSDTKFKQAHSQVLQNCADRLSKAHSNFFRRVKEKQAGKRIEVGFPRFKKRVHSITYPQSGFKFLSDKRLHVSKVGNIPIVLHRAPKGKIKTLTIKRNRIGQWFAFFACETEVKRKHPHPENKIGIDVGLENFATLSNGDTIDNPRFLIKSEHRLKILQRRLSRKKKGSMNRRKAVYKVAKCHIKIADQRSDFLHQQSRVIANKYGFIGVETLNINGMLKNHCLAKPIADAGWGMFLNMLSYKAESAGGRVVNDKPFAPTSQTCPECGRRVPKDLSVRTHNCVCGYVVHRDVASANVILNDTVGLDEPEPNACGDPTTTGGHKDLPASRVAEAGTIFGKPQLHN

SEQ ID NO: 53789 - protein, 486 aa, Blautia sp.
MANSNRKKVRKLQDVKKAKAAEKTKTVKKVKAAEEKPIKYTVTAKQQADGTFEFCGGKGGFNIIKQKNKALEPYGKCIHNYGVLLELIPGDKQAAINQQIGNARVVHNDYLSKREEYYKETKKALTVSQYKKEYLPSLKEEKEYLKDTDKFVYENACRNVDDAYNRFFKGLSGFPKYASRTKPHGNSFTTNFTNNNIELKMIDGIPHVKLPKIGTVRFILPKGKILSDIQPHGVSIKAATVSKEPDGSYRIALRMESVIDKPVFPTFINAREIISVDLGLKEFGVFGNLEESIPVPNPRWIQVHAKRLRRFQQSLSRKQYDHKTHTGSKNWEKARAKVAKEQRKIADQRRDFHHKLSRAITDNYAAFICEDLAVKNMMKNHHLAKSIMSVGWSQFLTMVQYKMEHAGKYFMKINRWYPSSQTCGCCGYKNTDVKDLSVRKWKCTKCGAWHDRDVNAQQNIYKIGAKILQDEGIQIVGLHVTSKSTN

SEQ ID NO: 53790 - protein, 412 aa, unknown
  TnpB Polypeptide
MLRAYKYRIYPTDEQKVLFAKTFGCCRFVYNWALNLKIEAYRQEKRSVAYKEVQDRLVNELKKENQWLAEVNSQALLNSIRNLDIAYKNFFRDTHAVGFPRFKSRKNRQSFQCPQHCNVNFAEETITIPKAKDIPAVLHRGFKGTVKTVTVSMTPSGRYFASILVDTVIQEQKTSEPVHDTAIGIDLGIKSLAVCSDGRTFDNPKNLQRSLERLALLQKRMSRKRKGSANRNKARIRVARLQEHIANCRRDNLHKITHALTHDSQVRTICMEDLNVKGMQCNHHLAQVIGDASFGMFLTLLEYKCRWYGVNLIKIDRFAPSSKTCGKCGYVYKGLKLSERSWTCPECGTRHDRDFNAACNIKEFGLKALPSERGDVKPVDCPTVDDRSHVLKSRGRKKQEKRRDNSLRSLCL

SEQ ID NO: 53791 - protein, 415 aa, unknown
  TnpB Polypeptide
MAELASEVRDISAYAIYTVRNDEALGDELARVTASAPAEAGRQAGITMPEFLASGRTGRSRKEKLFQYNVVASFRSYQERVNAANGESSKYVSRGWKRTADASPPSYGGDYVNLGAVDRCYAAVENDPFTDGEIILKMVIQGSWYRLIFDFDNKRFTEGKVTLPLVKVQGGHPVFIFTVVTDNPVVQFSGDYTIGVDVGINNYVTVVVRDTKTGRIVHETTLSQRVHSLWNSVRASQRQVRDLKKKAATLLRYRQARMSALDEAQLHREAESRKKRELAILAAQEIADLSHMWGNAVVAVEDLGWIRNTMQHGRWNRGTFVQWLTHYVTQNGGWVVAVSPANTSQLCCKCESKVTHPTHKDSVCPEHGMMDRDVNAAANIAARSVPRVVKARATRAKTGRSGHNGRSERRPPEVH

SEQ ID NO: 53792 - protein, 280 aa, unknown
  TnpB Polypeptide
  misc_feature (4)..(37): Xaa can be any naturally occurring amino acid
  misc_feature (231)..(264): Xaa can be any naturally occurring amino acid
VRTXXXXXXXXXXXXXXXXXXXXXXXXXXXXXXXXXXFSGRIVSCTITKTNTDKYFLSVLVEEEIQELPKKNNAIGFDLGVKDYLITSDGEVVNNPKILKQYEKKLIKLQRQLSRKKIGSNRYKKHSKKIAKLHEKIRNIRTDFLQKLSTRIIQENQLIISEDLNVKGMVQNHRLAKAINDVSWSEFARMIEYKANWYGRTYHKINRFYASSQTCNVCGYKNVDIKDLNIXXXXXXXXXXXXXXXXXXXXXXXXXXXXXXXXXXERRETTIHLVRLSGLW

SEQ ID NO: 53793 - protein, 335 aa, unknown
  TnpB Polypeptide
  misc_feature (2)..(35): Xaa can be any naturally occurring amino acid
  misc_feature (217)..(250): Xaa can be any naturally occurring amino acid
LXXXXXXXXXXXXXXXXXXXXXXXXXXXXXXXXXXQVLQNVLKRLDTAYDRFFKRISGYPHFKSYRNYSSFTYPQVKTMKKPFSKEGFVLLPKIGYIKMNVHRKFNVNDVSNITIKYLNGNWYIYLTCEVIGLEKIEKPSSYDKQIGIDLGIKHFIALSDETFIEKPKHLYKSEARLKLLQRRLSRKIKGSNNREKARRKLAKLHEKIANQRKDFLXXXXXXXXXXXXXXXXXXXXXXXXXXXXXXXXXXPTAYIDRAGNNLHLFSAYRRLSRRSSLAGGSRPSISLASQRSSYIADFSIGGLYLIPVSFCIYKGQSISLTNLSHYTIVGTWAGS

SEQ ID NO: 53794 - protein, 339 aa, unknown
  TnpB Polypeptide
  misc_feature (43)..(76): Xaa can be any naturally occurring amino acid
  misc_feature (277)..(310): Xaa can be any naturally occurring amino acid
MHTRSLTCLTRPTTGSPWSTATNSPRNSAPWSPKCGNWSTLWXXXXXXXXXXXXXXXXXXXXXXXXXXXXXXXXXXILLATIVKTGSERYYMSILTKQPENKVVPLLQKEKLRCIGLDMGITHFLVRSDGQRIENPRYYQQNLQRLRRLQKDLARKQRGSANYRKQQIKIARFHESLVNRRNAFLHRESSKIVQENDIIVVEKLGIQDLLGDRRLSLQISDASWYRFLEMLAYKSQWYGKRMIQIDRYAPTTRTCCRCRSLTAKLPLQTREWHCPQXXXXXXXXXXXXXXXXXXXXXXXXXXXXXXXXXXLTACATLLFTITIEVILSSKNTLLRIVAL

SEQ ID NO: 53795 - protein, 287 aa, unknown
  TnpB Polypeptide
  misc_feature (26)..(59): Xaa can be any naturally occurring amino acid
  misc_feature (247)..(280): Xaa can be any naturally occurring amino acid
MGGKILHFGRSTRRGVNLVECTHVLXXXXXXXXXXXXXXXXXXXXXXXXXXXXXXXXXXVRFAKSREVHGRILNATVRRNPSGKYFVSILVETEVQPLEKTGSSIGIDVGLKTFATLSDGTPYENPKWFRKLEEKLANAQRILSRRTKGGSNWNKQRIKVARIHEEITNARTDYLQKISTEIIKNHDVIGIEDLQVSNMLKNHKLSKSISEVSWYQFRTMLEYKAKWYDKQVVAVSKTFASSQLCSXXXXXXXXXXXXXXXXXXXXXXXXXXXXXXXXXXVLLQDFG

SEQ ID NO: 53796 - protein, 278 aa, unknown
  TnpB Polypeptide
  misc_feature (8)..(41): Xaa can be any naturally occurring amino acid
  misc_feature (224)..(257): Xaa can be any naturally occurring amino acid
LPVTTSPXXXXXXXXXXXXXXXXXXXXXXXXXXXXXXXXXXIDVGLTSFAVDSDGTAIENPRFFEQSKEKIKKLQRSLSRKKRFSKNWMKVKAKLEKAYDHITNQKRDFLHKLSRQYVDNYATICVEDLNIKYLKEKGKSRGLRRSIHDASWGRFFSYLAYKAESAGTNFIQVDPRDTTQICSNCGSIVKKTLSVRVHECPYCGFVADRDYNAAVNIHRVGMEXXXXXXXXXXXXXXXXXXXXXXXXXXXXXXXXXXVGGQCRMVQSILRYSYPSDPL

SEQ ID NO: 53797 - protein, 194 aa, unknown
  TnpB Polypeptide
NNNAIGFDLGIADYLITSDGEVVNNPKILKQYEDKIIKLQRQLAHKKKGSNRYKKQSKKIAKVHERIRNIRTDFLQKLSTRIIQENQLIISEDLNVKGMVQNHKLAKAISDVSWSEFCRMIEYKANWYGRTYHKIDRYFASSQLCNVCGYKNTDTKDLNVRQWICPQCNTNHDRDVNAAVNILNQGLKELGLTA

SEQ ID NO: 53798 - protein, 419 aa, unknown
  TnpB Polypeptide
  misc_feature (47)..(80): Xaa can be any naturally occurring amino acid
  misc_feature (279)..(312): Xaa can be any naturally occurring amino acid
VKGRFRVKSRKSSGRRKSPGLMDSSMDPTALVAMMRSTPSILRAYTXXXXXXXXXXXXXXXXXXXXXXXXXXXXXXXXXXIVSLWCIGGRIKIPFVCHNRNYIPYIKGEADLVYKKGKFYLFQTVDIPEQDVEDIEEFIGCDFGLTTIIATSDGINHSAEWLNTYREHRQKVRSSIQAKADTSKRSTKRNCRKLSKRLSGKERTTATILNHTIAKSIVKSAKEQGKGIAIEDLTNIRFTSKRRNKKFRTKLGRWNFGQLRSFLEYKSLLNGVQLVVVEXXXXXXXXXXXXXXXXXXXXXXXXXXXXXXXXXXSKDELFVEALRQTMDGEGYAIASALADKFGELCQTPVEEREEALDQFAREAMYDDRLVIESYHTGQPRMGRGLFGDSNCRRLKIEFTPSARGTVIGIKTNNNLAEEQ

SEQ ID NO: 53799 - protein, 262 aa, unknown
  TnpB Polypeptide
MAKSRDVSGRILNCTITKTKTNKYFVSICCTDVVIEKYKPTNKAIGIDLGIKRFATTSNGEIIENPKHLAKLERRLVREHKKLSKKKKGSKNREKQRIRLARVYEKISNMRTDFLQKLSTRLIRENQIICLEDLDIARIIKGSYAAKSISDVSWGEFVRMLQYKAYWHGRTIQKVNRFYASSQTCSVCGYKNTEVSNLSIREWECPQCHTRHDRDLNAAINILNEGLKLITSTAGTVGIQARGDRGYEVYEAGNSNCEVGST

SEQ ID NO: 53800 - protein, 421 aa, unknown
  TnpB Polypeptide
VDKRYSQRKLTQAKRQTQTCKVYEVKIDKSHLSKSSQSHLSSLFREAKWFYNYCLSHDNINDADTTAQQVPVKVGCNYEDRQFTTLQAQMKQGIKTRLFGSLSSLTALKENGHKVGCLKFKSVVNSIPLKQYNKTYFIKKDKVRIQGLKSWLRVRGLQQIPPDSEIANAVLVRKNHDYYLNITTYTNQKRQVPEASVGIDFGCETQLTFSNGVKVQFQVPVSKRLKRLDRKIMKKRRLNSKNKEKNKAKRQKEYEYLTNKKKDIRHKLVSAITDNYKYVCFQDEGIHAWHSGRHGKKVQSTGIGGILADLKHKAVTPIMVDKFFPSTQLCPECGSKNKHELSERTYVCGCGYSEDRDVKSAICIEAEGMRRVPTDYRELKPGEISTSTFLTQLSKITGVKVASWSCGARKLQGKPCGKSRT

SEQ ID NO: 53801 - protein, 416 aa, Micromonospora sp.
MIPCAFVQLRYQFRVYPTPGQQIELARAFGCARVVFNDGLRARQEAREQGLPYVSDAELSKRVITQAKATPERAWLGEVSAVVLQQALADLNTAYRNFFASITGKRKGRKMAPPRFRSRKDNRQAIRFTKNSRFKVLDNGRLRLPKIGDVTVRWSRSLPSDPSSVTIIRDAAGRHFASFVVQTGDELLPELDSEVGIDLGLTHFAVLSDGTKVAAPKFLRRAARKLKRLQQDLSRKQRGSSNRKKAVVKVARAHVRVADTRRDWQHKLSTAIIRENQAVYVEDLCVAGLARTRLAKSVHDAGWASFTAMLEYKAARHGRTFGRVNRFFPSTRMCSQCGRINDKMALNVRAWDCPCGAAHDRDANAAINVLAAGQAESRNDRGAQVRPGLLPAPRGEAVTHPDAARSTRSMEGISAL

SEQ ID NO: 53802 - protein, 491 aa, Micromonospora sp.
MVCGRGPFHTFRFCLSPTAEQEVVLRRHAGAARFGYNQCLRLVKDALDRKRGGTVGKVPWSGFDLINAFNGWKRSGDAGRVMVAAGDGTVTVQVTGLAWRGEVCQQVFEEAAVDLGRGLSAYTASRTGHRRGRRVGFPRFKSKKRAPLSFRIRSRTSAAGRAGIRVGEHAPRTVTLPGIGALAVRQDTRRLRRMLAKGRAKVVSATVSHRAGRWAVSLTCEAADLHDARRHPPNTSSAGWVGVDRGLSTFVAAARADGTQVLRVDGWPRPARAAMARQRRLSRKVTRKQRGSHNRAKAAARLGRHHARVAAIRRRFLHQVCNQLVNTHDRLAIETLTITGMLSNRRLASAVADAAWGELARQLAYKQQWRGGQLALVDRWYPSTKTCSACRTVAPAMPLHQRTFTCQICGYQADRDHNAAVNLAIWAEQHHAQVRDLPAGGPVTNAGRGEGPGPRTRAGETGPDDAGTAPTPPRARRGRPRRALSHNSTEL

SEQ ID NO: 53803 - protein, 397 aa, unknown
  TnpB Polypeptide
VATHRKVYRFRMRPTRSQEQSLNRLAGARRWVWNWGLARWKETYAATGKSISLKQLSAELTALKEKPETAWLKEADSQSLQQVLNDLHRAFTNFFEKRARYPRFKSKKRDPARFRIPQRVKIADGKVYVPKVGQVRIRQSRPVEEKTKSATFRRSADGKWYVSLTVEFDMPDIPLPAADPAKVVGIDLGLKAFATITGREPIPSPQFFRKGQRKLRKAQRVLSRRKPGSKRRARAKVVVARVQRRIANQRGDFLHKLTTQLVNDNDGICIEDLSLKGLARTKLAKSFTDASMGEFRRQLTYKSEWNRKHLVVIDRFFPSSRLCRGCGAVNGELTLSDRHWVCRCGMVHDRDGSAAINIRDEGLRILAEGHSDKSNARGAGVRPPMEAVGVEPRIPRL

SEQ ID NO: 53804 - protein, 376 aa, Thermococcus sp.
VSGVITSYRFRIYPSKTQQETMLQHMELCRWLYNQLLKVKRENPTLKEYDTQRLIVKLKKENPELNNVYSKVLQMVNHQLWSNLKALNEFKRRGHKVGKLRYKTSPNSWKTLNYNQSGFKLDEERKRLHLSKIGEIPIKLHCGIRGKIKGVIIKRTKSGKWYAIFQVEEEPKPLPETGRIVGIDLGVKHFAVDSDGNAFENPLFLENSIEKIKRLQKQLSKKQKGSKNWEKARVKLAKAHEKLYNQRRDFFHKLALYYVRNYDVIVLKDLDAKNIVENGSSKGFRRRFLDSALKEFVRILSDKAGRAGRRVVFVEPAYTSRTCSRCGFVVGELELSDRVFTCPKCGLVLDRDLNASLNILKKGLDEGLGRPGLPVE

SEQ ID NO: 53805 - protein, 417 aa, unknown
  TnpB Polypeptide
MILSKYANVKYPKNILTKYPINEYTSIHSNTCWFNNTHHLSSKLQVPKLIDTDKKVTKCRKIEVTFTPNQRNIMQQWFKLYKSVYNIAIHQANKNGLYNFIKLRALVKPMYKTLYEGEIKNCQIPIHTLDNAIRDVCKAYVSARGNLCAGNITHFNLRPKRKCNNKETIVIEGSSFSKVKNGFAIRVLDTVKTSESILGYKRDTRLTFDKRNNKYYMFIVIDTLKQIKLHCDTECALDPGLRTFQTSYDKKNYLDLGVNTMDQIKPILIKIDKVTKFKGKKWHKRYTRRLRLKISNMVDDLHWQTANFLTKRYNEITIGKLSTSIVSKKGNMSPMNKRLYYALSHFTFRQRLKHKCNERNVKYKEQCESYTTKKCGKCGKLNEVGIAKIFNCIYCKFSCGRDLNGARNIMIRKDLRL

SEQ ID NO: 53806 - protein, 384 aa, Bacillus sp.
  misc_feature (303)..(380): Xaa can be any naturally occurring amino acid
MILAKKVRLIPTPEQEKVFRNHAGAARFAYNYCKRMSDRYYKLFGKSVSQLALQKRFTKIKKRKRYEWLKDINAQVPKQASKDFDKARKHSFEKYKNGYHTSYKSKKDLIQGFYANYERLIIREKVVHIQSIGEVKTSQQLPRNKKTSNPRVTFDGRHWWISVGFKESFEAQELTDESIGVDVGLKELFVASNGTKERNINKDAKVKKLLKRKKSAQRDMSRRFKKGVKIQSVGYEKAKTEHLRLSRKITNIRNNHIHQATAKLVKTKPMRIVVEDLPISNLLKNKKLSKAFSFQKLNFFFQXXXXXXXXXXXXXXXXXXXXXXXXXXXXXXXXXXXXXXXXXXXXXXXXXXXXXXXXXXXXXXXXXXXXXXXXXXXXXXTIEI

SEQ ID NO: 53807 - protein, 248 aa, Halobacterium sp.
  misc_feature (23)..(30): Xaa can be any naturally occurring amino acid
  misc_feature (222)..(225): Xaa can be any naturally occurring amino acid
VGDYWCDTPLSPWRFLPPRPNKXXXXXXXXGVDLGVENIAVTSTGVFWSADELNHWRQEYVQRRKSLQECGSRWAHENVQAVGRKETGRFEQYLHRVANELVDEAAENGCTVIAFENLTDIRHRMPDARRFHEWAFRRLYDYVSYKTEVRGIQVEQVNPKNTSRRCSSCGFTHGDNRPAQDTFCCQSCGYENHADYNAAKNIGYRLLRNQTGGEGGAPVGVXXXXEHRDGERERGQTPAEFGQSGSPR

SEQ ID NO: 53808 - protein, 524 aa, unknown
  TnpB Polypeptide
MTVSLNISEQQADSASMMSTVISEPIVSQQLSCIAGCHPTNKKMTCLDKLNLCNQENQVLKSLETSVVVSTSNEKGLKPFWNEQCRVNALSLWLPTETDLQDLALTSSNKSLNEQVGKSWFSTEVYFLLNKNSQKTLCPSSMYSVQDCTDLEVTKTRLNRLYPSKEQVVVFRQWIDTSRFVYNQTVSKLKEETGLTPNWMAYWKDVIAPELPEWCDSVPFQIKKIAVRDAINALKEGKKRVKKRMIPRFELSFRSRKNPQQSCFIPSSAISKNGLYLRISGKGLNFKEPLPESLMDSRLVIRNGKFFLALPRKEKTSVAENQGRKVISIDPGVRTFHTFYSGESVGHIGHYDFSRIQRLAFFADDITSRASKVGKQKKKRMYRARARVFEKFRNLIDELHHKVALFYVKNFDVIFLPSFETSQMVGKSGRKIRSKTVRSMLTFSHHKFAMFLKHKAFEYGKIVVPMTEEYTSKTHPLTGELRNIGGAKRLKVGSEWVNRDIVGAFNIMLKALGDFPEIVKLSRS

SEQ ID NO: 53809 - protein, 393 aa, Dechloromonas sp.
MKLVQTQIIKNNHKDYVELDRLCFLSKNLYNATLYCVRQQFFKEKTYLNYATINAEFTHTNQADYRALPAKVSKQTQKLVEQDFLSFFALLKLKAKNKYDKPIRIPKYADKIKGRKPLLYTKDALSFKKKGFIYLSKTNIFIPTNFSREQIKFVRIVPQNQQIKIEIGYEKLEKESIKSNNYAAIDLGINNLATVSSNKIKPLIINGKPLKSINQFANKQVAKYKSLLPKGKYASKRIQNIFNKRENKIKDYFHKASAYIVNQLVSNNISTLIVGRNKGWKQDTNMSKKNNQNFVNIPFYKFQQILKYKCQLNGIKYNEIVESYTSKASFLDNDVIPNFDKNNNQQYSFSGKRIKRGLYKTKNNKTINADLNGSLNILKKYLIEKVAWKSSVE

SEQ ID NO: 53810 - protein, 384 aa, unknown
  TnpB Polypeptide
MLINKNYKFRLYPNYKEKELINKTFGCTRLVYNYYLDKKIKEYEVNKHNLSCYDFIKDLKNLYINYPFLKEVDSIALRCSLFNLDNAYQKFFKEKSGYPKFKSKFTKNSFRTNMVTREYKGNKYYNIRLDLVNKTITLPKLKNMKIKGYRNLDKINGRIINATVSRELNDTYYVSVLVEEEVINPKFIPTTIIGLDLGIKDLVITSNYQKYKNEKVIKKYEKRIKRKQKRLAKKIRGSHNYYKLKCEIGRIYKKIRNTRKYLIHHITKDITDKNDIIVCESLKIKNMVKNHHLAKAIEDASFSEIIKKLEYKTKWKGKKLYKIDTFYPSSQICSHCGYKNPLLKNLHIREYNCPNCDCELDRDYNASVNIMFEGLKRYMNEILV

SEQ ID NO: 53811 - protein, 543 aa, Thermus sp.
MKSPGRAILPHRRPSVVSEATSRGSSRKRKKEKAFTGVHALLVFPSGEDQKSTLDLMRRFSAAVCYAYNRLLEGWSREALKRENGPLRIFFGLNTRYADDAILKAQALLGSARERGEDPRKVVFGGRKLFETLKRGHLSGKPLKELKREWREKRQGTLYSRGDRSKGGNLNLRLEAENGALWLRVNLGNGRYAWALVKTSHPNLSALVERVHASLPYNVELSLKEGKVYATFTWEEEPAPFVATKENGVLVLDVNSDPYHLALALVSPDGNLRRHLTLSLEEVDRAPNKGAKEFLLWKIAHQVVSLAEEHGVAIATERLKYLRKSRRGDGSGRAFRRKQHRFAYASLLRKVHFLARKKGVQVVEVNPQDTSTIGMLKYAPQLSLSKDVAAAYVIGRRALGFKEKLPKGYGRLLRDERFRDHVQGFYASRVQELRAKRKAESNPYLRRRLSREIGKAKRHLSLLSSLQGSPGSQEGSTEGRNPIGVNPWRVLRVGLFLSLLGKAVPRDLSPLKTVLHRGAWEGWKGGLGPHPGGGPECTNVRST

SEQ ID NO: 53812 - protein, 660 aa, Streptomyces sp.
VSRRLPLGEGETARTACARGLLRSAVVERTGEVLSAAMLAERVGWAADLVSRMAAGLLAEHWNAAGVEALAAGVDVEGRGLPSQAWMALRRLGWTAVPPEGVRVNDRVVRMAQEQAGRLLRSAAWRADVTGGVIATWPADPVRRTPEEWDAVREAVPDGKHLPSGVIRSRTRQIAAFAGKHGRMPADVFELEAAPQAARMLLLSACDSQQATIVRTDDPGRALLRLQLPTRPDPRSYADWAWVACPITLPPTVPPGAVLHLPTLRIHAGRVHADLAHSHAVPTARRTGHTTALGVDWGLNTLLSAGAVRLHDNGTITALGGGAQFRAAGVLAKQHRLRRESEYLHAKTDHYQCLINDADGHRLSGRHAVLAEEIRHVSARRSNLNDALAWSAARWTVDQAIAAGASVIYVEDLRSMEACGMGRTLNTRLSQQVRGQIVDRMRHLAAETGIAVVTVPARGTSRHCPRCLVPLRHRKAPDRPTTPGWKWATCPNSDCGWQGDRDTGAWQRIAARGLTHQTKTVVDRASGTMAIRSVVDTLEATAVVEPTTPPARRDRSKTGPTRRRTPRPAPRRRRAPSPTGPCGPAGKRPEGHAPQGRTRLPRAAHRHQGVTTISTSTPTTRRHRPRGAALGAGFHLHAHATPPQWAEPTPNPTVRTGSLS

SEQ ID NO: 53813 - protein, 392 aa, Kitasatospora sp.
MLSGRKYRLELDQAQAELCETFGNICRDVWNTALEQRREYRRRGAWMNYVPQAAELVDAKKDFPWLKDAPSHVLQQTLRDLDRACREHGIFKVRWRSRTRWSPSFRFPAGNLITVERIGRKWGRAKLPKLGWVRFRWSRPLGGEVRSATVTRQRQHWFVSFLVETGTTTPEQHAMPNTAVGVDRGVKVAVTTSDGDFRDRAYATPGEAARLRRLQQRLARSRRGSNRRKAVLAKINVITGRVRNRRVEFCAHTASELATRNAVVVLEDLRIRSMTASAVGTAEQPGRNVRAKAGLNRAILNKGWHMLELALRNAARTTGTSVVLVNPAYTSQTCNACKHVDSKSRNSQADFRCTACGHQEHADVNAAKNILNAAGHAVSGRGDLGFGRSVKR

SEQ ID NO: 53814 - protein, 509 aa, Paraburkholderia sp.
MKRKLYARIAAHGGKAKSHKTTFCREHGISARLFNAMAIELQGLIDGTRELLGDERRSLEKGIRRQAAQLSARRQQIAQIDADRLRMKPGREAKLHRTAHQNVMSLVRLESKLRKIEARLAANVPGICFGTRKLFGQQHHLELAGFDSREALLREWQAGRSYRVFFVGSKDETAGNQLRRLHGAADGTYTLKIRVPDRLISPGGDRYLLVGNVTFGYDREALDAALEANVTLSWRLHRDERGWRAFVSFNHEPAERTKLDAAHGAVGIDFNADHLAVTETDPLGNLLRTRRFPLLREDAGTGQRNAVLSDALTAAVVWAKGARKPVVAEDLDFTAKKKAMAQLSPKGARMLSGLLYAKYRQLLESKCLRAGVELIRIGPAYTSTIGAVKYASRRGWSVHAAAAGVIARRGQKLTERLPSAGTAVRVPVRGGHHSLELPARKGRESRVAAWRGVHAAYSGVMREQWLATRSGSPRRSAKGTFGRGGNAAPLSRDNRLPCKDNLHEQICAR

SEQ ID NO: 53815 - protein, 383 aa, unknown
  TnpB Polypeptide
MDNDAYEKLRHTQALFRQACNLLVEIVCEDSDRKQRLWQRYNLHHVGYHRVREAVPQLGAQLTCNAVRVVSAAYKSLLTNNPKYVKDKKLALPKIVFKNVGIHLDARTLSFSKDRTSATVFTTQKRVNVRLCPGAFQQEILSGGQWRECELVYKRKRDSSQGQWQLHIVVTRDIELPDLQNLEKEEILGVDLGENNVAATSDGRLFKAGKLKNDRDKYLSQRTRLQRNGSRNAKRQLKRISGRERRHVEHVNHTVSKSIVQEAVENNKRLIVLEDLTHIRERIKAGRRVRARLHRWPFRQLQQMIVDKATRVGIRVLLVDPRYTSKTCSECGAIGKRAKHRFECYCGYRAHSDLNAGRNLQGLGYLLMAQGPDVNRPNAASLL

SEQ ID NO: 53816 - protein, 407 aa, Spirosoma sp.
MKLTAQIRLLPTPQQATALRLTLERGNEACNLVSAYAFEQKVFRSQEIQKVLYYRLKEEFGLSAQFVIRCLAKVADSYKTLKAQIRNHNATCEPDKKRSLTQISYRPTGAIAFDSRILSYRTDRKTVSIWTVEGRKTITYAVGQHHEKLLHYQQGESDLAFIKGKWYLLATCDIPDEEGESTAPADRPGGEIVDALGVDLGIVTLATDSDGQTFSGANVEATRQWYAKRRGVLQSVGTKSAKRRLKHLSKKQSKFQKDTNHCISKFLVSKAKASNRAIVLEDLTGISKNVRKDEKRLRQWQRAKHANWAFYQLRRFIGYKATLSGVAVLLIDPRNTSRTCSQCGHCEKANRKSQSEFVCRSCGHSANADYNASQNIKNSGLGQIAYGVESGTRSLTTQAQAPGFSRG

SEQ ID NO: 53817 - protein, 361 aa, Spirosoma sp.
VKVRYTFRCYPTDTQAQELSRVFGHTRFTWNWALRLRTDAWANGERINYNQSSAALTALKKTPEHQWLNEVSCVPLQQSLRNLQTAFGNFFAGRAKYPRFKSKRDRQSAEYTTSAFKYTNSVLSLAKIGKLKVRWSRSFTSQPTTVTISKTGAGRYYVSLVLDETPQTFAKTGESIGVDLGINRLATLSNGERIANLRFTRKYETKLAKAQKSLSRKTKGSGRWNRQRIKVAKVHEKLSNARVDHLNKVTTDIVRRFDVIAVEDLNVRGLVRNRKLAKHISDASFGRFVSMLDYKCVWRGKALVKIDRFFPSSKRCWCCGYVAQAMPLTVRNWQCPDCKREHDRDENAAKNIWNFAVGLTV

SEQ ID NO: 53818 - protein, 148 aa, Spirosoma sp.
MAQRAGKKRRVTAIHAKIRNKRKDWNHKTTTRLVREYDRIVVGNVSSSKLRKTRLAKSVSDAGWADLKQMLRYKAISLGIEYREVKENFSTVTCSDCFAKSGPSGLSGLGVRDWVCTCCGSVHDRDVNAARNILRIGHGTPIKGILPL

SEQ ID NO: 53819 - protein, 255 aa, Spirosoma sp.
MKLTAQIRLLPTPEQATALRLTLERGNEACNELSRYAFENKVFASAKLQPRYYKWIRSKFGLSAQFALHCIRKVADSYKLDKKIQRTYRPTGAIAFDSRILSYRTDRKTVSIWTVEGRKTITYTVGQHHEKLLHYQQGESDLAFIKGKWYLLATCDVPDEEGGEIVDALGVDLGIVTLATDSDGQTFSGANVEATRQWYAKRRATLQSVGTKSAKCRLKNSPGNNVGFSPTRIIAFPSPLYRRLRHLTGLSFWKT

SEQ ID NO: 53820 - protein, 376 aa, Spirosoma sp.
VKITAKIHLRPTPEQAAALLGTLLEANAACNALAQYAFEHKVFKQYDLHKAQYYNLKETFRLSSQLIIRCLSKVADSYKLDKENQRTFRATGGIAYDARILSINPAKSIASIWTVDGRLKIPYTTNAHNQRLLAFQKGESDLVLVKGKYFLLLTCDIPDENTDEFDDVLGVDLGIVSIATDSDGQTFSGAKVEAARQWYAKRRGVLQSVGTKSAKRSLKKLSGKQKRFQRDTNHVISKSLVVKAKATSRAISMENLKGISKQVRKEAKRLRQPQRAKHSNWSFDQLKQFVGYKCQLYGVVLTTIDPRNTSRTCHVCGHCAKANRRSQAEFVCRSCFHSDSADVNAAKNIKLLGRQSTGLWSRSFTFQGQAPRFSRG

SEQ ID NO: 53821 - protein, 380 aa, Spirosoma sp.
LSNDSGQNIPLQTQPYPVSQRALGRWLGACRYIYNLSLSYKKTLWEHNKVSIGKNDIQKELASIAKDTDWLGCVHSQTLQDVTDRVFNAYDGFFKQGKGFPKFARKGQYQSFSFKQGVKLTSQYVQLPKFGKVKYRNSQTLSGTIKRATVRECADGWYMCLCVETDIEPLPISPNSIGIDVGIKSLLVTSDGATIENPRHLYKAERKLKRLQRGVSRKKKGSANRRKAIKKLARQHQKVANTRKDFQHKLTTRLIGENQSISVESLQISNMLANHHLAKSIADAGWYGLTQMLDYKAKWYGRSFEKVSACHTSQDCSCCGYRNTELTLAVREWICPSCDSVHDRDVNAAKNIKAKAAGSAVSAWEVYAPVEVVAQESPAL

SEQ ID NO: 53822 - protein, 382 aa, Spirosoma sp.
MPKAYRYRLYPNAAQADLLNRHFGSVRYLYNWALAKKTQAYQTENKALSRYDIQRELPNLKGEQQWLKEINSQALQSALLNLDSAYTRFFREKKGFPRFKSKKDSRHSFQCPQNVKVDFSTSTIQLPKIGKVKAVLSREFVGTIKTVTVSKSATGKVFASVLVETTDVLPAKSAPNQALAVGIDVGLKDFATLSTGEAIANPRFLKKSLKKLRRLSRQHSKKQKGSSNRNKSRVRLARQHERVSNQRTDFLHKVSTRIVRENQTVCVESLNISGLLKNTKLSRAIADVSWGSFVSMLEYKCEWQGKNLVKIGRFEPSSKLCTCGTLNHALTLKDRVWTCSACGTTHNRDLLAANNIVRFAFQKQNLIGVDSPESALVETAVR

SEQ ID NO: 53823 - protein, 392 aa, Spirosoma sp.
MLKAYHYRLYPNATQTELLNKHFGSVRYVYNWALGIKTNAYQLESKTVSRFELDKQLTRLKTELTWLGEINAQALQASLRHLDSAYTRFFREKKGFPRFKSKKDNRHSFQCPQNCKVDFAAGTLQLPKIGRINVVFSREFTGTIKTVTVAKSATGKVFASVLVETDDVVLVKSAPNPTTAVGIDVGLKYFATLSTGEVIANPRFLKKSLKKLRRLSRQHSKKQKGSSNRNKSKIRLARQHERVTNQRNDFLHKTSTAITKRYGTVCVENLNISGMMKNSRLSRAIADVSWGSFVSMLEYKCDWQGKNLVRIGRFEPSSKLCTCGTINHSLTLKDRVWTCSRCGVTHDRDILAANNIVRFAFQKQNLIGMDSAESTLGERNGSLSLSQESPSL

SEQ ID NO: 53824 - protein, 382 aa, Spirosoma sp.
MLRAYRYCILPDDQQKSQLAQMFGCTRFVYNLGLETKISAYKQYGKTLNYFELNKQLTDLKAGTQWLSDCPSQALQMALRNLDNAYTAFFKGAGFPKFKSKRGKQSFQLPQGVKVDLENGKVFLPKLKWVDCVFSRAFTGNIKTVTVSRVPSGKHYISFLIDTQQSKPIRQPISRDTAVGIDLGVKTFATLSDGQVLANHKFLGKSLNRLRVEQRTLARRFKKGRSGDPAKEQSKNWHKQKLVVAKLHETITNQRRDFLHKASTQIIKEYDTVCLETLNTSGMMQNRKLSRAIGEMGWAEFNQMLDYKADWYGKNILRIGRFAPSSRICSICGWHNKALTLSDRVWTCANGHTVERDQNAALNILDFGLRTQPLLGNVRQVA

SEQ ID NO: 53825 - protein, 283 aa, Spirosoma sp.
VKITAKIHLRPTPEQAAALLGTLLEANAACNALAQYAFEHKVFKQYDLHKAQYYNLKETFRLSSQLIIRCLSKVADSYKLDKENQRTFRATGGIAYDARILSINPAKSIASIWTVDGRLKIPYTTNAHNQRLLAFQKGESDLVLVKGKYFLLLTCDIPDENTDEFDDVLGVDLGIVSIATDSDGQTFSGAKVEAARQWYAKRRGVLQSVGTKSAKRSLKKLSGKQKRFQRDTNHVISKSLVVKAKATSRAISMENLKGISKQVRKEAKRLRQPQRAKHSNWSF

SEQ ID NO: 53826 - protein, 383 aa, unknown
  TnpB Polypeptide
MSSQIRSFKFRIYPSKVQEKQMGQHLWMAKNLWNELLAHCKQTHNDFGYFPTKNTLQLMVKNTGLFSQTQQEVSHRVLNSVMKVFKLRKQGKKCGFPRFKSIDRMKSLHYPQAGFYLDKKLKVTPFGEIAIKKHREIEGRIKTLTLKRESSERWFATFCVEQDKPIPKQNTGNKVGIDLGLIDFAVISDETIIKNPRHLKKYEEKLAQYQRLLSRKEKRSKNMYEAKLKVARLHEKVSNTRADFLHKTSTQLVNDYSLIALEELASRGMSNKDFGLGRSINDAGWNMFTNMIAYKAEEAGCKVVFVDPKNTTQECSSCHEIVKKDLTERMHNCPFCGISINRDLNAARNILKRATVGTTESNASGDGTTVSSMKEDATQFIGW

SEQ ID NO: 53827 - protein, 453 aa, unknown
  TnpB Polypeptide
MLVFESKLRGEKAQYAALDEALRTGLFVRNKALRYWMDGWGKTRHDLNKYCRQLASEFSWAKKLNSMARQAMAERAWSAISRFFDNCKKKVPRKKGFPKFRRHQTRLSVEYKTSGWQLSECRRYITFTDGFKAGTFKLWGTRDLHFYQLSRTRGANSFRPLEMSAQIKRVRVVRRADGYYCQFCLDVDRVERREPTGKTIGLDVGLNHFYSDSDGEKVENPRYLRKSEKALKREQRRLSRKQKGSKNRVKARNRWGRKHLKVQRQRRDFAVKLARSVALSNDVIAFEDLKVRNLVKNHNLAQSITDASWSMFRQWLEYFGKVFGVVTVAVPPQNTSQKCSGCQQVVKKSLSTRIHRCSCGTVLCRDTNAAINILKIGLRTQGHWGTHACGHDHLCTQNGNGLEVSGVVEAGNLSSDVRNPRPQNLHEASSFMKVLGRGGCQLDKYTLFPNSLK

SEQ ID NO: 53828 - protein, 370 aa, unknown
  TnpB Polypeptide
MKLTLKIKLLPSETQSRLLLDTIKDANAACNRISDMVWKDKVFTQFNIHHHCYNEIRKDFNLSAQMVVRCISKVADAYKLDKKSKRNFRELGCISYDSRILSYSENAVSIWTIGKRQRIPFVCHNTNYLPYIKGEADLVPKKGKFFLFQTVEVPEEDVEDIEEFIGLDFGITDIVSTSEGKTYSSDTLNRYRERQRMIRGSIQSKGTRGRTRQCKRGCARLLKRLKGRERTTATIINHTISKRIVAEAKQRGVGIAIEDLKHIRRTSKRRNKTFRTKLNSWNFSQLREFLAYKCRLSGVKLIVVQPEYTSQTCHKCHHIGIRSNKSFKCNHCGCDMDADINAAKNIALLGAVVNQPEKSGMLSCALHTSA

SEQ ID NO: 53829 - protein, 418 aa, unknown
  TnpB Polypeptide
MQVAKSIMVKVSKKINRDKFLSLRNFFNTYQTIARLYYSYILENSLEEKLISEEITAKDLKNILHQKLYCQIKEIFDIGSQTIQEIRDVVVETINSYAQLIRKGEKASLPKVEEFTIRLNYPRVVSVFEHNKEFDFFFKVKLNRDKRVAIPIECGETQKQLLKYALNGKYKIGAFQLIRKDDWFYFVIPIKKEIELKQSYDGVAGVDLGLRYNAVITLLYKNGKITKVEFLKYRKLMHKIRMLWHCIDKLKSMLPEGQRTSKRIQKLWKRIRRINDWIAHNVSKRIVEIAKENNSIIAMENLKRLYPVKGKNSRRNNRRISNWIKGKVVKYTIYKARWEGIRVKLVSAKNTSKTCHLCGSQGLRTNATFFCDHCKHTYNADFNASVNIGIRATHPNARGCVNHPLGFMTYKAPCDSWE

SEQ ID NO: 53830 - protein, 414 aa, unknown
  TnpB Polypeptide
VLFTYQYKINPNPEQMATLSHWGELLRRHWNYALGQRLDYLRSTRSSIDRCSLISEPIGDISSKVNYYSQAADLKETKRLFPEYKDIYADCQQQNLMRLDKAWKRWLIPDKNGKRGGKPRFKKQGDICSFTFPRVNSAKAGAHLNSSTLKLSKIGEIPVVLHRPIPDGFEIKQATIVSKADGWYVSFALEDKTISTPLPIDEIKSVVGIDVGLEKFLTTSDAKAIAVPQFYRKAQAVLARQQRKLARLQKGANNYQKQANKVARLHLHIARQRKDFHYSVAHYLCTNYDLIGFEKLNIKGLARTRLAKSVLDVAWRSFLNILQAVAVRRGKHTQEVDAKGTSIECFNCEERVVKDLSVRVHDCPSCKISLDRDLNASLNILKRTVGQPFAACGGFVSRQPVRQELSFVNLRSSR

SEQ ID NO: 53831 - protein, 382 aa, Escherichia sp.
MRRFAGACRFVFNRALARQNENHEAGNKYIPYGKMASWLVEWKNATETQWLKDSPSQPLQQSLKDLERAYKNFFRKRAAFPRFKKRGQNDAFRYPQGVKLDQENSRIFLPKLGWMRYRNSRQVTGVVKNVTVSQSCGKWYISIQTESEVSTPVHPSASIVGLDAGVAKLATLSDGTVFEPVNSFQKNQKKLARLQRQLSRRVKFSNNWQKQKRKIQCLHSRIANIRRDYLHKVTTIISKNHAMIVIEDLKVSNMSKSAAGTVSQPGRNVRAKSGLNRSILDQGWYEMRRQLEYKQLWRGGQVLAVPPAYTSQRCACCGHTAKENRLTQSKFVCRACGYTANADVNGARNILAAGHAVLACGEMVQSGRPLKQEPTEMIQATA

SEQ ID NO: 53832 - protein, 427 aa, Escherichia sp.
MHQENTMLPRRISVSLFIDQSIIWPVKRLQAFKFQLRPGGQQEREMRRFAGACRFVFNRALALQNENHEAGNKYIPYGKMASWLVEWKNATETQWLKDSPSQPLQQSLKGLERAYKNFFQKRAAFPRFKKRGQNDAFRYPQGVKLDQENSRIFLPKLGWMRYRNSRQVTGVVKNVTVSQSCGKWYISIQTESEVSTPVHPSASMIGLDAGVAKLATLSDGTVFEPVNSFQKNQKTLARLQRQLSRKVKFSNNWQKQKRKIQRLHSCIANIRRDYLHKVTTTVSKNHAMIVIEDLKVSNMSKSAAGTVSQPGRNVRAKSGLNRSILDQGWYEIRRQLAYKQLWRGGQVLAVPPAYTSQRCVCCGHTAKENRLSQSKFRCQVCGYTANADVNGARNILAAGHAVLACGEMVQSGRSLKQEPTEMIQATA

SEQ ID NO: 53833 - protein, 380 aa, unknown
  TnpB Polypeptide
MIKAFKYRIYPSRSQEVLLSKTFGCIRVIWNTNVESFNSYDKENNPKPKVITKSDLIADKPWLNDVSAAAIQQKIRDFQETSKQFFSKTRKKKIHRPSFKKKSRNQSYRLPNQKFSIKENKIRLEKIGWVKMSVDRIIPDDSKILSCTVSKNCCNQYFVSISIDVAICHKPKTGKSVGVDLGLKSFATLSDNTIIDNIKFFREKQSEIAKAQRYLSRKRKGSNRYRKNRLRIARLHNRIANRRNYFLHNITTFLVDNYDVICIEDLNVSGMLSNHKLSKAISDTSFSMFRSMLEYKCDWYGKKLIVIDRFFPSSKTCSRCGWKKEDLTLSDRVFECKNCGTQIDRDLNAAINIQRVGVDILSNRTQSSEVTSCDEASRIL

SEQ ID NO: 53834 - protein, 397 aa, unknown
  TnpB Polypeptide
MKRTLKFSLNLANTGKKKAIESLYKEYKKAVNFYINILSFNNKYVLSQEEIKSFNSCLSYRYKQCAGRQAIKIWKSWRRNKKKGKLPEFDGALILDSRFIEIEKSKTTTFDHWVRISTLNKGKRVLIPFKSYNYANDYFKEWKLVNGGRIKRENDNWFLLLTFEKETPPKKKEGKIIGVDIGIKKLMTTSEKKFYGMRIETLMNKIQKKQQGSKAFKRALKERDYYINRVAKQLPYEDIKVIVMENIKNIKRNTKKERKLRKEFRSKLQRWTYPKLLSRISQLCEVNGVHFCTIDPAYTSQTCSKCGFVHRLNRRGEVFSCRNCGYTEDADYVASENILEAYLAQEHMVPGRTKANLMDTCSLSSQPLINNNLFTTPPRYILSKNLKGAFKNDILDI

SEQ ID NO: 53835 - protein, 426 aa, Methanosarcina sp.
MLSITNNLHLNNKQYEALRTLSRASKNLYNLGLYNTRQYYFQNNSFLKYPQNYHLCKDDANYKMMQAATAQQSLKYVERSMRSWFGLLKMYKNGQLDKPSIPHYLDKEGYFMIAFPKNAFSIKNGKVRLGISNEFKKEYSKDLLTFKIPSFLNKSYIQEIHIIPMYDGKYFKIKYCYEEKKQTVDIDYSKYLSIDLGVSNFATFVDTNGTATIIDGKYVKSLNQWYNKENARLQSIKDKQGIKQITNRQIKLLSKRTTKITEFMNRTVDYLIKHCLKNKIGNILIGELTGIKQGINHGRRNNQNFVQIPFGKFKGKLESKCNFYGIKYTLVDESYTSQVDSLALDPIEKPEYGRTRRVKRGLYKSSTGQLINADINGALNILRKVVGDSVVKPITDRGLVNRPTRLRLAYELNCQPEGKASLTALA

SEQ ID NO: 53836 - protein, 311 aa, Methanosarcina sp.
MESTKTIQLKIIDVDNDLVETMQKYSEGMNYVSEVVFQNGKVIPARKLQGIVYGYLREKLGLKSQVSCNIPRQVAGSYKTLSDQIKCKKSEWQKLVYTPSSMTLSYKRDYTITEDSVSITTFSSGRKTYKIQNYDYALQYFKEPWKFAASKVVKHYNGDYYFHLTVSQEIEEPAIEKASTFMGVDVGINYLAVASTTDKKCKFFAGGEIKNKRNIYSKMRARLQSKGTLSAKRVLKRLAGKEQRFMKDVNHCISKAIVKFAVHEKVSVIGLEDLTDIRENTNGKLRKKQRYLHNSWAFRQLQSFVDYKAKQ

SEQ ID NO: 53837 - protein, 371 aa, Methanosarcina sp.
MLKAYKYRIYPDNDQKELIKVHFGACRFVYNWALEQKIKTYQQSNKSISRFDLQKILVHEIKPSNEWLKKANSQALLASLVNVESAFTKFFREKTGFPKFKSKKNPVQSYQMPQHYTVNFDRNIIKLPKIGEVNAVLHRRFEGEMKTATISKSSTGKYFISILVDDGKETPEKQEISESNTIGIDVGIKDFAILSNGEKVENPKYLKNSLKRMKCLQKRVSKKVKGSNNRNKARQRLSKIHEKISNQRNNFQHQISSKLISENQAIALETLNVKGMVKNHCLAQSISDASWSSFVTKLEYKAEWLGKTILRIGKFEPSSKICNVCGYHNSELTLKDREWVCPDCKTKHDRDINAAINIKKFSLQDQNLIVI

SEQ ID NO: 53838 - protein, 415 aa, Methanosarcina sp.
MHLTAKVKIYPTDEQLKVLWELSDKCCSLYNLALAERKDAWKLERKNIKYVDQQNKLPDLKKRNPEYKAVYSKTLQGVLKKLDADHRSFFALRKNGDLNARPPNFKNRKYFQTIPYNQSGFYQSGSVISFSHKINDTKLVFYIGKKFENIKQIEIYNDDPFHAKGDFYISVTYEVATPEYIDNGCYQTIDAGITKIVTCINLKGKFHEIKSPRPDKYWQPKMDKIKSRKDHCKKKSRKWVKLHGNYRIMERKKSNQLRDFQHKLSKKMVNNTKANTIIVGNLKVKNMAQSKKLKGKRKRAMNRSIQNQGYLSRFIEFLAYKAELIGKKVIKIDESYTSKTCYVCGKIHDMPLWKRNMECDCGNYIDRDRNSAINIMTNFLSQNALWTGYQKFSDNLRQTGLPTSIRFFEPYPQMT

SEQ ID NO: 53839 - protein, 423 aa, Methanosarcina sp.
MKNKLRHSIKTNLRKEGRKPNPFRVGMNAVNFLTTTFVILPVTYMRVKRNIMLMLNAYKYRLKPTKKQETLINKHIGSCRFVYNWALEQKIKTYGQTGKCINHMGLDKLLPALKTEKPFLKETNSQSLQGMTKHVDAAFVRFFREKNGFPRFKSKKNPVQSFPVPQHYSVDFEKGIVKLPKIGEVEVIFHRTFEGTLRTATISKTCTGKYFISILVDNGQELPNKQKYSELTTVGIDVGIKDFAVLSTGEKIENPKYLKNSLKRLKCLQKRVSRKVKDSKRREKTRQLLSKIHEKISNQRNNFQHQISSKLISENQAIALETLNVKGMVKNHHLAQSISDSAWSSFVTKLEYKAEWFGKTVLRIGQFEPSSKLCNVCGYHNSELTLKDREWVCPICKTPHDRDINAAINIKKFSLLDQNLITT

SEQ ID NO: 53840 - protein, 298 aa, Methanosarcina sp.
MLKAYKYRLKSTKIQKTLIEKHIGGCRFVYNWALEQKIKTSEQTGKSINHMGLDKLLPALKTEKPFLKETNSQSLQGMTKHVDAAFVRFFREKNGFPRFKPKKNPIQSFPVPQHYSVDFKKGIVKLPKMGEIEVLFHRTFEGTLRTATVSRSCTGKYYISILVEDGKELPTKQKYSESTTVGIDVGIKDFAVLSTGEKIENPKYLKNSLKRLKCLQKRVSRKVKDSKRREKTRQLLSKIHEKISNQRNNFQHKLSSKLIRENQAITLETLNVKGMVKNNHLAQVISDSAWHSFVTKLE

SEQ ID NO: 53841 - protein, 415 aa, Methanosarcina sp.
MHLTKKIKINPTEEQVDVLWQLSEQCRCLYNFALAERKEAWKTEQRSVKYVEQQNQLPTLKEKFPEYNIVYSKVLQSVLKKLDASYKSFFSLWKNGDKSARPPKFRSGKYFITLVYNQSGFKIKDGKLSFSHKVNEIPLSFEVGNAFDLLAIKQIEIYNDDPYKGRGKFFVSITYEETPITEYVDNDLYQAIDLGITKIVTALNTQGKFFEVKTPRTDKYWNSKIDLIKSRRDHCKEGSKRWNRLHKTYRKIEAKKSNQIKDFQHKLSKTMIENTKANTIIVGDLSVKEMAQSKKLKGKRKRSQNRSTQNQGYLSRFIEFLAYKAEFIGKRVIKIDESYTSKECYVCGKRHEMPLYERTMKCDCGNVIDRDRNSAINIMKRFLSQNALWTGYQKFSDNLRQTGLLMDTCILQISK

SEQ ID NO: 53842 - protein, 387 aa, Methanosarcina sp.
MESTKTIQLKIIDVDNDLVETMQKYSEGMNYVSEVVFQNGKVIPARKLQRIVYGYLREKLGLKSQVSCNIPRQVAGSYKTLSDQIKCKKSEWQKLVYTPSSMTLSYKRDYTITEDSVSITTFSSGRKTYKIQNYDYALQYFKEPWKFAASKVVKHYNGDYYFHLTVSQEIEEPAIEKASTFMGVDVGINYLAVASTTDKKCKFFAGGEIKNKRNIYSKMRARLQSKGTLSAKRVLKRLAGKEQRFMKDVNHCISKAIVKFAVQEKVSVIGLEDLTDIRENTNGKLRKKQRYLHNSWAFRQLQSFVDYKAKQVGILVEYVNPEYTSQTCNRCNHISKNNRKGLRFHCETCGFELNADLNSARNIEHRTRDSRYILESQGCLSTIHTDT

SEQ ID NO: 53843 - protein, 335 aa, Methanosarcina sp.
VKLIIPSRAVRVDREEKILLIPCLKLLLNYHFSSNFKKISQIEIDSIYAYVAVVFPDEKPESTGHYIGVDRNTRGHIAVAADPESGKVWKFGKMRYHTHKKYENIKKRLCKGGKHKQLKAVKKREKSIVKNLNHKISRKIVDIALYNECGIKLENLKGIRKLDSKAEGGGKGRKNRNDDKKKTQPERKSKEMSRKIALKKVKKHVWSNEYSLNSWSFHQLQQFIEYKARLQGVEVVYIDPHATSKKCSRCGHKGHRHSKQFECPHCGHVDHADVNAAFNIALTPKGNGQFSAERDAGKGSPDTPQKVLARTFFRKRTAGKKTSPHFAWEVCQFLT

SEQ ID NO: 53844 - protein, 208 aa, Methanosarcina sp.
MGLDKLLPTKQKYSESTTVGIDVGIKDFAVLSTGEKIENPKYLKNSLKRLKYLQKRVSRKVKGSKRREKTRQLLSKIHEKISNQRNNFQHQISSKLIRENQAIALETLNVKGMVKNHHLAQSISDSAWSSFVTKLEYKAEWFGKTILRIGQFEPSSKLCNVCGYHNSELTLKDREWVCPICKTPHDRDINAAINTKKFSLLDQNLITT

SEQ ID NO: 53845 - protein, 159 aa, Methanosarcina sp.
MKVLQKRVSRKVKGSKNRNKARQHLSKIHETISNQRNNFQHQLSFRLISENQAIALETLNVKGMVKNHCLAQSISDASFSGFVTKLEYKAEWLGKTILRIGRFEPSSKLCNVCGHHNSNLTLDVREWTCPDCKTKHDRDVNAAINIKKFSLQDQNLIVI

SEQ ID NO: 53846 - protein, 288 aa, Methanosarcina sp.
MTLSYKRDYTITEDSVSITTFSSGRKNYKIQNYDYAKQYFKEPWKFAASKVVKHDNGDYYFHLTVSQEIEEPSIEEASTFMGVDVGINYLAVASTTDKKCKFFAGGEIKNKRNIYSKMRARLQSKGTLSAKRVLKRLAGKEQRFMKDVNHCISKAIVKFAVQEKVSVIGLEDLTDIRENTNGKLRKKQRYLHNSWAFRQLQSFVDYKAKQVGILVEYVNPEYTSQTCNRCNHISKNNIKGLRFHCEACGFELNADLNGARNIEHRTRDSRYILESQGCLSTIHTDNLS

SEQ ID NO: 53847 - protein, 157 aa, Methanosarcina sp.
MFAKRVSKKVKGSNNRNKARQRLSKIHEKISNQRNNFQHQISSKLISENQAIALETLNVKGMVKNHCLAQSISDASWSSFVTKLEYKAEWLGKTILRIGKFEPSPQICNVCGYHNSELTLKDREWVCPDCKTKHDRDINAAINIKKFSLQDQNLIVI

SEQ ID NO: 53848 - protein, 376 aa, unknown
  TnpB Polypeptide
MYKAYKFRLYPDSSQKQLLSKTFGCVRLIYNYFLDKCIKNGFIKAFDMCREVKELYIKYPFLKEVDSCSLRCAIFNLEDAFKNYFSKRSNYPKFKSKHNKQSYRTTCIRSKYKDKEYSNIELDLVNRKIKLPKLGLVDIRGYRNLKNICGIIINATIEKETTNKYYVSIVVEEKENVTSNVTPQSIVGLDLGIKDLVVTSDGEKYANPKEILKREKKLKRLQRKLSRQIKGSNNYYKTKEKIARIHSKIKNSRKHNIIYIVNKLVKEHDIVVSEKLHVKEMSHNHNLAKNILDASFNRICQVLKWKCRVLGKYYYQVDTYFPSSKKCSHCDSKTNKTNNLNVRNWICDECGCENDRDINASINIMFEGLKIHYQSV

SEQ ID NO: 53849 - protein, 364 aa, unknown
  TnpB Polypeptide
MLLGFTTKLKLNNQQCTAMAQHAGYRRWLWNRALLWWSTAYKEGLKPTANKLKKFYTNHVKPRYPWQSQLSSRVYQYCFQDLDNAFKKFFNGGGYPRFKKRGVDDSFTIDNGGKSISLKGVRTKLPFIGWVSTYEPLPECQVKKVIISYRAGDWYLGFAYEQERTVPQKKQDIVGIDLGVKSLATLSNGEVFVNLHPYRLTERKLKRLQRSLRRKKKGSANCLKARCKVAKAHRRVADIRKDYLHKLTSYLAKNFKTVVIEDLNISGMMANHKLAKATADLGMHEFRRQLDYKCQLYGTKFVVADRWFPSSKMCSHCGYIKDSLLLEERVYKCEDCGCSIDRDLNAARNLSNWGRLALRKSTEG

SEQ ID NO: 53850 - protein, 497 aa, unknown
  TnpB Polypeptide
MKRKVKGQLTVTRIAILGTQELNKWKSEELDTIAFRLGQLRCDLWNEFGSLKAWGISKFEIDKLLRPFREKYQLPAKLWDSTLYDVIDNIHLVQASCIEKVMKALGQSYQTFHSKKGVLQLTLESRDWLNHPKLCSLVRKYWHRGHTRVNNQIILRAFDTQFDENGVVWLRFGGLEKGKAIKVPTTLPHEVTCQLRLIKRADRWEIHYTTNIQKAEPKTEGLTIGCDRGYTEVYATSSNDGARLLGNNFGSLQTKETDYRTAKKVKRNKLKSVADKAIQKGDTAKADRINRNNLGKQKWDKRESRFKGQIKTLVFTATHQLMQNAIKVAFEDLTEQIRNKKPRTKRMKRNVSSWCKGVVADALNQVSTRVGCAIIGVNSAYTSQLDSRFGTLTGTRSGERFIGHDGVVLHSDINAADNILARLGDVEIPRFLSYKKAKEILLERTRKFLDSLTPMQGQLFEAKTDKGKSQTLEPRRRKPPSVNQGANIKQLTLFNFG

SEQ ID NO: 53851 - protein, 311 aa, Nocardia sp.
MAGFQVPDGWTVQGYRFALDPTPAQEQVLVSHAGAARKAFNVMLAAVKANLDQRVTAPDGTEVDRVSAPKPLKAAEAELARLQRRAARRTGPWDPTARRRRNASKRWKRAQAQVARTHARVANLRRHALHEATTALAQQHSVIVIEDLNVAGMSRGGGARKRGLNRALADASLARLRTMLDYKCRWYGAALVVADRWFASTQSCSSCGAKTKLPLAERLYCCGSCGLVIDRDHNAAINLARLGDTTHTGGGMGTGTGSGPAANVSVGQGRGADRKTRPTREVGKAGGVEASTPHGPLAGRTGTAAPQGTAA

SEQ ID NO: 53852 - protein, 447 aa, Natronomonas sp.
VIIQAFRMLEVHRTHRAKILNHSQVAEMLNQHGWSASKLWNVANYHSREVWEETGEIPDHGDLKDELKTHNKYKGLHSQSSQRVLEELAEAFNSWYGKRKSDNRANPPGYRKKNYYDSEGHRVHEEHPRSTVTWKQNGIKHDTNNGRVRLSKGANHKEHPKAWEYILVEYETRPGVTVENLQQARAVYDKAKGRWELHLVCKDEIETPTAPGNETAGVDLGICNFAAVAYSTEEADLYPGNRLKQDGYYFPKEIAKCDDSGGDRATRLHHKWSERRTHFFHSLAKHIVERCIKNDVGRINVGKLAGVREDDNGESKNWGKHGNLDLHGWAFDRFSNILEYKAKVEGIEVVEVDERDTSKTCCVCGREDDSQRVERGLYVCETCDAAFNADVNGAENIRLDINDESNSESAPGLGEDRSTGWLAQPGVYLYDLSRGFQPRREVVDCKP

SEQ ID NO: 53853 - protein, 417 aa, Natronomonas sp.
VATDYQRRTAITRLDVSAKQSTLLSETIAEWLKGCQLAADIGWRNEVRSKSDLQSIAYDEIRENTDLKSQHAILGVHQAADALSSVAERRESGHEVSKPVFSSRSMQFDERTMTVFDDGEVSLSTVSNRVRCKLRLPSETDGYQQKFLNSDEWELATSTLKPRGGEYYLHLGFRKPIDESSEEPTPENRTVLGVDLGIENIAVTSTAHFESGNRLRAKHRQFERIRGDIQRTGTRSAHLTLEQRERREKRYTRDELHKISRAIVEEASSYGCNCIALEDLEYIRESLPSGKEFHQWAHRKLVEFIEYKANEEGISVVFVDPAYTSRQCSECGHEAAKNRKTRQHFHCQNCGSKANADYNAAKNVGLAAVRCGQQPPQRTGHGQLALKSGTVTPNEGFTPYTPSAGIEAEDTDKSRCS

SEQ ID NO: 53854 - protein, 420 aa, Blautia sp.
MEKTGYYSVTVRKFNVLSRHTDWMRKTQELYNEIVYFYYSLYLDIVEENNAVEQFAHEGTPQSAGRERRGDFSSSQEAMRELEKMTIIGREKKPVSNPLPWKKVPLYFRRAAINTAIAAARSFLSRKEQKTRTEKFAEPVTFYKGMYKDFTGNEIFLKLWNGSVWQWTRCKLRGNTVPQEGQMMSPSLIMREKRIELHIPWKTAISDMRTAKQKMADSEKVCSVVFTNRNALMVCCIIGHSGEKESCLFLKGGAEYAFRCRTLLERIEKSQKAAGGGGNPRANRKYWEKLKNLNDYYSHQYSRQAVDYCKAHEAKIIVLPQFENVYQTYIMKQAGNFSPIHLSSAIREKIKYKAWREGITVLESVQHNINSVCSVCGGQIKTYGSLYQCENGHQGNRYLNSAWNLGIKCRESFRTKQSED

SEQ ID NO: 53855 - protein, 518 aa, Scytonema sp.
LTPTSRKKRGKNGGKSATVESPVTSNEMTLSDKLSSCADATQITKLSQTSGQDSTLKEKVLYPYWTGLAKELSVKLLSHIEIDSLDLGLTLSNGLVKNSPVKSWFSTRINFHPQKNLQGICFRSSMFSHTECMDSESTNVKSKKIRIFPNQQQTVTLKKWMGTARYVFNQTIAYLNKPDTKASWKAIKTGIIQSLPEWSKETPYQIKSIAIKDACDAVKNAKKKFQQTKQIQLVKFRSKKERRDSIYIPKGSVKSESVYITSLGKSLQPAEVFPDIEFDCKLVHQNGKFYIIIPMVFESKKSENQRLGLVALDPGVRTFQTFFSLHLNGDFGNLDIGRIYRLCAYLDNLYSRISKAKGTPKYRMLKASRRMRERIRNIVDEAHKQVAHYLCSQFDVILLPSFETSEMVVKKSRKLRSKTARAMLNWSHYRFKEYLKFKAQEWKTQVIEVSEAYTSKTCTKCGHIHTKLGGNKKFKCPSCGHTLPRDLNGSLGIYLKALVERPELLQWREHLLAMGNQS

SEQ ID NO: 53856 - protein, 404 aa, Scytonema sp.
VFSLTYEFKLKPTSKQVVIFADWLEQTRRVYNYALAERKDWFKSRSCQINACSLKSEYIIPADSKRPTYANQCKALTAYRKTSPNLQRVQSQVLQQALRRLEQAFVSMWEQNHGFPRFKKPGTMRSFVFPQLSKDAIVGNGIKLPIIGWVKFRQSREIPGGANLKQVRIVRRASGWYAMLTLQWDVQVPDVMPHGEAIGIDVGISHFAAVSNGKLFSNPRPFKKLERKLKLLQRSVSRKVKGSNNRKKAQLLVSKLHERIANVRAYYHWLYAHNLCDWAGMIFAEDLNLKGLARGFLGKHCLDAGWGQFFQILEQCCHKRGVFFLKVDSKKTSQICPNCLIETGKKDLSERIHSCEHCGYTTNRDVAAAQVVLNRGLAAVGHTVKMLSEGKAVALPAMKESLSF

SEQ ID NO: 53857 - protein, 406 aa, Scytonema sp.
VSQFDVQFDCTQGVALMAYKAFRIKLKLNNQQRTVMAQHAGYSRWVYNWGLRLWEEAYKDGLKPSVGMLKKFFTNHVKPQYQWMSELSSKVYQYAFINLGEAFKRFFTKKGKYPRFKKKGKSDSFAIDNSGAPIKIGGLRHKLPFVGWIRTYEALPEYITKKVTISQQAGDWYLSFHVEIPDVDLTPKSVERVGVDLGVNALATLSTGIVYPNLKAYRKARHKLAKLQRRVSRKQKGSNNRHKANIKVARQHRRVASIRNDYLHKITTYLAKNHGEVVSSALGGFPDLKRLRTRRVIEDLNVSGMLANHKLASAIADCGFYEFRRQLEYKCQRYDSKLVVVDRFYPSSQICSSCCYRQKMPLKERVYVCPVCNVSRDRDLNAAINLSNWGRLDRGCACGASAADGL

SEQ ID NO: 53858 - protein, 392 aa, Scytonema sp.
VLVLEYKAVVKKTQSVAIDEAIRTSQFVRNKVLRYWMDNRGVGKKQLYQYNTQLRAEFEFVKDLNSHACQASVENVERAINRFFDNCKKNKPGKKGYPRFKKGSRSVEYKTSGWKLHPSKRRITFLDKKEIGELKLLGKWDIHTYPLTLIKRVRIVRKADGYYVQFCIKVDAQPEQRNGNNEIGLDVGLEYFYSDSNGHHEENPRFLRKAEKSIKHAQRRIYTKEKGKNNRRKASWRHARKHLRVSRQREEHAKRLARCVCKVNAFVAYEDLNVKGLVRNRHLAKSISDVAWTSFRRWIEYFALKFNTKVVAVAPHYTSQKCSDCGKTVMKGLSTRTHNCPHCGTVLQRDVNAAINILLKAKNTGGHPGINAWGDVSSTSIGRKTCRGKKRR

SEQ ID NO: 53859 - protein, 445 aa, Scytonema sp.
MVVRRITFRLYPTSAQEKKLRTCRAMHKELFNSALSNRKTQYQKFGNKVDYYQQQGSLPAFKEVWTEYKLLNAGSLQATLKRVDFAYQRFFQGLGKYPRFKSIRHYSGWTYPDGRQGFKAHTTSVNGYLKLVDLDIEIQMRGKARSWGRPTTCTIVYRNGKWYASITVDVPNIQRELGACAVGIDIGCKSALAVSDGENHQLVEAPKFLRSCEAQIKQASKSKRRKKAPNRKSKTKASRRWKKASNRVGKLTRKVANQRQNWVHQVATEITRSNSLVATEKLEVAKMTRKAKKGKRKKQKAGLNKSILDVGFGRLLSAIKYKVEEGGGQFIEVPTKKIKPSQTCPKCGHQHSKTLDERVHQCQACGYQQDRDIASAEVCLYWVKGTLPGFGTNLVDGDGSSSTSLPKGRKSCGGMRQLAQKKRLKSQPAVGDAETPSKSAGRGSS

SEQ ID NO: 53860 - protein, 382 aa, Scytonema sp.
MKTLKFKFYNQKRNKHLKRKINASGVIYNHCIALHRRYYRMWGKHLACGKLQSHIAKLRKRNPFWQSVGSQAVQDICQRIEKAYQLFFKHNKKGVRPPGFKKVKKYKSFTLKQAGYKFIGGNRVKIGNRVYQFWKSREIEGTVKTLTIKRTPLGELFMVVVVDNCPESEAEFTTGRIAGFDFGLKTFLTCSDGSKIESPQFLKQSLNAIKKASRQHSKKLKGSANRERARKNLVRKHEHVTNQRRDWFWKLAHELTNKFDVLCFETLNLKGMQRLWGRKISDLAFGEFLQILEWIAKNKGKQVVFIDQWYPSTKTCSICGHVLEKLDLSVREWRCPSCQSVNGRDENAAKNICAVGASTAQVRRCKTGNACNCCLSLESPHL

SEQ ID NO: 53861 - protein, 435 aa, Scytonema sp.
MYSLKLELKLNNKERSKLAGCAGFSRFVYNFGLSLLTNSWDFEGIKASNSKRLAAIEKVFTNYVKTNPDYVWMQQYPSAIYSNALRNLAKAFEKWRQQESGFPQMKTKKKGDSFTVLKKSGVYPTACEPMLPFTNRQVLQPGKRITIPGLGEFRLKQPIPFLCSSQSFTISRMADKWFVSFSLDVEKAPPVIHEVESVGIDLGIKTFATLSDGSTRETPSSLKKAKTKLNKQQWRNRKKQLGNRRKDIKASKNAKQYFAQLAKSHAHITNIRKDFLQKTTTEISRKYYRIRIEDLNVSGMIANNKLSEAISNLGWYEFRRMLTYKEAFYGTKLEIVNRWFPSSKTCSSCGSVQPMPLSERVYRCGACGHVQCRDLNAAINLNNAPKSKIRAVSSALDGFPGLKRLRTRRASAESTPVDRKGAVSPGRSRKQTSKV

SEQ ID NO: 53862 - protein, 423 aa, Scytonema sp.
MSNYGCQQHLINATSDVIAILEFLCVESAKLANCGTYYARQLYFKTGKIPSKFDLHKLFKSNSHFQAMYSHVAQQCLTTVAESFKSYIGLLKGIKKGTVDQHPKMPGYRKGGLALVTYPKADVKLKNGLLRFPLGSKVKAWFRLDAFYLPMPSNLKFADIKEFRIVPRNKCFYIEYVYKQLDIAVINLDQSKVLGIDHGVNNWLTCVSNVATSFIIDGKHLKSMNQWFNKQVSTIKEGKPQGFWNKKLAHITEKRNRQVRDAVNKAARLVINHCLDNKIGTVVFGWNKGQKDGADMGKKNNQKFVQVPTARLKDRIAQLCEQYGIQFVETEESYTSKASFLDNDMLPKYGEKPERWQSSGMRVKRGLFRTANNFFLNADANGAANILRKVAIKLGLDLSGISRVSLIAPLKVRLWTLQESPGF

SEQ ID NO: 53863 - protein, 332 aa, Scytonema sp.
LIDFTVTASLRSLGRKAFLAFRKITVRLSIRPVAGHYIPQNDASPLLIKKVSEKSSSTGKWDIHTYPVKSIKRVRLVRKADGYYCQFAIDIEVKSESRTADGEIGLDVGLEFFYSDSNGHHEENPRFLRQAEKAIKHAQRQIYKKEKGKNQRRIARLRYAKKHLRVSRQRTEHSKKLARTLCKLNSLVAYEDLNVKGMVRNYCLAKSINDVAWTLFRRWLEYFAVKFNTQVVAVNPRMTSQKCSDCGAIVKKSLSTRTHKCNCGCHLQRDVNAAINILNLAKARDGQSRSNATGVATSTLVGETSPEGGSPDLGNWRTRRAQAWLSKWRRRV

SEQ ID NO: 53864 - protein, 321 aa, Scytonema sp.
VLVLEYKAKGKQQQYRAINEAIRTTQFIRNKAIRYWMDASTETKVDKIALNNYSTALRKEFGFVKDLNSMACQAATERAWSAIDRFYGNCKSKKPGRKGFPKFQKDNRSVEYKTSGWSLHPTKRRITFTDKKGIGEVKLLGKWDIHTYPVKSIKRVRLVRKADGYYCQFAIDIEAAALRGKLPPQTCLVKTEPRAGNGEIGLDVGLEFFYSDSNGHHEENPRFLRKAEKAIKHAQRQIYKKQKGKNQRQIARRRYAKKHLRVSRQRTEHSKRLARTLCKLNSLVAYEDLNVKGMVRNHCLAKSINDVAWTLFRRWERIFCS

SEQ ID NO: 53865 - protein, 404 aa, Scytonema sp.
MLTYIYRQKIKTMLVLEAKLKGKQSQYNLLDEAIRTALFVRNKALRHWMDNKDVGKNDLQKLCSVLAKEFDFADKLNSMARQASADRAWFAISRFYDNCKKQKPGKKGYPKFKKRGHSVEYKTTGWKLSDDRKNITFTDGYQAGRFKLVGTLYLPFYSVKQIKRVRIVKRADGYYCQFCVDIERQEQHQHNGKQVGIDVGLEFFYTDSNGSTVENPRVLRKAEKALKRKQRKVSKCKKGSSNRRKAVKKLAKKHLKVSRQRKDFAVKTARTLVQSNDLVVYEDLQVKNMIKNRRLAKSISDASWSLFTSWVDYYAKIFGTWAIAVAPHYTSQDCSNCGTRVKKSLSTRTHKCHECGTVLHRDHNAAKQILIRGIKSTVGHTESKACGQNNLCLGEETPLSKLTG

SEQ ID NO: 53866 - protein, 184 aa, Scytonema sp.
LQATTLNLTTAYKNFFDKRARFPKFKSKHGKQSIQYPQNVKIVEGNVKLPGNIGVVKAKIHRPISGKIKTVTVSKTPSGKYFASILTEVECENPSTTEGKIYGVDLGLKHFAVVTDGKKVSKHDNPKHLAKHENNLKRKQQKLARKQKGSNSRYKYRKVVAKVYERLSNSRQDFLHKLSYKLVS

SEQ ID NO: 53867 - protein, 465 aa, Scytonema sp.
VSQLYRTIPVRAKFTDEEKAFWVDQCEHANSLINSAIYHTRQTHYSKQEQQGEVFTLYWRGDELRYGWKTYKCSTAYPELDKALKENPHYKSMAAQSAQQTLKTVGESITSYNRLVNAYYKGEVDKPSLPKYRKKGGLAAVTFPRQALNYRDSCFYPSISRETKPHLLIEVCLHLPDFIDSDWVKEVTVRPYLGELWIDWVIDDGKQSIDINPNLDYTQAWSFDHGGTNWLTGVSTRGKSLILDGRKLRNMNQGYCRLVAKYKQGFADLYWDSNLDRVQRKRNNQMRDAVNKAARFIINQCLNDRVGNLVIGWNEGQKSGSNMGKRNNQNFVVIPTGRLIERLKQLSKEYGIVLTVTEEAYTSKASFLDGDSLPKYGEKPVGWKPSGDRVKRGLYRSRDGHLINADCNGSANIMRKIATQLGLNLVEVGRASLTVPQRIDLFTRLNKSYRKRCVDGLKALGATTV

SEQ ID NO: 53868 - protein, 434 aa, Scytonema sp.
MSYGCQQVLITPDKDLKALLEYVCTEANSLINCGVYYSRQYYFKTSKFPTKVDLHKQLGTIQQNKHYQALYSDTAQQILTGVAESFKSYVGLLNGIKKGTVTQKPRLPSYRKSRGLALATFTGRSVKLKDGMLRFPLGSLVKAWFGVDAFYLPMPSNLDFKTIREIRILPRNRCFYAEFVYKTELSVVESDKSKVLGIDHGLNNWLTCVSNVGTSFIVDGLYLKSLNQWYNKSIAKIKDNKPQGFWSNRLAAITEKHNPQMRDAVNKAARIVINHCFDNKIGSIVFGWNQGQKDGADMGKKNNQKFVQIPTSKLKNRIEQLCEQYGIHFIETEESYTSKASFLDNDALPRFGEKPDSAACAEGRIGWKSSGIRTNRGLFKTSIGIKINADCNGAANIIRKVAMMAKFDLAGISRGCLSQPKKVLLWTLQKSQCL

SEQ ID NO: 53869 - protein, 224 aa, Scytonema sp.
LGEVPSQVLQQSVKQLHRGWEYFQKRGFGFPRFKKYGQFKSLLFPQFKENPVTNLHLKLPKIGAIPINLHRPIPSGFTVKQVRILRKASLWYASISIACDVNIPDPIPHGHPIGVDVGLEKFLATSDGVLVKPPKFFKQLQSQMRLLQRRLSRKKKRSKNYEKARIKVARLHHKIDNARKDFHFKVAHALCDAGDMVFMEDLDYRTSAKGMFGKHMRHGCIWSI

SEQ ID NO: 53870 - protein, 419 aa, Scytonema sp.
MLTLTHRYRIYPSAVQEHQFIEWMEICRGAYNYALREIKDWCLGRKCLVDRCSLEKEYILPADLKFPGEVYQLNNLPEAKKSFPKLGEVPSQVLQQAIKQLHVGWKYFQRIGFGFPRFKKFGQFKSLLFPQFKKNPVTNLHLNLPKIGAIPINLHRPIPIGFAVKQVRILRKADRWYASISLQCDVSIPDPTPHGHPIGVDVGLEKFLVTSDGVQSKPPKFFKSLQSELKLLQRRLARLQRRSKNYEKQRLKVARLHHKIDNTRKDFHFKQAHALCDGGDMVFMEDLDYRTSAKGMFGKHMLDASFGQFRTIVKYVCWKRGKFFSEVDARGTSQLCPECGGEVKKDLSVRVHDCPHCGYKTDRDIAAGQNIRNRGIELISTLGHSGTQTACADDLPGTGKNQSRQVSKPRKGVTRKSKM

SEQ ID NO: 53871 - protein, 453 aa, Scytonema sp.
VLVLEYKAVVRSSQAIAIDEAIRTSQFVRNKVLRYWMDNRGVGKKELYQYNTQLRAEYAFVKDLNSHACQASVENVERAISRFFDNCKNNKQGVALGQKNEPNLSNPTNNRDAKTINHEGSAHFSRHSPVKKGYPRFKKDSRCVEYKVSGWKLHPSKRRITFSDKKGIGELKLLGKWDIHTYPVGLIKRVRIVRRADGYYVQFCVKADVTTEPRSEDGEIGLDVGLEYFYSDSNGHHQENPRFLRKAEKVIKHAQRRIYKKEKGKNNRRKAIRRYARKHLRVSRQREEHAKRLARCVCKLNSFVAYEDLNVKGLVKNRHLSKSISDVAWTSFRRWLEYFALKFNTKVVAVAPHYTSQKCSNCGQTVKKGLSTRTHDCPHCGTVLQRDVNAAINILCKAKSTGGHPGSNAWGVGISTLLGATQACASSDVEPRIPRLLAVGSVNDVDIADVLLA

SEQ ID NO: 53872 - protein, 419 aa, Scytonema sp.
MITLTHRYRIYPDVTQEQTLIEWMEICRGAYNYALREIKDWCDSRKCLIDRCSIQKEYILSSELKFPSEVYQLNRLPVSKKDFPRLGEVPSQVLQQAIKQLHRGWEYFQERGFGFPRFKKHGQFKSLLFPQFKENPVTTLHIKLPKIGVIPINLHRPIPTGFVVKQVRILRKADRWYASISLQCDVSVPDPIPHGHPIGVDIGLEKFLATSDGVRVSPPKFFKQLQSELKLLQRRLSRKQRRSRNYEKQRLKVARLHHQIDNTRKDFHYKQAHALCDAGDMVFMEDLNYRTSAKGMFGKHMLDAGFGQFRTIVKYVCWKRGKFFSEVDARGTSQECPECGGEVKKDLSVRVHSCPHCGYKTDRDVAAGQNIRNRGIALISTAGLAGMETACADDLPGIEVTQSRQVSKPRNRATRKSSK

SEQ ID NO: 53873 - protein, 412 aa, Scytonema sp.
VLVLEYKAVVKKSQSTAIDEAIRTSQFVRNKVLRYWMDNRGIGKKELYQYNTALRAEYGFVKDLNSHACQASVENVERAISRFFDNCKKNKQGLKGYPQFKKDARSVEYKTSGWKLHPTKRKITFSDKKGIGELKLLGKWDIHTYPAELIKRVRIVRRADGYYVQFCVKVDAIQEPRTGDGEVGLDVGLEYFYSDSNGYHEENPRFLRKAEKAIKHAQRRIYSKEKGKNNRRKARGRYARKHLKVSRQREEHAKRIARNVCKANTLVAYEELNVRGLVRNRRLAKSISDVAWRAFRRWLEYFAIKFGTQVVAIAPHYTSQKCSGCGDIVKKTLSTRTHTCKCGCILQRDVNAAINILCKAKSTGGHPGSNAWGVGTSTFLGASQAHASCDVEPRIPRLLAVGSVNLIYIRLG

SEQ ID NO: 53874 - protein, 420 aa, Scytonema sp.
VLTLTYEYKAKPTKEQIQVIEHTLEVCRKVWNFALRERKDWLKSRSCQINACSLTSEYIIPASKAYPTYNNQAKSLTLAKEQYPELKTVNAQVLQQVLRKLETAFIDMKRKGMGFPRFKNRYRMRSFVYPQLGKSQFLRGNQIKLPQLGWLEYVKSREIPNGFVVKQARIVRKASGYFVMLTLESDVNVPNPVASGHPVGLDLGLDKFAATSDGELVERPRFLSSLHRKLKLLQRKLKHKKKGSSNRHKLNRRIARLHQRISDTRKDWHFKLAHKLCDKAGMMFVEDIDFRTWAKGMLGKHTLDAGFGQFIEILKWVCWKRGVYFEKVSAYYTSQVCPQCDTHTGKKELKDRVHSCPECGYTTHRDVAAAQVIRNRGVSGLGRSLEENACGDDLTGTGNGLVKSQRSRKKGGEARLQSAS

SEQ ID NO: 53875 - protein, 330 aa, Scytonema sp.
MHGLQSPVKYVRILWRELNGKRRWYAQLINEGLPYQKEKNYISNALIGLDLNISNIAFVGDNKAGLLPFAEKVPTYDYEIAALQRKMQRSQRVNNPDNYERDFEIKKGHRTVKKKGKVKKGKREWKRSKNYKKAAQKKRELQRKKSAYAKSQNRKTVNEILQHGNVIKTEKVSVKGWQKRYGKAISAKSPGFVQSELQRKVEKTGGQFITFSTQKTALSQTHLDGSRVKKSLSERVHHDATGIKMHRDLFSAYLSRYVNHDDKLSLQDARDGYRGAESLLLEAWQESLNREQLGSSESGLIAPERFSDKLGKTNQIAVCAESGRKVNPNS

SEQ ID NO: 53876 - protein, 459 aa, Scytonema sp.
MYSLKLELKLNNLERSKLAGCAGFARFVYNFGLSMLQASWDFENIKASDSKRLHKIEKVFTNYVKTHPDFAWMQNYPSAIYSCAFRNLAKAVDRWRKGCSKFPTMKSKKRGDSFTVLKKSGVYPAKGEAMLPFSNRQVLFPGKRITIPGLGEFKLRQPIPFTCSSQTFTISRTADKWYISFMLDAQKIPTSVHEVESVGIDLGVKCFATLSDGSRLIAPPSLKIAKTKLSKEQWRNRNKCFGNRPQGVKTSNNGKKYLKKLARRHAHIANVRKDFLQKTTTEISRKYYRMRIEDLNVSAMIANNKLSEAISSLGFYEFRAMLTYKEVFFGTKVEIVDRWYPSSKTCSCCGHVQPMPLSERVYGCQKCGHTQDRDENAAVNLKNCPNNRVRAVSSALDGFPGLKRLRSPEACRRHTRRASAELTPVDRLGADSPGRSSPANFKVFELYDLSVLCKFCIAQ

SEQ ID NO: 53877 - protein, 410 aa, Scytonema sp.
LRRVFPRKILVVEFKAKGKTTQYSAIDEAIRTVQFVRNQAIRYWMDNRGVGQKELYRLSKTLRAEFPFAKTLNSSACQAAIERAYSSIARVHDNWKKSIPGKKGYPQFKKNCRSVEYKTSGWKLSIDRKQITFTDKNGIGKLKLKGTWDLNFYQIEQIKRVRLVRRADGYYVQFLVDAENKIDTKPTGKTIGLDVGIKEFYTDSNGHTEPNPKFYRTGEKRLKFRQRRVSRKKKGSTNRKKAINRLGRVHLKISRQREEHAKRVARCVIQSNDLVAYEDLRIKNLVKNHCLAKSINDAGWYQFRKWLEYFGVKFGRITVTVNPAYTSQQCSNCGTLIQKSLSTRTHVCKCGFVLDRDWNAAINILKSALSTTGHVGTWVKDRNASGDSTSTQVGAILPEQVGSVNEESPP

SEQ ID NO: 53878 - protein, 481 aa, Scytonema sp.
MVVAQMTSVKQGGDSPMLMNYQYRAYPTTQQKRQLSYWLRICRYWYNHQLGDRFDWWENNRTAVNSCPLVCSLPVLRDNPDFYSQKKQLPVIKEDLLKLNYSGELLDFTCVPSQTLQDVSKRVDLAFSRFNKGDSNGNRSGKPRFKNAARYRTMRIEAQAVTIERVEKDSLFLSLSKLKGWVKVRLHRPLLNRAKLRNLLLTLKSDGWYITICLEDSTVPEFKPDGIAPTWDNSIGLDAVLHEDDYLATSENTKLLALKSFRKSENRLAKVSKRKATKNKGSRSRRKLAKREARVHQRIARSRRDHAFKTAHALVRTGKKVFIHEDLNLKALSKRNQVKQDEHGKYLPNGQSAKSGLNKSWNDAAFGQFFTVLEYIAVKAGARTIACSPQYRSQLLAYRDEFIFIDCDIRSYWDAELSLLIDRDLNAAINLKRVGRGLFPTIKRRKGNPVVTASTTNSTLKEVLETLKCARSLHSPSAECR

SEQ ID NO: 53879 - protein, 398 aa, Scytonema sp.
VLVLEYKAVCNHRQSKAINEAIRTSQFVRNKVLRYWMDNRGVGKKELYQYNTQLRAEYKFVNELNSHATHASVENVERAINRFFDNCKKNKPGKKGYPRFKKDVRSVEYKTSGWKLHPTKRRITFSDKKGIGQLKLLGKWDIHTYPLDLIKRVRIVRRADGYYVQFCVKVDITPEPRSGNGEVGLDVGLEYFYSDSNGYHQENPRFLRKAEKAIKHAQRRIYRKEKGKNNRRKAIRRYARKHLRVSRQREEHAKRLARCVCKANAFVAYEDLNVKGLVKNRRLAKSISDVAWSAFRRWIEYFAIKFRTEVVAVAPHYTSQECSGCGSVVKKALSTRTHTCKCGCVLQRDVNAAINILLKAKSTGGQAGSNAWGVGTSTLVGATLLEQVATLSQESPCL

SEQ ID NO: 53880 - protein, 392 aa, Scytonema sp.
MAELSITLKLPFYRLNQVKASEFERLTVLNTQVANDLLKIDKAERRKITSSAFKHVEIGSAWINQTIRNTNAKTKVKHFKRMWLEVNNQNFEISKQGDLYSVAFNLLRGRKGRIPLSVHCASHAEVLDKIIACGVKLGSLKLCKSKKGIWYALVCVSMEVPDAISVERWIGVDRGQNNIAVAALPKSFGKFWKSGRVKSLRRQFQRTRRKLQSAKQLKEVKRLEQRERRIMTHINHVISKELVQFAQDFGMGLRFEDLSGCRQTMKQKKKTKSDAASNRDTWAFYQLEIFTRYKAIRSGVPVQSIPAPYTSKSDYRNGVIGKRNGDWFKGFDGYRCNADWNASQNIGQWVGFSCPLSLQDAVTAMVAVDTEGGVDDSPLTGEASKAAALAPS

SEQ ID NO: 53881 - protein, 392 aa, Scytonema sp.
MRTAYQYKLRPTKKQTASIDRWLSMLCAQYNYLLADRFDWYEQNRCQINACPLVCHIPELRDNPDYYSQKKTLPNLKKTHPHYGDIHSQVLQDVCSRVKLTFDRFLSGDSNGNRSGRPRFKSRDRYRTFTYPQMKDDCIQSNLINLPKLGQIKIVLHRPIPDGFKVKTASVTKKADGYYCTVSLEDATIPTVKPDINPESITGIDMGLKEFLTTSDGEPVGIPQHYRKAQKRLRVIQKRVSRRKKGSNRRHKSVKQLAKQHKKVADKRKDFHFKTAKQLLSKYDVVVHEDLNVKGLSRTRLAKSMHDAGWSSFLSILTNKAENAGLLVIAVNPKNTSQDCSSCGAKVPKKLHERWHSCQCGLSLGRDHNAAINIRNRAVGHSVLKAQSLRAQ

SEQ ID NO: 53882 - protein, 500 aa, Scytonema sp.
MTFRLYPNKQIEQSLRYHRKLHKDLYNAAVYNRFTQYEKFKHSVSYIEQQNSLPAFKEVWTEYKEINSQALQATLKRVDFAFERWFKGLGKRPKFKSIRHYSGWTYPAKTGYSVESNGENGYLNLSKIGRIQMRGQAKYWGTPTTCTVVFRNGKWYASITVDVLDQILKPEVLPIGAIGIDLGCKSALSITDGTNHQHSCAPKFLRNAECKIKQASKKKRRSRAPNRKKKVKASRRWKKAQSKVSKLVRKVANQRQNWVHQVVAEIVSGNSFVATEKLEVKKMTGKANKGDALSPKNRAALLQRVPDCADESTKQRLPDFLRVRPRKRKKQKAGLNKSILDVGFGMLRSTIKYKVEQIGGVFVEVPTKKVKPSQTCPKCGHQHKKTLDIRVHECAICGYQQDRDIAAAEVMLYWAKGILPGSGTGLVNAESPSSTSRTSKQAGDLEATRGEEAFKIYSYWAGCRNPPTGEVRAGSSSELSRLYLYIAVRLGEREIWHTGC

SEQ ID NO: 53883 - protein, 421 aa, Scytonema sp.
MASKKQHKTEETYTQVIPVVFCSDETQVDQIMHLCGIPRTLTYNKLGSLQGWGLDWKKADAIVRTMMKRNEIGLPGKIWEWSVNDTMKAISAQQEAAKVFLLREIWRKYPMQSAQQQRLKWIEENKEKKKGEELKALKQKALELFPLSPVELARNRLVDLLYTDSTADNWLHRKFRAQYLRGHTFVRNQIVYQSQGYICKRLNRHSVELQIQGLERGKKITLKLRCRHIIKGQIRVIRNELGQLEIHCTHKRTLIVPEGKPTHKLGIDKGYTEGFYTSDGQAIAAGLGKLMTEKTERIAKTNRNQYRMRALGQNLKPHDPQKAARILENNLGHKVKSRKLQREKETIRNFIRNDLRRNITSPVDIICEDLTQPIKSKAAAKRINRKLNQWMKGELQASTLENLFGDWIDNISGQSSLYVAS

SEQ ID NO: 53884 - protein, 279 aa, Scytonema sp.
LPGTAWLSARSALCAFLADPEWIAIKAETEKDGQLVQNISSELLAPTAFSGREVSSGGSDGTRTRSIRPVDSSPPSQLSNAENILEIGKGDIGRIQRMSLHLDDLISRSTKVKARQRRKMRIACDRMREKIQNLVKDLHNKAVSLLVNSYKLIYLPTFDSSQMVVKINGKGKKRTLNSKSARVMLSLSHYRFEQHLKQAALRKGVIVALVNESYTSKTCPSCGHIHAKLGGNKKFQCPKCKYTAPRDWNGALNIMVRALQATAFSFDGDAIVIDSDRNV

SEQ ID NO: 53885 - protein, 397 aa, Scytonema sp.
MEQVLTLVCKLNPTPSQSEKLEVVLHAFAAACNYTNEVIKPQITSKTTIQNVVYEDLRSKFGLAANLAVRACARVGANRLVAKRAGKPVKAFKPTSADYDARIFAFREKDWTISLTTLEGREHIKIDAGNYQRGKLKGRKPTSAQLCKHRDGKYYIHIQLKDEIPDPQPIKKVIGVDFGRRDIALTSNGDSWSGKQLTETRDRYSTARASLQKKASTRTRSSRRRCRQVLARLSGRERRFQSWVNHNISKTIIQQAKSEKALVAIEDLTGIRERTNQKPRNKTERRRSNSWAFYQLRMFLEYKGLKDGVEVVAVPPAYTSQTCHQCLHIGLRSDKKFKCGNCGLSCDADWNGAKMIAALGTSVNSPRGSNGLYCNLSTDSSGLLKAHTVFGTPNQCG

SEQ ID NO: 53886 - protein, 495 aa, Scytonema sp.
LARSTTLSFITEVPLIVDSKQEAELLSRFQAGRQLYNACLNEAMKRLELVGNSELYKSAKKIFRTQKKERCEAFKKAREQYRYSEYDLHAFATITSKKSKWIAEKIDSNTQQKLATRAFKASERVMLGVAKDVRYKVPSRFRSMEGKSNKTGIRWKDNCLVWGKLMLKPVIDPTNLVIRYGLESPVKYVRLLWRILNGKRRWYAQMINEGLPYQKPQNYVSDGLIGLDLNISNIAFVGDKHADLLAFAPNVPTFHKEIAVLQRKMQRSQRTNNPDNFEPNFIGSCGRKTVVKKGKVKKNSRKWNKSNNYRKAAAKKRELERRKTAYAKNQNRRVINEILRHGKDIKTENVSVKGWQKRYGKAIAAKSPGFVQSELIRKAEKAGGTVIKFSTQKTALSQTHLNGERIKKTLSQRVHIDRLTGEGMHRDLFSAFLAKFVNQDELSLQDAVEQYPRSKSILFGAWRRFKICEISRQVRTPVPDSRQSRSQRRQKKLAR

SEQ ID NO: 53887 - protein, 472 aa, Scytonema sp.
VSLIAAYNRNLFNLRSLIRILNHSVFIFCTHKLPIFVILTNNKEVIKLLKAVKVRLYPTTEQEITLAKSFGCARWYWNYALNACIQHYEETGQSLKLSVYKAYLPQLKLEHPWLKEDCYSAVLQCVAINLNKAYTNFFEGRAKFPRFKSKHHKQSIQYPQNVKIVENCLEIPKIGVVKAVFHRPIEGKVKTVTISKTPTDKYFASILCETEEAVRCAGSPTCSICPDGTNQPTGGKTLGIDLGLKDFAIVHDGEQVTKYSNPKYLKRHEKNLARKQKKFARVETRHGASVQESNSRNKYRKLIAKVHERVSNSRQDFLHKLSRKLVDDSQVIIVENLNVKGMVQNRKLSKSISDVGWGMFVNFLDYKLKQKEGRLVEIGRFFPSSKTCSSCDHVLDELTLDIREWACPKCKTHHDRDGNAALNIRNEGLRILSMDGGNPVLAMPRRSKTNKPKGRKASVNDAGSLHCTLRSV

SEQ ID NO: 53888 - protein, 194 aa, Scytonema sp.
VLVLEYKAVVKKSQSTAINEAIRTSQFVRNKVLRYWMDNRGVGKKELYQYNTQLRAEFEFVKDLNSHACQASVENVERAISRFFDNCKKNKPGSSGYPRFKKDARSVEYKTSGWKLHPTKRRITFSDKKGIGELKLLGKWDIHTYPLDLIKRVRIVRRADGYYVQFCVKVDIITESRTGDGEIGLFRWLRVLLL

SEQ ID NO: 53889 - protein, 465 aa, Scytonema sp.
MLLNYQYRVYFHTNQKLELNSWLRVCRHWYNKQLGDRFDWYEHNRNSINVCPLVCSLPQLRDRPDFYSQKKQLPIIKEDLLKVGYSGELLDYKRVPSQTLQDVSKRVANAFSGFLKGDCNGTCSGKPRFKSAARYRTLRIEGQAISVERIEKDWLFLSISKLDGWIKVRLHRPLPDGFILKNALLTKSADGWYITICLEDPSVPIFTADDVVPTWDNTVGLDAVLHEDDYLATSQNTKLPALKSFRKSEKRLAKVSKRKASKKKGSRARLRNAKREAREHQRIARSRRDHAFKTAHQLVKTGKKVFIHEDLNLKALSKRNKAKLDVDGKYLPNGQSAKSGLNKSWADAAFGQFFTILEYIAAKAGARTIAVNPAYTSQLLAYRDEFIFTNCDIRSYWDEKESLLVDRDVNASINIKRVGLGLFPTIKRRRGNPVVTNSTTNSTLKEVLKTLRACQKPTPTCTQAV

SEQ ID NO: 53890 - protein, 405 aa, Scytonema sp.
MPTRRVTFRLYPTPTQEQKLRYCRAMHKELYNSALANRKTQYQKFGNKVDYYQQQNSLPAFKEVWTEYKLLNAGSLQATLKRVDFAYQRFFQRLGKYPRFKSIRHYSGWTYPDGRQGFKAHTTGVNGYLKLVDLDVEIQMRGEARVWGNPTTCTIVYLHGKWYASITVDASSIKRELGTGAIGIDIGCKSALAITDGENHQLVEAPKFLRKAEIQIKHTSKSKRRKRSPNRKSKIKASRRWKKASDRVSKLTRKVANQRQNWVHQVAAEIASGNSLVATENLKVRNMTLDTPRPAMRGDSWFTGRTCSGRLASARVEVPSPQALLASSAKVPVCPTVPNPRLRIFLAAFSSLSITHPHLHTWVLVDRDFFTIVRQLEHSCVVYCGFTATVTRLNTLAKYSTQTRN

SEQ ID NO: 53891 - protein, 365 aa, Scytonema sp.
LRAPNRNRHAGHCTPRNRHAGQILRLIAFWCSKDALAFAAQGSAMFALLKKHFGHKQANLNATEKEIFSWFSRGFARFKSCKAKSQVIKFKAGNYKNGTWYPKTTKGLKYEASQAVPYQCEYGTQLVYQRGKWFACFPQVVEIVGTGSERVIALDPGNRTFLTGYDGENILEIGKGDIGRIQRMSLHLDDLISRSTKVKARQRRKMRIACDRMREKIQNLVKDLHNKAVSLLVNSYKLIYLPTFDSSQMVVKINGKGKKRTLNSKSARVMLSLSHYRFEQHLKQAALRKGVIVALVNESYTSKTCPSCGHIHAKLGGNKKFQCPKCKYTAPRDWNGALNIMVRALQATAFSFDGDAIVIDSDRNV

SEQ ID NO: 53892 - protein, 314 aa, Scytonema sp.
VLVLEYKVRGNQKQYQAIDEAIKTTQFIRNKAIRYWIDAPREAKINRIVLNNYSTALRKEFRFVKELNSMACQAATERAWSAIDRFYTNCKSKKSGKKGAALSLSKGFPRFQKDNRSVEYKTSGWSLHPTKRRITFTDDKGIGEVKLLGKWDIHTYPVKLIKRVRLVRRADGYYCQFAVDVEIKPEQRTGNGELGLDVGLEHFYSDSNGYHEENPRFLRKAEKAIKHAQRQIYKKEKGKNQRRKARQRYARKHLRVNRQRNEHAKRIARNLCKLNSLVAYEDLNVKGMVRNHCLAKSINDVAWTLFRRWERIFC

SEQ ID NO: 53893 - protein, 398 aa, Scytonema sp.
MLRIHANRKVYNNAIAYLNKHQGFKYVNTKGEVKTSGKKEFRSFCKTLGKEIIPQWCKDLSIAHALDNALFEAYTAWKKTDRQPKFIGGKEKKPNPNRGLKIAKFRSIRDKNQTIQFDPNDYKNGHWMASKGLEKAEFWGQDFCLINYNDATELTYNKGRWYANFPIDMEVVEPRNGGKVIALDPGLRCFLTGFDGNNFTEFASGDFALIAKLCYHLDKLKSKHDLAKGTYFKRYRYKLRKAMERIRTRIKNLRSECHKQVASYLARNYDVIYLPTFETSQMVVKKARKLRNKSARAMMTWAFYEFSKTLEHLCNRYGSRLVRVTEEYTSKTCTSCGHVHTKLGGNKMFKCPHCGTIIKRDFNGALGIFLKALWDTTLVSTVSAEEVVLSLACPECLG

SEQ ID NO: 53894 - protein, 279 aa, Scytonema sp.
MKVLKAVKVRLYPTTEQEIALAKSFGCARWYWNYALNACIQHYSQTGKSLKLSLYKAYLPQLKVEYPWLKEDCYSAVLQCVAINLNKAYANFFEGRAKFPRFKSKHHKQSIQYPQNVKVVGDCLEVPKIGVIKAVFHRPIEEKVKTVTISKTPTDKYFASILLEIEGESSQISGDKTLSIDLGLKDFAIVHDGNEVTKYSNPKYLKRHEKNLARKQKKFARKVKGSNSRNKYKKLVAKVHERVSNSRQDFLHKLSRKLVDEASVIIVENLNCFGNGAES

SEQ ID NO: 53895 - protein, 464 aa, Scytonema sp.
VSQLYRTIPVRANFSDEELAFWINQCEHANSLRNSAIYHTRQTHYSKLEQQSEAFTTYWHRDELRYGWKTYKCSTTYPELDKVLKDNPHYKALAAQSAQQTLKTVGESIASYNGLVNAYYKGEVDRPSLPKYRKRGGLASVTFPRQALNYKDSCFYPSISRDTKPHLLTEIALQLPEFIDSGWVKEVTVRPCFGQLWIDWVIDDGKQPVDHNPNLDYTQAWSFDHGGTNWLTGVSTRGKSLIIDGRKLKSTNQGYCRLVAKYKQGKSDFYWDSNLDRVQRKRNNQMRDAVNKAARFIINQCLNDRIGNLVIGWNDGQKNGSNMGKRGNQNFVVIPTGRLIKRLKQLCPEYGIVLTITEEAYTSKASYLDGDSLYKHGEKPDCWKPSGQRVKRGLYKSRDGHIINADCNGAANIARKVATQLKLNLAEVGRASLTVPQRIDLFTRLNKSYRKRCYGVLHPVPTSV

SEQ ID NO: 53896 - protein, 264 aa, Scytonema sp.
VLKAIKVRLYPTTEQQVALSKSFGCARWYWNYALNACLQHYSETGKSLKLGVYKAYLPQLKVEHPWLKEDCYSAVLQCVAINLNKAYTNFVEGRAKFPRFKSKHHKQSIQYPQNVKVADDCLDVPKIGVIKAVFHRPIEGKIKTVTISKTPTDKYFASILCEVEDNSSEPSGNPTGEQSPRLGNPPTGLSHKILGIDLGLKDFAIVHDGEQVTKHSNPKHLKRHEKNLARKQKKFAHKVKGSNSRNKYRKLVALVHERVSNSRY

SEQ ID NO: 53897 - protein, 367 aa, Scytonema sp.
MDKGVALLLGFKTELILNKAQRTALMKHCGIARHAWNWGLGLTKQILDHNNALPDSKIKFPTAIDLHKWLVALVKSENEWYYECSKSTPQQALMALREAWKRCFNKTAGVPKFKKKGKRDSFTLEGTVKILGNNKIQVPVIGVLKTYERLPQVLTKSATISRQADKWFISFRFDVETQNLEQTNVVGVDLGVKNLATLSTGEVIAGAKSYKKYEAKLSRMQWLNRHKIIGSTNWKKAQIAVARLHMKIANIRKDTLHKLTTLLAKNHGTVVIEDLNVSGMMANHKLARAIADMGFYEFRRQLTYKCQLYGSKLIVVDRWFPSSKTCSNCGTKKETLTLNERVFECGDCGFVIDRDLNAAINLSKAVS

SEQ ID NO: 53898 - protein, 479 aa, Scytonema sp.
MALTKLKGHRIETKTLRSKLLRNDFDLSETNKMFSDVTLFFLLVIKEDPDGVCTHGIDSKRYYEPRFFGDRPTQTFPFEVPQTFRRAALSKACGIYKSWKSNYDNWVALVEKRKARRTESSARQTLGKVNKRGKSDKKHCPPILPTRLKLNANLYSGMFKEDTGSTIVLKILVKGQWKWVKFTYKSAPISPEWKKSTPAIITKPDGSVWLNWTIERYCIATGGIKTLMQDGNRICAVDTDLDGEIMKAVILDVDADGSVNELARTTLSGHRSHVKRRKLRLGKIAKLMSKTGLIIKGFASTRCEQIKRCEREAANQLSAQLIDFAHRWRCAVIVFEFLGNLKPQLGRYSRRSNQKRAYWLKSKVMDETSRKARQNHNILSAKVNPRNTSKLSAIDGCEVLRTSDMDVAELMANNPKVWDNFKRTHGYHPGSLAVTRNGYIINSGYNAARNIGIKFLTRYYESPTLVTQGFDKVASKVTG

SEQ ID NO: 53899 - protein, 393 aa, Scytonema sp.
MYAIKVELKLNNKERTLMRKHSGYARFVYNYGLALTQNLYAFGVKASIAKQINEIKKVFTGYTKKQPENQWMNKLSSKVYQQAFMDLGQAYQRWSKGLSARPVYKSKKDGDSFTVYDGNGKTLTFAGNKIKIPTLGTFRLKEALPCRYVSQTFTISRQANKWYVSFAVEADRIPPTYHPEESVGIDLGVKCFATLSDGSQVEAPKPYKKAKTKLSKAQWRNRKKQFGNRRQGVKQSNRAHMFFDSLAKKHARIANQRQDFLHKTTTGISRKFYRIRIEDLNVSGMLANRKLSAAISDLGFYEFRRQLIYKAEFFGTKVEVVDRWYPSSKLCSICGNKHDNLKLSERIYQCQNKSCLAHTITIDRDLNAAYNLLNAPMDRVRLAQPEITLADKK

SEQ ID NO: 53900 - protein, 147 aa, Scytonema sp.
MLFVMLVIWSSWKIWITAPALKGCLENTCATAAFGQFRTIVKHVCWNRGKFFSEVDARGTSQQCPECGEEVKKDLSVRVHDCPHCGYKTDRDIAAGQNIRNRGIKLISTVGHTGTETACADDLPGIDESQSRQVSKSRKGATRKPKK

SEQ ID NO: 53901 - protein, 378 aa, Scytonema sp.
MYAIKRRLKLNNKERTLMAKHAGFARYTYNFGLNLYNSIDHTTVKSSVSKKLTTIKKILTNITKRQSENAWMNELSSKVYQSSFQHLGTAISKWLAGEAKRPVYKSRKDGQSFTVYDGNGVVTLDCGKKIKIPTLGTFRLWESLDARYVTQTFTLSCRAGEWYVSFAVNAERIPPLFHQVQKTIGIDLGVKMFATLSDGTEYSAPKPFKKAKTKLAKKQWRNRKKQSGNRKKDVKTSNNAKKFYQSVAKQHAHIANVRYDFLQKTTTEISRKYSHIRIEDLNVSGMIANHKLASAVSDLGFYEFRRQLTYKSPIYSTKVEIIDRWYPSSKMCHNCHHIQPMPLNERWFKCENCVHVNCRDWNAALNLADAPNDKVRLA

SEQ ID NO: 53902 - protein, 197 aa, Scytonema sp.
LSVDKVYLPQLKVEHPWLKEDCYSAVLQCVPINLNKAYTNFFEGRAKFPRFKSKHHKQSIQYPQNVKVVGDCLEVPKIGVIKAVFHRPIEGKLKTVTISKTPTDKYFASILLEVEGDASQSLGDKILGIDLGLKDFAIVDNGSEIHKHSNPKHLKRHEKNLARKQKKFARKIKGSNSRNKYRKLVAKVHERVSNSRY

SEQ ID NO: 53903 - protein, 390 aa, Scytonema sp.
VSQLYRTIPVKAKFNDEEKVFWVDQCEHANSLINSAIYHIRQTHCSKLEQQGEAFTTYWRGDELCYGWKTYKCNITYPELDKVLKNNPHYKAMAAQSAQQTLKTVGESITSYNRLVSAYYKGEVDRPSLPKYRKRGGLAPVTFPRQALIYRDGCFYPSISRETKPHLLTDIALPLPDFIDSHWVREVRVRPNLGELWIDWVIDDAKQPIQANPNLDYTQAWSYDHGGTNWLTGVSTRGKSLIIDGRKLKSMNQGYCRLVAKYKQGKSDFYWDSNLDRVQRKRNNQMRDAINKAARFLINQCLNDRVGNLVIGWNDGQKNGSSMGKRNNQNFVVIPTGRLIERLKQLACEYGIVLTITEEAYTSKASYLDGDRLYKHGEKPDCWKPSASLR

SEQ ID NO: 53904 - protein, 492 aa, Scytonema sp.
MIVILYLKRLLCQYPHLNPYRSTKPSFVLELPLKTDSKQDLELQARFNAAMRLYNNVLGEAKTRMELVRTSVAYQAARKISRDQKKARSDAFKSAREAYRFADYDLQSYANRAAKDSKWIAQKIDAQVQQKLATRAFQAVERVLFGKAKDVRFKVESRFRSVEGKTNKQGIRWKDNRVVWSGLELSAIIDTENVVVQHGLSCPVKYCRLIRRTFGGKPRWFVQLVLEGKPYQNPQNYVSDGIVGLDLNVSNIAFVADNHADLLPFAEGVPTFSKEITKLQRQMQRSQRANNPNNFEQNFEASIGRKTVVKKGKPKKGKQQWKKSNNYRNAAKKKRELERRKTAYAKTQNRCVVNEILRHGKHIKTENVSVRGWQKRYGKAISAKSPGFVQSELARKAESAGGQFIKFSTQKTALSQTHLDGSRIKKSLSQRVHRDVTGIPEHQRDLFSAFLSRSVNQNQLVLQDAREQYLRLEPVLLEAHQRYLTRNSRKRV

SEQ ID NO: 53905 - protein, 491 aa, Scytonema sp.
MATLTYVKGLPTPAEELNSLGLTEFEMFLAAYSPVFHKAACETVSFILSGQTFNKSSWNTHLQTAYGISKRHANGVISHAQGAVDASKEHRKRHIKTLEGKLKSINLWITKSDKKLSDSQNFYAKKNWHKSKTGCRFTFSCSLQYRDTNWKNLRFQIHNKKRRAYQLTKQIEYLKIAPIQTVIPKNQAFVVGSKDESFGNQVCQWDGDILKFRVPACLESRFGKYVQTKLGNFDRNINRLPKDGSKTWHFYRKDRKWNAAVQFTPTPVQRVSRHSAYGCIGIDMNPGSIGWAYVDGDGNLKAHGQIPLQMGLPSGKQDGQIVDACLQLATLADTFACPVACEELDFSTKKEQLSERGRKYARMLSSWAYSRFYELLESILSNRGIYLMKVNPAYTSVIGLVKYARQYGLASDEAAAMAIARRAMRLTENIPGSITAYLPVKDGKHVWSYWYQLNNLIKKSSIKRHNFYAISNWEPLVKRWSEQSVQSKRKC

SEQ ID NO: 53906 - protein, 234 aa, Scytonema sp.
VSTYEGLPHTTTKSFTLSQKAGDWYISFSYEIESEITEKQHDYVGVDLGIKTLATLSTGVVFVNPKALKQAQSKLNRLQRQLQHKVKGSNRRNRQKLRIAKAHRRVTNIRLDATHKATSFICKNHAVVAIEDFNSSGMMHNHKLAAAVGDANFYEFSRQIEYKATRYGSKVVLVDRWYPSTQLCSNCGFKQPMKLSDRVYSCQECGYTTDRDLNAARNLRKYARMASPCLDVEG

SEQ ID NO: 53907 - protein, 434 aa, Scytonema sp.
MLVFEFKAYGKPAQLVAVNEAIRTAQFIRNSCIRLWMDNKDIGKNDLQKYCAVLAAQFPFADELNSMARQASAERAWSSIFRFYDNCNKGVSGKKGYPQFQKDCRSVEYKTSGWKLADERKSINFTDKKGIGRLKLKGTRDLHFYQVKQIKRVRLVRRADGIYVQFCIDINRSENIPTTGRTIGLDVGLKEYYTDSDGGMAENPKFLRKGEKVLKRSQRRVSKKEKGSKNRGKARQILGKRHLKISRQRKDHAVKLARCVVQSNDLIAYEDLRIKNMVKNHCLAKSINDASWYQFRVWVEYFAKVFKRVTVAVNPQYTTQECSSCRTIVKKSLSTRTHVCKCGCVMDRDENAARNILSRGLGTVGHTGTFALDASNAWGDGTSTLADASLPEQVLPVNQESPRMAGRGVSRVMFLTLRFSVATRLLPLAISAAT

SEQ ID NO: 53908 - protein, 403 aa, Scytonema sp.
MSQAMYAIKVELKLNNKERILLRKHTGFSRFVYNYGLALMQGLEKDGIKGGCGKKIKAIKKVLTNHTKKQPSYQWIGGLSSKVYQSSLQALENAIRRWYKGLGDKPRFKRRKDSESFSVYDGNGKVLLKKGKQIKIPTLGTFRLKESLPCCYVTQTFTISHRAGKWFVSFAVDADKIPPTYQPEEKVGIDLGVKCFATFSDGTSVESPKPMKKAKTKLAKLQWRNRKKQIGNRRKGIKQSNKAKKYFDSLARKHWRVANQRQDFLHKLTTDISRKYYQIRIEDLNVSGMLANRKLSAAISDLGFYEFRRQLIYKSQMYGTKVELVDRWYPSSKLCCMCGTKHDALKLSDRIYKCINSSCVAHTITLDRDINAALNLLNAPSGVCTVGSIGTNARGQVAADCLG

SEQ ID NO: 53909 - protein, 414 aa, Scytonema sp.
MATKRITFRLYPSKIQADKMHYWRRLHKDLYNACIEHRKTSYKKFNKSVDYFDQQNCLPEFKECWSEYKELGSHALQDTVKRVDFAFKRFFKLKSGYPKFKSSRHYKGWTYPCISGWKACTNGKNGYLKISNLGNLKMRGQARDWGKPKTCTIMFKQGKWYASITVDCVPSRYQTDTGAIGLDFGTHHAIADSNSNVIENPRFVKFAQTKINKIAKTSRRKRSPTRSGKPSRRWKKTNKAVAKIQSKVARQRQDWQHKVSTQIVSCNSLVATEKLNLKGMTRKSKGKKKRQKSGLNRSLLDVGIGNLKDLIKYKVTEAGGFYVEVPTTKVKPSQTCPNCGHQKKKTLAERVHHCEKCDYQCDRDVAAAMVMLNYARGMERASTDGDELTSTGVRKLQASDSNEASETASSAEGG

SEQ ID NO: 53910 - protein, 212 aa, Scytonema sp.
MERLDSFVGLEYFYSDSNGYHEENPRFLRKGSKAIKHAQRRIYTKEKGKNNRRKARGRYQRKHLKVSRQREEHAKRIARNVCKANALVAYEELNVKGLVKNRRLAKSISDVAWSAFRRWLEYFAIKLGTQVVAVPPHYTSQKCSGCRNIVNKGLSTRTHACKCGCVLQRDVNAAINILSKAKSTGGHPGSNAWGDVSSTNVGSNTCKSKKRR

SEQ ID NO: 53911 - protein, 400 aa, Scytonema sp.
MLVFEAKLQGTEEQYRLLDEAIRTARFVRNACLRHWMDGKNIGRYDLSAYCKVLREQFDWCKKLSAQACQASAERAWSAISRFLDNCKKAKPGKKGYPKFKREQTHGSVEYKVDGWKLSEDRRNITFRDGFSAGTFKMWGTRDLHFYQIKQIKRVRVVRRADGYYVQFCIDQERIEKREPTYTTVGIDVGLNHFYTDSDGNTAPNPRHLRKSEKSLKRLQRRLSKTEKGSKNRAKFRQVLARKHLKVSRQRKDFAVKTARCVVMSNDLVAYEDLKVRNMVRNRRLAKSISDAAWTQFREWVEYFGKVFGVATVAVPPQYTSQNCSNCGSEVKKSLSTRTHNCSHCGHIQDRDHNAARNILEKALRTVGHTGSHASGETDLCLGEAIPQDKPTRGKRKPKK

SEQ ID NO: 53912 - protein, 462 aa, Scytonema sp.
MKTTFQYRFYPNTKQKLELNEWLRISRYWYNRQLGDRFDWWEMNRTRVDACPLVSSIADLRDKPNFYAQKKQLPILKQDLVKVWYSGELLDFSGVDASILQEVSKRVDKAFERFTVGDSNGNKSGKPRFKTVADFKTMTFADGKAIKISLVRKHWMYIRLPKLGVVKVRMHRDIPVGFTVKQVSVTRKADGWFMQIMLEDPTVPEFNPDEVIPTWENSLGMDAVLHEDVYLATSEGEKLPSLKPLRKNQAKLDRISTKRNKRKRGSRSRRKLAKREAKQHQRIARSRKDFQYKTAHQLVRTGKKVFFHEDLNLKGLIKRNKAKQDEAGTFLPNGQAASSGLNKSWSDAAFGNFFKTLDYIAAKAGAVVIPQKPAYSSMVLCYRDEIIFTECDIRDYWDEQHSLRVDRDINAAINLKRLGLGIFPSIKRRSAKLAVVGTMDTSTTKEILHTLHRAVGSLPCNL

SEQ ID NO: 53913 - protein, 478 aa, Scytonema sp.
MAKSKKQEQPEYTYTQVVPVIFCSDEAQVDRIMHLCGVPRALTYNKLGSLQGWGLDWKKADPIVRTVLKPENTGLPGKLWEWSVNDTMKAISAQQEAAKTFLVRDIYRHTNDPDERKRLVDLLKTNPTEDNWLHRQFRKQYLRGHTFVRNQIVYHGAGYFCKRLTRNTVQLEVAGLHRGKRIILKLRCRHIIKGQIRLIRCGQGALEVHCIRTKTLVLPQGKPTKQIGIDKGYTEGYYTSEGTRIADGLGKLLTAKTNRITRINRNRYRLFAISRSKPTKSAIILKNNLGYKTKSRRLQREKATIQNFIRRDLRRNITTSVEIFCEDLAQPIKGKQLAKSINRKLNQWMKGELQASIEKISLETGSTVSVVNPAYTSQVDHLTGTLLGRRERDCFIRYTGDVIQADLNASINICIRGTDNNITRYMKASDVESEFLTRTVRYLVSIGKSVTDALNLGWLVPKFKAKALKLEDEYHSQG

SEQ ID NO: 53914 - protein, 412 aa, Scytonema sp.
MYAIKVELKLNNKERTLMRRHSGYARFVYNYGLALTQGLRSAGVKASVAKQINEIKKVFTNYTKKQPENQWMNELSSKVYQRAFIDLAQAYQRWAKGLSSKPVFKSKKDGDSFTVYDGNGKVLALSGKKIKIPTLGTFRLKEAFPCCYVTQTFTMSRQANKWYVSFAVDADRIPNGRASFDSTETARTRTCSPPTYHPEEAVGIDLGVKCFCTLSDGSQIKAPKPYKKAKTKLALAQWRNRNKQSGNRRQGVKQSNRAKKFYDSLAKKHARISYQRQDFLHKTTTDISRKFYRIRIEDLNVSGMLANSKLSSAISDLGFYEFRRQLIYKSEFFGTKVEVVDRWYPSSKMCSLCGNKHDNVKLSDRVYQCQNKSCLAHTITMDRDLNAAYNLLNAPLDYVRLAQPEVTLVDKK

SEQ ID NO: 53915 - protein, 392 aa, Scytonema sp.
VIDLRRVTRTIKLKFPQLNKTKTELFEEMTVEATDLANWLLTIPLPERRKLTTSKVQTRLMSALSNQIIRHTTSDAGKKAKSFKRLPPEVNNQNWALHKVGTTYSISFPTIKGTKRVPVEVASKHWQPVLEGILNGTVERGSAKIIKHRNKWYVYVSVTEEVPEVVVTNKIGCDRGQNNLAVVASKNGFGKFFSGKEVMHRRRYFQQRRKQLQEAKKFRALKKWDKKERRWMDAVNHTVSRRIVRFAEYKCADVVVEDLEECRKTMKQSKKQRSDSGQSRHSWSFYSLEMKLDYKLAMSGLKLIKRPAPYTSKSCSSCGTLGIRNGHHFNCPHGHYHNADLNAARNIAQWDGFACSLDLKRDIAAMVMSDSENGLLGAAPNWMKIQSTGIGD

SEQ ID NO: 53916 - protein, 409 aa, Scytonema sp.
VYQVLHKAVKVRLYPTQEQEVLLAQHFGCARWWWNYALNKSIETYKETGKGLSQSALNVLLPKLKKDEETLWLSECYSQVLQAVTLNLTTAYKNFFDGRARFPRFKSKHGKQSIQYPQNVKLVNGSVKLPGKVGTVKAKIHRDIEETIKTVTVSKDPSGKYYASILLETEGENLLPSSEGRVIGVDLGLKHFAVTSDGSKVSKFDNPKHQARHEKNLKRKQQKLARKQKGSNSRHKYRNVVARVYERVSNSRADCLHKLSRKLVNENQVVVVENLYVKGMVRNHNLAKAISDVGWGMFTNFLAYKLEKKGGKLVEIDRWFPSSKLCSNCYHQVDEMPLEIREWTCPHCGTHHDRDGNAATNIRAEGIRMLKADGASVSAVGGEVRPKAGRKSVLRRSLTSTEAPDAALA

SEQ ID NO: 53917 - protein, 442 aa, Scytonema sp.
VIKVLKAVKVRLYPTTEQEIFLAKSFGCARWYWNYALNACIQHYEETGKSLKLSVYKAYLPKLKLENPWLKEDCYSAVLQCVAINLNKAYSNFFEGRAKFPRFKSKHHKQSIQYPQNVKVVGDCLDVPKIGTVKAVFHRPIEGKVKTCTIVKTPTDKYFASILLEFDGETGQVSGDKTLGIDLGLKDFAIVHDGEQVTKYSNPKHLKRHEKNLARKQKKLARKVKGSNSRNKYRKLVAKVHERVSNSRQDFLHKLSRKLVDESQIIVVENLHVKGMVRNRKLSKSISDVGWGMFINFLDYKLKWKEGQPSGFAVATTGRQLLQRGEPPQRTASGTPARRCSLVEIGRFFPSSKMCSCCGHVLDELTLLFREWDCPKCETHHDRDGNAALNIRNEGIRILQNNDGGNPVIAVPRRSKTNKPKGRKASVNDAGSAHLLRQQKCG

SEQ ID NO: 53918 - protein, 338 aa, Scytonema sp.
LPAFKEIWTEYKEINSQALQATLKRVDFAFERWFKGLGKRPKYKSIRHYLGWTYPAKTGYSVESSGENGYLNLSKIGRIQMRGKAKYWGTPTTYTIVYRNGKWYASITVDVLEQALKPEVLPTGAVGIDLGCNSALSITDGENHQQIDAPKFLRSAEHQIKKAYKEKRRKQAPNRNKKIKASRRWKKAQAKVSKLTRKVANQRQNWVHQIAADIVSGNSFVATEKLEVKKMTSIAKKGKRKKQKAGLNKSILDVGFGMLRSTIKYKIKQIGGVFIEVPTKKVKPSQTCPKCGHQYKKTLDINPSCGLSNSECFVTFDSGDRSLQSWNCAMHNPNFKKR

SEQ ID NO: 53919 - protein, 246 aa, Scytonema sp.
MDEVPQVTGTNALSIDPGLNNWVSAVCTNGKSFLISGRRLKAVNQWWNKTKAGLQTAVDKQFGGDSFFTQRMARMTDKRNRQMRDATNKVARQVINWCLNNEVGYLIFGCNKEQKQGIDIGRRNNQNFVQIPTAKLRKRIEQLCQQYGINYVETEEAYTSRASFLDGDLVPTFGEKPVRAASPKEIGYEFSGKRSKRGEYTTKHGIRCNADLNGAANILKKVATRLGLDLSRIGRGCLTQPMRFYA

SEQ ID NO: 53920 - protein, 492 aa, Scytonema sp.
LTLNNSDIYTRKYTAQESQQPGGDFQVLLNYQYRVYPDINQKHQINSWLRITRYWYNRQLGDRFNWWQHNRNDVNSCPLTCSLPELQENPDFYSQKKQLPILKEDLVIVQHSSELLDFTSVPSQTLQDVSKRVDLAFKRFLQGDSNGKRSGKPRFKNSARYRTLRIEGQAIAVQRTEKDWLFLSISKLKGWLTVRLHRPLPNGFILKNMLLTKKSDGWYATICLEDPTVPAFSPDEIIPTWDNTLGIDAVLHEQDYLATSEGTKLPALKSFRKSEKRLAQVQRRKEKKRKGSKARRKLAKRQGREHQRIARARIDHAFKTAHALVRTLKKVFVHEDLNLKALSKRNKAKLDEDGKFLPNGQSAKSGLNKSWNDAAFGHFFTTLEYIAGKAGARVIAVNPAYTSQLLAYRDEIVFTDCHIRSYWDTELSLNVDRDINAGINIKRVGLGLFPTLKRRKGNLVVGDSTTNSTLKEVLAVLKNAPEAYTLSVLRQV

SEQ ID NO: 53921 - protein, 295 aa, Scytonema sp.
MIVYPQLGKAQFLRGNQIKLPQLGWLEYVKSREIPDGFIVKQARIVRKASGYFVMLTLECDINVPSPVSSGHPVGLDLGLDKFAATSDGLLIERPRFLNSLHRKLKLLQRRLKHKQKGSNNRHKLNRKIARLHQRISDTRKDWHFKLAHKLCDDIGMMFVEDIDFRTWAKGMLGKHTLDAGFGQFIEILKWVCWKRGVYFEKVNKDYTSQVCPQCDTHTGKKELKDRIHSCLECGYTTHRDVAAAQVIRNRGVSALGRSVEENACGDGLAGTGNSLVKSRKSRNKSGEARLQSAS

SEQ ID NO: 53922 - protein, 443 aa, unknown
  TnpB Polypeptide
MKIYSTYSVKIRHYNHIFKDTVIVYRKAVNFLIDVCLDKWTDISALKGNLLRQQHVEQLCHMTKDNPLPQYPDFDKKFYKMPSYMRRGAINEAIGKVSSYKSNLANWNENPVGNKPSCPKAGYVFPSMYRTVMYDQTDMYTAQIKIYVRNTWDWIAVDLKKSDMDYIYRRCTTRKQCAPTLQKRGKEWFLDFPFEEKVTISDIPVYEQTIVAVDLGINTAATVSVMHPDGTILGRHFCKLSREIDHLTHSVNRIKKAQQHGNHKTPRLWEKAKGISHDIATKTANFIMDIAVLYNADVIVFEHLDRNGRIHGSKKQKLKLWRSQEVQAVVTNKAHRLDMRISHICAWGTSKLAYDGSGTVLRGKDGGFNTYELCKFQNGRTYNCDLSASYNIGARYFVREILKSLDENSRLLIEAKVPQCSKRSTCTLSTLISLNAELMPIVA

SEQ ID NO: 53923 - protein, 453 aa, unknown
  TnpB Polypeptide
MPQIITAKLKLLTTPEQFALLRQTQLAYRDALNAVSVYAFEHGKMSNAERLQKGMYAEIRMSYKLPAQMACNVPRQVGATYKGLWTKLKHNIEHRRTKRTTKRFKGLDKPPKYVSPTLTYNYGYDYSFKKEQRVSIATLQGRIILDYKGYAPHVALIQHGATIGAAKLWYDKPHKQFYVLVSLELEVAEPTPTTQRQVVGVDVGQRYLATTTTLSSESQFFSGKAVRAKADHYARTRKRLQQKGTRSATRRMMALSGRERRFTLNTNHVIAKQIVTAHPHTLIGLEDLTGIRERTKRRKRRRKGTQVLPLTLKQRRANRHASKWAFAELHDIIMYKAALSGSSFVVKVDADYTSKACPMCGYIDKHNRPGNGLMFVCQNKECGYHVRNGYAYHLHADLIGARNIAMRTFLIRQDWVRTGQLSVAPDVSDKEAKAARLKRYAELRWSPDASPSL

SEQ ID NO: 53924 - protein, 444 aa, unknown
  TnpB Polypeptide
MAKKSRSNKVLIGVQQNLLSLDRQTRAIITYLCEQSNSLYNCGTYWARQIFFKTSRIVSKFDVIYECGKNIHAQAMPSTPAQQTLLSVSEAFKSFKELKNKFAQGELDFRPRPPKYRPSGGLFKVAYPNTGAQRPKLSSDGKTLTFSLGNQVNRWFSVKSFDLPMPENLDYSKVKEFTILPKNGAFYLEASYEVEALAHILNVDEALGIDLGCASNLMACVDTLGNSFLVDSKQAKAMNQLYNKRIAHQKKGKHQDYWDVICDAITRKRNNQMRDMVNKSAKLVVDHCFNYGLGTLVIGWNQGIKDECNMGRRENQKFVQMPLAKLKTRVSQLCELHGIRFVETEEANTSAASYLDGDSLPEHGNKPSGWKASGKRSPRGLYTTANKNRVNADLNGAANILRKVAGNLGIDLGRLGRRSLATVGRIRLWTTPKSNTCPKESQSL

SEQ ID NO: 53925 - protein, 312 aa, Ktedonobacter sp.
MIRAHKIRLHPTSEQANSFACAAGVARFVWNWALAEWNRQYEAGEKPTALKLKKHFNQIRREQFPWTWDVTKNASDQPFLDLGKAFTAFFEGKARRPKFKSKKRSKPSFYLANDQFEVGDHRLWVPKLGWVNMAENLRFQGKVLGARITRTADWWFVSIQVELPEEIAVKKAAAVGIDVGLNRLATLSTGEQVENQAFLKTALKKLRQANKRLHRRKPGSRESGKSAQAGGTPALPDCVLAPGCPSEALDQAGGQLWNHRGGEPASQGAAQKPAPSPRVLRRLVGHSGAPAGSQGHPTRWTGDQGRPFLSFQ

SEQ ID NO: 53926 - protein, 184 aa, Ktedonobacter sp.
MRSIWHVLRDDMPRRKKAARTETRHARRLRVFMPISLIDAVMRLHKLSTRLIRENQTICVESLAVKNMVKNEKLAKAISDVGWSEFVSQLEYKADWYGRTLVKIDRWYPSSKRCFECGHLLDALTLDVREWTCPECGVHHDRDINAANNILAVGLTVHACGESRRPGAVKTKPGSSRRSRKASK

SEQ ID NO: 53927 - protein, 401 aa, Ktedonobacter sp.
VYQIKRITIGKTAQLDELAHACGEVYTATLVSFWRVVRKQGIWLKPKHLMRWHTSPLLHAHTADACVQAFFASLKSWRERRKSDPTARPPRRRKWYFRIEYKRSAMRLKDGKLILSNGKGNEPLVLDWAWTLPQTLVIRWTGTQYEALATYEPCYLPVPEGGNKIAGIDLGEIHMAVSHDGEQTYILNGRLLRSKRQYRHKLLARLQKKIDAKKPGSRRRKQLVKSKRKQLKKLANQIKDIEHKATTRLISTLHTDGVQILAIGDVRDIRQGLDVGSKNNQKLHQWSFGSIRQKLTYKAERRGMQVEMQEESSTSKTCPVCGKRRKGAVQGRNFHCINKDCKWKGHRDMVGAMNIRYKYRGEFGNPHVVGATMAAPIGLRHRSQTDVARKEKGYLREAAGL

SEQ ID NO: 53928 - protein, 225 aa, Ktedonobacter sp.
MPDPIPVKKRAACGIDVGLNRLATLSTGEKVENQAFLKTALGKLRQANKRLHRRKPGSKNREKARRQVARLHYRITSLRDDVLHKLTTQLAESYGCIGIEDLNLKGLLKNRRLSRSFSDAALGKLLSLLGAKVEQRGGQVIKVGRFFPSSKTCHCCGWKWEAMTLKDRTFVCQNPSCPYSQFPQDRDHNAAQNVLREALRLIGLMDQVVFGTGSDETEKTPVDLG

SEQ ID NO: 53929 - protein, 209 aa, Ktedonobacter sp.
LPTVDPFFLLFWKQLHSLFFPGKQIRAKADHYARLRKRLQKKGTRSATRRLLAISGRERRLKQDHNHLISRRIVHAHPQSLIGLEELTYIRERTKRKRGRKASKKQRRANRHASSWAFAELHGYIAYKARLSGSLAIKVDAYHTSQACPRCSFASPDNRPLLGRLFVCQECGYRLHADLIGARNVALRTLLTRQDWVRTGILCAPREAQ

SEQ ID NO: 53930 - protein, 455 aa, Ktedonobacter sp.
MQDANDAPGSQPDEALLPVRTRAYVYRLYPTRKQEETLLWTLRRCKELYNASLEERTAAYKMARVSVSYGMQAEQLPQIKEERPEYQGIHSQVQQDVLRRLDKAMQAFFRRVDEGQPPGYPRYKSNTRYHSFTYPQSGYTIIGALAPHDKKGKKTCRLKLSKIGHLKMLMHRPIKGTIKGCTIKRDGDQWYAVFSVEQAIHSTPVHPSSKTVGIDMGITSYATLSTGEQIANPRIYRYTEQQIKEAHRRLARRKQGSHRRIRARRALTRLYRKVRHRRQDFLHKASRRLVNQYGTLVFEALQIPNMTARPKPKKEEAPATTEGVEGGTAAAVTRYLPNGAAAKSGLNKSILDAAWGRFITLCACKAEEAGGMVVKVAPQQTSQVCSGCGVLVPKDLSVRWHSCPTCGAELDRDENAAINILRRYELQGAIPARKKRQSTRKGGRGGKRPTATGAL

SEQ ID NO: 53931 - protein, 523 aa, Ktedonobacter sp.
MKRTKTPTFLLELPLQVDWSQERQVRAHLEAARCLYNALLAEAMKRLRCMRNDPAWNKARALPHSKKQERAQAFSALRKKYHFSEYELHEYAKLARVSWIVDHIESTMAQTLATRAYQAVNRVCVGKAKRVRFRSKGRGIDSVEGKRNDVGMRFVLDPNAGDGGFLIWNKEVIPAIIDWRDPVVQHGMRHPIKYVRLVRRKASSPQAQGADKDSNRYYVQLVLEGHAFVKPKHEEGGKDTIGLDIGPSTLALVPRRAKADLVTFCQELSPNASKKRRLQRKMERQRRANNPDNYDEKGRVKKGRRTWKESKRYQASRRQHATTERRLAAHRKSLHGNLAHRIASVGNTITIEKTSFKGWQKQYGRSIGLRAPGIFLAHLTRIVAKTGGTLHEVSAYQTRLSQYCQKSGQYHKKPRSERWHRCECGLGPVQRDLYSAFLIAHLEPEQTTPSITQHVWEGAEPRLQAVMEELQQRANEGQPLPRSMGLVARRKSGAARAGARRLKSPAYLHQEPVSPSGEAGNGG

SEQ ID NO: 53932 - protein, 383 aa, Ktedonobacter sp.
MRLVYPTHKQERILEAWLVLCCETYNAALDERKSAYRMAGISLSYEDQCAELPGCKEVRPDLAKVPYQVLQDVVKRVDLAFDAFFQRVEEGKMPGFPRFKSRFRYHSLTFKQFGNSFKIHRQGKKNRGTLELARLGPVKMVMHRAIKGTPKTAIVKRTPTGKWFVSITVELRANDLQASRLPHTSEPVGIDVGLKTFAYLSTGEAIANPRFFREDETKLARAGRKLARAPKGTKERAHKRKVVARTHERIANRRKNFIEQEVSKLIARFGFLAVEALVVRNMVKNPNLAKSIADASWSMFFTRLQAKAEEAGRQVVRVNPAYTSQTCSACGHRQPMPLSVRVYECPQCGLVIHRDHNGSLNILEDGLHAVGRHSRVIPEAPGL

SEQ ID NO: 53933 - protein, 317 aa, Ktedonobacter sp.
MLLCKKIRIDLSEQDVATLEFMQGKCRGLYNWWVLKLREGEKWNLYEAKKSLQESKLHDPELIQVYGKLLQEVYYRLDGAMKAFYRRVKAGEKPGFPRVRPRHCFFTLCYPAMYIKIEGDKLILPTGGGGKHGAKVYPNIVARLTETPPEHFKEVAISRDARGNYYASFVRERKEKHCETDGTVAFDLGIKTLATGVNEQGRVYTIGGFKGARWYNKQLDKIRSKRDKCKKKSRRYIHLSKVYKRVSQKKCNKQRDSLHKASHLIAHKLVERTVVVGDLSQRQMVMKEHRERNKHLNRAVYNEWGVLKTFPGNYARC

SEQ ID NO: 53934 - protein, 205 aa, Ktedonobacter sp.
VSSRIVQFATKHEASILVFEHLGNLRPEQGKYSRRGNTKRAYWMKGRMFRYAKYKAWNGGGLITARVNPRNTSRQCHRCHGLVVRYNQGQPQEGYTPGAALCFCPQCQMRDHADRNASLRVGQRLIERTQAPLKEKPHALTRRAKREPKGSGVGISQDAKRQMGPSISAARRGDHANGHGTTQRGRRRMGAPLSDIASQLRIHFE

SEQ ID NO: 53935 - protein, 490 aa, Ktedonobacter sp.
MLIASKEGQSAQMKRAKTPTFLIELPLQVDWSSERQLRAHLEAARCLYNALLSEGNTRLQQMRHDPAWARARAIPRSRREERAQAFSQLRKKHHFSEYELHAFARTARVSWLANHIDAAMAQTLATRAYQAVNRVCVGKAKRVRFRSKGRGIDSVEGKRNDVGLRFVLDPNAGDGGFLIWNQQVIPAIINWLDPVIQHGLRHKIKYVRLVRRKASSPQAQGADVSGNRYYVQLIVEGHACVKKTHEKSGTQTIGLDIGPQTLAIVPREGNAQLVTFCEQLAPNARKKRRLQRQMERQRRANNPEHYDELGRVKKSGKKRLWWKESQRYKHTRRQHATAERKLAAHRKSLHGKLAHDIVKAGNMIILEKTSFVAWQKQYGRSIGLRAPGMFVAHLTRIVAKTGGTLSEVSAFKTKLSQYCHACGAYVKKPRSQRWHHCPCGCGPVQRDLYSAFAAFSPGTPTDHPLCHPVGLGRCGAAPASRDGGSAPTCE

SEQ ID NO: 53936 - protein, 286 aa, Ktedonobacter sp.
MSGSVGGRGKRAATRQYLARGLPNPKLGWVNMAENLRFTGKVTGARITKTADWWFVSIQVEMPAAAPQKKPAAVGIDVGLNRLATLSTGEGVENQAFLKTALSKLRQANKRLHRRKPGSKNREKARRQVARLHYRITCLRDDVLHKLTIRLANGYGMIGIEDLNLKGLLKNRTLARSFSDAALGKLLSLLTSKIAQRGGQVIKVDRFFASSKTCHGCGWKWEDMELSDRVFLCQNTDCAYAQFEQDRDYNASLNILQEALRLIGLIDQVATGTGSDDGVNLPVDAG

SEQ ID NO: 53937 - protein, 751 aa, Ktedonobacter sp.
VRLPLPKDFRIIGTLNSFDRNYLNQLSEALKRRFSFIEILPPSRRYRQEEQGIVIYKALQQLAHHTSLITTKEEELTWAGIISVRANTNGIYELVWQDKQHPFFSIFTQQLWPLFETTRIYRQLGTAQAIALTSQLLTPPPLLDERKESRVRYLELAFFPFLWYNRRQWIEITCVFEEGATMPKKCQGQRKKKEQQEKRPATPTFLLELPLAVDPGQAARLRSHLEAARQLYNAILSQGQQRLRRMRSDPAWQEARALPRTHKAERAAAFSALRKTYGFSEAALHEAIKGLRVGWIAAHIEAVLAQTLATRAYRALNRVCLGKAKRVRFKSRGRGFSSLENKRNNTSLRFVLQPPEEGNAGNLLWNGDRLPALIDWKDEVVTHGLRHRIKFARLIQRPASSPRAAGADEEGYRYVVQLALEGKPHQKKKHTVGTSIVGGDLGPSTLALFPQQGEASLEVFCAQLAPDAKAIRRLQRQMDRQRRAANPEHYDEKGRIKKQGKKKLHWKQSKRYQATRQRKASKERKLVAHRKSLHGHKVHQVVKLGTTIIIEKISYKAWQRQFGKSVGLRAPGMFVELLRRTVESTGGILVEVPTRTTALSQWCHGCGKKLKKPLSQRWHQCECGVGPVQRDLYSAFLAAYLDPADPIPSCARYQGYWEGAEARLRAAHERLTQRAKEGQTLPRSMGLTRARARLPESSGGPPLEPAFLLKREGREAWAEPLEPRRFSAGSFSTTTFPQNVQSRTMNIGKFW

SEQ ID NO: 53938 - protein, 255 aa, Ktedonobacter sp.
MAQRYRAQGAQLLGRIARNRSQTGIIAENEQDNADLWAKIRHVDEQIAHLVSARIVQFASEHKASILVFEHLGNLQPEKGTYSRRSNTKRAYWMKGRMFRYATYKAWQAGGIITSRVNPRNTSRECHRCHAAVIRYNQGHPVEGYTPGAALCLCPQCQMRDHADRNASLRIGQRLIERTQAPLKEKPHARSQRAKRESKDSGVGISQDAKRQMGPSLPAARRGDHANGDGTSQGRRRRMGAPLPDIASQLRVHFE

SEQ ID NO: 53939 - protein, 534 aa, Ktedonobacter sp.
MFDNFTSVWYSRREIPYILREEVLNMAKATKTIRQALHYPPQYAAYFAANQVLFNRVVAFYFDCIQAHEGLLSLNNKEALTALERLTHVTGANPNPIMPLTDLAPDIPALFRRAAINAALGSGRSFFSSLKTWRAHKQKHEAKQTKKGKRRPFRVRSPVPPRSWKKSAPFYASLWRERCTRSIMLKVWTGSCWSWLKLHTLGRDLPDDDLMGSPQLVRKGDRWWLHTPLEKTFEAPAKVREQLTAADTRLCAVDLNLDHHVAVCSVQTVDGTILATSFIGNGTAVSGTRRATAWTYCAQPITDWHHCRERTGQCRPLGQNQARGRTERAPGERSHCPVRYQARGKYSRLRASRQPATRAGHVFASGQYQTGLLDEGPHVPLRKVQGVEWRRYHHGPCESAQYQPAMPSLSWPGRALQPGTTPGGLYSRRRPLLLPTVPDARPCRQKCQPESRTALDRAYASPFEGKASCSDATCEEGAERLRCWDLPGCQTPDGTISPRGKAWRSCQRAWHRPERKAPDGRAPLRYCVPTTDSL

SEQ ID NO: 53940 - protein, 312 aa, Ktedonobacter sp.
MQLVERHIICKGDSRYTAIDAASFASKNLYNLANYHMRQSFIHTGTYLSIAEVYHLVKDTEAYQALPRKVSNDVLRLLEKNWKSFRKGLAAWFEDPSKFQGRPKLPKYKDKQKGRNILVYDRQALSKKALKKRGMIAPSQLGIEIPTKQNNVKQARIIPRSGFYIIEVVYEQEPKHAGVDPLLVAGIDIGLNNVATLTSNKAGFTPLLVNGRPLKHINQWYNKERARLQSHLSKHKRHTSTRLERLTQKRTRKIDHYLHTQSHRIIEHLVEEGIGTVVIGKNDGWKQEINIGKRNNQQFVQIPFARFIDMLN

SEQ ID NO: 53941 - protein, 524 aa, Ktedonobacter sp.
MKRTKTPTFLLELPLQVDWSQERCLRAHLEAARCLYNAVLSEANKRLRRMRNDPAWAKARALPRSHSQARAQAFSALRNTYHFSEYEMHDYVKSARISWIADHIESTMAQTLATRAYQATNRVCVGKAKRVRFRSKERGIDSVEGKRNDVGMRFVLDPNAGDGGFLIWNEQVIPALIDWRDPVIQHGLRHTIKYVRLVRRRASSPQAHGADHDGYRYCVQLILEGHAFIKPKHTQQGSDSIGLDIGPSTLAIVPRTGKADLVTFCEELAPDTRKKRRLQRKMDRQRRANNPENYDEKGRVKKQGKTRLRWRESKRYQATRRQHANTERRLAAHRKSLHGNLAHTIAQMGNTITLEKTSFKGWQKQYGRSVGLRAPGMFVAHLARIVAKTGGTLVEVSAYKTKLSQYCHHCGRYVKKSRSQRWHSCDCGLGPVQRDLYSAFLLAHLDPEQTIPSVTQPVWEGAEPRLRAVMEGLRQRANEGHVLPRSMGLLASDKAARARARRLKSPAYPHQEPLSFSGENGSVG

SEQ ID NO: 53942 - protein, 397 aa, Ktedonobacter sp.
LYEIRQSFIHEGKYLDYNEVQRRMQPHEAYKALPAKVSQQVLMLLDNNWESFFEALMAYKEDPSKFQGRPKIPKYKHKAEGRNILVYTIQAISSKGLERGIVQPSKLAIEVQTKQKTIDQVRIVPRNGFYVVEIVYKKEVKQADVNPDYYAGIDIGVQNLVALTSNKPGFRPVIVNGRPVKSVNQFYNKRRADLQSKLGQTGTTRRMERLTNKRNRRIDHYMHTASKRIIDLLVKEQIGVLCIGKNDAWKQEANLGKRNNQHFVQIPHVRFIDLLTYKAHLVGIRVVITEESYTSKASLLDLDPLPVRDPDNNSEKHAFSGRRVMRGLYRASDGRTLNADVNGAGNIIRKVASDAFGLEGVEGGKGVLASLVVHPVRVVIPLTKPKSKRKVVKASGQ

SEQ ID NO: 53943 - protein, 416 aa, Ktedonobacter sp.
VKSVQLVEQHCISKIDPSYEIIDEAAFKSKNLYNAANYEYRQAFFHEGTYLNYSEVQKRMQLHEAYKALPAKVSQQILMVLDSNWKGFKEGLKAYYEAPSKFRERPHPPKYKHKTEGRNILIYTIQAISRGKNGLKRGLIKPSMLPVEIQTKQKDIHQVRIIPRNGYYVVEVVYSKKPVQKHVDPSFCVAIDLGVTNLVAITSNRESFIPQLVNGRKLKSINQWYNKRMKELKLCLPKEERDRTTKQMERITNHRNRQVNHYLHAASKRIIDFLVKEGVGTIIAGKNLFWKQEVDMGRRNNQNFVQIPHARFIDMLTYKAELVGIQLEIQEESYTSKASFLDLDPIPTYKPNDETEYTFSGKRIGRRNRLYCTKDRNIICADVNGSYNILRKSRPDAFAKGVAAYVVQPSRLAITV

SEQ ID NO: 53944 - protein, 485 aa, Ktedonobacter sp.
VSKKPQKASLDEKKKRKRKKKTKQTITRAVTHIRLIEANPGKLEALDQLVAVYLPLCQQYTTLFCEAETSPDKYQETVFKTDLSDRLHRVAIQQAAGIAKSVRTNRANAYQAYLEDVADYAQAKAKAQAEGRMSAFKRREPTWTEWDLPVLRVPVIQANVNVVVLEKSEDSTFDYWLRVSTLDVGNPLRVPVKLASYHKRALEGRTLNASTTLHKRNGVWWLTLSFDEDVPLQTKPDAPTVGVDVGIAHFLTTSTNKAYGSFHGKMARQHKHDREKRRRKAKLRACLEKKGVPKGKLPSTSSETSQRLSRHVKQEINRAVNALVKDHRDARLIYEDLNVASMRFKARVMNSYLYASHLGHIPEQLAWAAAKQGMAAHTVRAAYSSQECPRCHYVDRANRPNQKTFKCLVCGYADQADRKAAQTLAGRWGDRKLAACRSTSEVKALLMTRHEAWKQQNQQRIQDAGPPVQLSFWDPPEMFLESSHE

SEQ ID NO: 53945 - protein, 524 aa, Ktedonobacter sp.
MKRAKTSTFLLELPLQVDWSSERQLRAHLEAARCLYNALLSEGNTRLQQMRNDPAWTSARAIPRSRREERARAFSHLRKKHHFSEYELHAYAKTARVCWLADHIDATMAQTLATRAYQAVNRVCLGKAKRVRFRSKGRGIDSVEGKRNDVGLRFVLDPNAGDGGFLIWNQQVIPAIIDWCDPVVQHGLRHTIKYVRLLRRKASSPQAQGADVSGNRYYVQLILEGHAFVKKKHEQMETQTIGLDIGPQTLAIVPREGRTALVTFCEQLAPNARKKRRLQRQMERQRRANNPEHYDEKGRVKKQGKKRLWWNESQRYKNTRRQHATAERKLAAHRKSLHGKLAHDIVKAGNTIILEKTSFVAWQKQYGRSIGLRAPGMFVAHLTRIVAKTGGTLSEVSAFKTKLSQYCHACGAYVKKPRSQRWHRCPCGCGPVQRDLYSAFLLAHLQREETIPSVTQSDWEGAEPRLQAVMEGLQQRANEGHILPPSMGVVASSKAARARARRLESPAYPHQEPLSPERESGSVG

SEQ ID NO: 53946 - protein, 255 aa, Ktedonobacter sp.
MAQRYRAQGAQLLGRIARNRSQTGIIAENEQDNADLWAKIRHVDEQSAHLVSARIVQFATKHEASILVFEHLGNLQPEQGTYSRRGNTKRAYWMKGRMFRYAKYKAWNGGGIITARVNPRNTSRQCHRCHGLVVRYNQGQPQEGYTPGAALCFCPQCQMRDHADRNASLRVGQRLIERTQAPLKEKPHALTRRAKREPKGSGVGISQDAKRQMGPSLPAARRGDHANGHGTAQRGRRRMGAPLSDIASQLRIHFE

SEQ ID NO: 53947 - protein, 511 aa, Ktedonobacter sp.
MAKATKAIRQALHHPPQYAAYFAANQVLFNRVVAFYFDCIQAHEGLLALKNKEALTALEKLTHGTGANPHPIMPLTDLAPDIPAMFRRAAINAALGSARAFSSSLKTWRARKEKHEAKQTRSGGKKKPFKERPPVPPRSWNKSVPFYASLWRERHTHCIVLKVWTGSCWSWLKVHLLGRDLPDGYAMGSPQLVRKGDRWWLHTPIEKTFEAPAKSGEQLTTAQTRLCAVDLNLDKHLAVCSVQTVDGTILATSFIGNGTAVSGCRKQLLGRIARNRSQTGIIAENEQDNADLWAKIRHVDEQIAHQVSARIVQFASEHKASILVFEHLGNLQPEKGTYSRRSNTKRAYWMKGRMFRYATYKAWHAGGIITCRVNPRNTSRECHRCHAAVVRYNQGHPVEGYTPGAALCLCPQCQMRDHADRNASLRIGQRLIERMQEPQKEKPPPAVRCASRVSKETGVGTSQDAKRQMGPSLPAARRGDQTNGHGTAQGRKRRMGAPLPDIASQLRVHFE

SEQ ID NO: 53948 - protein, 410 aa, Ktedonobacter sp.
MKTTISAKIKLQTTPEHFTALRATQLAYREALNAVSHYAFTQGKISNAKKLHNGMYAEIRTHFGLPSQMACTVSRQVSATYKGLWTKVKHNATQRKAGLTKKRYKGLDKAPKYVSPTLTYQYGYDYSFKKNQRVSVLTLNGRMVVPYTGYDTHVALIQKGADIGGAKLWYDKPRKQFYLLVSLEIEVADPTPQTQTSVVGVDVGVRYLAVTSDTTGACSFHSGKQIVPKANHYARLRKRLQKKGTRSATRKLVIISGRERRLKHNANHVVSKRIVTQYPHSLIGLENLTDIRERTRRRKGKNTTKKQRKANATYSKWSFAELHTMIAYKALMQNSMAIKVDAHYTSQACPRCGHTAPENRPKKGLLFVCKHCQYTLHADLVGARNLTMRTLLARQDWASTGHLCAPREAQ

SEQ ID NO: 53949 - protein, 280 aa, Ktedonobacter sp.
VICAHKIRLHPTKEQTLYFAKAAGITRFTWNWALAEWNQQYEVGEKPTVLKLKKQFNEIRRERFPWTWEVTKNASDQPFLDLGKAWTAFFEGRAHRPRFKSQKRSKPSFYLANDQMELGDHRVWIPKLGWVNMSENLRWKGKVTGARITRTADWWFISIAVEVPNDHPIKRSAAIGIDVGLNRLATLSTGEGFENQKCLSTALKKLRQANKRLHRRKPDSKNREKARRQVARLHYRITCLRDDVLHKLTTRLANSYGIIGVEDLNRKRVAQKSQTGSLVL

SEQ ID NO: 53950 - protein, 545 aa, Ktedonobacter sp.
MDKKRQSKQQQEEQREKRPATPTFLLELPLVVHPGQAARLRAHLEAARLLYNAILSEGQKRLRRMRADPAWQAARALHRTHKAERAAAFSALRKRYGFSEAALHEAVKALRVGWIAEHIEAVLAQTLATRAYRALNRVCVGQARRVRFKSRGRGFSSIENKRNDTSLRFVLQSPEEGNAGFLLWNGDQLPALIAWKDEVVTHGLRHRIKYARLIQRPANSPRAAGADAEGYRYFVQLALEGVPHRKKKHKVGTSIVGADLGPSTLALVPQEGEASLEVFCAELAPDAKAIRRLQRQMDRQRRAANPENYDEKGRIKKQGKKKLRWKQSKCYQATRRRKAAKERRLAAHRKSLHGRKVHEVVALGKTIILEKISYKAWQKTYGKSVGLRAPGMFVELLRRTVASTGGTLIEVPTRTTALSQWCHGCGKRVKKPLSQRWHQCVCGIGPVQRDLYSAFLAAYLDPAEPIPSCARYQGYWEGAEARLRAAHERTIQRAKEGQTLPRSLGLTRAGARLLERPGERPLEQALLSTREALEAWKEPLEPPPL

SEQ ID NO: 53951 - protein, 224 aa, Ktedonobacter sp.
MSGSVGGRGKRAATRQYLARGLPNPKLGWVNMAEKLRFAGRVKGARITKTAEWWFVSIQVEIPDTIAVKKPAAVGIDVGLNRLATLSTGEEVENQAFLKTALKKLRQANKRLHRRKLGSRESGESAPTGRPSALSHHLPAPGCPSEAHNQTSRQLRDHRGGRSPPQGTPQESPSRSLVRRCLARHPQTSARGKSGATWGRGDQGGPFLSWKSRPVIAAVGRGKR

SEQ ID NO: 53952 - protein, 444 aa, unknown
  TnpB Polypeptide
MKITSSYGMKLTGDLKALENTIAIYRDSLYFVIPIVDMHWDEVKDFEYSNQRVMYVEKLIHSTANRQACYNFDEKFPKFPTYLRRAVLNRALGIVSSYRSNLVNWEKDPKGQAPQLSFTHYAYPAYYKKGLFKNFDPIRQTIELKVFKNGDWVFETYKLKTSDCTYYQNHLTGKKQNVPIIQKKGRRFYATFSYEENVPLVPEESIDKICAVDLGLGTDATCSIMDQDGTVYARKFISFSEEHDRLHTQLGRIKRNQKRGSRHNKTLWRKVAGISQDIADKTVKAILDFGNEHGVDVFVLEYLDFKGKNAVKRAHFWRYKRIYKVLAQRAHQYGLRIARVNARNTSRLAFDGSGWSKRGREITPETPYALMEFPNGKTYNADLNASYNIGARYFIRHLLKTVTATQRLALEAKVPQVAKRSTCALSDLINLRSEFVALTTKTQA

SEQ ID NO: 53953 - protein, 226 aa, Lactobacillus sp.
MDAVGHYFVSIQIGSERSFVAKQPAIESKVGIDLNLDNFLTDSNEQVIENPRYYRMIKGKLAKAQRKLSRRARRAKKAQRRLSESKNYQKQRLQVAKLQLKVANQRKNFLHHVSTALIKNHDLVVAEELRSKNMLRNHALAMSISDVGWRTLLSMLAYKADLYGRKFLTIDPRNTTQTCSQCGHIMTGKNKLTLADRKWMCPSCGMLHVRDHNAAKNILAKGLATL

SEQ ID NO: 53954 - protein, 440 aa, unknown
  TnpB Polypeptide
MQLVERHIIKRSDDRFAKLDNLCFRSKNLYNATLYAIRQHYFETKEHLLWTKVTKDFQDRNQADYIALPRKVSVYIMRLVGQNFQSFFGALKSKKAGTNDRPVKIPGYLNKTDGRYVATYTNQAISMEWLKKGFIKLSGENIFIKTRRGADLKRVCVGKDKQGKDKYEYKSEVQQVRVVPKGNHYVVEVIYNVEDVEVLPDNGRYCSIDIGVNNLAAVASNVLSPFLINGRPIKSVNHYYNEQLAKRKSQLETRYGRKSSNSIQRLTFKRNQKVDDYLHKSSRYIINQLVSNHIHTLVIGHNPGWKQEVNIGKINNQNFTQIPHTRFIEILKYKAQLQGIRVIVQPESYTSKCSFLDNETIEHHETYAGKRIKRGLFRSADNTLVNADINGALNILRKAVPDVTFTDRIKVCSTPILINIPKNSGVLISIKDIHSSAYTQ

SEQ ID NO: 53955 - protein, 387 aa, unknown
  TnpB Polypeptide
MKSYKFKLFPTPEQKEKLELSLDVCRRTYNNLLSELSNGFSKCELSNYLLDLKVVFPEMKNVYSKVLQVENDKLFANLSGLSASKKNGRKIGRLRFKGKGWKKTFTYNQSGFKILKNNKKNNQLHLSKIGDIKMILHRKLEGKIKQIIIKREIDNWYAIVQTDAILKLKCGTKEIGIDMSPSKFIIRNDGIKMSMPKEIDVSLEKLKKSHRNLSRKKKKSKNRLKAKKLLQKDYWRLNNQKVNFYHQTSFKLVKECKIIGIENLNIKGMMMGYYSAVNFQKSGWSTFINKYLLYKAENAGCEIWACDRFEPTSKKCSSCGWINKNLKLSDRTFNCSECGLSIDRDLNASINIKKTCKLGTNFCGADTSLVEIPKVSVLKQEKISNCS

SEQ ID NO: 53956 - protein, 536 aa, unknown
  TnpB Polypeptide
MPSRYQTYVKQLHPDTDAGLFLADYAAISSGASIVALKGLVKKQNKSKLNTTLQEHFHISKRHSAGIIAFVEGELKSAEECLSRHVTTLEAKIKSLKNDISSLEKKIAAHKSYLKAIVEVNHRFKSGRRAKLTKKYKPQFEDTCSLKFGRKCGTHYQSAKQKLHQLKRKSARLSAKLKQVKLSELHVKLGNREVISFVGSKDERCGNQVCQLILMTDDAIQIRVPSALEQRYGKYVEIPVNLVGIGSTEIRQAWAEGKAITFRIRQRQYGVWEAHITVDVYRPITSNSVMLGCLGVDLNADSIAWCKVNSDGNPTRFSQIAIDLHSKSSGQTEAILADAVTKLTSLALAFKCPIVIEELDFSAKKAQLKSGVRHRRYNRMLSGFAYRRFYELLSSRCFKLGIKLIAVKPEYSSLIGLVKFQSMYGMNSGTAAALVLARRAMNYSEAVPARTAFADMESKKHVWSHWNVISKRVKGTARHSFFQPKLTVSSSLRNGVEGDPPLELVFSVVQLSLWDLGLNVPSHQASASRNPVRESS

SEQ ID NO: 53957 - protein, 332 aa, Lebetimonas sp.
MKCVDKYKSNRNIVYSCKYHIVWCPKYRRKILVGEVEKRLKEIIQEVAKECDVEIIEMETDKDHIHILCEVDPQFGINKYKIDNNIIWLNGYKFKFWLSREIDGKIKTVTVKRDNIGDYWICIAIEKEYKKISATSGKIVGIDFGLKTFLTLSDGTQIQAPRYYLQTLKELQKLQKQHSKKKKSSNNREFARKKLAKLHKKVANSRRDFFHKLANKLAKEYEYIAIEDLNLKAMQKLWGKKIIDYAFSEFVNILSYKVNVIKIDRYYPSSKTCSNCGYVKEDLNLKERVWICPVCKTKHDRDINASINICKVGASTFGIDGVRPIIKQATIA

SEQ ID NO: 53958 - protein, 430 aa, unknown
  TnpB Polypeptide
MIRSSKLSLKYLNKQKKEFLFKFVDEYKRCLEIIIDFLWTSRLEVDGKILDVTNGFYECPMFAKDVPEIDTWLTGRCLKSITTQASGMVRAVLNRRIKEEDLLAWKISKGKKDEKLQKRMELPPTKPSVNEVNCELNSINVSIQESKTKTFDYWLELFSYTKESRGEKIYLPLKSHSRLEKWNEEGKLLNGVSIGKKNVSFRFDVPTPEIRKNGEITSVDQGAVDMLTVKGGWKPIFEEFHWMSDWTMMKVLKKLSNCQKGSKGFQRAIELRKNFTHAYLNKFREYIKEQNITEVKLENIENIKYGRRSSRVLSHWSNPLIRDVIKKVCEEEGVLLTLVPNPFNSQRCFKCGWTQKSNRKGKVFKCKHCGHEDDADENATENIYINFSLPKVSKWLVYSKLNISGFFWIQEGFYYANQEPIVPDPHETLD

SEQ ID NO: 53959 - protein, 455 aa, Ectothiorhodospira sp.
MKVTRILHAKRPNPGKVAALREQARRLGQVRSEVWQRFGSVGGVGMSDRQIRDQWLKDKRVFPVSANAWKETLRDAKGDITACMEAAKVKARRCIWHHTQDKTEQKRLFTALKANDWTSDAYLRRIMRRTWARGHTHTHNQIIVRSDNYTTFHLGGRAWIKIPGLVKGARIAIPLNTTVEPTGTLRIIITDDDRVEIHITIEAETTQDCGTRTIGIDKGYSEVLVDSDGEHHGPELGQVLREQSDRLKAKYQRRSKLRALANNTRNPRKRERIRHFNLGRKKLNRQMGKTHARVRDIVFQSVHAVVDKAAVIAAEDLTAPMAGKSFGKNINRRLAAWTKGVIVEALDSVSSRRGSAVVLVNPAYTSQMDSRNGCLLGKRQGDRFHCFDGVVLQADQNAAQNVLARLSDPDIERFTPHRTVKAILQARTERLRLGLLNQDSSCSPGSNRVLSTESE

SEQ ID NO: 53960 - protein, 369 aa, unknown
  TnpB Polypeptide
VKLIAQIQLKPSESAAQTLLATMRKANEACDFLSALAWEKHIFGQYALHKIAYAQTKERFGLSAQVVVRCISKVADAYKLDEKKQRTFKPLASIAYDDRILTYKLTKNTVSIWTVEGRLEIPFVCGEHQKALLQTRQGESDLCLVKGKFFLLATCNVEEPPTDSKGDVLGVDFGIVEIATTSEGKSYSGEKVKALRKKLREHRRRLQKCGTKSAKRRLKKAAKRQERFVRDRNHCISKELVKDAKTSKKALGLENLKGIRDRANGFNKEMRWQMGNWAFAQLRSFCTYKAQMAGVEVRVIDPRNTSRTCSECGHCEKANRKSQKHFKCLSCGHSENADSNASKNIAHRAVVNLPIVSSVFREGQAPQLV

SEQ ID NO: 53961 - protein, 355 aa, Sutterellaceae sp.
VCNFVVPTVAADRTKRLWQRFTLHHAVYDKIKAKFPDLGSQYACNVIRSVSAAYKTELANHPAQLKSEDKKLKTLVFRHPSVHVDKNTLTFFPDGTVSISTISGRIRARLCPGPFQKELLASGKRKECNLVLHPRRGRKEAFWELHIAVESQGCSGKEHLKNLKADEIMGIDVGENNIAAVSTGRIWKAGALKDKRDRYMSQRKRLQRNGSQSARQHLKKASGRERRHVTHVNNVVSKEIVQEAAKRGIKLIALEDLTHIRDHIKAGKRIRSRLHRWSFRELQEMIVYKAAAAGIRCVFLDPRYTSQTCSQCGAPGKRHKHGFRCSQCGHLAHSDLNASRNLQGLCRQLSAQGLM

SEQ ID NO: 53962 - protein, 254 aa, unknown
  TnpB Polypeptide
VKITSSYGVELRKQNIPIRQTLDIYRSAVGYLTEIYEQVWEELERIPEMKKRFNEAEHLIHTTKKNQARFSFDLHFPKMPSYLRRAAIQHALGTVSSYKTRLSLWEKSGQTGGWPKLVYENHAMPVFYRDVMYREDKEGKDAAYLKLYDGHDWKWFHVRLSHTDMEYLRKNWSGEKASAPTLEKRHRKYFLRFSYTEDVILTKILVKEQIICSVDLGINTDAVCTIMRSDGTVLGRKFIDFPSEKDRMYVYWDG

SEQ ID NO: 53963 - protein, 425 aa, Bacillus sp.
LSEGKGIKFPFPLETNIRSLYDDDKGGDFMYRTLKTAFTANQQTLQHLFGIRRICGTIWNDCVQLARYYYRIHGSWINQSDLQSELKGLYPLHSQTVQAVCHKFLRARNGVRKARKTNKSIRYPYKEKFVFHPKWVDQSFVLEGRKLTLSLGRWKGKQQAPLVLTLASVPTGLVREVELVYDGRWHACLSYEDGVTPVPVQDGHTAAIDPGEIHTISAVSTNGQALVISGRKMRSIHRLRNKKVRELQILMSRCQKGSRKWRQYNRAKKYVLSRSERQLGDLLHKTTRTFVEWCVEQRVGHVALGDVEGVQRHTSKRNKCRKRVRSKQVNQKLSNWSFGKLTKQLSYKLEAAGISLSKENEAYTTQACPACGKRNKVRSRNYRCSCGYERHRDVHGAGNILSRYLHGKFLEVMVTSITYLQPVQA

SEQ ID NO: 53964 - protein, 463 aa, Bacillus sp.
MKIRVKDRQFVSYAKKKLYSTKHFENMLLILIHQDDKQNDKKMFYHLTNSSVMRAIITGNKGGKDAEKVELVRNHYRNNELMKQLIETGKTLKIHNLVETIKEVKKNYKSYFTKLKNGDTTAKPPKPKKLNKLNHFTLHTDSYKSHTFKKKNKIGINLSDKMRYTHVKHSALKKVVGRLENIKNINIHLSNGHVYLLIAYENAAPKVEENLAYKAAALDMGVNILVALFVEDEKTPSLLIDGTPFKTYNANFNRLMAKVNETISTSKSVNRVSFLQKYRSFLYEKRNNYFFSEFHQMSTRMLEFCQKQGVTHLIISRNLAELKNNGEIKLRKKAKQPFVQIPFIQLLKSLMDKAPKYNIHISEVDEAYTSKTSSISADIHEIQSLAQENTPLTTNDYKGSRVERGLFKDQVLKKIVHADVNASRNICFLGSWNEKDISIPFPKLCNPIVIKSDRKFVQLIANS

SEQ ID NO: 53965 - protein, 391 aa, Bacillus sp.
MLVNKAYKFRIYPNQKQIERINKTIGCSRFVFNFFLGKQKGKDAYWSIVEEMAQNGQFPTNNWKGKCLNKFEAVKAVAELKHHYPFLKEVDSIALQKSVENLADSFNRYYKKQNKYPRFKSKKNPVQSYTTKHTNGNIVIIDHYIKLPKLGLVRFAKSREVEGRILNTTIRRNPSGKYFVSIGTEAEVSELPKTQSAIGIDVGLKDFVILSDGTTYSNPRFFRTLEEKLGKAQRIMSRRTVGGANWYKAKMKVARIHEKITNTRKDYLHKLSTGIVKNHDIIGMEDLFVSNMLKNHHLAKSISEVSWSEFKTMIEYKTKWYGKTIVTVARNFPSSQLCSCCGYQNKDVKHLGLREWHCPKCHTHHDRDINAGINLKNEAIRLLTAGTAGLA

SEQ ID NO: 53966 - protein, 364 aa, unknown
  TnpB Polypeptide
LKKRGRLPPHIRKVSPPGYWKDRLTGKKEIHIFIRNDRYHLEPVNENGGYLVLEDFGLRIRYAGRIRWEGRQGRLEIVYVNGKWYAYLPIEVGREPPKSNKKGYVRPNYKDRKGKIVNPRSIKQRDPIGDEKAFMDMGLNNLFAVVTTNGYVLLVKGGSIKSEYYWWKREISTYQAVRDLLRNAGLPTWIYYHERYLEAMHNRDERLRHLYLTSIRFLAETLWSRGVRKLYIGYPIMLSQDNGNEYNTNIWWYRKIVLWIVDVFREYGIEVELVPEHYTSKECSVCGEVHEDGRVYRGLYVCRRTERKINADVNAALNIARKQGYRIKVTRKIESYLVTHNGVKPLNPHRRANTQDPEVRNPAL

SEQ ID NO: 53967 - protein, 353 aa, unknown
  TnpB Polypeptide
MIIRELKLRPNKWLESKLDSWLWILTGVYNFGVQKIKHNAANKIYFSKFDFVNLCCGHSTRLEIPSHTIQGTLQRSYNAWERCFKKLTKQPKLKGIRNKLRSIPFPDSIPESRFTRGKINLPGLGRIRYTKQELPMGKIKQGRLVKRASGWYLQLMIDTTHTFKVHKTRKKVGIDTGFKYLAVLSDGIKIENPRNFIQGQQRLAQAQRGKRKCLTSRLHERISNHRKDYNHKVSKRIVQHYKEIYCTNDNLSGQATRFGKSVGDAGISQLRNFISYKSDNHGRKFVLVDSINTTKTCSKCWSLTGPTGLNGLSVRSWECKVCGTIHDRDINSAMVILKIGSGTDLKGDINVFN

SEQ ID NO: 53968 - protein, 678 aa, unknown
  TnpB Polypeptide
MVKKKNISVLERLQHLQGLESRPLEKWLIHRKLHAIKHLQDTESLVEQVFSICVEKIQLMETNPESIFYILESPLKSNWTTFLDKLNTSSDPNILTILLFKTLVQELTSNEKEYKPFWTTAYEELSEKLWSPTETGLADLAMTSSKALSTRQVEKLHCLTSQKINLRNRNLQMTSYPLSISLVADKWEEEITENPVKFKTLAVKVQMSKQQKQIYKEQYGCFRYVHNQTLDRVKKHGEEPNFQDLRNLLVTKDTKMHSNTYKYHMLCIQTAKRKEKAIAFKIQEEEKEFKKRISKDKQLSNEEKKILKNSFKTPVSYAVDASAVFLNYTTEITTWIQDMLLRKTNQEVLVEEEEALLEKALKPIPSRKNPYVSNWEREFHKDLRSNAVKKVCESYKTAIANFKAGNIKSFDIKYMSSKEPRKCIELASGQLSIKNKNIHIPLFKGCPTLKVSKKMAKKLNGIQIKNNCDFVCQKNSYWILIPVKIKLSKLDIEKPRYCGVDPGIVKIATTFGNYGITEYTHNRELLQRYNLKLTFLKTKRTLGRVRKKQLNKIEKKKIDYTNQLHWKLIKSLLDENDVVFFGDIKSHDIVKDGNNSSLNQEFNDLKFYRLKQRLIYKSKTRGKKVILVNEKYTSMTCSICGNLKTMTDRIYNCKGCKTTVDRDINAAKNILMRGILCM

SEQ ID NO: 53969 - protein, 777 aa, Streptomyces sp.
  misc_feature (443)..(759): Xaa can be any naturally occurring amino acid
MAAPFVALGPSGVAIRTRLKHLSPGDEKVLRLVGGHLGSLASRDLAVRCRDGLEHTTDTWAARKRELTAESSSRWAGSITKATHDQWALARRGQLAHVQGLEAGVRTIAHRLSLPVGEKGTKRAPGGYRSKQEWFTKTRRLHLLNDRLEQAQADREAGRVHVVRGGKRLARTRHNLDAAGLTETQWRQRWEAERWFLQADGESGKRYGNETIRVSPDGEVSIRLPAPLAEYANAPHGRYVLAGRVGFPHRGAEWADRVAANRAVAYRIHYDVLRDRWYLTASWQIPPAQTIPLTAALAHGVIAVDTNTDHLAAWRLDTCGNPIGNPRRFSYDLAGTSGHRDAQVRHALTRLLNWAKSCGVKAIAVEDLDFTAEKTREKHGRKKRFRQLISGMPTGRLRVRLTSMADQTDIAVIAVDPAYTSRWGAQHWQKPLTSTTRKTTRHXXXXXXXXXXXXXXXXXXXXXXXXXXXXXXXXXXXXXXXXXXXXXXXXXXXXXXXXXXXXXXXXXXXXXXXXXXXXXXXXXXXXXXXXXXXXXXXXXXXXXXXXXXXXXXXXXXXXXXXXXXXXXXXXXXXXXXXXXXXXXXXXXXXXXXXXXXXXXXXXXXXXXXXXXXXXXXXXXXXXXXXXXXXXXXXXXXXXXXXXXXXXXXXXXXXXXXXXXXXXXXXXXXXXXXXXXXXXXXXXXXXXXXXXXXXXXXXXXXXXXXXXXXXXXXXXXXXXXXXXXXXXXXXXXXXXXXXXXXXXXXXXXXXXXXXXXXXXXGRSAEHESWQQDSLPLSP

SEQ ID NO: 53970 - protein, 483 aa, Halopenitus sp.
MIPSTTAGFVVKSEAKGFVKKAAFTKLEAEAPPSRSAGLPARAEAQASRVGRKLTWYQLAARLVPAYSQSLSDFNNICENIVEYRRTAVIKLDTPEGADEYLRETVEQFKYCANTASEWCWHSDDGYHVTSKAKAEDALYDQLREDTELTANLVQKGIRQAVEAIKSGVERLKNDQNTSRPTFTADTAIYDKRSATFHRDHVSLSTPDGRIECDYILPENPETPPTKYVTNEDYEFRRGTLHRRDGDWYLHASMLKEDDDTDTTTGHRTVLGVDLGVNQLAVASTGRFWSADEFNHWKREYEKRRGDLQQCGTRAAHDAIAGVERKEDGRFEIFLHRVANEIVAEAAEHNCSHIVFEDLTDIRENIPQASWHHLWAFRRLYEYVEYKAREQGIEAVQVDPRNTSKRCSTCGFTHDDNRHGGDFECQDCGYQNHADYNAAKNIGLQYLRRRQNADTGGAPVDVRLNRGTLNVSGEYNPPASATA

SEQ ID NO: 53971 - protein, 381 aa, unknown
  TnpB Polypeptide
MSQIERLEEWDRALRFLWNLAQEQRKLGYARSRGERRFPSAFDQMKELTELRTSLSWLNDVPRNVCDQLLKELDKAWQCCFAKLARAPRWKRKGRDFSSFCEPHPKTWSLVDGHVRFPKLGFLRTVMHRPLEGTPKTCTLKRDGDQWFVSIVCEVETVDPIPRTEPVVAIDRGIVNFGATSDGELIPNPELLVASLKRLAQAQRTVSRRRKGSKNRDKAKRRVVRIHRTVRRQRENYLHVLTARLAKSHGIVVLEKLNVAGMVRSNLGRSISDVGWSSFANMLRYKLAWSGGSLVEVPAAYSSQTCSACGSIDATSRRSQSVFRCTSCGYKDHADLNAAKILKSRANRSVLLGEDAGSSQLRRTKKRLRVSKRFSPESSSL

SEQ ID NO: 53972 - protein, 384 aa, unknown
  TnpB Polypeptide
VQAVKAVKQNYKPTPEILALLEEFRRMVNECIQIGLAGNITSMKSLSQKAYHQLEKHPIPTYYRLTAISKATGILRNYKQTLKKHPMAKKPYASKLMLTDCYAFKVEEGKLRLPLKAREYAFIPLNSHVLRSIQGYTVRSVCLTACTLSIAFSKETAQIEPTELIGIDRNLDNITVAFSNSETKRFDLSKATEIKAKYREVKSHFKRNDVRIRKRIFGKYGRKQRNRVNQMLHCVSKRIVERAKAERLGIVMENIKGIQKLYRKGNGQGTQYRSKLNGWSFYELQRQIEYKAKWEGILVILVSAHKTSSVCAVCGSEIAECTERKVYCPRCLRAMDRDVNAALNIRQRGMRFVPNGFACEAVRGNPELVILRADANKLTHHSKS

SEQ ID NO: 53973 - protein, 545 aa, Streptomyces sp.
VGGLREVAAPFVVPGPTGVAVRTRLKNLTAQDEKVLRLVGDHLGSLASRDLKARCTAGLDHGSEQWAQRKRVLTQESSSRWAGSITKATHDQWALARRGQLAHIHSLEAGVRTITHRLSLPMGKKGGKRAPGGYHSRQEWFAKSRRMHLLEDRLQVARADRDAGVVHVVRGGKQLLTTRHHLDAARLTEEQWRRRWQAGRRFLQADGESGKRFGNETIRVTPGGEVSLKLPAPLAHLANAPHGRYVLTARVGFAHRGEQWADRVTANRAVAYRIHEDAGRGRWYLTASWTIPPAPAVPLAAARAGGLVGVDTNADHLAAWRLDAHGNPVGAPRRFDYDLTGNAAHRDAQIRHALIRLLHWAKRHGLAIAVEDLDFAAEKTREKHGRKKRFRNLISGLPVGRLRARLASMAAELGIPVIAVDPAYTSRWGAQHWQKPLTSKNRKTTRHHAAAVAIGRRALGHPVRRRTAPPPAHRSDEQGHRTVQARPAAPGREGTRPRIPGPRTRSMRAGRGAKAGDQCAQHRSGHAAEHGSWQQDSLPLSLQEW

SEQ ID NO: 53974 - protein, 394 aa, unknown
  TnpB Polypeptide
MSRYRLLPSPAQTVVLRDHCGHARYVWNMAVEQHSHWRPGRAGAPGYLEQCRQLTEARAEHAWLAAGSQMVQQQALRDFAQAMGAFFDPGNPARRPTWRKAGRKEGFRIVAVKPGHVRRLSRKTGEVWVPKAGWVRFRWSRAVPPGARSYRVSMDRAGRWHIASAVIPNPIPPPGNDRVVGIDRGVAVSAALSTGELLRVVGLMAPERRRMRRLERKLARTQRGSNRRGRVRLAIARLKAHETDRRKDWAEKTSTSIARRFDLIRVEDLHIRNMTRSAKGTPQDPGRNVSQKAGLNRGILASGWGLLVRRLEEKAPGRVERIKPAFTSQRCSACGQVDRDSRESQAVFWCTACGYACHADVNAAKVIAAGHAVTARGGDGITRPVNREPQLLLQ

SEQ ID NO: 53975 - protein, 383 aa, unknown
  TnpB Polypeptide
METKTVIKGYKYRIYPTKEQETLINKTFGCCRFVYNQLLAKKIELYKTEQKSLSKIDCNNYCNQFLKKQEEYKWLKKVDKFALTNSIYNLDSAYQNFFREIKKGNKNQGFPKFKSKKDNRQSYRTNFTNDNIKVNFENNKVQLPKLKWIECKLHREFKGKILSATINKVPSGKYFVSFNVEVEHVISSKNEYTVGIDLGIKDLLITSDGEVINNEKITYKYEKRLAKLQRKLAKKNNGSKNRNKQRIKVARLHEKITNIRKNNLHQISKQIINENKVVICEDLDIKGMVKNNKLAKSIHDCGWGELTRQLKYKTNWNNKIYHEVNRYFPSSQLCNKCGYKNTDTKNLDVRFWICPECNTEHNRDENAAINILNQGLKDLGLVS

SEQ ID NO: 53976 - protein, 121 aa, unknown
  TnpB Polypeptide
MISCRNSQRCWCAKNQTICIEDLNVKGMIRNHKLAKSIASVSWAKFFEMLEYKASWYGNELHRVPTMYPSSQTCSSCGYRNPRIKNLSIRIWECPKCHAVHDRDTNAGINILKKALQMQSA

SEQ ID NO: 53977 - protein, 411 aa, unknown
  TnpB Polypeptide
MIVSYNVKLAFPDEETKGKYEKVLSAERECYNYLSKKFEEIDFVHNKLTRYEVQSRYYGDLRSRFPELSSQMVLKCILETVSNWKSAIRNCYDDFEVPYKKNLSMVLDKRLYGKLTASSIELTVQGGHRARCTFSPYPKLAELLNLYRVQNCNVFFRRNQAWLTLQFDVPPSEDAGHGVLGIDRGMRRIVACSDNTGWINREFNRKRRQLRYLRRCLRARNSKSAKRHLKKLSRTERNRSKNEIHRVVNWLLAKPVHTYVVEDLSKIKKKTSRKKIVTPSGVTLEIKRRKHNNRFGQVPLKEIQAVLEYKAQLLGKEVATVEPAYTSLLDSRGMPQGIRQGTRYRASDGVLLDADINAASNIALRHHPESIVANPIYGSAVFSGRPQLSTGQSWMKLRQNLQAAALHGGGS

SEQ ID NO: 53978 - protein, 368 aa, unknown
  TnpB Polypeptide
VKTIAKMHLLTDEVGSKRLLATMEAFNAACNEIAETCFAEQSASKYTIQTLVYHAIREKYGLSAQLCIRAIAKTCEAFKLNKKVQPKFKKHGSITYDSRILTFKGLHLPHPQVSITTLEGRQLFNLSICAYFAARTSRVQGQVDLVYLDGKFFLYATCDMPEETPLEPDDVLGIDLGVKNIAVDNTGTTFSNEKVEAVRKRVHKHRAALQSKGTKSAKRRLKKVSRKESRFRADTNHCVSKYLVAKAKGTGCAIALEDLSGINTRTTVRKKQRAERLSWAFYQLRSFITYKAKLAGVTVVLIDPRYTSQRCNKCGHTEKANRNSQAEFCCKSCGHVDHADCNGAKNIRDKGLLSISLLASAKKLLKVA

SEQ ID NO: 53979 - protein, 389 aa, Erysipelotrichaceae sp.
MSQSENTKPIYRGYRYRIYPDSKEEKIIIKTIEAAKEIYNFTLAERLKNDSHSKPDFDYRSLAVFAISKAKEFTGINPQIGFYVAISVNSACVKAKQTGQTPLPKNNKRPIGSFTLKDPKPRIIVSKGRRAKVEIKGFGTIDMIYHREIPKGATFHTFTISRNKVNQYFISFECECPQPFDRPQIKKAIGLDFSVPKLYVSSDKTVFADPERIHQYEKHELLVKRAQTKLARCQKGSKNYEKQRDRIARIHLKIVNSRTDFIHKETAKLSKNFDFVGIETLTISDLSERYRFYKRAYDDSWQMFVFALKYKMEYQKKIVAAVPRYYPSSKTCHRCGNIKRDLTLQDRIYTCPRCHVSVDRDVNAAKNIRDQALRNAGFKIRYVAPNLVS

SEQ ID NO: 53980 - protein, 230 aa, Klebsiella sp.
VKSSAKLKTSRSSSHAANGTLASRRNTKCLNRFIRQRKLAMLQRQLSRKVKFSASWQKQKKKIQRLHSHIANIRRDYLHKVTSEISKNHAMIVIEDLKVSNMSKSAKGTAERPGRNIRAKSGLNRSILDQGWYEMRRQLEYKQLWRGGQVLAIPPAYTSQRCACCGHTAKENRQTQSKFVCQVCGYTENADINGARNILAAGHAVLACGGMIKSGRPLKQEPTEASQAPV

SEQ ID NO: 53981 - protein, 421 aa, unknown
  TnpB Polypeptide
MLSGATYHAFHNTKIPIFVCGGTKMLRAHKIRLYPNNKQETHLLQSCGVARFSYNWALGEWGRQYKEGLKPSEMSLRKQLNAVKREEFPWMMDVSKCAPQEAIINLGIAFKNFFAGRAKYPRFKKKGRRDSFKLTVGQFEVKNFKIRIPKIGLVKMREALRFSGRPVSVTISRIADEWYASIAVETNDLPAKCENQAAVGVDLGIKMLATFSDDRQSIEGAKAFKVLLPRLRRLSRSVSRKVKGSCNRKKAVLKLAKLHARIANVRNDSIHKLTTMLTSSYAWIAIEDLNVKGMMSNGKLARHIADGAFSEVRRQLEYKAKMRENHVAVVSRWFPSSKTCNVCGCINKFLTLADREWTCLGCGAVHDRDKNAAKNILAVSCTVTACGGNGAGSGRKTGTKLSPVKQEYSSKSTFNQICVGL

SEQ ID NO: 53982 - protein, 402 aa, Limnoraphis sp.
MKARYRYRIYPNRPQRFMLAKTFGCARVVYNDAIRLRQDLYKSGEKLNDTELQKRVITQAKLTEERHWLSEVGCDPLIQSLRDSSQALRNFFKSLKGERKGRKVGFPKFKKKHSTQSIRFTTNGFSVKPNSVYLAKIGCVRVKWSRDLPSQPSSVAIIKDAGGRYFASFVCEVEPISLPALNDGVGIDLGLTTFATLSTGEKIISPKPLAKSLRRLRRAQNIFSRKVKGSHRRELARRKVARIHARIKDQRTDFLHKLSTRIVRENQAIVLEDLNVSGMVKNRLLSRAIADAGWYGFRQMVEGKSSRYGRDFQVISRWEPTSQRCSSCGQLGGRKPLEVREWTCLHCGAVHDRDINAALNIQVAGGQSETLNGRGGQRKSSSLVAADEASTHGLVKQLRLFG

SEQ ID NO: 53983 - protein, 406 aa, Thalassospira sp.
MQRLQAYKYELRPNGQQERQMRRFAGACRFVFNKALALQKERYEAGEKKLGYAGLCKMLTEWRNSTETAWLADAPVHPLQQTLKDLERAYSNFFAKRADFPRFKKKDLSDSFRYPDPKQLKLDQGNSRLFLPKLGWLRYRNSRDVLGEVKNITVSQSCGKWFVSIQTEREVEQPIPEGGAVGIDMGIARFATLSDGTFYEPLNSFKKHEAALRKAQQAMSRKVRFSNNWKKARARVQKIHSRIGNARRDYLHKTSTTISKNHAMVCIEDLQVRNMSKSAAGTIEAPGRNVRAKSGLNKSILEQGWFEFRRQLDYKLEWKGGWLVAVPPQNTSRTCPCCGHVSADNRKTQARFECVECGFGENADMVGAINVLRAGHVRLACEVSDVVMSPAAGTHRSDLSVAQCQA

SEQ ID NO: 53984 - protein, 371 aa, unknown
  TnpB Polypeptide
MKLTLQMKLLPDDKQSKSLIETLKECNRVCNNISDTAWQNKIFNKFKLHHLVYHKIKSTSKLSAQALVRCIGKVADSYRHDKKTRRKFKPLGAITYDIRILSYNIEKQIVSIWSVDGRLKIPFVCHNSKYLPYIKGEADLIYKKGKYFLFQTVEVPEDDVKNVEEFIGVDFGINNIATLSDGTQYGSEQLDKVRNRYFKTRKSLQSKGTPGSRKCLKRLKGREERYASLTNHTISKQIVGRAKTENKGIAIEDLTYIRERTKVRKTQRRRHHSWAFAQLRSFLEYKSKLAGIPLVVVNPHYTSQICNVCKMIGNRKGSSFSCPNCGNADADVNAAKNIAQLGALCKQPRKDVSMLNFVSHIPLKADCFSCQ

SEQ ID NO: 53985 - protein, 380 aa, unknown
  TnpB Polypeptide
MRTLMKQTLFVRLDTDQAQFRMLLGTMERFNEACNHIASVAYKLRTANKMKLQKHVYRQARDKFSLSAQMAIRAIAKVCEAYKRDRSKKPQFKPHGAMVYDQRILSWKRLEQASILTLKGRILVPIHIGEYQKPRMDRIRGQADLILRNRRFYLAAVVDAPEASQYDPVGALGVDLGIVNLAVDSDGIAYKGKDVDRTMRRMDRIKAKLQACGSKSAKRHLKRLSGHEARYRRNVNHAISKSLVATAKDTGRAIVLENLEGIRAQTTVCKAQRRRHNSWSFHQLRQFVEYKAKLAGVPVVYVNPRGTSHTCPRCGLQARKSRLTRDRFRCVACGLAGPADYIAALNIAARGQVSSPIVPRNFLEPQALLRDKPTTLVVGS

SEQ ID NO: 53986 - protein, 317 aa, Oceanobacillus sp.
MTAINTAFSNWLLHFEGLQTATSKVFKRYSDERFPAAVVNQTIQTVKSKKKKQKTKLFRRMWCGFNNQNFKVERENGLYKVSFPTLEKRIGVRVVCTDRGKPWLDKLLSSEVKQGTTELFEKRGRWFVAISLSFEVKQKQPDQAKTMGIDIGLRQLAVCSVGTTTLFFSGKELAYRRKGFTSRRRKLGRLKKLEAIRKSKNKESDWMKEANHKISRQIIEFALKNGVHLIRMEDLTGIRHSRNTTKEAGRNLHRWSLYQLQQFIAYKAQMAGLMVEYVHPTYTSQMCKCANVDMLTSETGTEMLFVVRSVATEAMQI

SEQ ID NO: 53987 - protein, 181 aa, unknown
  TnpB Polypeptide
LNSFKVKAERLAKLQRQLKNKNKFSNNWKKIKAKISQCHEDIGNARKDYLHKVSTEISENQAIIIIEDLRVKNMSKSSKGNSEKHGKKVAQKSGLNRSILDQGWSMFATMLEYKQDWHGGAVLRVPAHHTSQTCPCCRHDAKENRLTQAEFACVDCGFSENADLVGAMNVLAKGHALLANQ

SEQ ID NO: 53988 - protein, 454 aa, unknown
  TnpB Polypeptide
MTNRKQHQITDYEKTLRDYHKTSSRHVVVFETEISEDNKRHLFCQADLLRQCGNELLGIMKRRLEQLLRTKRYRGLRKYYGSLNEKLKALEKVKVLSAIQKKHRQELLAELKSAGNSMKEMQEAYQVTWDFCRKTMEHLRLSYGQPSIFALSRAEDVWSAVSKVLYSDGDSLHFRKRGQLPEMRAKQSNRGILIFLKNDHLCFRCNGMDLPIRCNENDLWLIDELDAIETYLRDPDTWDAYAVNQMQKGHETVSTYRPCYASIVCKGIRGKLRVYIHLTVEGSSLAKRTKDGCVKHPCSDGVVGCDIGTQTIAYTSDCEVGLENLAERGQSIRHTERQQRLILRAMDRSRRAMNPGNYNPDGTIRKGKKIWIKSNRYRKLQKRHQELCRIAAENRKFAIHEQVHKMRSLGNVFVTEAKNAKKLQRRAKPEDPLDKNGKPKRKKRFGKSIQNRCP

SEQ ID NO: 53989 - protein, 369 aa, unknown
  TnpB Polypeptide
MINIKAYKIRCYPTGEQEQLIIKTFGCCRWYWNQALHDDIEYYEKNKKGKINTPAFYKKENEWLKDVDSMALCFTQIDLQSAFSKFFKEKNVGYPKYKSKKIPKNSYKTMTSSGYQVTENSIKLPKLGYVKIINHRHKTGIAKSCTISMTPTGEFYIAILWKDEEIAEKLKPVNEEIGIDLGLKDFAICSDGKKFPVLQSLRKELLKLKREQRKLSKMERSSKNYDRQKLRIAKLHQYIANQRKDYLHKISYKLTNENQVIVLEDLDVKGLMKNHHLALSISDVGWSEFVNMLEYKALDKGRTVQKIDRWFPSSQICSCCKCITGKKPLWIRQWKCPKCGEIHDRDINAAKNILIEGKRILGASSCPDR

SEQ ID NO: 53990 - protein, 373 aa, unknown
  TnpB Polypeptide
LAEKAYKYRIYPNKKQQELIQKTFGCARFVYNYFLDKRKTEYEQNKKSLSYNDTSKMLTQLKKEFIWLKEPDKDSLQKSLKDLDMAYQKFFKEHTGYPKFKSKKNRYKSYRTSYTKTTVGGNIMFVNKHIKLPKLGLVKVRDKQIPKGRILNATISQEPNGHYYCSICCTDVEFSQYPKTNNNVGIDLGIVDFAIFSEGNKIENPHFYEKSEKELAKLQRELSRKTIGGSNWNKARIKVANLQKHIFNQRKDFLQKLTTEIVKTYDIICIEDLDVKAMKETGNSIRNKRVGDVSWSEFRRTLTYKSQWYGRTLSVIDRYFPSSQICHCCGFQSGKKSEDIREWVCPVCGVIHDRDVNAAKNILNEGLRLLNFK

SEQ ID NO: 53991 - protein, 358 aa, unknown
  TnpB Polypeptide
MAKAVIKTAKNQLKLLKESAQYQFNNLYKRKRSLYKKIQKLKFLLSSSSTSLKQRKLAKLRLFWTQMKLNKVNQLIANGLRLHLTFGTKHLLKTNKAKFLTKRDNQVVYIGAKDETCGNQQFQILYNSKYNRFDYKLRLENQWVSDSGKYVLGSFVLKNKEAKIDVLKTLSKKKSNPLSYRIIKRDDSLYLQIMYRRETTDTTRYNQGVLGVDFNKGFISVSEIDSDGKLQSLTRYNYLHRGKATKTKTSMLVLVSQLVSQAVNLGKDIVIEDLVSLDSNKKQEKSTSKNYNRMINSLKFGLFKRCLLSKATKEGVSVQVVNPYNTSKIARASYTDRMKLNVHDAASYVIARRFYQYD

SEQ ID NO: 53992 - protein, 411 aa, Halopenitus sp.
MQYSHRYPAYPTQEVAGDLERHIDIHRQAYNYTRYEYQNVDADTIGSAYKHHSRLPDWKDDFPVFTEVNAKALQRTVTRFYQNLSGLKSLKEKRHKVGELKWKSPKEYQSITYSQHGFKLKNTSGRRATLWLSKIGEIKIRYHREIPDESDIKEVTIKKETTGDWFVSFGLEREEASLPEKPDVDLLDANNCVGIDLGIQNYIHTSDGKTVDWLDLSDEYERLSHEQRNLSRKEDGSNNYERQRRTVAKVKRHIQQKIKDFQHKLSTWLVREYDAVFVEDLDVKPMLEGSHNARNKQDAAWRQFITLLEYKAELYGTHFVQVDARGSTKECAKCGTETAKHIWVREHACPACGFECDRDANAALNVLQRGFDELGLGWPESTPVETALPTDTDDFQEVSAKRVVETGSLGV

SEQ ID NO: 53993 - protein, 424 aa, unknown
  TnpB Polypeptide
MMENRAFKFRLYPLKDQEQNLRQHGGNARFVYNKLLERSCASRDETGEFIFGRDLEKELLILKTENPFLNLSYSQSLQKVAQNLAQGFINRFVHHSADFPTLKKKRGTDSFTYKQNWSMGPRSIHLPKIGRIRMVRHRPLVGKPTSVTIVQDGDLWFASILCRVEVKEIPPRFPEEDSFVGVDLGIKDFAVVSDGTVIENPKHLRKSTKKIRRASRWLSRKVKGSKNGEKSRDRLTNIHRKIRNHRKDFHHKVSRSMIAKCSGISLETLNIQGMLKNHKLARAIADCGWGQFVQFLEYKGKESGKLVIKIGRWFPSTKTCSDCGELMDISLKQRIYVCKGCGLIIDRDFNASLNIRSEGLEILRIAFETLPRGTGEGEGLRPSNACGEESSGQESQGTLTKLFSVKQENFQDGDSLPALGSPRL

SEQ ID NO: 53994 - protein, 388 aa, unknown
  TnpB Polypeptide
MVNYTYKFRLYPTKEQEVLLTKHFGCCRYVYNHYLNKRIKHYLENNQRLNYYDDAKDLTKLKKQFSWLKEVNSQSLQFAIKCLEGAYGKFFEKKAKFPKFKHKHGKQSFCVPQHINVDNNKLYICKFKEGIKIIVDRKIEGEIKHVIVNQNKAGQYFACVCVEKNLIPLPPNKFEVGLDLGIKTLVTCSNGKRFQQCSIKNTLQHRLVKLQQWLSRTTKGTKLHEKIRKKIAKLWQKLKNIRNDHLHKISRKIIDENQVIVIEDLNVSGMLRNHCLARSLQNSCFSELVRQLKYKGSWYGRTILQIDRWFPSSKTCSNCCYVKDNITLNEREWICPRCYSNHDRDLNAAKNIHKQGINMLNRRNYGDGLGTGCETLRVVEDYSKSILG

SEQ ID NO: 53995 - protein, 289 aa, Streptosporangium sp.
MGRGHRSAGRPGPFPVDQEPARHRQQLPGREGDRRQGGEGGERLAHRVPHRTTRATPDPAPGPEGGMDRGITVPLALSTGEKLRHKPWLTHGERERLLRLERAAARRRAARTRGEPVSNRLARTYDQIARLRAKAKRRAYDWQHQTTTALARKYSAIVVGDLHITNMTRSAAGTATAPGTNVAQKRGLNRAIAGQGWGRTVTFLTYKAAERGGCVPTVPAQGTSQECHRCHTTTAGSRESQSRFVCKNVRCGWIGNADINAAGISFIGTTLPPDRRSPGVETSSRWAGL

SEQ ID NO: 53996 - protein, 423 aa, unknown
  TnpB Polypeptide
MKKVKKRLKKSNLSFKTLIYTNMLKSYKYKIKPNEDQIVLLNKHFGSIRFVYNYFLNERKVEYETNKQTLNYNDNSAALTMLKKQEEFKWLKEINSQSLQHSLKGLDDAYNSFFKKRTGFPKFKSKHTKNSFKVPQFVEVINEKLIIPKFKDPIKMIQDRKFKGEIRQCTLSKTPTGEYFVSILVEGDYKKFEKTGKSVGIDLGIKDFVITSDGYKFKNNRYTKTYANKLSKNQKHLSKKVKASNRYNKQKLKVATIHKKITNSRMDNLHKVSTELIKKYDTIFLEDLNIKGMIKNHKLAKHISDASWSKFINMLDYKALWNDKQIIKIDRFFPSSKACNCCGWINQNLDLSIREWTCSSCNIKLDRDLNASKNILKEGIKVISSGTDDYRRGDEIRPVLTGTIAEASKKKELVSGNLSVFSR

SEQ ID NO: 53997 - protein, 431 aa, Nocardioides sp.
VSIRQRLYPDTGQASGLVEHCHHARFVFNIGLEQRSMWSRDRHNRGTHPELGPLDAVRVTTTTQMRELAQLRAELDWLRVGSSSVQQAALRDLDRAFANFFAGRAAYPRFKRRADREGSFVVRDLTVRRLNRKWGVVTVPKVGLVRFKVSRLWAEIEAATSARITHRNGRWHISFTTPPADKIAAGTGCVVGIDRGVKNTLATSEGKMAQAPALTEGEQARFLALEQRLARQTTAAKKTGRKLRECRSRNGTLDQLAVLRRRLQDRRMNWVEKTTTELASTYDLIAVEDLRVSNMVRRAKPKPDPDEPGVFLPNGARAKAALNMAILASCWGKLLTRVEQKMPEGHVVRVDPKNTSRTCAACGHCAPGNRESQAVFECEACGHQAHADTNAAINILARALASQPGDTGGSPAPARPQEPDQGAIPATQDAA

SEQ ID NO: 53998 - protein, 412 aa, unknown
  TnpB Polypeptide
MKKSVEDCLILSERHLIFKGHDYYDECDRITFLCKNLYNATLYYQRNSFFNHSFENYYATNKHFVHSNQMDYRALPTKISKQVQVLVDRAFKSYFALVKKKRNNSYDKKVSLPNYLNKTTGRCTAPYPKDALSLKHDGLIKLSKTKIVIKTKVPKDKIQAVRIVPKGNHFVLEVLYNQPVDKLVSDKIERMAFVDPGLNNLMTVTSNCFNPLLYSGRDLKSINQLANKTIANLKSKLSEHGLFSSPLLQSIYSKRNRRILDKLHKITSNLMSHLVSHNVDTLVFGHNKGQKQDIQLGKKTNQNFVQLPFNQLISMLQYKCQLKGIWFVLTEESHTSKCSFLDLEEIKHHEVYLGKRVKRGLFRTSRNCYVNSDVNGSLNIGRKWLTNQSLYSDRLHSELVKHMVNPKRLRVA

SEQ ID NO: 53999 - protein, 495 aa, Symploca sp.
VAKKIHRKAKKKQKTGEVVRTDKWKLHPTELQHHYCHLTVSEYRKYVRALIGIAYTHWHEMADMSIKERLTFVESLIHPTAKRPSVKYEYFKQAKHKSFLKFPSYLRRAAINNAIGQVSSFVTRYRTWQSKVRNRRDARPPRLTADTGVYPALYQGQCIKFGDGYTTAEIKLWDGSDWTWHKIPVSGHRSRHLVDTNKRKSPSLVVSERKCHLSVPFGINPKDLPSKEKVLSVDLGINTTATVAVVSSTGTVMHREFIHPSKDIDRRDSRLRRISAKASETLGGKGGKKRCDQSRGNLRQVKGTSMKGKLYRGFCRPLYRKATNINREIAQKVSRAIVNIAKSFDVQVIVFENLSGWRPKGGKKRSTLKQRYHGWLKSRLQELTEQKWSELGGKVQYVLPHYTSKYAYDGSGQVRRDQKNYALAVFSTGKRYNADLNGTLNIAARYWHKVLKGQKSREVWLGKSSRHTPRIPVTLSAIWTLHLDCRGEDTPSTTS

SEQ ID NO: 54000 - protein, 383 aa, Proteobacteria sp.
MYTVRTIACKLAPTEEQRTELNATLVAFADACNCTADVARAIHSTNKVLVQHACYQDIRQQCGLSANLAIRAIARVCAALKVPAKMHSVFAPTSADYDARIFSLREWDWTFSMTLLHHRAHLATKLGDYQKRQLQGRLPRSATLVKRRDGTFFVHVVLTDTVSEPEEPHGMIGMDLGIKNLATTDDGEHFSGDAVEAVRKRYGRMRRTCQQAGTKSAKRKLQKIRMRESRMRAHENHRMSNRLIAKAKDTRSAIACEDLTGIGDRITARKAQRSRLKGWAFYQLRTFIIYKAKREGILVLPVDQRNTSRTFSSCGHCEKRNRKSRDEFVCRHCGYALPADWNAAKNIQARGEVMHPVVEVVDAGTQNLVETTNKPRQFIGSGS

SEQ ID NO: 54001 - protein, 485 aa, Sporosarcina sp.
MEVQNLKKDYRTYQINIKKGHRLYDYFNELCLNSSKLYNVTNFYIRQVYTALHSDKKLQPLQQEVMDTLQDNIEKMNEIQYYSHQKRLTKEKLKPMAERKELKPNLFGLPSKDKSFLSYNFLDCLFKVIKQQDYYSLPGQINQQVIRNVIQNWNGFFKSIKTYKTNPKNFKGKPSIPGYLSRDRKKETIFSNQICKIQDKKFLRFPKTKGRLNIGKLATFPGEFQQVRIIPKYNGFTVEVIFLVGVKKEIPAQKERCMGIDLGIDNIAAIAFNTGHSSMLFKGGVIKSINQRYNKMRGFYYAALRNGKKPKEGQFRSKILIKLDAKRHRKMKDFFHKVSHNIVKIAIETNVDTIIIGKNKDWKQKSNIGKRNNQRFVQIPHALLIELITYKANAKGIAVILTEESYTSQASFPDGDLIPTYKLGNQTHHQFSGKRIKRGLYQTKSKMRINADINAAANILRKVVPNAFANGIAAVCSQPRVVNVR

SEQ ID NO: 54002 - protein, 596 aa, unknown
  TnpB Polypeptide
MLTYNGVKVDRTLTELILKVVSTVGKSRKFSANEALMSQLQELYRRDFQPLLPPGDAPPSRSGLKQVMKYEAVKMVAVFETHLKCHYPDYVKDACAVVYQRRVMREQYKGKKFVPFERKFRDLLHDVLTVDGRAWKSDPVDHDGVHYLRSLALPAGKTFEKQNLQYDLKANPQDYFSVLEGMTALTENTEERPSLRNLWPLRTTLVPRYIRIDTMVLVELLVPPSERKQFTSKVKASAFEVWQRFFHLDAKVFRGKKFHHMLETDGVATSVLFEWENVPVVKKSKSKNAVPTESYLDELPPATLQSLRSRKVVSIDPGMSDLLSCISEVSTTTTPEKLRYTQNQRRFDLKTVSRRRQLQYEKDHTIIAGKTVTTHETELSAYNHKTVNIKKFKQYLRAKFLFNSQLAPFYRHYHFRKDRFNTFIDTQKSERAFLNKFRRTFGTPTDTVVAFGDWEQRQHRKYKEPTKGKGFRQMLRRDGYDVFLVDEHKSSVQCSSCCSPSARCHKFRRRLDPNTSKPQEQRHRRDVHGLLVCNTCSRLWNRDVNAPLNMNTLTRACLEGRPRPFYLQRGNTFSTVSTILPTVQGICKDVKIHIRW

SEQ ID NO: 54003 - protein, 231 aa, unknown
  TnpB Polypeptide
LQNFFETGNRDSVSGIGLDMSVPFLYIDSTGKRPSYELNGREVRFLKQYRKLEKRIAREQRKRSKMVKDSNNYNKQCQKIARLHAKAKHRRDDFLHQIAVRLVRGYDLIAIEYLNMAVMKKCLNLGKSVSDIGWGKFTQILEELCNKFGKLLIRVDRWYPSSKTCSHCGYINKDLKLEDRVYVCPECGHVMSRDKNAATNILEESFRILEENMLRPAVEGYKKPSLLTTIV

SEQ ID NO: 54004 - protein, 412 aa, unknown
  TnpB Polypeptide
LLDNDEDGFEGNVWDANTGHLEGRYKGVLGASTAQQVIRKNTEAWRAFFRLKDQYHDESNTSVTEHPEPPGFRGNEDDGRQLKGVIRNDAYTIDWGELSRLEILVGSELKDRYDHIGRLRLEIAGDPNWPDYEKQGRLDLWYDETDCTFRASQPVTVSDDVRDTPLADETAALDIGANNLVACTTTTGQQYLYEGRDLFDRFRETTRAIARLQSKLREGRYSSERIQRLYRKRTRRRDHAQEALCRDLLERLYEDGVDTVYIGGLTNVLETHWSVDTNAKTHNFWAFKKFTERLACTAEEYGISVEVRSEAWTSQECPQCGSTDRTTRHQDTLTCPCGFEGHADLTASETFLKRHTAKAVRPMARPVRFEWDDHTWSESPRSPERERPKEQRTDPSTVHRDGNVASGESETG

SEQ ID NO: 54005 - protein, 319 aa, unknown
  TnpB Polypeptide
MKKITLTPELTEDYIKAVPYQIKKIGVKDSYTSWQTNCKKKSGKPFKLRYKSRKNPVQSCYIPKQAVSERGIYHTISGKLKFSEREWLNNDICDCRLINDHGRWYLSVPQKITTTMPTENQGGIVDLDPGVRNFLIYFSEDGRFGWLGIHAFDRILRLNLKRVHLLSRLVLTKDKREKVKLKRTLNRTYHRIHDLVDELHWQCINYLVHNFSAVVFPPFEVKGMTKKGRKLRKSVVRSMLALRFFDFKERLKQKCKECSVLYIEQNESYTSKTNSFTGELMTNLGSKEWFMYDGIKSHRGLNDARNILIRAMRDSSAAE

SEQ ID NO: 54006 - protein, 162 aa, Lactobacillus sp.
KWNHNRSDHLEELDDYSNWQRARVNKARCQQRIANKRRDYLHKLTTDLVRNYDVIVIEDLKTKNLQKNHHLARSIANASWYQFRAMLEYKCAWYGRQLVVVKPDYTSQICSNCGFSSGKKPLEVREWTCPKCGIHHDRDVNAAVNILHKGLKAIGQGLALVK

SEQ ID NO: 54007 - protein, 223 aa, Lactobacillus sp.
  misc_feature (37)..(70): Xaa can be any naturally occurring amino acid
MLILVVLVLCGIKCLICTLNAIKTIKRLNSKADIQWXXXXXXXXXXXXXXXXXXXXXXXXXXXXXXXXXXRTDLKQFPRYQQAVRTVAKLKRHIAERRRDNLHKLTTRLVKDYDTIVVENLSVKNMMKNHHLFASIANASWGTLISQLKYKCAWYGKQLIIIDPKNTSRICHECKQKNHEFDSLSQSEWLAAREWDCPNCHAHLDRDVNAAKNILAKGLETLA

SEQ ID NO: 54008 - protein, 327 aa, Nitrososphaera sp.
LATRKKSIRRGYIPKSPYAVQPQLVSCYGFKIKKDVLKIPLGNRKYFDILLNSYSKQALFSDSSLTIRSFTLTGNIVSIAISKTVNEIDCINIVGVDRNLRNLTVGDSVKVVQYDLSKAVDILENTRSILRSLKRNDQRIRKRIYSKYGARRENRINQLLHHVSKVIVQDAKKSKTGIAFEDIANIRRLYRRGNGQGKVYRGIMNSWSFAEVKRLVTYKAEWVGVPVIQLSKSETKGTSSLCPRCGERLQVGQLKRCLRCDRCRREFDRDVVAAMNISYKGRAFLSGSGKGVFKRPKGDASEAMKGNPTTPVILRVDASKLTHRYRR

SEQ ID NO: 54009 - protein, 370 aa, unknown
  TnpB Polypeptide
VADDYVRRTAITRLSVDGEQRDLLEDTISEWKRGCQLATNKAWGKCNAKSDVQPLAYDDVREHTDLGSQHAILATHQAAQAITGCIERRSKGKKVSKPTFTAPTVKYDTRTMTLFDDETVSLSTTENRVRCPLDLPDADDGYQRQYLDSDEWSVTESTLTARDGDYFLHIGFRRHKNDTERDTAEDGTVLGVDLGIENLAVTSTARFINGRQLTHDLREFEKVRAGLQQTGTRSAHRTLEQSRGRELRHVRDVLHQASNALIDEALRYECDVIAFEDLTHIRDRTGASWGHKWAFRTLYEQVEYKAEVEGISVKQVGSAYTSKRCAECGFTADENRPSRTDFRCVKCGSEANADYNAVAGLHPAGSKVTA

SEQ ID NO: 54010 - protein, 397 aa, unknown
  TnpB Polypeptide
MMVVKKMIKTIRVMLIPNNKQNTKLFRYANTARFAYNWALGREKENYKNGGKFLSDSDLRKEFTQLKKTEEYSWLNEVSNNVTKQAIKDACHAYKRFFKGCSKFPKFKSRKFSIPSFYQDNVKIQFSDTHVKIEGFAASKKKNKQKINWIRLAEKNRIPTDCNYSNPRIRYDGINWWITVGIEYEDSVTVPSNDGIGIDLGIKDLAICSDGNKYKNINKTKKVKKLEKQKRRLQRSISRSYENNKQGKEYCKTKNVIKKEKLLLTLNHRLTNIRHDHLHHITSEIVKREPSFICIEDLNVKGMMKNRHLSKAVQQQGFYEFRRQMEYKSKWNNIQVIIADRFFPSSKLCSCCGKIKKDLKLSERIYKCECGNVIDRDLQAALNLKKYGEDVLKRSVA

SEQ ID NO: 54011 - protein, 423 aa, Oribacterium sp.
MYRNVVDYFIDVILKEWTVFSECHTSKSAVNMAERYCVKTPRNPEPPYDFTNRFYKFPSYLRRSAIAEAYGKVCSYQSNLRNWQDAVPRTRGAVPSSPKAGFVYPAMYRDNCYVRIDDYTAKIKVYIRNTWDWLTVQLRKSDVDYILHHCVNRKECVPTLQKRGRQWYLDFVFASDQELHKTDIFDQTIVAVDLGINSACACSVMRSDGTVIGRHFLRLPKEYDSLERKISRIKHAQRHGSRRTPALWSLADGVNDDIAVKTAKFIIDTAVSYNADTIVMEHLDLAGKKRGSKKQRLHLWKARRVQAIVTDRAHSFGMRVSTVNAWGTSRLAFDGSGKILRGRESERTGNNYSLCEFQTGKVYNCDLNASYNIGARYFVREIIKSLPVMQGQRITANVPGCAKRSTCTLSTLISLNGELYTAA

SEQ ID NO: 54012 - protein, 372 aa, Veillonellaceae sp.
VNDVLQQKGYQYRIYPTKQQQQLINQTLGCARFVYNRFWNIRKEAWTNSKTSVTYNQTSKMLTELKCEPDYVWLNVVDSTSLQQALKDLDKGFKNFFAKKAGYPRYKSKHNHCLSYRSQCVNNNIAIKNGKLKLPKIGLVKIKLSRNFTGRILNATVSRKATGKYFVSLCVEEEVGIFPNNGGEIGIDVGIKDFYSDSNGDVAANPKTLKKYSKKLAREQRKLSRKAKGSNNRNKQRIIVARVHEKIANIRKDYLNKVSTKLVKENQLIGIEDLQVRNMLKNHQLAQAISDVSWSEFFRMLEYKAVPHGCKVVRVPKFYPSSQTCCKCGYQNKDTKNLAIRAWDCPVCGHHHDRDVNAARNILAKAKEIIAA

SEQ ID NO: 54013 - protein, 375 aa, unknown
  TnpB Polypeptide
MIISLKVRLEPNNKQNSKLFQYSGTARFIYNWTLARQEENYKNGGKFISDNDLRKEITQLKKTEQYQWLNSISNNVAKQAVKDGCEAYKKFFKKLADKPKFKSRRKSKPSFYHDNVKIKFTITHVQLEKLGKVKLSEYNRIPIGVKYSNPRVSFNGVHWYISVGIESIQESVELTDESIGIDLGIKDLAICSNREKPYKNINKTKKVKKLEKKMRRLQRKVSNKYLINKEGVRYVKTSNIIKLEKNIIKLHKRLDNIRTDYRHKVTTEIVKTKPSRVVMETLNVKGMMKNKHLSKAIAKQGLFEFKTMMKYKCEKYGIEFIEADKWFPSSKTCSVCGHIKPKLSLSEREFICECCESIIDRDKNASYNLSSYEVA

SEQ ID NO: 54014 - protein, 427 aa, Lactobacillus sp.
MIVKTRVYRLKPDEAMKQILDDWCNYRRYCWNQALALWQDLYMAHTIFDKVVATTFIPKQNKKTKKWRMTHQDYHLNPSPNWRLVRDLMIEQKEDWQYAYSARTLQLAVQDLGKAWQNFFNKAQPDWGKPKFRSKKNPRQGFKTDRAKIGDGLLWLEMPRDTPYKDRWAGIELSNKPLSGKIGVVSIFKVNHKYYASIPYKLEKPLPKAKTGKGTGVDINVGHFNYQDGQCLVLPKSLKRLYAKIKFYQKRLAKKRTVNGRIKGTQSNKYLKTKTKLQSCYERVSNIQHDLMHKFTTKLVNDYDQIVIENLDVKGMLMSHVASKGMHRSMFGLFRQLLAYKCDWYDKELILANKLYPSTQRCAVCGMVKKGDEKVTLKGNQKHGTKHNEYICYNPDCPNYGKVVDRDENAMKNLTLLISHPELNKAI

SEQ ID NO: 54015 - protein, 189 aa, unknown
  TnpB Polypeptide
VSLCKTVAATGIDLGCRDSATTSNGEVLKTKVTQQYAKKLGIAQRAKNKQRVKAIHAKIKNTRQDLIHKFTTNLTKTNKIIIIGKLQSKSFTKGKLAKSVYDAGWFEIKRQLAYKCENAGCYYVEVNESYTTQTCSCCGSRQNSPKGRANLGIREWLCECGVTHDRDINAAKNILALGLERLVVGIPSL

SEQ ID NO: 54016 - protein, 410 aa, Actinomadura sp.
MARQVRRAFKYRFYPTGEQAAELSRTFGCVRLVYNKALEERTRAWYDEQRRISYAQSSAALTRWKKTPELAFLAEVSCVPLQQVLRHLQTAFANFFAKRAAYPRFKSRKRSRASAEYTRSAFTWRDGRLTLAKMAAPLDIRWSRPLPEGAVPSTVTVSRDSAGRWFVSILCQDTITAAPATEHAVGIDAGITTLVALSSGEKIANPRHERRDRARLAKAQRELARKTPGSANRDKARRKVARVHARIADRRRDFLHKVSTRLVRENQTVVIEDLTVGNLLKNRTLARAITDAAWRELRSMLEYKCAWYGRDLVVVDRWFPSSKLCGTCGTVRETLPLEVREWTCECGAVHDRDVNAARNILAAGLAVTACGDGVRPQRDTSRTGHSSAKQETQRATAGIPRLQAGEEAKV

SEQ ID NO: 54017 - protein, 414 aa, Lactobacillus sp.
MPQLPYYYGTKVRIFPSNSQKRLIKKNSDASRFIYNQMAGINQELYFLRQVKIPIKIVQKRIDTLEERLRNPATGISNIHGWLNDKELDSLMKANAIRNYRSAWSMFYKVHNTGIPVFHKKGIEQKYQTSCMYAGKLPITNMNNGNVRLLNNRYIHLPKLGNIRFKGMPKKLLSRKENIRIGTTTVSMDSTGCYYISLQLASEQPFVTVLNINNSSPIGIDLNTDNFITDSDGNTIDNPRYYRSIKGKLAKAQQKLSRRALRAKREHRSLCDSKNYQEQRKIVATIQRRVTNCRKNFLHNVSTTLIKNHDLVVAEELRSKNMLQNHALAMSIADVGWKIFLNMLTYKAELYGQKFITISPYNTTQKCSNCAFVMRGNQKLTLADRKWTCPKCCMHHIRDHNAAKNILNKGLILN

SEQ ID NO: 54018 - protein, 428 aa, unknown
  TnpB Polypeptide
MQLTKKIRIYPTEEQVDVLWELSEKCRIVYNFALADRKDTWTSDKRSVKYTEQQNKLPDFKKRNPEFKSVYSKTYQGILKKLEGSYNSFFGHIKNGNKKARPPNFKGRNYLMTIPYNQSGFIIFRGYISFSHSVNDTELIFDIGNLADGLKVKQAEIVNDNPYKARGKFYICLTYEIDVEDTYFDNGNYQAIDLGITKIVTAINSEGKFFEVKTPRPDNYWNQKIDTAKSRRDHCIGKKKGSTKSRRFLRIARTVTKMSRKKANQVKDFQHKLSRKMVENTKANTIIVGDLSVQQMAQPKVKDGKKEKKTKQKKGLNRSTQGLGNLGRFVQFLTYKAELIGKHVIRIDEKNTSKKCCYCGKKHNMPTYERVMSCDCGNNIDRDRNSSINIMVRYLSQNALWTGYQQFVDNLRQYRLPDGIEVFNTEAK

SEQ ID NO: 54019 - protein, 391 aa, unknown
  TnpB Polypeptide
MIETLKVQLNPNNKQLTKLFQYANCSRFAYNWAIAREQESHKLGNKFLSDCDLRKEFTQLKKQENHKWLTNISNDVTKQAIKDACNSYKRFFKGQTKYPKFKSKKNSKQSFYQDNVKIKFTNTHVKVEGFAGSKRPNKQKLNWIKLSEKGRIPTNCKYMNPRITYDGLHWWVSVSIEVDNNTNSPPISEGIGIDLGLKDLAVCSDGNTYKNINKSLKVKKLEKKKRRLQRSVSRKYNMNKEGVRYKKTSNIIKREKELLKLSRRLTNIRRNHLHQTTSEIVKRKPSFIVIEDLNVSGMMKNKHLSKAIQQQGFYEFRRQIQYKSEWNNISVIIAGRFFPSSKLCSCCGEIKKDLKLSDRIYQCDCGNVIDRDYQASLNLKQYGENVLKQNL

SEQ ID NO: 54020 - protein, 367 aa, unknown
  TnpB Polypeptide
MERTIKFTIPFDQNVIDTIREYNKACNYCLKVGLKNRTLNKNNLHKMTYNKVRKRFKLQSSLVCCARDQASDMLKREKLKKLPIKKEYSSVRYNLRTFSFKLDGMIISIATINGRKKLKVNIQKHFLRYINGRISCATISFKNGKIEGRFISDIVTPEKVKVKNILGIDRGIINPVVTSNNQFFNSNEIKRVKGKYSWLKASLQSKGTKSAKRHLKKLSGREKRFMTDTNHVLSKKIANMPFEAFALEKLQVKRSKKNGNKFNKKLGTWAFKQFQIFLQYKAEALGKIVVLVDSRHTSQVCSNCGHLSRSNRKGVTFKCLKCGFCLHSDLNASRNIAELGKAFFSRLPVNQPIVASFNEFSYKPLTC

SEQ ID NO: 54021 - protein, 359 aa, unknown
  TnpB Polypeptide
MLRKYFRDTKFECPPSYITFRKYITTRLPAELKRELKTSGIPAHSFANSIHDVLKNWKSSSALKKKKHIKDFLIRYQKYNKNKFSIVLESSVFSKDNKRISPTVLKGYIKSVGDQFHKTRVQITKNLKTGLKDHECRLCWDKRTGYITLYVPMEKPEYEMIYRESWCSLDPGLRVPYTLYSPISSADLGTSDRDKIKSLLDRIESRKRFKDAKWFPKFQSHYMKKIADIRDNMHWSISNMLVKSYDKILIGSMSTKSICKRGGNLTANMKQLAYSLSNSEFKNRLASKAAEYGSEMIVVNEYLTSKTCGGCSKTHNVGSSKQFNCPRCPYRADRDLNGARNIALNYFGLFKPIIRHTVR

SEQ ID NO: 54022 - protein, 398 aa, Acidobacteria sp.
VDVVCFPTKLNNSAANIGSNARKSLPKKANFPAEIRAKHDVDGKVVDVVTCCLQVKVPDSFKWALETIEPFARICVDRMMEHRERASSVFYPEIPCVIAKSLIAKYQRNQKCKVVKNLVLPICGDKGKQIKLEGNGIRIPAVLKKQVLPVVWLRKPLGFIRSIEFLRKGGDWFACICYNTQAEFNFTPIGTVGVDRNSVGAVATLADPQTGKVLHLGFNPAHTKEVWRRRKANLQSLGKRRLLHKIRNKQSRRTKYENHLVSKQIVDYAAKHRRAIVLEKLEKVRRGRMRHYVEKSQWSFYQLFRFIQYKAALRGVMVMEADAAYSSQECSRCHQISKPNGKSFRCGYCGHHDHRDANAAFSLSERVMPIGGLATESESRGSALLVMPSLGTEAQQCA

SEQ ID NO: 54023 - protein, 338 aa, unknown
  TnpB Polypeptide
MLLQRRYYRMFGKNLSASRLNAHVAKLKNRTKPHWAALPSQVVQDVVLRYGKAQDAFFDNIKDRKAGLTTRKVGRPKIKPRHKYNSMTFTQAGYTLEGNRIKINCIGTWFSFHKHREIKGNIKTITIKRDRCGGYWICFSCENVDDSEPKLKTGKSAGFDYGNKTFLTSDKGKLIESPQFFKQSFNKLQSLSKALSRKVTGSGNWYRACRALARLHRKIAHQREDWQWKLATELCTEFDILIFETLNLDGMKRLWGRKVSDHAFYQFLQILEQKCAKHGKELKRINQWTATTKPCSDCGYDNKELSLSDRQWTCPRCGSHHDRDINAAMNIKRAGLAA

SEQ ID NO: 54024 - protein, 649 aa, unknown
  TnpB Polypeptide
LRNPAERDRQRIACPHEQIHSLVGRRLVGSHAHAAVGAGRRQRSHIHPDRRERRPGSLHTGRRRSDGRVVRPQGPRLGGLRRRRTYGLQHLTSNPDGHKACLTSYATAPDGTAAKSYRLHSTPFLDTAMALASPVSGRGCPVFQCRKEPPPPFGLSLLSLYARSDIIGIMSQKVMIERVQVRGAAPYLGMSATPDGRQVPLYSTNPDIVMRWLCDGWRCRYNQLRSRRTKWDRESQTAVPLNGRPDMRSDRQARLECSWLTAIPAMVLQSPNRIENTDWWSANKRRRTLKKKHRNPGMMPRFKSRHDDLYFVCWHNKGSNANYRQLNRHHGEVVITGQNPGEYRLDGQPCRYSIHIRVRVSQPIRDYTSIGVNWTKRTLMFVNDPLPISRERTGAMVGLDRGCVHTLATSDNTFIDFPKNRLNHIDREIRRRQKAQARRIAMSGETVKQYRRHASRTYERTSREISRLYAKAHRIIDDWQHKTTTMLVREYDLIALEDLNLQGMSRKAKAKPDPDRPGAYLPNGQSAKRGLNRSLRAASLAGIVDKLEYKTRLTGQNRLILVNPAYTSQTCSKCGHCAKENRESQADFECVRCHARMNADLNAANNILKRGLGHLIGLDEAEHARTESDIPTAYGSRDASALTCGTSTR

SEQ ID NO: 54025 - protein, 400 aa, unknown
  TnpB Polypeptide
MSRYRLLPSPAQEAVLRNHCAHARYVWNLAVEQYQHWRPDRASAPRYLEQSRQLTEARAEHDWLRAGSQTVQQQALRDFAQAMAAFFDPGNPAGRPSWRKAGRDEGFRVVGRGSQWDVRRVSRKVGQVWVPKAGWVRFRWSRAVPAGVKSYRVTMDRAGRWHVAFAAIPAPVPAPGNGLAVGIDRGVAVSAALSTGELLHVPGLSGREAAWRRGLERKLARARRGSGRRKRVKLALGRLRARETDRRKDWAEKASTDIARRFDVIRVEDLHIVNMTRSAEGTVQDPGRNVRQKAGLNRGILRSGWGLLVRRLEEKAPGRVEKVSPVFTSQRCSACGLVDPRSRESQARFVCTACGYACHADVNAAINIAAGHAVTARGGIRDTGPVNREPQLLASLTGCE

SEQ ID NO: 54026 - protein, 439 aa, unknown
  TnpB Polypeptide
LLTNYIYKLRPNQTQCLKMANWIDMLRSHFNWCLNDRITQYNQQFIEGDYCDIRTQSEACPLTSFVSKSGATGNPWKDSKFDKEGKTRNPRRSAGDIQITALPELKIARPWYGGIDSTVLQQNVKRLDAAYKNFFEGRGFPKVKNRSNFTSFTCVMGIKLQGNKIYLPSLGWMRFYNSRPIPDGFTIKACTVRKRQNGWYISIRIEDKSVPEYSAKLLGNNPKVIGCDLGITKLVHLSDGHQIENPKFATTKKAKRTLKIRQRRVSRKVKGSKKRKKAAIRVGRFHQKIGDKRQAHQWKTANKIVSRNVDVMALEDLNISGMMRRCKVKTDERTGRFLKNGQSRKKGLNRSISDASWGDLVLKVEYLAVKQGKNVIKVNPKHSSQECRNCGHTEKSNRNGEKFICSECGYHEHADIGAAKTIKDRALKIVRGPGRETWC

SEQ ID NO: 54027 - protein, 550 aa, Streptomyces sp.
MAEPRKKRQLRSIDPPFVALGPSGVAIRDRLKDLAEQDGKVLRLMGGHLGVLASRDLKARCADGSEHDCEKWAARKQGLTAESSSRWAGSITKATHDQWALSRRCQLAHIKSLEAGVQTLRHRLSLPIGESGTKRAPGGYRSGREWFQKSRRLATLEDRLAQETADRENGIVHVVRGGKKLARNRHNLEAAQLTEAQWRQRWEAERWFLAADGESGKRFGNETIRVTPDGEVSIKLPAPLAHLANAPRGRYVLAAKVAFAHRGAEWRDRIDANRAVAYRIHLDVARGRWYLTASWQRPVVQTIPLATARAKGVIGVDTNADHFAAYRLDTHGNPIGEPRRFHYALSGTANHRDAQIRHAITQVLHWAKSIGVNAVAIEDLDFTAETTREKHGRKKRFRQLISGIPTGRLKARIVSMAAETGLSIVAVDPAYTSQWGDEHWRKPLVTPRRKMSRHDAAGIAIGRRALGHPIRRRTAPPRDDRNDRRGHRTVQADRGVRGRDETRRPVTERAHDARDRTGTHQGTRATSASKTVRDARSAGQWVQDSLLLTD

SEQ ID NO: 54028 - protein, 361 aa, unknown
  TnpB Polypeptide
MLKAYKYRIYPNIEQKVYIAKSCGCARFIYNQMLADRIKLYEENKDLDIKQIKYPTPAQYKSEFPWLKEVDSLALANAQMNLESAYKNFFRDKSVGFPKFKKKGNRISYKTNNQNKTIYIENGYLKVPKLKSMINIEQHREFSGMIKSCTISKNSCGQYFASILVETENFALPKTDKKIGVDVGLKEFAICSDGYREPNPKHLRKSTKRLVKLQKDLSRKQEGSNNRNKARLKVAKLHQKIADQRKDFLHKLTIKLIRENQSIAIEDLRISNMLKNHKLARAISEASWAEFRTMLEYKAEWYGRTIVVAPSNYASSQFCSECGHKNADVKHLALREWICSSCGTHHDRDINASKNLEKLIV

SEQ ID NO: 54029 - protein, 418 aa, Microcoleus sp.
MLNMTWEFKLEPTPEQVDTIERIFAVCRSVWNFALRERKDWLNSRKSPVNACSIEQEYILRADEPYPSYHTQAKRLTLAKEQFPLLTSVHSQVLQQVLRTLDRAFEDMRAKKLGFPRFKNKYRMRSFVFPQLGKNPINGSLLKLPQLGWIRLRLSRQIPGGFEIKQARVVRRASGYFVMLSLQLNVSVPDTPISGHPRGLDLGFDKFVATSDNEQIARPRFLQTLQRELKLLQRRLKHKKKGSNNRHKLNQKIARIHQQITDTRKDWHFKLAHRMSDGVGMIFVEDIDFRSWARGMLSKHSADAGFGQFVNILQWVCFKRGVFFAKVDKDYTSQQCPECGTHTGKKRLDERIHSCPVCFFTASRDVAAAQVVRNRGLELISGLGHSLEVKQTVCGLDAAGTGGKVSLAGTGRSRKLKK

SEQ ID NO: 54030 - protein, 539 aa, Streptomyces sp.
VSEDVEDVVAAGARVVPPAVAARLASMQARKDAGLVGRTAVVPVWLSRTDHVRAHEACHAAAGLWNQTVSWLRGEWTEGAQPGKEDVRRFVTSLRSDQRPFHAHTAQAVAYDVWDAVATSRANRAQGLKARAPWREKQYRPLSLSAGFGWRVTPKGRLALSLGRGRDRIVLALPQVTSRDGRPVGPASWGEIRLCWDRNARSWALHIAYSTPGDALPGPAADRPTVTVAIDEGVINPMTLAAPLPDGSMSVLVINGRAGRAAKRQRNKTVAKLTSRMARCKNGSRKHRRLLAAKKKVEAKTERRLHDFDHQVTAKAEKFTRGIHATWTKHRREVSGPDTIVGVRLVAGDVGGIERNANKKRRASRSTRQQLSQWSRGRQEDFLQYKTGLVLEHINEAYSSQTCPVCNHRTKVRGREYVCRNTTCGFRLHRDAVGGVNIQTLAVNDGRFRPDPDLRVEVMYRRAQPGWSPLQRTLHAYHQDVLGRAGWEACREARRSAQNRATRGTTAGVAVVPAPRDSTDQTAGTTTLAGAGRTPVHAA

SEQ ID NO: 54031 - protein, 118 aa, Gallibacterium sp.
MIYIEDLQVSNMSKSAKGTVEAHGKNVKQKSGLNRSILDQSWFEFRRQLSYKTQWRGGFLVAVPPQNSSRTCPCCSHIAKENRQTQAHFECVECGYTENADVVGALNVLAQGRVIALA

SEQ ID NO: 54032 - protein, 430 aa, unknown
  TnpB Polypeptide
MRQVERHWIKEGHELYSICDDSTFKAKNLYNAGLYQVRQSIFQRNKSEEENKPPVLSWIELVAQFRKEKQVDMLALPSKVSTNILKLVGSNISSYYQLLRCYHDKANTSVTNKPGLPGYLHKTKGRYIVEFTHQTFSKKRGTNGELILCPKDLKLSIPTKIEHPNCVRIVPKLGVFLIEVIYEVETAPLKHTGNYAAIDLGVDNLASVTFSNGVQPLLVKGSKIKSINQGYNRLIAKAKSKLPANQKTSQGIHRLWRNREMKLQSELHKITSFLSLYFDEMAIEKVFIGKNVGWKQGLALGKKTNQTFTQIPFTTFISQLSYKCQLKGIEVIEQEESYTSKASFVDQDDIPIYGKSEQKPTFSGKRIRRGLYQTKNGLLLNADVNGSYNILVKGLLTLGKCLNRENLSFHTRSLRNYHSISNKELLAQIM

SEQ ID NO: 54033 - protein, 375 aa, unknown
  TnpB Polypeptide
MVNYCIQKAVENKISSFVKLWHIVKDEIRRWDYARQYHVTACRVACSILKAWRKKVKKKEADPKSPPQVKRLFVKLHSTLTKFEGNRLRISVRAREYVWVDLKFGKYQQRFINEWKQGKLKIGEILITPEKVIVPFKKKIELIEAKQWLAIDINECNVTGVSTDGSWFIIDTSEVKRIRHVYFKKRKRIQSGIRTGKRRKRLLAKYGRREKNRVKDILHKVSKTIVEFAKVRGCGIILEDLNGIRKRIDYGRVLNRRLHNWSFRKLQHYIEYKAKLEGLPVIYVDPKGTSSYCPICGEKLAPNGQWREKKCVNCDIVWNRDVVACLNLLKTKDVPVCVAGECLPMNLEVGKRLVIVYEKHKRKCYLSLMVSVNFV

SEQ ID NO: 54034 - protein, 384 aa, Methanofollis sp.
MLQAYMYRMYPSQEQVALLMKHIHACRFVYNHSLEQKIRVYEQEGRTLSCFDLNNRLPALKEDYPWLKEVNSQSLQSANKNLDNAFSRFFREKKGFPRFKSKKNPVQSFQVPQSYSVDFDQRWIKLPKISTIRTIFHRVFTGKMKYATVSVTSTGKWFVSILVDDGKNEPDPAPFTLDTTLGIDVGLKHFATLSTGEKIENPRHLKTSLQRLKVLQRRVSRKKKGSKNREKAIQKLARCHEKIANQRNDFLHKVSFRVVSENQAIAVESLNVGGMMKNHLLAQGIGDVSWYAFFTMLEYKCRRYGKTFLKIGRFDPCSKICNTCGYLKRDLALSDRGWVCPDCGAHHDRDINAAINIKKFALQEQNLVGVSGAGRTGEPVDLPQ

SEQ ID NO: 54035 - protein, 449 aa, unknown
  TnpB Polypeptide
MCEAYQSIDSCRLYGSSEPYDSYGERAGVEIQRGIKFRLYPTPEQAAILEEQGHAARGLWNLLHEWWTWGGRHRRPSLKQADEAIRQARKEIDWLTVLPAQAAQQVLKHYTRAWANFWDGRAKPPRFKSRIRSRMVIDVPQGRDLDVTKLSRRWATVKIPKVGVVRFRAHRAIPGRVTGARLVNEANGWHIVFRTTWEQPDPAPHAGPSVGIDRGIAVPLALSDGNHQHHGPWLRPKEAERLLRLERQAARQRRTRKRGERDSKRLTRTYDQISDLRGRAARRRADWQHQTTRRLAGTYSLIAIEDLNIAGMTRSAKGTAEQPGRNVRAKAGLNQAIQGEAWGQLAEQLTYKTYEHGATIVRVPAPSTSQRCHACGFITPGSRESQARFVCKNPQCGWAGNADLNAARNIHHAAVRAATAPGSGVAGRRALQPVGGATKRQPKRKEPAA

SEQ ID NO: 54036 - protein, 359 aa, unknown
  TnpB Polypeptide
MQIYSTYSVKIKHYNHIFKDTVSVYRGAVDFLITVCLNEWDNISKIDQSQKRQQYVERLCHRTNGNPNPVYHFDKKFYKFPNYLRRGAINEAIGKVSSYKSNLKNWEETDIKVHGNKPSFPRAGFTYPCMYRTDMYKQTELYEAKIKVFIRNTWDWITVKLRKSDMDYIERRCAGRKKCAPTLQKRGHEWFLDFPFEGRVTLCDTAVKDQTVVSVDLGINTAATVSVMCADGTILGRHFCKLPKEIDSLSHSINRIKKAQQYGNSRTPRLWARTKGINHDISVKTVQFIMDVAVLYNADVIVFEHLDKQGKVKGSKKQRLKLWRSQEVQRIVADKAHRLGMHVSHICTWNTSRLAFDGS

SEQ ID NO: 54037 - protein, 406 aa, unknown
  TnpB Polypeptide
MHKAIKVRLYPNDKQAQKLSQVIGSARWWYNFALNLCNETYKATGKGLNQIALNKHLPKLKKAEETSWLNDCYSQVLQSATLNLTKAFKNFFEGKTKYPRFKSYHGKQSCQYPQNVSIKDGCLKIPQLGLVKASIHRIFDGKIKTVTVSKTPTGKYFASILFETEQDFPVVTIIGKICGIDLGIKDFAIVNDGEKTSKYANPKHLKKHEKNLARKQQKLARKQKGSKNREKAKKLVAKVHERTSNTRQDYLHKLSRKIVNGNQVVVVEKLNIKGMVRNHCLAKAISDVGWGMFINFLDYKLKEKGGLLVEIDRWFPSSKTCSNCLYQMSEMPLDVREWTCPSCGTVHDRDENASKNIRAEGIRIIKTDGIAVSANGGTVRPKGGRKSVLGHEPVKLEANTVIFDLV

SEQ ID NO: 54038 - protein, 374 aa, unknown
  TnpB Polypeptide
MKMYRFRLYPSKRQEKQMNTHLWLAKNLWNDLLEHSKNIYRSFDKFPSRDALQGMTKDSGMFSQTAQEIAHRVEKGIWRYVKLRKAGDKKAGFPRFKSMDRMKSLNYPQFGFSLNRKLKVAPFGEISLVQHRQINGRIKTLSLKKEASGKWFACFTVEETPFIKVQNGKSKIGIDLGLKTLATISDGTIIKNPRHLKKHADHLARLQQLLSRKEKGSRNWWKAKKKVALVHEKVANTRADFLHKTTTNLVNAYSLIALEKLSSQDISEENFGKSINDAGWGMFANMLVYKAESAGCQVMFVDPKNTTQECSSCHEIVKKDLSIRVHDCPCGLVMDRDLNAAHNILIRATAGHAGSNASEDGTMVPSVKEETRTL

SEQ ID NO: 54039 - protein, 477 aa, Lentzea sp.
VIVHQAYRFALDPTPAQARALSARCGAARFAFNWGLALVKAVMNQREAEASYGVAPEDLTPAMHWSLPALRRRWNQAKGEVAPWWAECSKEAYSGGLDRLARALKNWSDSRTGKRAGPVVRFPRFKSKRRARRSCRFTTGGIRVEPDRHHVTLPKLGRIRTHESTRKLARRIEAGTARVMAATVCFEAGRWFCSFTCEVERNDQPPARPDAVVGVDLGVAHLAVVSQPLPGGTDAAGFVPNPKHLVRGSAALRGACRTVSRRRGPDRRTDTQPSKRWERANQRRNRIHHRIANLRRDGLHKLTTALAAEFGTIVVEDLNVAGMLRNRRLARAIADTGLAQIRCQLAYKTRWRGTWLIVADRWFPSSKTCSECGVVKVKLPLRVRVFTCESCGLRSDRDLNAARNLAALALRSTTGTGEAGDLEPQGSNGRGADRKTHSTWAGGDEAFTSHRATGSDEDRTTGNSVLPQRCYPDMVCR

SEQ ID NO: 54040 - protein, 392 aa, unknown
  TnpB Polypeptide
MKKAYVFRIYPNKNQEVKMDRTLSTCRHLYNDSLAERKKQAELNRLKRDLQVFPWGKPEWVSYEDQANALSESKTAFQKEVHSQVLQNTLKRLDRSFKNFFNGFGYPRFQGRNRYNSFVYPQSGFELKEGKLSLSRIGSLRIVLHREMEGRIKTCTIKKDVDQWYAIFTVEIEQKIEKVPVATKIGIDVGLASLLTLSNGEQIEPPEFLRASEKRLAREQMHLSKKKKGSQNRNKQRIEVAKVHRTIRNQRKDFAHKTARNLVTRFDFIAFENLHIQNMMQNHHLAKSIADAGWYQLQTLTASKAEYAGKQVKLCIAAGTSQTCHICGNIQKLTLRDRVFHCTQCGNTENRDVNAANNIENRCTVGIAGIEACQSNLNREPMKQEATLLVGW

SEQ ID NO: 54041 - protein, 226 aa, Serratia sp.
IQYKLIIGKVSSITLSRGATGKYYASILCDDGLTEPAKPTLITRVTGCDLGLSHYLIQSNGKKIANPRHLVRASRNLRRKQKALSRKIKGSVNRAKARLQVAKCHEHVANARADFQHKLSRTLVDENQAVIVETLKAANMMKNHKLARHIADASWSGFVMKLEYKAEQSGKHLVKIDQWFASSKTCHCCGYKMTEMPLNKRIWPCPACGVEHDRDINAAITSSTRV

SEQ ID NO: 54042 - protein, 237 aa, unknown
  TnpB Polypeptide
LAAAIDIGLDNLATITFNDPAIQPIAVNGKPLKAVNQWMNKKVARLRSQLGFGTSRRVQNIFRNRNNFVHTYLHACSRLIVNQLLALGVTQIAIGKNEQWKSKINIGRRNNQSFVQIPHTKFIAMLTSKLEAVGIKVIVGEESYTSKASFLDWDNIPTYTPGSNNPQKFSGQRLRTKEYRAKDGTKIHADVNGSFNIGRKVIPNSFDSLKLIVERNRGCVVAHPRRISPKITHRNLS

SEQ ID NO: 54043 - protein, 376 aa, Chloroflexi sp.
VRKAFKYRLYPTRQQDRAMSAMLETHRRLYNDALAARKQAWEQEQRSVSYGEPSGQLKSARKTNRFLAATNFSSCQATLRRLDRAFQAFFRRVKAGETPGHPRFKSRNRFATVEFPSVGDGCRFDGRCVSFQHIGRVKIKLHRPIEGQIKTISYQREADGWYVVCSCDLGDVNPTPADGPAVGIDLGLKAFLVTSEGERVAPPHSYRQAQAALRRAQRKVARRQKGSTRRAQAVHALHKPHQRIGNRRRDFHHKTARALVTRYGTIIHEDLNIRGIARSWLAKSTLDVAWGSFLHILSYKAEEAGVTVMAVPPHQTTQACSRCGALPKVLKTLADRVHSCSYCGYVADRDLNAAQNMLRLGSSLQDKTCADGQCVS

SEQ ID NO: 54044 - protein, 369 aa, Planococcus sp.
MANKAYKFRLYPTNEQEQLLLKTFGCVRFVYNKMLAERKEIYEQFKDDKELLKKQKFPTPAKYKTDFEWLKEVDSLALANAQLNLQKAYTNFFAGRAKFPKFKSRKTKQSYTTNRVNGNILLLASQIKLPKLGLVRLKLHREIPSCHLIKSCTISRSATGKYHISILTEFECTPIKKEIKKIIGLDFAMNGLYVESEQGEIANYPRFYRQAQQQLAKEQRILSRRTKGSSRYEKQRIKVARLHEHVANQRKDFLHKTARRLVTHYDCVVIEDLQMQGMAQTLRFGKSVGDNGWGMFTAFLHYKLGEQGKKLVKINKWFPSTKTCSSCGHRRDMPLSERTFSCACGFVSDRDWNAAINIKNEGRLMLELS

SEQ ID NO: 54045 - protein, 456 aa, unknown
  TnpB Polypeptide
MLSSGQLNGHEEREPISPAIPEKGIYEVEYKNKRTNVVRLLPNGFQERKLRKLADASARLFNEVNYERRQQFFKQHQVDFKSTWSKYYEKYKNILVPANTQAVLQKNNEAWSSFFSLLNLKKKGKLPPHMSHVSPPRYWKEEKKRKLLLVIRQDKYVVDEKNHKLILKDFNLEIEFAGRLRWYGKQGRLEIYYDDVENAWYASIPVEVGVEVTKTGKKSKYIVRGERKSIQIKTPKGNKVASVDLGINVLASVVIDDGTWLLYKGVRAKEDFFYLQKKIADVQSLADKARNIGEYEAQEELNREKRRLFKKLTRRLHHLYRTLASHMVEKLHDQGVSVIFLGYPYNIAQDKGNKFTVNLWSYRMLMKAIELKAQEYGMKVYEVVEYNTSKYCAYHNVQVSRRPRGVVSCPKGHKLHSDLNGALNILKKAIGIVISTVKKPLSFLVLHNGVAPIKGV

SEQ ID NO: 54046 - protein, 404 aa, Burkholderia sp.
MQRFQAFKYELMPTGEQRRQMRRFAGSCRFVFNHALAMQQANHETGGKYIGYVAMAKQLTMWRNSTETAWLKDSPVHSLQHALKDLERAYRNFFEKRAGFPRFKRKGHSDSFNYPDPKQIKLDQGNGRIFLPKLGWLRYRNSREVLGELRNVTVSVSGGKWFVSIRTRREVEIPVPRGGAIGIDMGIARFATLSNGTFYVPLNSFRRHEVVLRKAQRAMSRKTKLSNNWAKAKARVQRIYSRIGNARRDYLHKCSTAISQNHAMVCIEDLQVRSMSKSAVGSTETPSRNVRAKAGLNKAILDQGWSEFRRQLDYKLAWNGGLLVVVPARNTSRTCPACGHVSAENRSTQERFRCVGCTFEENADLVGAINVLRAGHARLACADTSPEVGASGQEPSEATMQSSI

SEQ ID NO: 54047 - protein, 396 aa, unknown
  TnpB Polypeptide
MVRVIKSQFYPSEIQSDILRETMIEYSKAMQSAFDYGYHNNTRNKNKIHEETYANFKKSSPLNSDLIISARGKAVDTLVSLNGIRKKTGINSKPVIYKKYHPMRYNNKCSTLNIENKEISLATIVKGNRIKLNLHIPKYYQQYIGNGWEFKSLELILRDKRGIEKWYIHFSVEKYQEELDFEFTTEYIGIKRGMKNLIVSSKNKFYSGKELRKLKTKNYKKKQSLQKTGTRSAKRKLKENSGREKGFQIVTNHEVAKNLINDLQPNSVLILEDLAGIRDEATYPKQSKFSRELNTWAYYQLELFIEYRAAEKNIRIEYVDPHQIQQICSKCGYNSKSNRKNAVFRCGECGFELNADLNASRNLVNRFISQLPIRQQTQEAIRFLGGAPVIVPNVTS

SEQ ID NO: 54048 - protein, 557 aa, unknown
  TnpB Polypeptide
LPPSTYDNGAPHDVTSVAAGLWVCTIPLRVSSVEDKYLRSRFEVARQVYNASLGEAMRRLEAAWANDLYVQAAAMRAAAGLRSSRGGDGTHARARRGAETASGRREGGPWTALYRAAYREVGFSDYGLGTYALRLRAPRCDCKRARRIPPRVCPNCGFVSTLTWVGDHLAAFSVQRLGVRAFRTAQRLALGSARQVRFLRPGGITAVDGGSACQEISFDLERSSVVWKVPARPDLILRALVDPADEVMRHGLESHQRSVRVIRRRERGRDRWYAQLTVVGQPLAKKRHQRGTGTAGISVGIRGVGIVHQSGAQLSEFCGELANVEMKLRVLHRRMDRQRRANTPENFHPDGRIKGRGELAPWRDSRRYLAALDELRELYRRQREARRTLQGALANEVLAHCDDISVQVPAFRRLQRRYGRAIERRAPGLFVTVLERKLSPPRGHLSRAVFAADLPLQDDCHGCGSTVTKSPRELRQRWAARVHRCSCGVVMQLDLYRAFLAWCSPGGHLDRGLAAERWLGAQAAMLAAWSDVVGEATVGRLSEGRPVTTTPDRTRLS

SEQ ID NO: 54049 - protein, 401 aa, unknown
  TnpB Polypeptide
MIHTERHYIKENEQILVLCQQSKELYNRCNFLMRQAWINHQTLPDISKLIEETQSLDCFKNLHNTKTAKQTIRKCLTDWTNFKKALNAYKKNSSKFLGIPKPPHYKNKLAQVVFYNETIKGGQSSKLEKQKSGIITPSNDCFSIKSNRKYKQVVITPKTFGFIIDVSYETSNIIPRKSKQESVVCIDLGVNNLCAITSDKHSPILINGRIVKSINQYYNTNPCKSRSKKRYFRMENYFHHVSKFIIDNCANNKIGTIIIGKNDGWKQNTKKGKRMRKKNRQEFQYIPFGKLIEKIVYKAEMTGISVIFTEEAYTSQSSFLDRDILPDYETGKKTNPEFSGKRIKRGLYQSKEGILLNADCNGSANIGRKIIPNMNNEWDRSVAATPVIVNPLRSKKLSVYV

SEQ ID NO: 54050 - protein, 310 aa, unknown
  TnpB Polypeptide
LKKISRFTYLKEIGSQAVQDITQRIDKAYKLFFRNLKHKIRTAPPSFKKIKKYKSFTLKQSGWKLNEADNSIIIGKQRYRYAKSRKIDGKIKILTIKRDALGDIYLYFVCETSENEVLARTGKSVGFDFGLKMFLNASDGKDIASPLFFKQNANAVKRANKNLSRKVKGSNNRQKAKLTLARLHKKIANQRNAFHWQVAHRLVAEYALICLESLNLKAMQKRFGRKISDLGFADFVDKLKYLSNKTGSSVIEIDRFYPSSQICSACGYQNTKIKNLEIREWVCPECGSTHNRDRNASINIEREGIRIFFA

SEQ ID NO: 54051 - protein, 800 aa, unknown
  TnpB Polypeptide
LSAAKRSAACAGSQRPTRRYRTPVPGAIVTSTEIPLSVAPTWRSGSDPHRPAADSSHFPAPSPAARIRPDEASSAANPRRNSAILRIVATLLRPAENLVPDLREAIREARGARVRPVEPVAAEDHPHAVLPLAHRVRPDADIGERRHRLLHDAGVGRLRGHRVEDDAAPAAAGNHRPHPLEHRLEHARDAGEDRHPVDEEAGSRGERVRDQRRALRNLGHQHPVLRVRPPVRAGFQRRLRLGVHDQRHPGDLGDGVPGDVVRRGADPPRQDEEVDLLAEPAQVPHHHVNIVRKDRAQRRLRPPLGQQRDHVGEVRLPDLALQHLVAEDHDPHSRRHAPLPVRIRSSYPVMGRKSLIRCASASAFRSHRLVGRQEKDRADDRIVLFPGHTTGYTIAMQRLQSFKYELIPNGQQHRDMRRFAGSCRFVFNKALAMQKERFKADEKKLGYAGLCKLLTEWRNGTETPWLRDAPVHPLQQTLKDLERAYANFFAKRANFPRFKKKGQSDSFRYPDPKQIKLDQANGRLFLPKLGWLRYRNSRDVLGTVKQVTVSQSGGKWFVSIQTEREVEQPRHESRSMIGLDVGVAKFAALSDGTVYMPVNSYRKHEKRLAALQRAMSRKTKFSNNWKKAKACVRKLHSKIANTRRDYLHKTSHEISKNHAIVVIEDLQVRNMSKSAAGTTENPGRNVRAKSSMNKSILDQGWFEFRRQLEYKQLWSGGWVIVVPPQNTSRTCPACRYVAKENRKTQALFECVACGYSENADLNAARNILAAGHAVLACGESAQSGHSMKQEPAEVSQPAFG

SEQ ID NO: 54052 - protein, 487 aa, Lactobacillus sp.
  misc_feature (342)..(348): Xaa can be any naturally occurring amino acid
  misc_feature (422)..(428): Xaa can be any naturally occurring amino acid
MTKKKKKVVAKVKKTDETKDEKPKRKTLMIPMSELPYHLGLKMRIYPNNEQKRLIAINSGISRSVYNKLIAINSELNQLKKVNVYVKQVADRIEALKERKSKLSKYYFYMDSEDVDSLTIAQAKRCYGVAWNMYHKVHSSGRPKYHKKGVNDGYQTSCIYKSEDKKIENCTPFSGSVCFLDMKHVKLPKLGRIRISGSSYRKVLAHNPNFRIGTATIKYDASGFYLSLQIGDVIPFKAQKAKTGKKTGIDLNLDNFLTDSDGTVVDNPRYYRKSLKRLKKLQRRASRRQNRAKKEGRKLWQSKNYQKARKQASRLQRRVRNQREDFLQKLSTAYINNHDVVXXXXXXXDVVVLEDLRGKNLMKNHALAMSISDAGWTSFQRMLEYKAGLYGKAFIEIDKRNTTQRCHACGSIMGHNGHEKLXXXXXXXMGHNGHEKLTLKNREWDCPMCGAHHIRDYNAALNILEKGIAKLSDQEYKIIPYDSEAAS

SEQ ID NO: 54053 - protein, 341 aa, Lactobacillus sp.
MTKKKKKVVAKVKKTDETKDEKPKRKTLMIPMSELPYHLGLKMRIYPNNEQKRLIAINSGISRSVYNKLIAINSELNQLKKVNVYVKQVADRIEALKERKSKLSKYYFYMDSEDVDSLTIAQAKRCYGVAWNMYHKVHSSGRPKYHKKGVNDGYQTSCIYKSEDKKIENCTPFSGSVCFLDMKHVKLPKLGRIRISGSSYRKVLAHNPNFRIGTATIKYDASGFYLSLQIGDVIPFKAQKAKTGKKTGIDLNLDNFLTDSDGTVVDNPRYYRKSLKRLKKLQRRASRRQNRAKKEGRKLWQSKNYQKARKQASRLQRRVRNQREDFLQKLSTAYINNHDVV

SEQ ID NO: 54054 - protein, 425 aa, Haloferax sp.
MTDGKALVKTLDFQLNIQSNNESLLYDACLESRSVYNETIRLAKLGMDWDAIPDHVADDADLVKNTTQRVVDKALGAMKNYYEYEDFGQPSHTKDGVYPLRSNYEEGYNLSLTDDGDVAFRISAKPYKHVKGVLKGEDAHIGILKTAIEGDEWKIGTAEALFHDGTPELHVNVTNTKRTVRDKQDSRTAIGVDVNEDNVALAALSEDGVEDTLVIDFPEIKFERHRYFTIRKRVQNVGKSSTHDTLKGREERFVRDRLHKVSRHIVVWTQQFEKPCIVFEDLKEMRDSIDYGTRMNRRLHHLPFRTLQYYTSYKASFEGIPTSWINPEYTSQRCPMCGYTERANRNKKRFKCRSCSHQDHADRGASVNIAVKGIEKHQNWNVPALNSLPIVRKVRRQASGAVDAPTVTHDTVRGYQTDGAAGVPD

SEQ ID NO: 54055 - protein, 377 aa, unknown
  TnpB Polypeptide
MDRTLRLPLNPTTEQAESLLETMRQFTQSFNLVSAEGWRLKEGNAFTLHRLTYRDCKTLCPKLVSDLHVQARQKAAEAVKSAIALHKKGRKTLCPVSALCPPRYNCNSFSVDWQKGLANLASVTGRQKVVFTVPAYAISLVGNRVATADLMYRKGRFTLHVVLKLDDAAFVDNGAALGVDLGVCRPAVTSDNRFHGKRRWREVSKRRFRLKRKLQANGSKSAKRHLKNLAGREQRFRRDCDHVLSKGVLHGITAGTSVVIENLTNIRTRVKATRGDAKRRLHAWSFAQLASFLTYKAETAGCRVVGVDPRHTSRRCSRCGFIYRGNRPSQSRFHCRSCGFQLNADLNASRSIRDKHLVGWVRNPSDGPLSDGLSSQT

SEQ ID NO: 54056 - protein, 228 aa, Methanomicrobiales sp.
MPSACPGIAFRRSPYTFTPHGNARLQSIKDKQGISGITKRQARLLKRWDCRITEALNRYANWIVNYAIQHRIGTVILPRWGGIKDKINHGRRGNQNFVQVPYHKFRQKLKSNCELYGIRFDNTHSEAYTSQVDALALDPIKKPPCGRKRRVKRGLYQSALGILINADVNGALNHLRKVAGDSVIRRIIGRGRVNRPVRIRTAFEESAFAHIKLQPGAPQGATAASPTL

SEQ ID NO: 54057 - protein, 124 aa, Clostridium sp.
VKELLKAYKYRIYPNSEQNKDLDIKKVKYPTPAQYKKEFPWLKEVDSLALANAQISLNKAYKNFFRDKSIGFPKFKSKKSNYYSYTTNNQKGTVYIQNSRINLPKLKSMIKIKQHREFNEVSGW

SEQ ID NO: 54058 - protein, 346 aa, unknown
  TnpB Polypeptide
VACRGLPNNWALARWKERYEAGEKVGESALRKELNSIKREQFPWMLEVTKCAPQLAIMDLGEAFNNFFKKKTKVPRFKKKGVRDSFELSNDQFKTDGKRLWIPTLGWVRMRESVRFVGKAMKATVSGRAGIWFVSITVETDDIPKASENQAVVGVDVGINALATLSDGRSIAGVKAHKHLLPRLRRQSQAVSRKVVRSNNHRKAARRLARTHYCISCLREDCLHKLTTDLVQNYSVIAIEDLNVSGMLKNRRLAQSLIDSSFGEFRRQVEECTDIFFAMNDWTFSSVSAGLAWVANPRTSTIGLLLEGQIAAKVPVIGLGLKLSANINALNPYGALTAVVLLGWMP

SEQ ID NO: 54059 - protein, 377 aa, unknown
  TnpB Polypeptide
MIIRKTFQFHLRPTKKQAKALQFHLDECRWLYNHLLEQRKTYYEELEESLTKFQQNNFLPFIKEERTSLTLIHSQVLQNVTDRLDKSYKAFFRRVKSGQTAGFPRFKGYNQYNSFCFSQSGFSLVDGKVKLSKIGIVRLKLHRNIEGKVKTCTIKKTATGSWLISFSCEIESNPLPENNKSVGIDVGLETFAVFSDGNEILNPRFFKQAEKELAKAQRKLAKEEKGTPKRKAKRLIVAKVHEKISNKRKNFCHQESRKIINNYQYICIEDLNIQKMLDNSFLSKSISDASWGLFRQHLTYKAEYAGRKLGVVDPAYTSQTCSNCKNIVAKKLSERKHSCQVCGYQDTRDGNASKNILALGLDSQQAIARSSRFQAGE

SEQ ID NO: 54060 - protein, 382 aa, unknown
  TnpB Polypeptide
VIVVYKSFKFRLYPDNKQKELLNKSFGCSRFIYNYYLSNIENNGYQNAYSNISDYVNNLKYKYLFLQEIDSTIIRKTLFHLDDNLKKFYDNDFGYPKYKSKFDKHSYTTSAVYKKYKYKNYCNIELDLVNRKIKLPKLKWIDIRGYRNIKNINGKIVNATISKEKNGKYYVSVVFDMIDIKNNDFIPRSIIGIDLGIKKLLTLSDGITYDNNKYIEKYEKRIKRLQRELSRKVKRSNNYYKCKKKLAILHSKLKNARNYYLHNITKKITDEYDIITCEKLTVKKMLEEHNLSKKISDASFNEIIRQLEYKSKYKGKLFYQIDTYYPSSQECHVCGNIDKKYKNLNERIYKCSKCQNTIDRDLNASINIMFEGLKIYMKEVII

SEQ ID NO: 54061 - protein, 606 aa, Rhodococcus sp.
MAGTGYTALRQFSFTTRPHLAVDDATGEPIGLDDLDIRAGWMLDLISGAEAELISRLWQPVTFDVLATGRDSHGRALPKHGHVAAARLGWTPHYPDGVYAPSRVTRVVTAQAMATLRTLTYRDNAIAALSARFDPETGRLSAPSCAAEYVPPGFARGVRRQLIARTRRIDDPDSGAAQSTRLRITDVQAPPRTSAMARLSAADRQLAHLTVTDAVLTLTVTLPTAPAPGGRAQWRRVRVIAAIPPHLHGRPIAEWHLPTLHLDHRGLLLRCAATEAVPAADLTAGTVAVGVDWSPSTLGAAAITADGPQGLMSDYRGWTYDDRGLGTKLARLQSEGQRLHRKAARLRRLAATAPPEVRAQLEAKIAVLDGHRTAVGAKRGKINRELAFHFGRQVTDYATAAGATVIAVEDLTTLETRGHGRANNNRAAQSARRKAVDALTHTAAGVGVTVVSVPARGSSALCPGCDEPLTRPGGYHSAWCGQCKVGGNRDHVAGVNLAKRALLGRGQVVRKRGGNPQIRVVEHAPVRRCRDKMCPTPSRPRHRRVRRSGPAATPRVGVNQTKIVPAPQASVWDTVQPATPQGVTGSREVHPSPTPATSVVGSTRSM

SEQ ID NO: 54062 - protein, 218 aa, unknown
  TnpB Polypeptide
VTTITKTLHATFAPPTAHKQSKLNDLLETYRDGLQEAFDAGASTMSAVSKIVTSYELPYQAKAALCNYVPKLRKTYNATELDDEHPIRLTNQAAKFDHSNEREYEFMWWVPRPGRGTNFWIPLRINPEQKDLWHDLVSEDAKSGEIRLQKHRKNWVLHVTGEYPVEEPTTDGDTTHIGLDIGETALITGCDLKHGSPTDPLVYSGSRAKHLRKEMHTL

SEQ ID NO: 54063 - protein, 379 aa, unknown
  TnpB Polypeptide
MEQMTITAKIQIVADEADKVLLDETMSVYRNACNYVSDYVFRTHDLKQFSLNKALYSTLREKFSLKSQMAQSVLKTVIARYKTILENQNEWIKPSFKKPQYDLVWNRDYSLTQNCFSINTLNGRVKLSYFADGMSKYFDHTIYKFGTAKLVNKHGKYYLHIPVTYDVEESNISDICNVVGIDRGINFVVATYDSKHKSGFVSGKAIKQKRANYSKLRKELQMRQTPSSRRRIKAIGQRENRWMQDINHQVSKALVENNPKHTLFVLEDLSGIRNATERVKTKDRYVSVSWSFYDLEQKLIYKAKQNQSSVIKVDARYTSQCCPCCGHVEKSNRNKKIHLFACKNCGYKSNDDRIGAMNLYRMGIDYLADSQVPNTVVTE

SEQ ID NO: 54064 - protein, 364 aa, Streptosporangium sp.
MLVTEMVKLAPSAEQGEALLATMRACNAAANRVAEVAFKQRTANKIAIQKLLYADLRADFNLSAQMAIRSIAKACEAYKRDKKIKPVFRELGAVAYDPRILTWKGRDTVSILTLTGRIIVSVVYQGRWLKTTGTTVRGQADLIYRDGMFFLAVVVDVPEPPAGPEPDEWLGVDLGIVNIATDSTGQAHSGAGVRAVRRRNRILRARLQSKGTKSAKRLLKKRRRKESRFARDVNHVISKHLVGKAKGTGSGIALEDLEGIRDRVTVRKAQRADLHSWSFNQLRTFLMYKAAIAGVTVRAVDPRNTSRTCHRCGHCEKKNRPTRDDFRCVACGFAGPADHNAAINIGRRAAANQPNAGDSLGSAA

SEQ ID NO: 54065 - protein, 413 aa, Streptosporangium sp.
MVVSHFLSVGVGRLLGVSRYRLQPSPAQEAALLEHCGHARYVWNLAVEQHAHWQRGRASAPGFAEQCRQLTEARAACEWLAAGSIIVQQQALKDFHQAMANFFGQTHRRPTWRSRGKNEGFRIVAVKAGDVRRLSRKVGEVKIPKVGWVRFRWSRPVEQAKSFRVTRDAAGRWHVAFAVIPQPIPGPGTGAAVGVDRGVAVSAALSTGELLSVPGLRETEKKRLLRLQRTLARAKRGSKQRTRVKVVIARLKAREGDRRKDWVEKTSTDLARRFDVIAVEDLKISAMTRSARGTVEAPGRNVRQKAGLNQGILANGWGQLVSRTEHKAPGRVHKINPRYTSQTCNACKHIARESRESQALFLCVACRHRDHADVNAAKNHRDTAAGHAVAARGGLPLGEPVNREPQRDLLVVG

SEQ ID NO: 54066 - protein, 375 aa, unknown
  TnpB Polypeptide
MRVTIKVKISEQPQFVELYDKFLKACQYATDKAFEHKIKHKFALHKLIYYDMRKKFQLKSQFCINAIARGFEAFKSCEDKVVFKSVPLRYDRRTFTFKPNSIRLTINDGRIDVPIHIADYYIKYLAWTYQTADLVRDRQNRYFLHITFSKDIIINKVTRNNVVGVDVGVNNLAVTSDGKVFSGYKTKIMQYQYLRRKLQRKGTKSAKRLLKKVSGRQKRFMRHINHNISKNIVADADIIVLEDLKGIRKSRNKYKGKRLNRWLNSWSFFQLQEFITYKAEMQGKVVKKVNPYMTSQTCSRCGKVGSRYSSSFVCLHCGFASDSDFNASCNLRRHLITMPYNSMDEGKGSFGTSASDIRVKYPAFRQWEYVINPTT

SEQ ID NO: 54067 - protein, 332 aa, unknown
  TnpB Polypeptide
MAINPGLGALTYATEDGTIAKVQIAPSADTDHRAVRKLQRAMERSRQATNPDNYETVEVVRHGKKHKSLKVKSGRLQWRFSKRSESLRAELAEIFRLSAATRKREHGEVCNWLLGHAGHIIVEDNSYKAFQRGRFGKTIGRHAPAALYAQLTNKAESAGLLVEVVSPKKLKPTQHNLLTGQFVKHELWERRVRLGNDDDDRWIDRDAATCLNMLYADLEKETHAPERIREAVPAGATAWRDAGVVVIQAREGITEREFGRFRQRGIPTLAVQGLRQQGFRGRSNNKSGTTPRRKPRLYRTPPTSVARLFRHIYTRCPFGSTRERAMKPTPSA

SEQ ID NO: 54068 - protein, 354 aa, unknown
  TnpB Polypeptide
MKRTNTFDIAPDSETTEEILTRVLDASASLWNKLTYDRRQQFFDGESVWECDGYYDEYVDVLSGATTQQIARVNDTAWRSFFELLDDPEYDPSPPGYWGNQDDGRELRTYIRNDSYTIQWNRRSRLEIRIGMDLKDEYGFGMYERLRLPVRGNPKWCGDGGRLEISYDSVEETYRVHQSVTIDDVEESRPDGSEAAALDLGANVLVACTTTTGRQYLYSGHQPFEQFRETTNAIASAQAKLPDGQHSSQRIKRLYRGRSRRRDHAVNALLRDVVERLDEAGVTTLYHGDLTGVLGEYWSVEANLKARTFWAHRQCIDRLGSVCEEYGIDVEAISEAWTSQTCPECGERDRTRRH

SEQ ID NO: 54069 - protein, 386 aa, unknown
  TnpB Polypeptide
MKQKRAYKYRFYPAEEQKRILARTLGCCRYVYNWALRKKTDAYHQDAQRLSYKTLSAALTELKQQEETAWLSEVSPVPLQQALRHLDKAFLNFFAGRARYPTFKKKRHQQSATYTATAFAWDGTSLLLAKMTEPLDIVWSRPLPKGSKPSSVSVTKDGADRYFVSILIAEDIAHLPETDASIGADLGLKSFVVTSSGEVIGNPKFFRTDEKNLAKAQRRHAKKQKGSKNREKARKKVAHIHARIADRRRDFLHQLSTRLIRENQTICVESLAVRNMVKNPKLSKAISDVGWSEFVSQLDYKAQWYGRHLVKIDKWYPSSKRCFACGHILDSLTLDERSWTCPECGIHHDRDINAAQNIHAVGLTVFEACGEAVRPGAVKAKPGKPR

SEQ ID NO: 54070 - protein, 387 aa, unknown
  TnpB Polypeptide
MLLAHKIELRPTPEQAIYLDKACGSKRHCYNQLLAHFSKPENKWSKTAAYQYYIKVIRQEFQWYSEVSSRVTRNAIDDLDNAFSHFFRRIKLKQKAGFPRFKKKDINDSFALRESAKFDVIGRELRLEKLKTRIEMRQSLRFQGVTKQVTISKRAGKYFASILVETEDYNPNDNDRQASVGVDFGIKELAVLSTGTVFAANQKLKANLKKLAKLQRNLAKKIKGSNHRAKAKLTVAKLHFRIAKQRQALLHELSDYLTKTFSVITIEDLNVKGMVKNRKLSRAISDAGFGYLRQMIKYKAHLRNCIIVIANRFFPSSKTCSCCGKIKENLTLADRVFNCECGFSADRDLNAALNLNKYGQDTLQPDLKCASEQSQTVDLFTASVLTV

SEQ ID NO: 54071 - protein, 482 aa, Euryarchaeota sp.
MPEAIAVIKLRLNPDAETARILDGQSKKCNWLYNQLLEKANALRVSYREQPSEEISKVLYTSRGLRNLVPGFKEENPFLKTVHSSPLKNAALRLTDCIQSYQKSRKGQRKGKTGWPKFRSWKAQWFSLFYDEPNKGFCIEGSILRLSLGSGLDRKDRALQIALPEASALKGKSVRNLRIVKQAGVFSTVMTVVRQMPEQKQIKRVIAFDPNHKNFAYGVDNEGKAIEIEKPWWVKRYDQRIDEIKSLRDKKQKKSRLIPILDDQGNPTGKQRFDASRQYKKLQTTLERALSKRREQVKVFLFTLANSLYRQYDLVGVGDYTPNGGGITTPMRRAMNNQSLIGQFKIIAKWSAEKSGKHFMEFDESGTTRTCNVCHDVVQEGLSPSIRTWICAGCNTWHIRDENAALNGITRILREVQERNPKQFGLVPSSGPVSVKERWAWRVRPSGVLRTSRGMGGFVKSNRQEIKRRAWKPSIQADQVCA

SEQ ID NO: 54072 - protein, 235 aa, Actinomadura sp.
LSTAAPPTAKRTGFPRFKGRGWFASVTWPRDDDGCRWDSQPQHPAAAFVRLQGVEHVRVHLHRPVHGVVKTISVKREGRRKAVVRVAALHARVRRQRLDGACKAALSLVRANDVIVHEDLRITTMTRSASGTAEEPGRSAAQKSGLNRSILDAGWGVFLTILAHKAESPGRELIAVNPAHASLTCSHCGHCAKENRVTQAAFACTACGHTAHADVNAAINILRARLALRDAAEAA

SEQ ID NO: 54073 - protein, 267 aa, unknown
  TnpB Polypeptide
MIKTQKARLYPNRAMKKVLDDLCDYRRYCWNQGLALWNDMYDAFLILEDKELLPNERKVRNELVADKVDWQYQLSARCLQLAVSDLGKAWKNFFNKAQPDWGKPQFKSKKAPRQGFKTDRAKIVNGRLRLDKPRGIKKWYDIRLKGAKSLKGELKVVSIYRENGKYWASLPFEVEIKTKAKTGKQTAVDVNVGHFSYTEGQIKTLPNNLKFLYERIKHYQRLLARKRKTNGKKAVRSNNYVETKAKLQRDYRKVANIQHDIVQKFTT

SEQ ID NO: 54074 - protein, 172 aa, Fusobacterium sp.
HYFASILCEEEIEELAKTNKNIGIDLGIKEFATMSDCTKVENLKLSKEYEKKLKREQRKLSRRCKLAKDSNKKLSDSKNYQEQKKKVAKIHNKIRNKRKDFINKLSTKVINNHDIICIEDLNIKGMLKNHKLAKSISDVSWSEFVRQLEYKANWYGRKIVKIATFYPSSKTC

SEQ ID NO: 54075 - protein, 429 aa, Planctomyces sp.
MARSSTKSFVTELEILPTGKQAKKIRARFEAARQVYNACLGESLKRLKLMRESRAWQQARKVTDKKQRSARFKEIQQAFGFREYDLHKWATQFTKSWINEHLGARTVEATASAAFKTTADYLYDAGKRKRPRFRRKGDLRAVDGKSGSCCRWKEDHLVWKGLNLTVQIDPDDPVVQHGLEQRVKYVRMIRKVIRGRERFFAQLICEGTAYQKPAHQPGSGIVGIDIGTQTIAVVGERDAWLDVFCQEIERDHRRIRKIQRALDRSRRANNPANFLGDGRINTAAGRLEWIESRNYRHLKNLLANLLRKEADHRKNLHGQMVARILHAGDQVRMEKLNFQSFARKAKRDGNKRRKRFGKSIASRAPGLFVERLKREAEKWGADVTEFSTVKTKLSQTCSCGHVAKKQLSQRVHNCPKCGAFAQRDLYSAY

SEQ ID NO: 54076 - protein, 549 aa, Planctomyces sp.
MARSSTKSFVTELEILPTGKQAKKIRARFEAARQVYNACLGESLKRLKLMRESRAWQQARKVTDKKQRSARFKEIQQAFGFREYDLHKWATQFTKSWINEHLGARTVEATASAAFKTTADYLYDAGKRKRPRFRRKGDLRAVDGKSGSCCRWKEDHLVWKGLNLTVQIDPDDPVVQHGLEQRVKYVRMIRKVIRGRERFFAQLICEGTAYQKPAHQPGSGIVGIDIGTQTIAVVGERDAWLDVFCQEIERDHRRIRKIQRALDRSRRANNPANFLGDGRINTAAGRLEWIESRNYRHLKNLLANLLRKEADHRKNLHGQMVARILHAGDQVRMEKLNFQSFARKAKRDGNKRRKRFGKSIASRAPGLFVERLKREAEKWGADVTEFSTVKTKLSQTCSCGHVAKKQLSQRVHNCPKCGAFAQRDLYSAYLARYVQGDILQADQAHRDWSCNCEALKVAWSNIKHANGLPSSLGLRTRDRAARLQNGGQNPTEIQDAVPAGSPARESLKEVGENRHHTILTDVRAPFSGSDSHRKHSSRKRYGESDADTG

SEQ ID NO: 54077 - protein, 448 aa, Moorea sp.
MKTPAKVIRTDKWRLNPTTEQRVLLSETVEVYRRACRYLVGIIYTHWGELGDLTADQLTPAVEKLMHKTAKRPNIKYPQFNKTFYKFPSYLRRAAIAFSAGQVSSFVTRYRDWQSGSRKRKDAKPPRLNASTGCYPSLYKGQCYKLHGFNTVEVKVFNGSDWIWTDVHITGLRERHLVASNKMMSPSIVINNRGYYLSVPFTCKPEKRKPEANVTAVDLGINTTATIAVVTHSGTVIHAEFVHPGRDIDRRDKRLKSVSTRASLTMGKGGKLHKGFCSKTYDKCRRINHQIGHIVSKRIVEIAKKFNSSAIVFENLKGWRPKGGKKRSNLRQKFHGWLKSKIRDFTEMKWAELGGRVVEVVAAYTSKLAYDGSGVVKRNSKKYSLATFTSGKRFNADLNGAYNIGARGVFKLVCRNDNEGRSSKRSGRPPRSWVCLCDLWVSGNPKLA

SEQ ID NO: 54078 - protein, 407 aa, Oscillatoriales sp.
MFQAYKYRIYPTIEQQIALAKSFGCCRWYWNYALNLCQETYKTTGKGLSRTAIQGLLPQLKQEYPWLTDAYSQCLQVVALNLSTAYKNFFEKRARLPQFKSKHGRQSISYPQNVKFEGDYLKLPGKVGSVDCVVHREFEGTIKTVTISKNPDGKYYASVLVDDGKETPNSLTNGKAIGIDLGLTHLAITSDGEKYSNPKHFAKHQRNLKRKQQKLSRKQKGSNSRQKARLKVAKVHAKISRCREDFLHKLSRKIVNENQVIAVEDLAVKNMVINPKLAKSISDCGWGMFGTMLKYKAEKEGKTYIEIERFFPSSKTCNVCLNQVGSLPLDVRSWTCEHCQTIHDRDINAAINIKNEALRILSLGTSDTAMLRGCKSFEQTSVSSDAPPVETGSPYRRAMARLVEKWG

SEQ ID NO: 54079 - protein, 483 aa, Bacillus sp.
MTKEKEYATYQIWIKKGHKLYAYFMEMCQNAKNLYNTTNFYIRQVYTALRTDQPLQPLQQEVLHTLQAHIEIMNENQLHAYQKRVLKQKEKPVKEQKEMKCNLFTLPTKEKSFLSYHFLDCLFKTMKQQDYMNLPAQTNQAVMKKLYQNWKSFFASIKAYQKHPSTFTSRPRIPKYIKSSMKEIVFTNQVCKLQEKYIRFPKTSMKLNIGKLFGQIGNLKEVRVSPAYRKFKVEIVTEQSEPASEDVENNRYMSIDLGINNIVTIITNTGATPVLVKGNVIKSINQYYNKQKAHLLGILRHGKEPKEGPHTSKRLERLHEKRFLKIKDLFHKMSYYIVKLAIQHEISMIVIGKNTSWKQNSDMGKRQNQSFCHIPHNLLIEMINYKAKRQGIMVQVVEESYTSKASFLDNDDIPTYGEEDIPVFSGKRIKRGLYRTKGNKLLNADVNGSYNILKKAVPKAFADGIEGLCHQAAVSTPLVLSIS

SEQ ID NO: 54080 - protein, 444 aa, unknown
  TnpB Polypeptide
MNITSSYRIKITGDLKALENSIRMYRDALHFVIPIVHTHWDEMKDFEYSNQRMAYAEKLIHSTKTNQARYDFDTEFPKFPTYLHRALLNCAIGVVSSYRSNLANWEKEPEGQAPQLSLNHYACPAYYRSRSFRNFDPVRQTIELKVFKNGDWVYETYKLKTSDCTYYQTHLTGKKQNVPTIQKKGRRFYVAFSYEEKVELVKDESISKICAVDLGLNTDATCTIIGQDGTVYARKFISFSKEHDRLNTQLGRIRRNQKRGSRQNKTLWRSVVGISQDIADKTAKAILDFGNEHGVDVFVLEYLDFKGKNIVKRAHFWRYKRIYKVLEQRAHQYGLRIARVNARYTSRLAFDGSGWSKRGREIEPDTPYSLMQFPTGKTYNADLNASYNIGARYFIRHLLKTVTVTQRLALEAKVPQVAKRSTCTLSDLINLRSEFVALAPKTQA

SEQ ID NO: 54081 - protein, 288 aa, unknown
  TnpB Polypeptide
MFTGWRNSAETVWLADAPVPPLQQMLRDQERACSNFFVRRADFPRCRKKGQSDSFRYPYPKQIRFDQGNIRIFLPKLGWMRYRNSRQVTGIVKNLTVSQLVLISIQIEYEVSEPVHSSTSMVGPDAGVAKLTTLSYGTVFESVNSFQKNQKKRAGLQRQLSRKVKFSNNWQKQKRKIQRRHSRIANIRRDYLHKVTTTISKNHAMIVIEDLKVSNMSRSAAGTVRQPGLNVRVKSGLNCSALDQGWYDMCCQRTQASVACAAVIQRKKIACHKVNSGVRRVDIQRTRM

SEQ ID NO: 54082 - protein, 365 aa, Moorea sp.
LAVGHATRTLVRKWFGVSRYVFNKTVKILQGGEVKANWKAIKTGILNDLPEWCKEVPYQIKSIAIKDACTAVREAKKKYKKTSQINRARFRSRKNPVQSCYIPKSAVSKTGIYHTKLGQLTYTEVLPEDICDCRLTSRNGKYYITVPHQVALSHTENQGRVVAIDPGVRTFITFFSETSVGKIGQGDFSRIQRLCQYLDNLFSNISKAKAGQKRRMRKAARRIIVKIQNLINELHHKTARFLVDNFDVILLPTFETSQMSRKRNRKIRSKTVRNLLTFSHYRFKEFLKHKAQETGKLVLDVCEAYTSKTVSWTGELLNIGGSKTITSKVDGRSMDRDINGARGIFLRALGDTPWLQKQLALVSQD

SEQ ID NO: 54083 - protein, 528 aa, unknown
  TnpB Polypeptide
VKKSKTTTFLLELPLRVDAGQARRLHAHLEVARCFYNAMLGEAKKRLNQVRSAPAWQEARGMARSQKQERRQAFSLVRHQYGFSEYAMHDYAKATRKSWIADHIDSTMAQTLATRAFQAVNKVCLGQANTVRFRSKGRGIDSVEGKRNDTGMRFLLQAPEEGSSGWLVWGADRILALIDWHDPVVCHGLKQRLKFARLVRRTASSPQARGADSEGNRYCVQLVLEGSAYQKPRNTVGTDTIGVDIGPSSLAIVSQQGHVQLKTFCEELKPNAGAKRRLARKMERQRRANNSQNYDDKGRVKQGRLTWKESQQYKATRRRYATAERKLAAYRKGLHGKLVNDLLRVGQTIQIEKTSFRGWQKRFGKSVALRAPGLFYEHVKRIVAKTGGTLREVSTYTTKFSQYCHGCRTYTKKPLSQRWHTCACGIGPVQRDLYSAFLLAYLTSTDNTPSIALNEWEGAEPRLQAEIERLKQRANEGQSLPGSFGLPRVGARQPKSLSPNQQELCSPSLQYRKGKLEALEMGKEPPRL

SEQ ID NO: 54084 - protein, 513 aa, Cupriavidus sp.
MPFKRADPTTIQFARKVRLVVDADAAGKLDGQSKICNWLWNRLKDEVETRMAELSIVGGYGYLDEARTKKLLSEVYSEIGLRNLVPPLKERHPFLRCVFSSPLKNVALRMAKAIASHRKSKNGQRCGPDVGWVKYKAWAKHWMSLEYDEPGKGWNVSQFGWLNLSFGANAQGQRLSLRLKMEKTPKEIASARTCRIVREGRDRYFAVFTFKGQKKARQRGTRVVYIDPNLKNFGYALDTEGRAFELSNLEKLKESERILDRLTSLRDRCIAKSLWVDTVHGDGTVSTHWRPSRRWKRLDDAVERMQTKVREQKKHFMYSLANQLCRHYDVIGIGNYVPENTNHGKGRKYNRAVRNRTMHGAFKDILSWVATRSRKHALVLDETGTTRTCHACGHVVEGGIAPAIREWDCPGCGTCHLRDENACQNGLRRLLTQVGDAVDCSHLPCSGPVQIIGRCDWRFHPQGWTGVPRGGANVNSMRLPEYRQRMRALPRARVGDRASKSAKTSPSAMRRLA

SEQ ID NO: 54085 - protein, 189 aa, unknown
  TnpB Polypeptide
MRRARRRVARSHARMVNLRRDAMHKLTTRLATNHAGVVVEDLNVAGMRARGPGKRGLNRAVSDAALAELRRQLTYKASWYGCRLVVAGRWYASSKTCSGCGLVKAKLAATESVFVCESCGLRLDRDVNAAHNLASLMFVVAGSGPETQNARGEDVSPGPIRADLNEARTPHSIVDADKTGTAAPQGSAV

SEQ ID NO: 54086 - protein, 376 aa, Thermococci sp.
MMEITKTIKCKLIGLTKRKLELLNREYNNFQHYLKTGEDRGVYSATKQQGKRTYRKIKPDKEYPLVIRKDLMDIRKTDNKLAKYWARIPNCGVRGGIKAALAHQPFNFEEWEICGSKLVRTKDGEFYLHVTVKKDIELRKEYSSIIAIDLGAKWVGVSVALHRNKPKFYGKRIREVRGKYFWLRRKLGKEKKLKAIKKIGNKEKRIVNDKLHKIAKDIVDEAEKHNAMIAIGNLSGVRKNNKGRKVNRKINSMPFYRLKEYIKYKALERGIAVIEVPEHYTSKQCSRCGSMNTKRPSQGLFICLDCEYQINADVNGAKNILKRAVGYMLTAGVVVTQPEGGSRFVLHTPQPPPNGFRWKPLAIARGGGHREVKFLL

SEQ ID NO: 54087 - protein, 439 aa, Thermococcus sp.
MMIKRTVTVKLQPSKGQEKVLFELAHATALIWNKLNYDRLKQFKEFGKIDFLGTQQEAYYQFKDWIGGSTVQTLARKNAEAWRSFFILLKKKKNGELPEWFKPKPPTFIREENGKKLFIIPLRNDQYRIEENVLEFRRLGKFGRLKIQFKGRIHLKGKQGRLEIQYDSVRKKWYAHISYTVEERLYSENWEKLPRESLGNLSAGIDLGVNNLMAIYVESGESFLVNGRPLKSIAFYWRKKIADYQSKLNSSGCKRSKKLSRMHQKAKLQTKHYINTAVRQTIEKLHQMGVSRIVVGYPKGISRNSDKGRRQNYLLSHIWRFNYLLKRLMEVSEEYGISVIVVNEAFTSQTCPLCGQRHKNARFVRGLFKCHREGIVMNADLVGAFNILRKAVKTITPSLPDLTAGRGNRGKAVPEGFEELDSIRVLVKTPQTFPSLARG

SEQ ID NO: 54088 - protein, 422 aa, unknown
  TnpB Polypeptide
MLMKFAVQSNVIRGLSKQQYQTLKELCQYSNNLYNIALYNIRQYFFNDKQFLTYESNYHECKENENYALLQAGVAQQTLKVADRSFKSFFNLLKTCKTGDYRYHDVKIPHYRKKGGYFNLILSTNAISVVNGYFKLPISREYRKLHPDMEDILIPYPERLNGAELKEVRICPHDNGRYFKIQYVHHWYQEETLVNPDNIIAIDLGVENLATCVSNIETPFIMDGRKLKSINQYWNKEKARLQSIAMKQGVRTTHQINRITTKRNNCVNDIIKKTARYIINNCIEHQIGTLIVGYNKDFKRSVNIGKINNQNFVQIPLGNLKQQLEFLCWTYGIDYIEQEESYTSKSSFIDGDVLPEYKAEHPYLGQFSGKRIYRGLYQSKNGIVINADVNGSANIGRKCKQDFTFERLSSGLLASPKRIRVA

SEQ ID NO: 54089 - protein, 335 aa, unknown
  TnpB Polypeptide
MRVSYQYRLKPHQEQIAKIEKWLELLRCQYNYLLGQRFDWWKTHRTAVNSCPLICHLPELSDRPSYYSQKQSLTQLKKERPWYKEVQSQVLQDCVKRVDLAFQRWLSGDKNRKKSGKPRFKGKGRYRTILFPQVKQDCIRDNCITLPKLGTVEFVEHRSIPEGFKIKTAQITRKADGYYLTLSLEDTSVPEATIEITPTSENTVGIDMGLKEFLLTSEGEKVEIPQYYRKGQKRLKKLQQKVSRRQKGSNRRLKAVKQLGKHHQKVARQRKDFHYNTIKLILSKGDVIAHEKLNIKGLAKTKLAKSIYDAGWGTFLTRLAVKAENEERPRAVSRR

SEQ ID NO: 54090 - protein, 287 aa, Desulfurococcales sp.
MLLHPGSGYRIKDDYVEIIGGMRLRIIGWDRRYDDYENREARLIYRRDKMILWISKRIPKPKKYTPIDVIGVDINEQKIVYGDEIINIEKDTAIDKAYRYIRLAEDLQRKYSSSRYLAWRRRKRILNRIRSYHEKARNILIDWTKKISLEIVRLAKELRYAVSREDLTNLIRSLRELPKDHRRKLIIMGYSRFERWIDWQAEKHGVPYVKVDPNGTSSECPICDYKGLEEVGYRRFRCPRCGFEADRDVIGKLNVRKKGLRKLGIVPRGGSLATPTAPQMTDVNPNR

SEQ ID NO: 54091 - protein, 413 aa, Spirochaetales sp.
MKTYRYRLYPTEEQESLMSRTFGCVRLVYNHLLDFRTKAYKRRKETADYYKCNEFLMKLKEVFPFLKDVNSQSLQSANRNLDAAFRNFFGKPGKVGYPKFKKRNGRQSFQCPQNVKADHTTQSVYLPRIGWVPCVFHRRFEGRIKTVTVTQEPSGRYFASISAETPPELPKPERKVESADDVIGIDVGITTYAVCSDNTEYENPRHLSKYERRMKRLQKSVSRKKKGSKNRKKAGRKLARCHEKIADKRKDNAEKISADIAGKNQAAVAVEDLNIKGMTRNHHLAKSINDASWGYFTMRLKTKCERNGMRFVKVPRFFASSQTCSACGYKNPEVKDLSVRNWICPVCGMEHDRDRTASINIQKKGYELSVPVDGGEFKPVETVTVDDRAKAPKKHTVDEAGIVLELPQEAPCL

SEQ ID NO: 54092 - protein, 263 aa, unknown
  TnpB Polypeptide
VGLDIGTQTIAIASESEVKLLELAPEVDDIEKEKKVLLRKLDRQRRANNPGNYNDDRTIKKQGNKKVVWINSCRYKRTRNQLKEIQRKQADIRKQSHNELANHILSLGSRITVETMNYKGLQAKAKETTINEKTGRFNRKKRFGKSLANKAPSMFLTILDNKLKYNGQILLKIDTYKVKASQYSHMDDGYTKKALSERWNHFKGFKIQRDMYSAFLIMNVKDNLKEIDRQSCFEGFDHFKNLHDKEVANIKNNNNRLICSMGR

SEQ ID NO: 54093 - protein, 374 aa, unknown
  TnpB Polypeptide
MQLSIKIKLIPSQEQKSILLKTIETYNKACDFVSQIAFENKTASVVKIHHLCYYEIREKFNLSSQMAVRVVGKVADAYKIARSKKLRLEKPHHFNKWGAVIYDQRILSWKGLEKVSILTLQGRQIIPLVLGEYQQTKLVYPRKGQVDLLYKNKEFYLIPIVNVPEPPQKISKGSLGVDLGIKNLAVDSEGEIYSGKEVDDKRVKIDKLKSALQKKGTKSSKKHLKKLSGKESRFRRNINHIISKKIVAKAKRHSLVIGLEKLTNIREKTVFRKAQRRQHSSWAFDQLQKFIGYKAALAGIRVVFVNPKNTSRTCPNCGFVSKGNRHNQSSFKCLSCNFAELADKVGAINISRLAVVNPPIIAPAKGVTSHLVFS

SEQ ID NO: 54094 - protein, 370 aa, unknown
  TnpB Polypeptide
MPYRAYKYKLRPSKRIAQRFEQTLDVCRELYNAALQERRDAYRICKENITYFAQSAQLPEIKSVRDDIAEVQAQVLQNTLRRLSRTFDSFFRRFKHGEKVGYPRFKSRSRYNSFCYPQSKHSFRLNGDKLHLSKIGSVRLRLSRPVEGTIKTCTIKRQADGWYVLFTVESNQSCYFPRTGESVGIDVGIEHFATLSTGETVENPRYLHKAERKLKTAQRSVSRKRRGSFNRRKAVVLLAKRHLKIKRQRLDFFYKLSLELVRRFDSITFEDLNIVGMVKNHRLAKAISDAAWGTFIFIHEGKAESAGRRVTKVSAAFTSQDCSACGNRARKSLAMREHACIACGLVLHRDHNAAINISARASRVWITDSR

SEQ ID NO: 54095 - protein, 412 aa, unknown
  TnpB Polypeptide
MWVGAGLSVPAVSVRAVTKVVKVRLLPTEEQAAALDSTLRTCNCAASWLSAAMYAERVRGKYSVQKRFYAELKARFGLSAQPAIRVIGKVADAYTALKANIDAGNHGPPGSPKRKKVAATPIGFRADAAQPFDARCLSWQMPETVGCREATVSIWTTAGRLKGVPALAAPHDLVMLRTRPIGESDLIRRDGIWYLYATMEAPEAPQVDPANAFLGVDLGIVNIATSSDGDRAAGARLNRYRKRQQRLRARLQAKKTSSARRLLKKRRRKETRFAADVNHRISKRIVAEAQRTGLGIAVEQLAGIRARVRLRKPQRAAVHSWAFAQLGSFLAYKAKGAGVAFVQVDPAYTSQTCSRCGWVDKRNRRSQSDFECGRCGFVGHADHNAAIKIAARGVERWGEVMHPHAAPTLTAS

SEQ ID NO: 54096 - protein, 450 aa, Okeania sp.
MPTRAIIKSLNVSNRPKTLKSRYKYRIYPNHIQITKLNQLFGCCRYVWNQGLAHCNQLYSNGKKKPSYVDLTKQFITQAKQELVWLKEVASTPLQQSLKDLETAYKNFFGSCIGKGKGIKVKPPKFKSKKSRQSARFVGKNYKIGQDKIYLPKVGKIKIVWSRELPSEPTSLTIIKDSANRYFASFVVEINPEPLPKTGSSIGIDLGISTFATLSNGDKINAPKPLKQNLKKLAKFQSKFAQTEKGSKRRERRRLKIAKLHAKIKDIRTDFLYKLSTDLVKKYDTIVLEDLNVSGMVKNPKLAKAISDLGWRQFRTLTEAKCEKYGKEFRIISRWEPTSQKCSNCGFKGGKKQLNVREWTCLNCGTLHDRDINAAINILEVIQPKTKVETTETKVIETPVQLSLFNEVAEGHSETIKRTRSRRKSSPKKDANGNDVSTHPESFVQLSLFE

SEQ ID NO: 54097 - protein, 339 aa, unknown
  TnpB Polypeptide
VTKNARAPHREKNYRPLEFTAGFGWRVTPDGRRIALSFGKGHKRIALPLPEIADPKTGEILPSERWGSMQLCWDRNARKWSLHISVPTPKPPQGNPDIIAAIDEGIINPMTVAIETEDSYDVLVVNGRHARAVKHYRNTRIATLQEKLSRCVKGSKRWRKLNAKRKRIEAMTDSALHNANHQTTRKVADFMQAHDAGRIVTGDVRGIEKSTRKDEAKRVRNTKNQRRRLSQWSRGRQETLLEHKTGMAIEHIDESWSSKTCPACQTRNHPNGRGYHCHNCGFTCNRDAVGAINILIRAKNGSYQPMDTNKTVHVKYLRATPIFQPKAGVEHGVIPGTGA

SEQ ID NO: 54098 - protein, 184 aa, unknown
  TnpB Polypeptide
  misc_feature (155)..(155): Xaa can be any naturally occurring amino acid
LRKSEDKLAKIQRMHSRKKKGSKNRNKSRIKIAGIYEKITNQRKDFLHKESRKLANLSNNIAVEKLSISNMVKNKYLSKSIADASWQRFIQMLSYKVEETGGKLIEVNAKGTSQYCICGNKVEKTLAVRIHRCTKCNIEIDRDVMSAMIIKQLAXKGTTAGSAESNAWGDVSREMPMNQESQCI

SEQ ID NO: 54099 - protein, 426 aa, unknown
  TnpB Polypeptide
MRTNVVRLLPSGFQERKLRKLADTSARLFNEVNYERRQQFFHGGKVDFKSTWDKYYDKYKGVLGVNAQAVLQKNNEAWSSFFSLLKLKKQGKLPPHVNNVSPPRYWKDRETKRRKLFLVIRQDRYEVDEQNHKLILKGFGLEIEFAGRLRWHGRQGRLEIYYDAESAWYASIPVDVGVEVTKTGKKSKYIVHGERRSIQIASPKGNKVASIDLGINVLASVVVDDGTWLLYKGVRAKEDYFYLPRKIAEAQSLADKARNVNEYEAQEELNRERRRLFKKLTRRLLHLYRNLAFNLLKQLHDQGVSTIYLGYPYNIAQDKGNKLTVNLWSYRKLMDAIELKAQEYGMKVYEVVEYNTSRYCAYHDVEVKRYPRGVVSCPKGHKLHSDLNGALNILKRATGAVVSTVKKPLSFLVLHNGVAPVKGCNT

SEQ ID NO: 54100 - protein, 434 aa, Microcoleus sp.
MYGCQQNLINPDKDLKAVLDFLCSEASKLINCGIYYARQLFFKTGRIPTRGKLHKVLGTENKNIHYKAFYSDTAQQILTSVAESFNSYLGLLTGFKEGTVAQCPRLPGYRQGGLALVTFTGRSVKLKNGMLRFPLGNKVKAWFGIDSFCLPMPSNLEHSAIREYRILPKNGCFYLELVCRKATIQSEVNVDSVLMIDHGMDNWITCVSNTGTSFIVDGKHLKSINQGYNKRVAALMSGKDNGFWSKRLERLTESRNRTMRDAVNKAARKVINHCVSSKIGTVIFGWNKNQKYSINLGTKTNQKFVQIPTGRLKERIAQLCKQYGIKFVDTEESYTSKSSFLDGDELPTFGEKPEGWKASGSRIKRGLYRTAKGWLINADCNGCANIGRKVATILGLDLSGVGRGDLSAPVRLKLWSYESPSMTRAGEMSNPCNL

SEQ ID NO: 54101 - protein, 376 aa, unknown
  TnpB Polypeptide
MIKAHKIRLNPTPEQEVYFKKAAGTARFIYNWALARWKEHKEEHPDEEYGPMALKKEFNAIKGEQFPWVYDVTKCASDGAFFNLAKAFKNYYDWQNGKRNGEQVGFPKFKSKKRSIPSFYLQNDHIRLDGHWIRIPKLGWVNMAEELRFDGKIMSATVSKDAGHWYVSISVELEKPGPVDFPQESVGIDFGVKSLGVLSDGTVYENQGLLRSELNKLKRLNRELSRRQEGSNRWNRTKRKLARFHKKVKDRRADILHKMTTEIAQTYRLIGIEDLYVKGMLRNHRLALSLSDVALGKARRQLEYKSEWFGGQTIRVDRFFASSKLCSDCGMKNDELQLSDRQWACRGCGSLHDRDWNASKNIEAEMLRIAAVATSR

SEQ ID NO: 54102 - protein, 350 aa, Blautia sp.
MLLSKKTSIKVSREYANLIGHMCYAASKLWNVCNYERQHYKETGMEQYPDWYYQKKAHKEDLWYKQLPSQTAQEVCRLLDKAWKSFYVLKRSGGIETPRPPRFKQESIPITYMQMGIVHERDTDRVRLSLPKTLKKYMEETYQIHENFLYLENKIFRGMDQIKQMRIYPPEKGSCKIIVVYEVPDQEELPQNGHELSIDLGLHNLMTCYDSGNGKTFILGRKYLALERYFHKEIARVQAQWYGQQSGKGVKHPVTSKHIRKLYKRKQDSVTDYLHKVTRYLAEYCREQEITCVVAGDIRNIRREKDLGHRTNQKFHSLPYNRIYIMLEYKLKRYGIRFIKQPANKKSRLN

SEQ ID NO: 54103 - protein, 380 aa, unknown
  TnpB Polypeptide
MHKAFKYRIYPNKSQKVLLSKTFGCIRVIWNANVESFNSYDKDSNPKPKIIIKSDLIIDKPWLNEISAAAIQQKIRDFQEITNQFFSKTRKKKIGRPSFKKKSGNQSYRLPNQKFSLKDNKIRLEKIGWVKISIDRNIPDNSKMLSCTISMNCCGQYFVSILVDVVIPNKGKTGKSVGIDLGLKSFATLSDGVVIDNIKFFREKQSEIAKIQRHLSRKNKGSNRHRKNKIKIARLYNKIANKRNNFLHNVTTSLVNNYDVICIEDLNVSGMLSNHKLAKAISDTSFSMFRSMLEYKCNWYGKELVVIDRFYPSSKTCSKCGWKKEDLTLSDRVFKCENCGIEIDRNLNAAINIQRVGVDILYNRMQRDEVTNLNEASIME

SEQ ID NO: 54104 - protein, 410 aa, unknown
  TnpB Polypeptide
MERNVLAEKFLLTDNRRRSHRDNSEPYKKAGQVILVNKAYRYRLYPTTEQKSIFAKTFGCARFIYNKMLGDRLDYYMKTGKKLNNTPAQYKDEFPWLREVDSLALANAQLNLNKAYNNFWNNRKHFGKPRFKSKKTGHFSYSTNNQKGSVRFEGNKVKLPKVGWVKLCLHRPLMENSTIKTVTISRTPSGKFYISILVEYENQILPIIPKKFLGLDFAMHGLYVASDEEDADYPKFLRKAEKKLAKAQRKLSKCKKDSKNREKQRKRVAVLHEHIANQRRDFLHKKAKFLADRYDAIGIENISVKAMAKRKKGKHFSFGKSVSDNGWSKFVNILKYKLVLKYKLAWQGKQLIKVDKWYPSSQICHDCGFQNEETKDLSVREWECPKCGSIHNRDKNVAVNIREEARRMIA

SEQ ID NO: 54105 - protein, 398 aa, unknown
  TnpB Polypeptide
MLKGFKTEIRVTKKHISKIHQSIGICRFLYNAYLAKNKELYELYKDGKIDKKQAFISANDFDKYINNEVKILDEFKWINNCGSKARKKAIVNAEMAYKRFFKGQSKFPKFKKRKNQDVKIYFPKNGKGDWTVERHRIKIPSLGFIELKEKGYIPTNAKVVSGTVSMKAGRYYVSVLCDIIDRIDRNDRNYYSDSKNEGIGVDLGVKDLAIVSNIDKPFKNINKTVTVRKLKRKLKRLQRQVSRKYEMNKDGKKFIKTKNIIKLEYKIRVIHQKISNIRLNYVHNITNALVKSKPEYITIEDLNVKGMMKNKHLSKTISEQNFHEFRRQLTYKCLWNNIELRIVDRFYPSSKLCSDCGAINKDLKLSDREYICKECGIIIDRDKNASINLKNAQIYKVA

SEQ ID NO: 54106 - protein, 395 aa, unknown
  TnpB Polypeptide
MRLVERHIIKDNRFEDICLKSGLLYNYVLYLVRQGIFNKEYLKEYDLSTKLGRENQFDFRNLPCNVSQQVVGQVFKSINSWIKLKKDFEKNPAKYNNCRPHLPSYKKGKKQNMVVFTTNTCRVKEGYIYFVKNIIQPIKTKIGDNKLCQVRIIPQATCYVVEVIYEKREQDLNLNKDNVLSIDLGLNNLCSCINNAGKQPFIVNGHIIKSFNQWYNKRKAKLMSFAGDKGTSKRLRQLNNYRNFWIEDHIHKVSRFIINYCVDNNIGSLVVGLNKGWKQKINLGKKTNQKFVEIPFSRLIDKISYKCKLVGISFYLSEESYTSKVDHLAFEELGKHDAYLGKRKKRGLFQSSVNKLINADINGAIGIGRKVFSDSYVSRIIDSGLAFTLVKVNIA

SEQ ID NO: 54107 - protein, 278 aa, Halogranum sp.
MHRDLPEHNAIKHVTVKKEPTGAWFVSFCIETDKPDKPDVDAIDPKDTVGIDLGILKLIHDSDGRSVERLDLSDDRDRLEREQRALSRKEKGSNNWEKQREKVAEIHERMSAKKRDLKHKLAHFYTTRYDAVFLEDLNVKSMLEGPQNARNKAEVGWRDLISIFHHHGKKHGCHVVEVDPRGTSKECAACGVETAKPVWVREHSCPACGYTADRDENASLVIQKRGLEELGVGHSEFTPAETATATLTTFTQSGGTVSASRVVETGSPNLKESASADE

SEQ ID NO: 54108 - protein, 295 aa, Halogranum sp.
VIPDGTEGTPIGKYLLNENYEFRMSTLQYDRATESFYLHARMRRTRDKQSTTSSNAKHRTVLGVDLNVDGSLAVTSTGAFIGNADEMNHRRREFEKTRRSMQQAGTRSAHLSIQSMDDREHRWMQDELHRASNQILEEARDHGCRHIAFENLTEIRKRMVGAKRFHAWAFRRLYQYVEYKTEMFGIEVEQVSPAYTSRRCSSCGFTHETNRKSKHQFVCQKCEYELNADYNASKNIARKLLKRLHSGQKSSSGGVPCQCALTSGTLNLNGDFHAYSITEAEGESTDKPTSSLVGY

SEQ ID NO: 54109 - protein, 338 aa, Halogranum sp.
MTARRKPAPSGTGGSRHSINDDHTTLATIDGRLTAEFVLPDEQRDTPHSTYLFNDDYNVKGATRHYDEIEGCFYLHVRTKPAVENDDVEQGDAKHVSVLGVDLGITNIATTSTGKFWNGGELNHWHREYENCRGSLQQTGTRWAHLNVQRVGRKQTGRFEQMIHIISNELVNLPRGQASGLPASTTRFASTREGVEEALENDCTHIVFEQLKGIRERLPYAKAVHKWAFHRLYEYVTYKAESEGLVVKQINPAYTSQRCSKCGFTHEDNRLHTNGQDEFDCLTCGYDVYADYNAAKNIGLKYLRDQQKSGRGDAPVGVRLNSGMLNVNGEYSPTALSG

SEQ ID NO: 54110 - protein, 348 aa, unknown
  TnpB Polypeptide
MLYEKQEKYKNKDESKSKTEKEYKQEYEFLKEVDSIALQQARIDLEKAYKNFFRKLKNKQKTSIKYKSKKNPKNSYRTISINNSIRVKDNHIKLPKLGFVKFRKSREVEGKIKSVTITKNILNQYYISILCEVEIKTFTRIDKEIGIDLGIKDFAITSDNEKVSNPKYLRKLESKLVKAQRKLSQRKNGSNRKFKQRQKVFKIHQKIANKRSDFLHKLSTKLINENQVICLEDLSVKNMVKNHCLAKSISDASWSKFVEMLVYKADWYGREVVKIDRFFASSKLCNKCGWKKKDLTLADRVWTCDTCHTKHDRDLNASLNILDEGLRILSGRDDRDSSVNKQTLVCCS

SEQ ID NO: 54111 - protein, 339 aa, unknown
  TnpB Polypeptide
MYAISRELKLNNIETSLMRGLAGFRRWVYNFGLDLLVASWDFEVVKASDAKRIDAIKKVFTQVTMQKPEYAWMKNYPSTVYQSAFIDLKDAFSRWRKRQCGFPQKKSKKKGDSFTVYKTSGVYKRKGKPALPFTNRVVIEAGKHVKLPGLKVFRLKERINFIGSSQTFTVSRSADRWFVSFVLDAEKIPPTLHPIQRVGLDLGVKCLATVSDGTRYEMPVTTKKAKTKLGKIQWRNRNKVLGNRKLGVKASGKARRYYVKLARQHSHLANIRTDTTQKMTTDLSRKAKSMMKMHQSILRMHPQSEYGWLDRNLRPQTGRSRLPRMRREAITRPSLTKFG

SEQ ID NO: 54112 - protein, 291 aa, unknown
  TnpB Polypeptide
LRFPALFLLNPAELQNLQNNEVEMRSKADPRVLCHPAKGGDPKKSSMLSSHVDRPNPTSAAPEPATAAAGRAVETGGFVDIAKGDFGRIARLCYHLDDLQSRLSKAPRPKRRRMRQAAFRLRERIRNLVDECHRKVAAFLTDNYRLIFLPTFESAKMVAKAGRKFGSKTARAMLTWAHYRFKQFLKFQAKKKNVVVVEVSEAYTSKTCTKCGHIHTKLGGAKVFTCPKCSHRLPRDWQGALGVMLRALRDTAFLFGLRPANAVASASRSDNGNGQNAIASPLSSNAQQCSA

SEQ ID NO: 54113 - protein, 404 aa, unknown
  TnpB Polypeptide
MLVQKLFNTILKIKGDNMQLTYVLELLKPTKRKQNIFLNNIAEVVKNRQSVADKLKVGETKLSSADFKEIKLPSAVKNQNIREVKALYKLFLKSDSDKENLEFKDNQPICYNNQNYKIDGSIISIPLYTSKCQRFAFPVKQTKRFEELQRYIENSCKLGKASLFYKRGKWYFAVTIKISDKETANSNVMGIDIGLRQLAVASVKNPQGKELNRQFHNGKQAGFIRKKYRSLRRKLGQSKKVKAIKTIDDKEQRWMVDLNHKISRQLINLAVQEQVGIIIMENLDNIRNTLQVGKSRPFVKKHSTKSLNRAGSTTKSSYRTRRDRNLHSWTFYQLQQFIEYKATLAGIKVEYINPKYTSQSCSKCAKVKKSNRKANLYSCECGNHIHSDLNASRNIANKYLASVS

SEQ ID NO: 54114 - protein, 402 aa, Cyanobacteria sp.
MKQRYRYRLYPHPHQQVALAKAFGCARVVWNDALAKSRELYAAGEKTSYPVLAKLCITQAKQTPERSWLSGPSNVVLQQSVRDLDQAFRNWWVSLSGKRKGSKVKPPRFKKRRGAQSIRFMSHVFRTGERSLTLSKIGTIPIEWSRDLPSDPSSVTVIRDAAGRYFASFVVEVEPKPLPANGKAVGIDLGLASLAVTSAGEKIAPPKFLRSALKRLRRLQRNLKHKQKGSNRLAAAKRQVAKLHATISDKRLDFLHQLSTRIIRENQMVVLENLNVSGMLKNKNLARSIADAGWRQFRTLLEFKAEQYGRQVVVINRWLPTSQVCSTCGHNDGKKELSIREWQCPSCGTVHDRDINAAKNILAAGLAESQNGRGAAHKSTALVAAGCEAPTHPIAEAPSCAA

SEQ ID NO: 54115 - protein, 537 aa, unknown
  TnpB Polypeptide
MFPKKKTPTRSYQFKLARDERLQWFQELTTKAARKLLEELWTEEWIQILGDSKLKAYKVINEAQMVLPNVYLPSRVRRGGAEWVGRLLRNQYKRMNCYYDCLEIVNWLGVETKDSKLLAIVMQHYRTKSKNGKTYSKYKKVMVQQTIAMIKNWYEKLAIDFSMFSYTDFVQPKISYFAFPYGPDDGQAIQYFSDEQTIHLKMKLPKTAEPRSISDWEWVEQELTIPEKIQEKIAQANSQQPKKPNLRTKILKGGLEYFFLQFPYEYPKEPKRNGKERVLAIDHGLKKIATAVVCEGGKQIAKPIMIKFKGSEYKHIEHLYDNIGGVQSKIAEQKKRRKNKQFGVKRREEERNKLYQKRNRLGEELAHTTTNILIQLALKWQCSKIIIEDLRGYKPPKGRRSWSRRLSEWLRGKLAFLLDYKCQEKGLTLVKVCPWNTSTHCPRCTAKGQKILGPNNLTADKKGRWFHCEACGFTADRDYIAAINIYRASFIDYKEIKSLKDTSPVPYTDSGTLHSTAPSGGSEMNYTNTIVVVTGNG

SEQ ID NO: 54116 - protein, 396 aa, Mycobacterium sp.
MPGYVLEATLKTEAIDWFSATKRRKTNVANGRKPGAMPGFRRKDSDQRFVCWFNGGRNAVFTKTGRRAGMVTISGANPPTQRAPGLGPDGKPHKLAWRITLHVRLSQPIRAYTSVRVNWTRRQLVFVNEPLPVAGKVPTGEVISLDRGVVHTAADDRGRFYDTPDTAALDKQRKFHQRRMAKSKLVAPRQGRRFWESKRYQAHKAAAAGLAAKQARLREDFAHKLSTQLVREHDFIGIEKLSLHRMTRRGKGKGAAAKRGLNRVLQRAALGRVATCIEYKAELAGVTVVEVPAAYTSQRCHQCGHTCKENHESQAVFRCLSCAWTGNADTNAAVNVREEALTRWAAQTQQLAGTSAINAGGEAVSQAGSKTKTDPHTGPAPGPAASAMNRKPPNAA

SEQ ID NO: 54117 - protein, 386 aa, Lentzea sp.
VFYAHDVKIVVQVRLLPCAAQAAALEATLLACNAAADRASCVAFERGVHSRNDLQKLVYGEMRGSGLGAQASVRTVKKVVDAYASLRASIRTGHLTGLRRLKAESKPIKFREGAAQPFDDRMLSWQHEARTVSIWTTAGRLKGVRYAGHSSQLAALVAHREGESDLVLRDGKWLLIATCDVPEPPSSEPGDWIGVDRGIVNLATTSDGTNFQGRRLRRYRRWQVRKRAELEARRTKSATRRLRRRARREHRHVTHLNHAIAKELVAVAKRTGRGVALEDLSGIRDRVRPRRDQRAIHSSWPFQQLGAFIEYKAKRVGVRVITIDPRYTSQMCPGCGHTARNNRTSRDLFRCRQCGLAGPADHVAAINVRNRARSAWVPVNVPEPAA

SEQ ID NO: 54118 - protein, 672 aa, Nonomuraea sp.
MSRKVALADGQSARTATARALLRGGVEEKTGEALSARAVAERVGWGADLAAGMVADLLAGHWTAADVAVLAAGVDGVGRRLPSKAWMALRRLGWDVSAPAGVKVNDRVVRMVQEQAGRLLRSAQHRAELTAGVLKTWPADPAKRTAAEWDAVREAIPDGRSLPGSVIKARTRHITAFVSTHGRLPVDVFELEDAPRAARMLVLAAVDRQQATLERAEDNPARVLLRLQLPTRPDPRSYADWQWVACPLALPSTVPADAVLHLPTLRPKDGKVYADLSFSHAVPQAERTGHTVALGVDWGLNTLLSAGAVRRHGDQSITALGAGAQFRAAGVMARQHRLRRQGERLHAKTDAYEHLVGEDEDHRLVAKHAVLKAERQCVADRRTGLNDALAWSAARWAVDQAIAARSTVIYVEDLRSMEAKGMGRTLGTRLSQAVRGQIVDNMRHLAAEVGIAVVTVPARNTSKHCPQCLVPLRHCKAPDRPTTPGWKWAICPNPGCGWQGDRDHGAWRRIAARGLTHQDKTIVADRASGHMAIPRVIDKLEADAVVRPATLTTTPEARRADRSKTGPTRHRTTSRSVPRRRGAPSTPGPHRPAGQRPEGHAHTDRRLPRAARRYQGVRTTNVHTISSSTPTTRRHRPRGAALGAGFHMHAHATPPRWETHPQSETITGLRIA

SEQ ID NO: 54119 - protein, 288 aa, Calothrix sp.
MLVDIPSFELPQIQEISDVKSVVGIDVGVNKLVAITDGSFIENIRPATNNKTARRLAIRQRAASRKVKGSNNKRKVIEKLARTHHKISQQRSGYNWQAASKIVNTADAVVREDLNIKNMVKRAKPKHDGNGGYKRNGASSKTGLNKVILDCGWGDLFDKITWLAAKSGKLVIVVDPKYSSQECPACGHTDKSNRDGEKFVCTQCNYTEHADTKASRVIAKRSGLVFPKNKKKTLPVDDGKVTSNSYQHIVVEVRNHAYDQKGIQLTLFDLDQYRSGDKWNVRKYGRNS

SEQ ID NO: 54120 - protein, 337 aa, unknown
  TnpB Polypeptide
MLRRYRYRLYPTQDQMILIARHLGCCRYVYNWALNRKNQTYHDEGSSLSGYDLMKQLPQLKEELPWLKEVNAQSLQQSIHHLSRAFTNFFEGRAEEPTFKKKHDPEQSFTVPQSYTVDFKQGTVKLPKIGAVKVKYHRTFAGTMKSATVIRRSTGRYFISIVVEDGRKPPKPADPIPDQTVGIDMGLSHYAVLSTGDAVPNPKYLRNAQERLAILQRRLDRKQKGSKNRNKARLKVARCHQKIADQRRDFQHQLSSRLVRENQALAVESLNVNGMVKNHSLAQAISDAGWGTFLAMLAYKCQEAGKTLLKIGVFEPSSKTCSVCGYKNQNLTLKDRE

SEQ ID NO: 54121 - protein, 384 aa, unknown
  TnpB Polypeptide
MPTQILKAYKIRLYPNAEQQVFFAKSFGCSRFIWNKMLADKIDHYKATKTTLNNTPAQYKKEFEWLKEVDSLALANVQQNLRAAYSKFFKQGSGFPKFKKKGQRDSYTTNNQKGTVAITKNTVKLPKIGHINAKLPDKINGLIKSATISRKPSGRYYVSLLVETVIEPLSKTHSNIGIDLGLTDFIVLSDGTRVANPKFLSKLQDKLSREQKILAKRREVAKTDQRKLSDSKNYQKQKLKVAKVYEKITNARKDFLHKLSFSLIKNHDVIAIEDLNVKGMVKNRKLAKAISDSSWSSFTTMLAYKSEWYGKTLVKIDRWFPSSKTCSGCGHLLTKAEWPLSVRSWNCPSCLQENDRDLNASINILNQGLLLAKQSKTVGATGLA

SEQ ID NO: 54122 - protein, 460 aa, Streptomyces sp.
VQAVAGDASTVTRTDWYGHRVATERAQEKRRCGHRARLALTPVQTRLVDAQAHAARTMWNLLHDWWTMLPNAKRTLAAADAEIRRARREIDWLAALPAQAAQAVLKTYFQAWRNYWDGRAGVPHFKARARTVMSVDIPQGRDLRIKRVHRRWGMVNIPKIGRVRFRWTRGLPIGKAADCDNKITGARLVKDPLGWHIAFRVQTVDPVPEPHTGPEVGIDAGVIIPLALSDGHHQDHGRAAHLPDGTADRDKWLNPDERIKLLRLEQQAAHRKSFRKPGQKASNRLNRTYDRIASLRATAKRRANDWQHRTTTRLASTYGVIVVEKLDIPNMVKRVGGTTEKPGKNVAQKSGLNRSISLEAWGRTVTMLTYKAARRGGTLHQVPASGTSRRCSVCGFTTRGSRESQAVFVCKNRDCGWSGNADLNAARNVLHLYRTGRALVPAAGRAVVRRPRGVKPATTP

SEQ ID NO: 54123 - protein, 291 aa, unknown
  TnpB Polypeptide
LKTLRVYPDGSRKGGRYAPVVLDFKGSAIKLYQVCRNERGYAIEVPMPKWVVDRVKEGGDVKYAMIGFKDDEPYLALTAEREVEPYIPSDYMLAIDVNAWNNGIAWGLIKNGNIIKWKPERPRLREIDGLYYSSVVLSQKYGKLKRLGLHKTREGKGLWREVRRLRRRIYAKLRDYAQRLVHRLVKKALRHRALVIIDDIIEESRRELLEGKLPSGLRKIYLAETRRFVKLLVTQLQWYGVPYKFKRLYSSVCPICQHELTQLPGRIMVCENCGFKAPRDKVPMYWVLKLR

SEQ ID NO: 54124 - protein, 252 aa, unknown
  TnpB Polypeptide
  misc_feature (65)..(90): Xaa can be any naturally occurring amino acid
MTRSPILRKGSRSILERMYLSKIGEIKIKLHRPIEGKIKRLTVRWAATGKWYACFSVDLEDLPKXXXXXXXXXXXXXXXXXXXXXXXXXXLARVQRILSRAPKGTPERKKALEIVERVHERIANKRYEFAHQISNQLVNRYGLIAFEDLNIKGMMQNHNLAKSIGDVAWNMLVTLTSYKAASAGSMVVLVDPRNTSKMCSRCGILVQKDLSERVHNCTQCGLSIDGDWNAAINIHRLGLQSVGIQSVQARPL

SEQ ID NO: 54125 - protein, 408 aa, Clostridium sp.
MFLVAEFMVLESIRKRLRRMKKLKRAYKIEIKPTLAQKIKIHQTIGISRFIYNFYLAHNKEIYQKEKRFVSGIDFSKWLNNEYIPKNQDKKWIKEVSSKATKQAIMNGEKAFKKFFKGETSFPKFKKKKNKDVKAYFPKNNKTDWTIERHRVNIPTIGWMRLKEYGYIPTNSIVKSGTVSQKSDRYYVSILVEEDIKPNDKPYSCGIGIDLGIKDTAICSNGIKFKNINKTSKVKKIERKLKKEQRKLSRKYESLKIRNKNNKEGATRQNIQKQVVKVQKIHQRLYNIRNDYNNKIVSELVKNKPVFITIEDLAISNMIKNKHLSKAVQQQKLYDLRNKLISKSHQNNIEIRQVSRWYPSSKLCNKCGSIKKDLKLSDRVYNCKCGYSFDRDANASYNLRDAKEYKII

SEQ ID NO: 54126 - protein, 387 aa, unknown
  TnpB Polypeptide
MAECIFTAECKLAPTSEQIVEIEDTLKVFADACIWINNNVDAGIRGRVRIHHLTYKEVRAKFGLSANLVVTAITRVAGNRKTAYESHSTVKEFKSTSVSYDARIFQYREKDETVSLTLLRSRQRIKLVLGDRQREMLKGKKPTSAALCKRGREYYINIQVKSDTPELIQTNKALGVDLGITDIAMTSEGQSFGGETVKRIKDHYQSVRRHVQSNVSKGTRSTRRRGRQFLQRLSGKESRYQKQINHEISKAIVARALEIQALVALEDLTGIREGVNKKAGRNQRKKVNGWAFYQLREFLTYKALAAGIPLVLVDPAYTSKTCHKCGKPGVRYGKSFKCPHCGWSGDADFNGANNIALLGLHVGQPCGPILPMHPAQVRLGLLKAHLF

SEQ ID NO: 54127 - protein, 398 aa, unknown
  TnpB Polypeptide
MMKLVEKHKIYKSHPAYSKINDMSIKANNLYNQCVYFAKNSENLFEDLNNLDKVMKSFPEEYDNYRSFGYVKCAQQILRLFQQNLRSYFASIKDYKKHPTKYTGRPNFPKFRKSGERFQVIFTNQSAKLVGNTITIASKTFDNQLSIVLRTTSANKLCQVRFVPRNDYFLVYVIYEAEKMSSQESNKVASIDIGLKNLATVTFSEQNEPILYRSDLVKINKDFNRLTAKYSSILKKTQNKYTSKRRKRFSEKRSGLVEDRLHKISRTIINDLSHRGVSTLIVGKNTGQKINSKLKNFVQVPLFRLIEMIKYKAELAGITCIVTEESYTSGTSFLDNELPTKEYYNNHRRKFRGLFFSNTLKRINSDVNASFQIMKKIYENFTYNDSVKYANPIIKTIC

SEQ ID NO: 54128 - protein, 394 aa, Microbispora sp.
VKRAFKYRFYPTPEQAAELARTFGCVRKVYNMALSARTEAWALRQERVTYNATSAMLTAWKKTEELAYLNEVSSVPLQQALRHLQTAFTNFFAKRARYPRFKSRKKSRDSAEYTTSAFRFRNGRLTLAKMAEPLTIVWSRPLPEGAKPTTVTVSRDSTGRWFVSLLVEDPTVTPLPANGNAVGIDAGLDHLVVLSTGEKVTNPPHERADRERLARAQRNLARKARGEGANRAKARRKVARIYARITDRRRDHLHKLTTRLVRENQTLVIEDLTVRNMVKDRSPARAISDAAWSQFRGLLEYKAAWYGREVVAVDRFFPSSELCSVCGAVQEKMPLHVRVWTCACGATHDRDVNAAKNLLAAGLAVSVCGAGVRPQRRPPGGQPAMKQKALRREL

SEQ ID NO: 54129 - protein, 399 aa, unknown
  TnpB Polypeptide
MMLKAYKYRIYPTKTQEVLLVKHFGCTRYIYNYGLERKIKSYAETKKSLSRFTIQSDLPKLKKAEETKWLAEVNSLSLQVALLNLDMAFTRFFKEKKGFPKFKSKHDHNQSFQVPQNTTVDYECKRVYIPKFKEGIKCKFGRQFSGKIKTSTVSRTPTGKYYISILVETNDTIPSKAPIDENKAVGVDLGIKTFATLSDGTEIQNPKNLKKSLKRLKRLQRSISRKIKGSNSRKNTVKLLARQYEKVTNRRKDFLHKTSKWLIDHYDTICLETLSAKNMMRNHKLAQALSDISIGTFNAYMDYKAEWYGKNIIRIGRFEPSSKMCSCGHIYKELTLKDRVWTCPCCGAINKRDLLAANNIKKFAFKQNNTARTTGIYAVETMNPTRGAATETHTSLVRG

SEQ ID NO: 54130 - protein, 416 aa, Micrococcaceae sp.
MPTMRYRYRAYPKPAQIEPISQLFGCTRVAYNDALALCKAEYEAGRGKPSFAELSRQLTQSKKTKERAWLADVSAIPLQQALRDLDRAFRNYFDVATGKRKKPRGVKKVGSPKFRSRHNHQSAYFTKAARFSVRQVSAKKGFVRLPKIGEAEFRISRPLPSEPSSVTLIREPDGRHYVSFVVEVPEVEAKPAKAEAIGLDLGLEHLATTVDTNGQVTKYENPRWLRSKERKLANLQRALDRKKKGSKRYAKQQHRIAVAHRKIRETRTHHHLQVANKVVDENQVIALETLNIAGLKQTRMGKSISDAGWGQLVSLIRSKAEARGRQVIVADQFAPTTQMCSVCGANCGKKALHIRAWTCDSCGSRLDRDANAAVNIMLAAGLAESINERGENVRRQLAGAVTVEALTRLELVPSGY

SEQ ID NO: 54131 - protein, 432 aa, unknown
  TnpB Polypeptide
MGPDGGNHWPNRKGRRREAGSEGSVKRTPAPGHTKRMRHLSPGKGGTKTLKPDGHPEEGMDAYAADIRDEGRCAIPSGGPFVCRMRCLCQETQARAFRALTGKRYSQQTRPAYPCSARSVPRCSRAFRAFFRRVAGKSGKAGYPSFKSEGRYDSITYPQEPGFSIRDGKLALSKIGHIRMKMHRPAEGRMKMCTVVRDSGHWYACISVECEARTRTARPSGRHIGIDTGVTSFAVLSDGTRIENPMYLTRSLKKLSRLQKGLSRKKKDSANRKKAKLLVTRVHRAIRNQRADFQHRLSRTIVDQYGAITVEDLKVRNMVRNRHLARSISDAGWGSFLMKLAYKAEEAGRLFEKVPPHGTSQMCSGCGGKVPKSLSVRTHRCPHCGLVLDRDHNAAINILRRSTVGATGSYARGEAALSGPSSNREVPSVRAG

SEQ ID NO: 54132 - protein, 668 aa, Mycobacterium sp.
MTHMAASPTAISDEMIPRRRGKSKAPNFTYRGPVSVIRLELDVSDPVVRRRVDRHWEAVFRLRRALQRDAQARCQVYRAARQERARDPNAVRERLGLTRKGLEAAAKRHIEDSGWMRDHLTKAIGLHVADEVWETVDRHLFAHASGRRHGPPRVGSWWEFTRIPGRARSHTKSRPTWETYRLVGTLDGHLGEYRHPGLPAAVSTATAATGRVAGTSVLGQPARLAPPRRPASGSWWDHDGVLAVVFTGLPAGDLVLPVRLPQGAGRWAHLAHFLADPDVWHKIDLVRVADRRAPGGWRYYAHLLVHQSGYQSPATRARRAEIPAGRRAGVDANVSNLAVASFPSQCPAQLVIDRIDCTPEQQKAAARAAKKARARHKALDRSRRNSNPNQYGPSQRQHKRAARRAAAGLAARQITNPGGPRAARADGVPLRAYRHDTLSRRYQRTRSDRTSESRTASQAKQARAEQVSARIVAAHGNAITVEDCRISTWARLWGKRIQLFSPGMLVAALERECQAAGGRLYRASTRSTALSQHCLCGHRVPKTLAQRTHHCPECGLQADRDVTSAILAACVELADPDDPRTARVDYTLANTLQRVWLASQQEWEGSVNRHQPRPPSNGAGSARTGSHHPVVASAEQAAPGPPPNRPDSKPGRRGTSRKQPAPKLIGAA

SEQ ID NO: 54133 - protein, 514 aa, Rhodococcus sp.
MKVSTEHLFLNGEVNEMYSAYKIQIHPDHELFHYCDSLCFKAKNLYNITNYYIRQVYTALNKETQNENQLQVLRDIELHLRKMNEIRQKSYEIAKMKPKKVDKSGKSIDAKLKLFEMPHHGKSFIGYGFVEALFKVMKQVDYTSMPSQSNQQTMKKVYDDWKSFFEASKKYKINPASFSGKPKIPKYKQKNGRTTCYLTNQIATIKEGNVLKLPGTHLQLNLGKVARSEGKLQQVRIVPSYGRYVVEVIFKGTQDKEIHRTEKQFNELVFEPKRVMGIDMGVNNLATIVDNTGLKPLLIKGTRLKSFNQYYNKLKGYYMSIIRNGKGPKEGIFNTKRMTSLDRKRNNRVMDFLHKASAKVVEIALDRNIDTIIIGRNVGWKLEVDMQKANKQTFIQIPYSTFIEMIRYKAERKGIQVIDREESYTSKSSFLNHDPIPTFGEEHQTIFSGYRSTRAFYKVKGSKVLIHADVNGAFNIVRKHVKSAFEGLERKQFLQSPQKIIIIKSTHAKLKASA

SEQ ID NO: 54134 - protein, 188 aa, Bacillus sp.
MDMPKQNKAYKFRLYPTEEQAHLIRKTFGCVRFVYNKMLAERIEVYEKYKEDKEELKKQKFPTPAKYKTEYEWLKEVDSLALANAQLNLQTAYKNFFSGQSDFPTFKSKKSRKSYTTNRVNGNIMLFHGYIKLPKLKMVKLKQHREIPPKHIIKSCTISMTPTGKYYVSILTEYEKEITSKKVERVVG

SEQ ID NO: 54135 - protein, 196 aa, unknown
  TnpB Polypeptide
MEIGHINHVTIERTPTGKYFVILNVDFDPELRPNAGGKIGIDVGIKAFYSDSNGNTVSNPKYLEKSARKLIREQRNDFLQKQSTMLVRENQTICIEDLHIKGMLRNHRLARSISSVSWASFFSMLEYKASWYGNEIIKVPTMYPSSQTCSCCGYKNPLVKNLTVRRWKCPACHAVHDRDINAGLNIMNKGLQMHSA

SEQ ID NO: 54136 - protein, 395 aa, unknown
  TnpB Polypeptide
MSIRDVAGMQKTFGYRIYPMDEQAIALDNQLYLCQKLYNAALEERITWHKNGVAIGYTMQANELPELKKSLPEYKEVHSQVLQDVLRRVDKAYKNFFRRCKDKKGKAGFPRFKGRNRFKSITYPQSGFSIEGNDLKLTKNGKIRMVYHRPIEGEIKTLTIKRDAVGDWWATFTVELPDVPMKEPMTVIGVDVGLENLVTLSTGEAIGTPRYLRKSERNISVLSRKLSRTEKRSKRREKARIKLARAQRRVEDQRNDFLHKLSRGLVERADLIAFEDLNIQNMQKNHCLSKSIADASWGKLIEMTRYKAVEAGGAVILVDPRGTSILCSRCGAAVPKRLDQRLHSCQSCGFEIDRDWNAALNILKRVGPDGAELLNKRLVEATPLPLPSGGGKYGP

SEQ ID NO: 54137 - protein, 402 aa, Planktothrix sp.
LLKSFHTKLNLNNQQRTLAAKHAGVARHAWNWGLEICLKALSANEKLPSAIDLHKRLVAEIKSANPWYYQVSKCAPQQALRHLFKAFGHFFKVPGRGKPKFKKKNIKDGFYLEGSITVSGNRIKLPIFGWVRCHEILPAIKPKNVTITKRASDWYVSFRYELEAKPSPKTRQRIGVDIGIKSLATCSDGSVFPNAKAYRKTQRKLAHLQRSICRKLQGSINRTKANLKVARLHRRIANIRQDALHKLTSWLAKNHSEIVIEDLNISGMLKNHRLASAIADSGFYEFKRQLEYKASWYGATVIKVDKFYPSSQLCSCCQHRQKMPLSARIFKCANCGIELDRDFNASVNLEHWQAIIDYPLTVSSTGIACGGSHQLNGTAIKDSMKQEGNVKLSINQAFEVCE

SEQ ID NO: 54138 - protein, 408 aa, unknown
  TnpB Polypeptide
LRSPLRTASGCQPSGQGHRSGHREGSVKLQQAGSPRSPLRGVPQAYRYALDPTPSQERRLRSHVGAARYAWNWALTRVMARYEAEKKWDSAEDLHRLWNAEKKRNPELAWWSENSKCVYQEAFRNLDWALEDFSKSKKGLRKGRRLGFPRSKKKGRCRDSCRFSTGAMRCSGSTVTLPRLGTIRTHESTEALAGKIAEGKARILSATVSRTAQRWFVSFAVEVEREIPDHHRRPQTAVGIDLGIASLITAVDHRGRVIRFPGPKPLRAALGRLRRAARAHSRKKTGSANRRKSAKRLARLHARIANCRLDAVHKATTWLATRYEAVVVEDLNVPGMLCNRRLARSRPVLRDHTAPARLQDRLARRTTAGGRAVLPQLQDVLWLRDGESQGWPSAPSAARAAAWSSTGT

SEQ ID NO: 54139 - protein, 436 aa, Halobacteriales sp.
VSFGLDIHTGSGDDLQHGCLEARRIRNETNRLDQQGWDWNDIKSTVVDNATHVKNTSQLIVDKALGELETYHDNKDDGWGRPYPYIDEPYPMVMNHGEGYRLFPEDDGTVRFRLTATRGTHVNGELRGSPDQFDRLRTAFTNDEWRIGTAEVVHKHDEWRLHVTITHETHRVACKTDADTVVGVDVNEDCIALAAMSQNGTVKDSVVFEYPSVKERRHEFFTKRKRMQTVGQTAFETVIQTEERDYVHDCLHQVSRRVVEWVSQFSAPVLVFEDLKDMRDAIDYGTRMNRRLHSLPFAALQEMVSYKAAWNGIPSDDVDPEYTSQRCPRTACQHTERANRHKKRFKCQQCGFQDHADRKAAVCVVQNWFDRETENVPSLETLPRVKKVRRAASGRGGATDSHGPNSGSGVTSTGEAQDSPSQAREELQSVASALQD

SEQ ID NO: 54140 - protein, 669 aa, unknown
  TnpB Polypeptide
MAQEAERGGVHLDAVEPAGRGQRRGGGEPLGHRRDLPLLHLLGHLPGDGVGHARGRPEHALAVGARPLSAAVAEGGHRQPAVRVDGVGHGRPAGEALGRQRGPLVGPVTGVDGGRLGDHRAAAAGRPPLVVGDVARREGAADAQVGLVRPEEQPVGRPLGAEVDGFEEPHAHLSTRAAQRAAPGAASAATGNVCTVTAAGHDGTVPRKRPVAAPPIVHRTTRVALRTTPGQSRRCFGLLRSGGDVWACVLELSALRRQRGVPALVTYQELCRELSAAGPGTFGELSSTGARSILRRYSDAWMSTAKRRQAGDRSARYPRRKKGLVPSRYYAGTFWIEGRRLRIPTAKGAAPLAVRLTREVPYPAPSIRSVTLLADGPRLCVDVTAEIEVEHYLPGAAPDPDRIAGVDLGIIFPFAVVADEGSLLVSGRALRAESRLQLAEAKARRRAVARRAPGKGQRGSRRWRKYRVRTKVLQGRHRRRLAQARHEAAKTVVDFARQNGIGLLVVGDPRGVLDRDAGVRQNLATRNWRVGQLMGVLEDKARAAGIEVTTVDERATSSTCPRCGNQVRKPRGRNFSCPHCALAAHRDLVGAINIASRSPRGGINVDPAGLAITHRRAGRHLPGRTRRDPRRVALEQRGRLVGLWPAVARPGAVEHDGSGESLARGASVA

SEQ ID NO: 54141 - protein, 357 aa, Methylocystaceae sp.
MMLTFKYRVKDATVRKRLNRHAWACNQVWNYCCQIQREAESRWKAGRVGRWPSAFDLIKLCTGAGRELGLHSDTVQTICRQFVVPRDKHKRCPRFRASGGAKRALGWVPFINRAVQIDGSRVTYMKQAFHFWRSREIGGPVKSGCFTQDARGRWYVAFQCEVEDNLPTGNGQIGIDLGLKTFATCSDGDTIPALQHYRLYEAQLAVAQRANNHARVKAIHAKIANARRHHLHEQSTRLVRENELIVVGNVNAAKLAKTRMAKSVLDAGWTTFRSQLAYKARRHNARYIEADERWTSQTCSCCGSIPVSSPKGMGALGIRHWTCSDCGASHDRDVNAALNILRVGRERSPLVGEIPVL

SEQ ID NO: 54142 - protein, 433 aa, unknown
  TnpB Polypeptide
MILTKKFQVFPDKESKDKLWDGSDCCVDIWNCANEQRQMRSGFGKVNLYSQKKELALLKKEFEHFKRPSSQVLQNVLFSLDRSYKQFFTKLKQGDKRVKRPKFKSKKYFFSQEYSQPKTSFTLDKESKILSLAYGKSRNDWIHVSFLDSLPFPSEQVKTCIIHFDSMEKKWYASVTYVFEEVRYQKNNVSLYFDPGSKTTLTGITSDGNFVEYDIHPLRTLNMSTYKHLDELISKRDNLKSKKSKRAVSAYRRLNRRIKKGFRKINTRTKMYLHRLANDMLDNHPDVQQFYIGDWAKQTTLADTKNTFANKTINRAVQNNLPLGKLIDYLTYKAKMRGKVVEKFDERGTTRTCTKCNKQHPKGVSTTARTFQCIDKHCNFRFSRDHHSCLNFIKHFEPALWRCLVEQDNLPTRSEKRTFAPFSLKSQIYSYQL

SEQ ID NO: 54143 - protein, 347 aa, unknown
  TnpB Polypeptide
MITISHKIELVPNNKQKSYFRKAFGCARLAYNWGLAEWQRRYKEGDKVDAYGLKKAFNAIKKEEFPFVGEVTKYATQQPFINLGKAFKKFFEDLKKGIVSYPQFKRKKDNEGGFYIGGDQVSLSDTNRNSKNFRKIPHNEKQKHQYLKVPNLGWVKMTERLRFIGKINGVVISQQGNKYFASFSVQAVEDEYKRTHPNADTDKGVRMAGIDLGIKSALILSDGIAVENPKPLKKNLRKIKKISRQLDKCVHARNKQERLEGKKKSNNYRKLSVRLSNAQRKVANIRRDFTQKVTTILTTHYAHIALEDLNVKGMVRNHRLAQSVSDVAFGELCRQIEYKSMLKGLKF

SEQ ID NO: 54144 - protein, 388 aa, unknown
  TnpB Polypeptide
MQKGLSISICITIFVLKAYKFRLYPTKSQKRIMERTLDLCRWTYNQTLAYRKNAWEKEGKSVSKYETHNLLPQWKEDRPELNEVFSQTLQNVQERVDLGLKAFFRRVKAGENPGYPRFRGKSWYDSFTYPQKGFKIGGGKLHLSKIGDIKIKLHREIEGKIKRLTVRRSATGKWFACFSVEIEDVRLPPWKDGSMVGIDVGLESFATLSNGDKIANPRFLRAEEKELARVQRKLSTTSKGSPERKKALKVVERVHERIANKRYDFAHQISCGLVNRFGLIAFEDLNIKGMVHNNCLAKSISDVAWRMLVTLTSYKAANAGSMVVLADPRNTSKMCSRCGILVEKTLSDRVHVCPHCGLRIDRDLNAAINILRLGLQSLGIKTVEAPCL

SEQ ID NO: 54145 - protein, 383 aa, unknown
  TnpB Polypeptide
MLINRAYKFRLYPSKEQEILINKTFGCTRLAYNYYLNMKQELYKQNHTTLSSYDMCKDLKVLSNGRPYLKEVDSIALRTSIFDLDDAYNSFFKETNGYPKYKKKNGKNSYRTNLITSTYKGKTYENIKLDLKNKTIVLPKLKEVKIRGYRNLEKINGRIINATVSKESNKYYVSVCIEEDIPTPIFTPTSIVGIDLGIKDLVITSDFEKYGNQKIIEKYEKKLKRFQRKLSKKQKGSNNYYKLKQKISRIHQKIRNARKFIIHHITKAITDENDIIVLETLKVKNMLKNHNLAKRVSDASLSEIVRQLEYKSKWKGKKLYKIDTFYPSSKICNKCGYKNERIKDLSIRNYTCPNCGCNLDRDYNAALNIMYEGLKLYMKEVLV

SEQ ID NO: 54146 - protein, 381 aa, Nocardia sp.
VQLRYNFRIYPTPGQQIALARAFGSARVVYNDALAARREAFEAGQRISDAELSKRLTAAKATPQRAWLGEVSSVVLQQALADLNVAYRNFLSSVTGKRKGARVGPPRFRSRRDSRQAIRFTRNSRFAVTLGGKLRLPKIGDVPVRWSRVLPSAPSSVSVIKDAAGRYFASFVVHTDDQPLPPVESEVGIDLGLATFAVLSNGQRIESPKFLRQAERRLKKAQQALSRKEKGSKNRAKARVEVAKAHARVADARRDWAHKQSTKIIRENQAIFVEDLCVKGLARTRMAKSVHDAGWSMFVTMLEEKAARYGRAFSKVDRWLPSTRMCSNCGVIGEAKALHVREWTCGCGTTHDRDLNAAINILAAGRAERLNACGGAVSPAA

SEQ ID NO: 54147 - protein, 421 aa, Streptomyces sp.
MTQQVKRAFKYRFYPTDEQAAELSRTFGCVRLVYNKALEERTRAWYSEQRRVSYVQSSAALTEWKKTEELAFLAEVSSVPLQQALRHLQTAFGNFFAKRAKYPRFKSRKKSRASAEYTRSAFAWRAGKLTLAKMTQPLDIRWSRPLPEGAQPTTVTVSHDSSGRWFVSLLVEDTVLPAPVTDAVVGLDAGITSLVTLSTGEKISNPRHERRDRDRLTKAQRELSRKVKGSSNWNKARRKVAGVHARISDRRRDFLHKLTTRLVRENQTVVIEDLTVRNLLRNGKLARAISDASWTELRSMLEYKCAWYGRELIVIDRWFPSSKLCGACGTVRPKLPLNVRTWTCGCGAVHDRDVNAARNILAAGLAASACGDGVRPQRESSRTGRSSAKQEPQRATAEPSRRQAGGKVKLPSTPVRPGPLG

SEQ ID NO: 54148 - protein, 444 aa, unknown
  TnpB Polypeptide
MDILKYTTETRLYSKNNEDIIAYFDEVKEQYNYILRKVYYIIRNNPKIKESSLNTELQSEYNISRRTANSIMKTVHGRINSIKRLKKTEVKQNQYRLEKISAKLEKLIPMLSDLKLKAKENNIKDLVKYKNLKTKVAFLKIRKDKLINKIKSLNHQLETNKFKITFGTKKLLKQSLEEFLNKRDNQMIFLGSKEEPCCNQTFQLKYVPKINQFIMKVRKDFKYKDAKGEERYVYGKCFFNNHKKLLKEILRSKSSPLTYQIIERNNKYYLQCTFEINNCNLSLTDNAQGVIGIDFNKGFVAISQTNKYGHLVSTDKITYRFGSGNKTKNDLLLIINRLTELAIYTGKDIVVEDLNFLKKRSKTMQGKSQKGKKYNKMTHSLAYRMFLDRAEQICNKRNVGLIKVNPAWTSWIAKNKFCDKMKLNIHTGAAFVIARRGMNIKDVV

SEQ ID NO: 54149 - protein, 408 aa, Nostoc sp.
VLHKAIQVRLYPTKEQEILLAQTFGCARWWWNFALNKSIETYKETGKGLGQVALNSLLPQLKKAEDTKWLADCYSQVLQATTLNLTTAYKNFFEKSAGFPKFKSKHGKQSVQYPQNVKIVDGDVKLPGNIGIIKAKIHRPIEGKIKTVTVSKTPSGKYLASILTEIEGDKPSTSEGKIYGIDLGLKHFAVVSDGKKVSKYDNPKHIAKHEKNLKLKQRKLARKVKGSKSRNKYRKLVAKVYERVSNSRQDFLHKLSYKLVSDSQAVILENLHIKGMVRNHNLAKAISDCGWGMFTNFLSYKLERKGGKLVEIDRWFPSSKLCHVCFYQIGEMPLDVREWDCPNCKTHHDRDENASHNIRAEGIRMLKAEGSAVSAVGGEVRPKLGRKSKLRHSPVSTEAPPSGEAKAG

SEQ ID NO: 54150 - protein, 408 aa, Thermoplasmata sp.
MKRTGGFRLYPNNGQIQAIAGMLEECRWLYNWALDCRKLAWEHMKEHVNYYDQANLLPYLKEKVRPNLTGVQSQVLQDVLRRVDKAFKAFFRRAKSGEKPGYPRFRGKDRYDSITYPQNPAFRIEKTGLRCDKLVLSKIGAVRCRVHRDIPDDAVTKTCTISRSGDRWFASITYDVPDADVKEIISENVVGLDLGLNHLLAFSDGVFLDAPKWFRASEKKLGIEQRRLSRKKRRSKNRSRQRLRVSAVHRKIHAQRKDFMHKTSRSLVDSFDGVVMEDLRIKNMVRNHHLSKSIHDAGWNMFAGFVAYKAEEAGKHAVFVNPSGTSIECCVCGTPVSKTLSVRTHRCPSCGLVLDRDTNAAVNILGRGLDALGLLTAGTAGRACLNDLVTGAMIQEAPSSPVLAGREG

SEQ ID NO: 54151 - protein, 363 aa, Microcoleus sp.
MFAIKRALKLNNNEATLMAKHAGFRRVVFNFGLSLRTQMYSEGNLSDSKVLNEVKKVLTNHVKKQPEFGWMNQLSSRVYQNALIDLKDAFSRYRSGKAGHPTFASRRNGQSFTVDSSNGKVLLSAGNTIKIPTLGTFRLYEALECGFVSQTFTISKKGSRWFVSFCIDAERLPVRQPESSVGIDVGIKYAATLSNQQVFDAPKPLKQAKTKLATWQRQASKQVKGSQNQCKTYNKITRIHAPIACIRSDFLHKLTTYLAKSFKLIKIEDLNVKGMMANHKLAGAISDIGFYEFKRQLDYKCKMYGATLVLVDQWFPSSKTCSNCGTKKDMPLSIRTFDCPVCGISLDRDLNASLNILNWEPSA

SEQ ID NO: 54152 - protein, 380 aa, unknown
  TnpB Polypeptide
MGGVLVPYRSIKVRLIPTQTQELALKQHAGTHRYAYNFAKALSERYYEEHGESISVNDISKAFRKTYGSIPWIVDICKDVNHEAIRDYGTARSNSFRNHKDGYHTKYKSRKDSIQGFAVDARKLKFKGKVYLPKVGWVSVNQTPKKRIYKNPRVIFDGQYWYLSLGLEVETKQVELTEEVLGLDIGLKNLVTTSDGTLFENINKTKTVKKLERERKQAQREMARRYIKGSTKQSKNYYRSKYKHARICRKLTNIRENHIHQVSSALVKTKPKAIVLEDLKVQNLLSNHCLAKAIQDASWYKLRTYLTYKAEHQGIEIVLAPSTFPSSQLCSNCHQRFDVNAQKRTWGLDIRNWKCSHCEVEHDRDENAALNLKWYYNHQV

SEQ ID NO: 54153 - protein, 482 aa, unknown
  TnpB Polypeptide
MEKGKQIFIYTRKLNANKSHKEQFAKRFRMAEDIYKKTLITLLKRYSKMKKDPLYKKAYKFPKGKERNAILKELGVKYNLVGNFTAGKFANDYRNARNYSDYIPSKVAYTLGFRAWGAFSKVMFAKGAEKVNLRGTLTSFESSGNTGVSVKGDIFTVSTRKKKVSCTIRNENDVFEEDVLHNTLKYNRLVRRFEFGEWNYYVQSIFEGTLPIKYTSELEGSVGIDIGISTIAVSSYYQTELEELAKGVTLNQRELTCLSRKLDRQRRANNPHKYNEDGTIKRGGHQPWVDSKEYLKTKTELNELHRKATEQRKLAHKTLANRIVRMGSTFVVEQISFKDLQTRTKETKISEKTGKYKSKKRFGKAILHKAPSMLIEQIRYKTMYQGKTFILANTKEVKASQLNHLTEEYNKVSLGANVKMIGDVLVQRKLYSAYLLQHVGIDGITVDIEGCKSDFDTFLRNQEFTMSQLTTDLKSVGKEYFN

SEQ ID NO: 54154 - protein, 201 aa, unknown
  TnpB Polypeptide
VETEHVELPHINQNTGIDLGIKELCITSAGKKYENPKIIRKYEKKLVKLQRQLAHKEKRSQNYCKTKKKIALCHEKITNTRKDYLHKMSHEIISENQVIVSEDLQIKNMVKNHRLAKSISDVSWYELTRQLEYKAKWNGRKYVKIDRFYASSQLCSACGYQNTETKNLSVREWTCPVCGTNHDRDINAAKNILEEGLRQIA

SEQ ID NO: 54155 - protein, 570 aa, unknown
  TnpB Polypeptide
MPHRPDYLAYTVPCPLNAGKLQEVVAWVAHWRSLAAREAAWQWRHFFETCGSDGFQASARAGWTRPWVTSGESTVTLAQQVMAQVAGQLTGHVGNVQNTFTRLVAGSSLSADDKHRLFYLNRCRLWLFKGAVKSPVEGEAVLSQDIRQLGRKLFHRALAQHARPHFRHYHPQLDQRSVKLLAAKQATTFPLWAKISTLTPGKTIALPVAAWPALMDTVAATSAALANTQAEQRLAKQQRAAEKRKSKGLPPTKSQHEGRSATLCSLPQTIRLIVRQNDPLRPHAGLHLALGLVVDHAGKRAQERATYTPVRGKTVAFDLGVATLLATSEGDLLGRDWRARLERLDALLQGIARGQQKRGLPVATPRYRALTQQLDGWLKTEIFRLVNAWVARVRPEKIVREAVDFHLQPGLSKRLNRLLSRFGKRYLDLALQRLEATHGIVVECREAAYSSQQCHACGYVDAKNRLSQSQFQCRFCNTHVHADVNAARVVCHRRSVVASPSTAASRKRLLHAQVVQFMADFPVSRADSSRVQPLMCGHKDDPRLGNPYFSAVLEAALKAERPAPPSVFAA

SEQ ID NO: 54156 - protein, 256 aa, Okeania sp.
LPKKPTSLTVIRDSANRYFASFVVETCAEILPKNNNSIGIDLGISTFATLSSGEKIFAPKPLKQNLKKLAKFQRKFAKTEKGSNRRERRRLKVARLHAKVKDIRTNFLHKLSTKLAKQYDEIVLEDLNVSGMVKNRKLSKAISDLGWRQFRTLTEAKCEKYGREFRVIDRWEPTSQRCSVCGFKGGKKELDVSLRDMKREWTCLNCGTVHDRDVNAAVNILNAGSQLEAVEPQPIIKVEVLLKPNLKTQFSQVFSI

SEQ ID NO: 54157 - protein, 630 aa, Rhodococcus sp.
MSLSGDGGASRKTDRPGFVRFVPGGGSAGISGPGAAVPRQFSFTTRAHVAVDDATGDPIGLDDVDVRVGWLLDLIAAAGTELAARLWHPVTFDVLAAGRDRQGRRLPAQGNTAASRLGWNPRYPDGVYVPSRVTRVVTAQVMATLRTLAYRDAAITSLSERFDAATGRKAPPTQPGDWVPLGFARGVRRELLAHARRTDKAQSTRLRITDVQGPPQVAAMARLSAADRQLAQITPAGDELVLTVKLPTSPVPAGRAQWRRVRLTATIPTHLHGRAITDWHLPTLVLDHRGLLWRCAATELVPDCDLGSASVAVGVDWSPSTLGAAAITTEDPAGLSSDYRGFTYDDRGLGTKLARLQTEGQMLHRKAARLTRLAATAPPEVRARLEDKIAVLNEHRTAVGAKRGKINRELGFHFAHQVTDYAEAAGAQVIAVEDLTTLETRGHGRVNNNRAAQSARRKAVTALAHTAAGVGVAVVAVPARGSSAQCPGCDEPLARPGGYHDAWCSGCLVGGNRDHVAGVNLAKRALLGKNKVARRRGKLPAIRVAEHAPVRRSRDKTSPTPSRPRHRRVRRSLPTVTPRAGVNPKQHVPAPEASVWDTVKPTPPHGDASSRDTRTSPTPATPVADSMRST

SEQ ID NO: 54158 - protein, 613 aa, Rhodococcus sp.
MEAGHGVEVGSLMADTGLPALRQFSFTTRPYLAVDDGIGEPIGLDDVDTRVGWLLDLISGAEAQMLSRLWQPATFDVLAAGVDRQGRKLPIQGHVAAARLGWTPHYPDGVYVPSRVTRVVTAQAVATLRTLAYRDTAIASLSARFGPATSRLAAPTTAAEYLPAGFVRGVVRQLTARARREGGALAGRLRITDMQAPPKTSAMARLSAADRQLAHLTVTDAVMTLTVKLPTTVAPTGRAQWRRVRLTAAIPPHLHGRPISEWHLPTLHLDHRGLLLRCAATETVPAADVTSGTCAVGVDWSPATLGAAAITTETPDGLVSDYQGWTYDDRGLGIKLARLQTEGQMLHRKAARLTRLAATAPPEVRTRLEEKIAVLDEHREAVGVKRGKINRELAFHFARQVTDYATAAGAQVIAVEDLTTLEARGHGRVNNNRAAQSARRKAVAALAHTAAGVGVTVVSVSARGSSALCPGCDAPLARPGGYHTAWCSGCGVGGNRDHIAGVNLAKRALLGKHKVTRRRGQMPAIGVAEHAPVRRSRDKTSPTPRRSRHRRVRRSLPTVTPRAGVTPNRYVPALRASVWDTVEPAPPHGDAGSRDTRPSPTPATQVADSMRST

SEQ ID NO: 54159 - protein, 630 aa, Rhodococcus sp.
MSFSGGGDSARKTDEPGLIRVVPGAGSAGMTGPGSPAPRQFAFTTRAHVAVDDATGEPIGLDEVDTRVRWLLDLIVAAGGELVSRLWQPVTFDVLAAGRDRQDRRLPTQGHVAAARLGWNPQYPDGVYVPSRVSRVVTAQVMATLRTLAYRDTAVTSLSQRFDPATGTLAPPTEPGEWVPPGFARGVRRQLIARARREGGAPSTRLRITDVQESPRVAAMARLSAADRQLAQITATDRELVLTVKLPTCPAPAGRAQWRSVRLTATIPAHLHGRAITDWHLPTLILDRKGLLWRCAATELVPDCDLGSATVAVGVDWSPSTLGAAAITTENPDGLSSDYRGFTYDDRGLGTKLARLQAEGQMLHRKTARLTRLAATAAPEVRAQLEEKIAVLNEHRTAVGVKRGRINRELGFHFARQVTDYAEAAGATVIAVEDLTTLETRGHGHVNNNRAAQSARRKAVTALAHTAAGVGIAVVSVPARGSSARCPGCDEPLARPGGYHTAWCPRCRVGGNRDHVAGVNLAKRALLGRSKVAHRRGQLPAIRVAEHAPVRKSRDKTSPTPSRPRHRRVRRSLPTTTPRSGVTPKQHVPALQASVWGTVKPAPPHGDAGSRDRRTSRTHATPVAESMRST

SEQ ID NO: 54160 - protein, 603 aa, Rhodococcus sp.
MANAGYTALRQFSFTTRPYLAVDDITGEPIGLDDVDTRVGWLLDLISGAEAQMLARLWQPATFDVLAAGVDRQGRKLPIQGHVAAARLGWTPHYPDGVYVPSRVTRVVTAQAVATLRTLAYRDTAIASLSARFDPATSRLAAPTTEAEYLPAGFVRGVVRQLTARARREGGALAGRLRITDMQAPPKTSAMARLSAADRQLAHLTVTDTVMTLTVKLPTTVAPTGRAQWRRVRLTAAIPPHLHGRPISEWHLPTLHLDHRGLLLRCAATETVPAADVTSGTCAVGVDWSPATLGAAAITTETPDGLVSDYQGWTYDDRGLGIKLARLQTEGQLLHRKAARLRRLAATAPPEVRAQLDAKIAVLDAHREAVGIKRGKINREMAFHFSSQVTDFAAAAGATVIAVEDLTTLETRGHGRVNNNRAAQSARRQAVDALTHTTAGVGAVVVSVPARGSSAQCPGCNEPLSRPGGYHTAWCSGCKIGGNRDHVAAVNLAKRALLGRGKAVRKRGRNPQIRVVEHAPVRRCRDKMCPTPSRPRHRRVRHSAPAATPPVGVNQTKTVPAPQASVWDTVQPVTPQGTGSREVHTSPTPATSVVGSMRSMQTL

SEQ ID NO: 54161 - protein, 556 aa, unknown
  TnpB Polypeptide
MRNILTLKQQDKYLEFQLLPFVIGIKKVGLKLLGLHQDIDFTIKEIFSRLLMSILLLHRNKKYVIVGSAQKSKKMTWTDKSIFSSPNTLYTRLLQILALELTGKDKALKPFWNNRCLEVSQRLWLPTEIDYVGSDLNSSSLSLNKTELNLLFSTEKIMNPINKTLPTISFPSSTYTLVEKWEKEDIKTRIKKIRLYPSKQQRKTMIEWIGTTRYVYNRALQYLKETKEPCRFQTLRNKFVTKKNNPLVEDWEVRTPKDIRAGGLKDLEIAYKAAFSNLKQGNILKFDLRYRTRKKSFSISIPSSALKNIKNGIQIYPSYTDKKPIKTSKDKALLKLDFNHDCRLKLDNGKWYLFVPYDVNIQKLNTTGKCALDPGIRKFQTIYSENSVEIIRLRKEKLVKLQNKLSLLQSLRDKKSISKSHYIRGIRRVYFRIGNIIDDMHYKTINKLVSEYKTIFIPRFESQDIVRINKNRSSRRLCLTLEHYKFRNRLISKAEIVNSDVVVCTEEYTSKTCGKCGILNDIGSNEVYQCNTCGLRIDRDINGARNILIKCLRDID

SEQ ID NO: 54162 - protein, 337 aa, unknown
  TnpB Polypeptide
MNGKSFSVWLNNEYLPNHPEYQWIKEVSSKSVKKSIEDGCTAFTRFFKGQSKFPNFKKKGKSDVKMYFVKNNPKDCACERHRIRIPTLGWVRLKEKGYIPTTKEGWKIKSGTVSIKADRYYVSVLVEIPDTQITNNSNEGIGIDLGIKYFAIVSNGETYKNINKSARLKKLEKQLRRKQRCLSRKYENLKKGEAIQRKNIQKQKLKVQRLHHRINNIRTDYINKTIAELVKTKPSYITIEDLNVSGMMKNRHLSKTVASQKFYEFRTKLKSKCDDNGIELRIADRWYPSSKLCHRCGCIKKDLKLSDRIYRCGCGYIEDRDFNAALNLRDAMTYEIA

SEQ ID NO: 54163 - protein, 388 aa, unknown
  TnpB Polypeptide
MLIYEYKVDGSKRQCAGIEEAIRTVQFIRNKCLRKWMDERGVCKNDVQCSCAHLAKEYPFAARLNSQARQASADRAWFAIQRFYDKCKQHQPGKKGFPRFQQDNRSVEYKTTGWKLDDDGKHIRFTDGCGIGRLRLVGNPKQHIETFPRKQIKRVRLVRRADGYYVQFSVQAQRRVEHIPTGKQVGIDVGLKAYYTDSQGSTIENPRHFRKAEKQLKRFHRHLSRKQKGSKNRLRARKRLAKASLKVQRQREDFARKQANALVTSSDVIAYEHLEIRNMVKNHHLAKSIHDAGWGIFLHWVKAYGVMHDIPVIAVPPQFTSQRCSACGTLVKKSLSVRTHICTSCGLVLDRDQNAALNILAKALDRTVGHTGTHGSSVRRLGTVSLLW

SEQ ID NO: 54164 - protein, 404 aa, unknown
  TnpB Polypeptide
MLVKGVVFRLDSDLPTEAKLMLEDFRLAVNNAIRAGLQARVTSRNALTKLAYKDFRQEHSRMYSQHLVSAFGAAGGILKNHRKRIRKGVTGRIPFVKRLMMKAENQAYKFDRRSGIIDLPIRAGHHIELRLVVSRYHRKYLDDMTLSLGSLTVLPDRVIVTFRKDAPKPFVPESALSLDTNERSLDGVFVEGDVAKAVKAGFPDIATIQQRHHDRRKRLQKKKAHDRRTSRNLCRREGTREHRRVDYRLHQVANSVLKFAEERRSAIVLEDLRGFKSKRSKELNRRLSMWPRRKLHQIIEYKAQWKGIPVVKVDPRNSSRTCPICRSIQDSRMGAEFKCECGWHMDRHINASINLLQTAISKGMAGGLRFNPGAFQHDVMMILYEPAMAARSEPNGTSSTVGVT

SEQ ID NO: 54165 - protein, 386 aa, unknown
  TnpB Polypeptide
MAESIIQKSFRFRIFPSKTQTTKLVNTLDLCRNLYNAALQERRDAYRLNRISISYYDQANQLKEIKETNSEYKDVHSQVSQDVLKRVDKAFQAFFRRIKSKKEKAGFPRFQGKHRYNSFTFAQSGFSLTNSRLTLSKIGKIKIKLHRAIVGKVKTLTITRDSCGKWFACFSVETAKEILEPTSQQVGIDAGLAIYAKFSDETEIENPRFFRKSEKRLAMAQRRLSAQVKGSKERHQKRKIVAKIHNKIKNQRSNFTHQLSRFLVNNYDLIVFEKLQMLNMVKNHCLAKSISDASWGQLIEQVRYKAENAGRTLIQINPAYTSQTCRICGYCEKANRKTQAVFECVKCYHTENADLNAAKNILRIGLDSLGIQSLEATSKRFGLVVE

SEQ ID NO: 54166 - protein, 382 aa, unknown
  TnpB Polypeptide
MFKAYKFRFYPNNKQIELINKTFGSSRYVYNHYLDKMKNNGYVPAYTNIKDYTSTLKYDAVFLQEIDSIVIRKSLFNLDNAYQKLFNKTGGYPKFKSKYNRNSYNTTAVYNNYKNKEYCNIELDLTNRQIKLPKLKWIKVRGYRNTDNINGKIKSATISREPNGKYYVSVLYEMYDILPEIKPSTIVGIDLGVKKLLTLSDGTTYDNNKYIDKYEKRIKRKQRELARKEKSSKNYYKCKKELAILHSKLSNARKHYIHKITKDITDEYDIITCEKLKTKEMIIKGKDNKLSSKINDATFSEIIRQLQYKTKYKGKEFYQINTYYPSSQICSRCSTQDKRYKDLARREYICTKCNQKLDRDLNASINIMFEGLKLYMKNYARV

SEQ ID NO: 54167 - protein, 383 aa, unknown
  TnpB Polypeptide
MKANKYKLKPTPEQIEKLSQNFGCARFIYNFALSRKKELWESEKKNISRFELQSLLVQMKKDENTSWLKNAHSQVLQSSLMHLDNAFKNFFKKKARYPTFKKKYRSQSIQYPQGVSIKENQIYLPKIGLVKAIIHREAIGKIKTVTVSKDATDSYYASVLLDDNKIKPEKKKHIESHIGIDMGIKHFLVSSDRKKIKNPKFADRQLKNLRQKQRKLSNKKRGSIRYKKAKKLVAKIHKKTKDARNDFQHKLSLELASKNQAVSIETLSMLEMSKNRILSRRLADIGWNEFTQKLSYKLEDRGKSLVKIDKFFPSTKTCSCCNHILDNISLSVRNWTCDQCGTKHDRDINASINIDYQGVIKLKAEGFTVSARGGYIRLSHRQQ

SEQ ID NO: 54168 - protein, 388 aa, unknown
  TnpB Polypeptide
VHKAFRYRLDPTTEQEQKLRQFAGARRFVWNWALQQRRDYYRQTGKTVPPKELSARLTALKDQPDTAWLRDMDAQLLQQALADLQRAFSNFFARRAGYPRFKSKKAELARFRIPQRVKVVGNRVQVPKVGRVRLRLSRPIVGPTKSATFKRDACGHWHVTLVSDRVVTAVTPPLPEVRQTLGVDLGLKDIVVCSDGQREPAPRFYRQAERKLRRAQRVMSRRKKGSRNRAKARIWLARVHQHVANQRTDFLHKLTTKLVKEHAAICTEDLSVKGLARTKLAKSVQDAGMGTLLWQLAYKGRWYGTHVVAVDRFYPSTQLCHDCGFKNEALRLAERTWVCPACGVRHDRDHNAALNIRDEGLRLLAVGYPESQNACGRDVRPACAGSPG

SEQ ID NO: 54169 - protein, 380 aa, unknown
  TnpB Polypeptide
MPLYFFKNITEKLDNSNYQYLTLVIPLAKLTKKKEEKLKFLQKEFTECVKFFLKETQRINTTSPYKLHKLYYKAAREKFKLTAMLIQTARDRAIAIQRIYWVRLKNGKHASKPHITSLLPLHFRQDSYALIRTSRGNWMIRFASGPGRKEYLSLPIVVRPYILQYLNKTFIPGAMEIYRKYKKWLISLSIKIPYHLKIFENIIGVDLGIRHPAVLSNGKFFSGKPFRYIRYKQYRNKFILKTKKRKRKEHYQITYLNHLISKQIIQIALKEKANLSLENLIGIKERLVKRGEISPLLLSNWPYKQIFDFIRYKANLAGIKVVTVNPSGTSITCSKCGYSDENNRINQCIFKCKNCGFELNADLNAARNIAKKGAELLRSS

SEQ ID NO: 54170 - protein, 172 aa, unknown
  TnpB Polypeptide
MALSNGEKIANPKSFKTKRRKLRKAQKALSRKKKGSNNRYKARLKVAKVHAETSDARNDFLHKLTTRLVRENQVIAVEDLSVKNMVKNHKLALSISDASWGEIVRQLEYKCNWYGRTFVKIDRWFPSSKRCGHCGYIAVTLRLHCGYIVDKLPLNVREWDCPKCSIYITIAM

SEQ ID NO: 54171 - protein, 208 aa, unknown
  TnpB Polypeptide
MGLADLVISSDGVKYGTFNAEWLEKQAVRWQRKYARRRYLAQCEVWKWNHNRFDHLEELDDYSNWQRARVNKARCQKRIANKRRDYLHKLTTDLVRNYDVIVIEDLKTKNLQKNHHLARSIANASWYQFRAMLEYKCAWYGRQLVVVKPDYTSQICSNCGFSSGKKPLEVREWTCPKCGIHHDRDVNAAVNILHKGLKAIGQGLALVK

SEQ ID NO: 54172 - protein, 450 aa, unknown
  TnpB Polypeptide
MRKINRTYKFRLYPTEAQTELLAKHFGCTRFVYNYFLNQRQEQYRLTGKSDNFYAECKSLTELKKQEETAWLSEVNAQSLQFALRCLDASYSSFFKKKTKFPRFKSKRTKNSFTAPQRATLVDNKLFINKFREGIRCRVHREVKGTIGKVTISKTTSGKYFASVCTEEEYVTPLVKTNKSVGLDLGLKDLLTTSEGDRFTNNHYTKEYERKLASAQRHLSRKKKGSRGYENQRLKVARLHEKISNSRADYLHKCSISLVRRYDIICIEDLNVKGMIKNHHLAKSISDASWGKFIVILTYKAEWHGKKVVKIDRFFPSSQMCNVCGHINKQTKDLSVREWECPSCHSHHNRDVNAAINILRVGLKQYTSAGTADYTGGEEVRAVPSESHSSEKPEARKYFNLRVVHEYIETAKTLPINGEEYLETLKEAQRFCNEHYKTDLLQNFNLTKVK

SEQ ID NO: 54173 - protein, 245 aa, Streptomyces sp.
VKREGNRWYAVLSCDDVPAEPLPATGAVVGIDMGITHFLTTSDGAHVAGPRFLVQAADELAEAQRHLATFPKRTRRRTKAHRAAARRVAKLYARIRRRRLDHAHKTALTLVRDHDVIAHEKLNTAGMTRAPKPKPAPDAPGTFLPNGAAAKAGLNRSILDAGWAQFLTTLANKAESAGRLVVAVDARNTSRTCPPSLGGCGHIAKENRVTQAKFECTACGFTAHADHVGATNVLDRAGLVLCDAA

SEQ ID NO: 54174 - protein, 367 aa, unknown
  TnpB Polypeptide
MSKITREVRLYPTPEQSHLLMTHALEYISTVNVLASAFDADMLPEKVSTKDFRAALPSAVKNQALRDAQAVFKRSFDLDCLPVLKKPICQWNNQNWRIEQGILTLPLCIDGKVRRVPIHCADLAMEGRPGILRIKKKRGKWIANIALTVEDAPRTDGQAVMGIDLGIKVPAVVHISGKGTRFFGNGRSQRQMRRRFYSRRKQLQKAKKTRAVKKSKGKEARWMKDSNHKLSRQIVNHAHEQDVGTIKVESLAGIRKGTTRTSRGAKARKNNRMKNSWSFYQLTLFIAYKAERLGIKVEQVDPAYTSQECPACGARNKAQDRMYVCADCGWHGHRDSVGAINISRRTGLSDKRIGAVGAEGSANGRAA

SEQ ID NO: 54175 - protein, 476 aa, unknown
  TnpB Polypeptide
MMSDIIYDIDQVVAAVSATSKATPESSSAEDEREFYVERHSIKEGTEGFNDLHPVLLQCALLRNVVVFITRQHFFQVTGRNYTYDVFEGEVEGKYLPYCKIEKYLKQTDQPDFRILPANVAQAVVRDVVAEWTSYKKLLKKKQRGEYDGYVSIPGYSDTKHSATFNATYFKATLSKIHLADGIINIPMSNVSIKTNVPVELIRSMKVSYSPGQCFADVVYEKTERTPLKADNGRYLFADMGLDNFISIGSNVSSFKPVIIDGKEMKSVNRYYNKKISTYTEKMKAIDESFASDEFTRKLWADRKNWFYDKMHLISARLVSWARTLQVNTIIIGHNQRWKDGLPFKKPVKQNFAFIPYYIFIRDLKYKASAYGITVVEQEESYTSKASFLDGDFIPTYKKGDTEKYEFSGKRIKRGLYRTKDGHLINADINGAYNIFRKYLQVNSIEYDFSREAMGVVIPPRRVRLSELKHQGNAVK

SEQ ID NO: 54176 - protein, 356 aa, unknown
  TnpB Polypeptide
MSRYRLAPTTAQEAVLRDHCAHARFVWNLAVEQQSWWRPGRRSAPGFLEQCRQLTQTRAGHDWLREGSQMVQQQALRDFAQAMTNFFAMTHRRPTWRKADRDEGFRIVAVKPGHVRRLSRNAGEVWIPKAGWVPGTGGALGVDRGVAVSAALSTGEMLTIPRPGPAKQRRLRRLQRKLDRARRGSNRRARVKRAIAKLRAREADARKDWAEKTSTNLARRFDVIRVEDLRVKDMTRSARGTIAEPGRRVRQKAGLNRGILASAWGRLVRRLQDKAPGRVEKIKPHYTSQRCSACGHVAAGSRESQALFCCVACGYACNADVNAARNIAAGHAVTAWGGDGVTRPVNREPQLLLHSA

SEQ ID NO: 54177 - protein, 414 aa, unknown
  TnpB Polypeptide
VWAALIEVNRARFRRRAKPIFGYQAWCREIAGVEVGELSVAAMRSVVRRYSSACFEVAKRKRAAERARYPRRKRPLVPLRWHTGTFTVEDRRVRVSTAAGSPPCWLRLCRPIPYPIDSLRSVTLLFDAGRLVLDVTAGLDVEDHDLDPSRVAGVDLGIIHPIAARSAEQALLVSGRALRAEDRLHLADTKARQRKMDPRKPRPGQRGSRRWGQLRARQRRAEAANRRRVRQAHHEAARTLVDWAIRQRIGKLVVGDPQGITTKDAGAVHNRRLRTWRRTHLMGTITDKATLAGLTVERVDERGTSSTCPICRHRVPKPSGRNFSCPHCGHAGHRDLVAAHNIAAPRGGTITTSRLVVEHRRVGTPTQRRDRRRHHMDERRSCPAPGRPAKPDGESLADPCEDQPTLRPNSALIG

SEQ ID NO: 54178 - protein, 439 aa, Caldivirga sp.
VASQSSVQKTLERSVALECYVNIFGRRALREVEGAYREMLIEMVDYAVEHNASQETLHRVFYRKFTGQYPWLPTRIIKGAYRDAVRRARSFRVLKRKGKAHKDKPEIRSITIVYSDSQDWRLENAVLKVKTHRGWVTLRYGNNKLLHRYLYGGWRLSSELKLKFIGGRIIAYLTFKRVFNVEYNPLNVVAVDVNENNVTMALFKDAKLIGVYRIETGLGNMVIAYTERRRKITQGNSTKDREVRKRLRRLREKARKRDVLSKTVKAIEELAKENNAIVVIGKITEKAKEKMEEGKGKRLRHRIHQWAVRGLTNMLSDKPIQVVEISEKGTSSHIPFSGRRIKHYRPLVIRNAVRGPGNPFRIRVMKIKLRIAVVNGVVWERDEVGAVNLGLKYLKKILKQMGGVVAYPSTGAHEVWVKLMNPHQGPTHLVATINLNKHQ

SEQ ID NO: 54179 - protein, 419 aa, Streptomyces sp.
VIVKLVVQVKLLPTPMQAAALEATLRACNEAAGWASEVAFHKDVKRNFALREHTYAEIKARWGLGAQAAQHVIKKVCDAYATLKANLKAGNLGKPGSKRYRRDVEKPIAFRVQGAQPYDDRMLSWQIGERRVSIWTVHGRVKDVAFTASPEQLATLALYRKGESDLVCRDGMWFLLATCEVPEAPLNTDPVDFLGVDLGIVNIATTSDGEIMAGRELNRIRMRERTLRTKLQKKNTPSAKRRLNKRRRKESRRAKDINHKIAKHVVAEAERTGRGIALEELTGIRERVRLQKPQRATHSSWSFAQLGAFIAYKARRAGVPVVYVDPAYTSRTCAECGHVDKANRVSQAWFACRSCGVVAHADRNGSRNVRARAWGLWRRGAESTAPAPPPSQRDGAGRKRSITASDARCASPGTFVPGS

SEQ ID NO: 54180 - protein, 547 aa, unknown
  TnpB Polypeptide
MGRVAGPSRGQGRDGSRVRAERAPPQVPRPAPRPVGDGDRGGAPGQVRPVRRGVRRGRPRRPGTPTARRRPGGSGRRPGAGRDGDPDLAVRAAVRAARGGEPGCPRHRRDHRGRPVKVLQAYKYAIDHTPRDERGLRSHAGAKRFAWNWGLARCRERHDAEGKWYSAAELHKLWNTEKKQDPALAWWSENSKCAYQEAFRDLERALRDFVKSKKGQRKGKRLGFPRFKKRGKCRDSFRFGAGVMRCEGTTVTLPRLGTLRTHESTEELASLVRAGRARILSATVSRTAQRWFVSFAVEVERDVPEAHARPGTAIGIDLGVKTLLTAVDNTGNIIEIPGQKPLRASLRKLRRASRDCSRKQKGSNRRRKAAERLARIHARAASVREDALHKATTQLAARYETVVAEDLNVTGMTANRKLARAVADQGFGEARRMLACKTERNGGVLVVADRWYPSSKTCSSCGGRKPSLTLKDRIYACDHCGHTEDRDVNAARNLLKLAASGAESENACGGTVRPGLAGRVPVKQEPGTAHAGKTGTVPAQAGTADEH

SEQ ID NO: 54181 - protein, 371 aa, Megasphaera sp.
IIVNKAYRYRLYPTAEQKIMFAKTFGCVRFIYNKMLGDRLDYYKETGKKLNNTPAQYKEDFPWLKEVDSLALANAQMNLNKAYNNFFRNRKHFGKPHFKSKKTGHCSYSTNNQKGSVRLEGNKVKLPKVGWVKLCLHRPLMENSTIKTVTISRTPSGKFYISILVEYENQILPIMPKKFLGLDFAMHGLYVASDEDDANYPNFLRKTEKRLAQAQRKLSKRQKGSHNREKQRLRVAVLHEKIANQRRDFLHKKARYLVDHYDAIGIEDISVKAMAKRKKGGKFSFGKSVADNGWNMFTNMLEYKLAWQGKQLIKIDKWYPSSQLCHVCGYQNNETKDLSIREWDCPKCGSHHDRDKNAAINIREEARRISA

SEQ ID NO: 54182 - protein, 307 aa, Lyngbya sp.
MKRTVSIPVDLPHKRFLPLMGFCADIFNQHVDWALKERTYNKNKAHKALYAKARLQHPNVPSALLQTVRDSAMEAVKATKFKRHPRKKPTSGLRYDKRTMTLRGHQLTLSCIGKREKLILNVPEYFQEVFETWEFRAATLTYSKHNKQFWVRLVFETETPTQLEGGIQGIDRGLYHQAVTSNGQFFSSSRIRAVQRRYLYNRRQLQQKGTRSAKRRLKTMSGCDYRFMRDTNHCVSKKLANQPGIAAFVLEDLSSIRTRRRGKKMNKWLGSWAFYQQEQFLTYKAEALGKKVVYQDPRYTRAKMQYL

SEQ ID NO: 54183 - protein, 274 aa, unknown
  TnpB Polypeptide
MKSITITAKVKLYPTSEQMIILNKTLSVIRDVLNFVSAFVFGREGIRYLELDHALYYPVRQQFGLRSQMTQSVFKTVLAKYKSMKSNGHPFSKVSFRNFEYDLVWNRDYSISGQSVSLNTLSGRLHIPFELKGMEHWFSAGGRFGTAKLIRKNRKYYLHIPVTLEAENRNTLNHIVGIDLGVNHLAVSFDDEGITRFFSGRTVKEKRAKVLATDPKYTSQSCPVCGNTTKANRNRRKHEFCCTVCGYRSNDDRTGAINIYRKGCNTLFAETCQA

SEQ ID NO: 54184 - protein, 266 aa, unknown
  TnpB Polypeptide
LFVWIFVNVPIREYPDTDREIGIDVGIKPFCVDSDGNGVANPAYFRASERLLRGRQRSLARKQRGSNRRSKARVLVGRAHEKIANQRRDFLDKTANHYIENYKTIRIESLNIRGMVRNRHLSKSISDSSWGKFFSILSGKAEEAGRMIVKVPPHGTSQICSNCGEKAPKSLSVRFEFNPQLSQITWVPLDSLFARCVLFDFTVEDATFFDNEFAAFNTCIDIGCFQKCKSVGSFNFSLEESGNGKEVRLNICRYTTVFLCNNGFSI

SEQ ID NO: 54185 - protein, 383 aa, Microtetraspora sp.
VQLRYNFRLYPTPGQRESLARAFGCARVVFNDGLRARQIAREQGLPYLSDGDLSKRVITEAKKTTERSWLSEVSAVVLQQALADLNTAFRNFFASITGKRKGPKVAPPRFRSRKANRQAIRFTKNARFSITTGGKLRLPKIGDVDIRWSRSLPADPSSVTVIKDAAGRYFASFVVETADAPLPEAASEVGIDLGLTHFAVTSDGRKVDNPRFLRRAERRLRKAQQDLSRKANGSNNRKKAVVKVAKAHAKVADARRDWAHKLSTQIIRENQAVYVENLAVSGLGRTRLAKSVHDAGWSQFVTMLEYKAARHGRHFAKIDRWFPSSKLCSACGALAESMPLNVRSWECPCGAVHDRDVNAAKNILAAGRAERLNACGGTVRPAA

SEQ ID NO: 54186 - protein, 435 aa, Thermococcus sp.
MKRTVTVKLQPSKEQEKTLFELTNMGAKVWNRVNYLRRQEFFEGKPVDFNKTEKIVYEEFKKEIGSATVQQVCRKNAEAWRSFFSLSRKKKAKELPKWLKPKPPNYLKEGGRRKPLIILRNDQYKIEGNRLILKGLGRFKRLEVQFKGRIHLKGKQGRLEITYDTVKRKWYAHISISVEKKLQGEEWVKLPRQPLGNLSAGIDLGVNNLMAVYVENGESFLVNGRPLKSIDFYWRKRIAEYQSKINKSGAKKSGKLRRMHEKAKLQARHYINTVVRRTVERLYHLGVSRIVIGYPKGIARNSDRGRRQNFLLSHVWRFNTVIQRLKEVAEEYGILVVVVDEAFTSKLCPVCGKPHEGARFVRGLFKCPVEGLVFNADLVGAFNILKKIVKTITPSLSGLYAQRRGNGGKTLPEGFREPSSKGVMMGTPQTSLPLG

SEQ ID NO: 54187 - protein, 435 aa, Thermococcus sp.
MKRSVTIKLQPSKTQEKILFELAHASAVIWNKLNYQRLKQFKDFGKIDFNGTEKEAYHEFKNWIGGSTVQQLARKNAESWRSFFALNRKKKSGELPEWFRPKPPGFVGKENGKKLFIIPLRNDQYRINGNVIELRRLGKFGRLRIQFKGRVHLKGKQGRLEITYDEVKRKWYAKINLTVEEKLIGNEWIKLPRTPMGNLSAGIDLGVNNLMAVYVENGESFLVNGRPLKSIAFHWRKRIADYQSKLNKSGAKTSRKLKRMHGKARLQGRHYINTAVRQTVEKLYRLGVSRIVVGYPKGIARNSDKGRRQNFLLSHVWRFNTVIQRLKEVAEEYGILVEVVGEAFTSQLCPLCGQRHADGRIFRGLFKCRGEGVVMNADLVGAFNILKRVVRTITPSRPALAGGRGNWGKAVPEGFSEPSSKRVVMRTPQTSPPLG

SEQ ID NO: 54188 - protein, 501 aa, unknown
  TnpB Polypeptide
MTKWRKDCFIIELKLLLETWQKDILLKRFEIARTLYNTTLSYAVKHYTLMQESKHYRKQLRRYQKAKKSNDSKELKQTAKELDNIRQSFGLSEYQLHAYIKKHQHNYKKHIDSNTSQKIASTVWKAIQDVLFKRSKAHFKRYGMLHSIEGKSNKAGIRFKENIVYWNGLTLPVRIRKQDLFVKESLARHTIKYCRLVKKVIRGVYTFYVQLVMDGMPPAKRIPSTGAFRHAYQKQKRVGIDIGPSTIAVVSGKTVFIQQLAPGVPLLEKRKRRLLRKLDRSRRSTNPNNFNKDGLIQHGVKLHWTYSKNYQKTKKQLQELYRKKACYIKETHGALANKILSLGDEVYIETMHFKGLAKRTKQTKTNILGKIQSKKRFGKSIGHHAPAMLVEIIDQKLGYTKQMIKKVNTIIFRASQYNHVTDSYEKKKLHQRWCQIGSHLVQRDLYSAFLLMNSEPNLQQTNRDLCNKTFNTFLALHNQHIEGLRQVKKTFPLSMGIKQIK

SEQ ID NO: 54189 - protein, 490 aa, unknown
  TnpB Polypeptide
MRILSVRVEGTPFTGYDRWGGPMYESDPEQVMEWLCNGWRYRFNRVRSRRMKYADPDHMLLEPIGDTVDNRSKSEAKNDIPWLAAMPDRVIATCERMENTEWWAAVHRRETIRKQGGNPGGMPRWKRRKQDMTFDCWYDGGKGAVYRKTNRKHGIVTIGGVIPKKYRNPGIPARYKVVIRVRVSRPIREYTSIHVNWTRREIVFVNPPQPIRRETTGCVVGLDGGAVHELTDSNGVFHDLPLEELKRIDRQVRSLQKAQARCRKTAGYPNVKDYLAHGVSKRYQRLDKEISRLKAHATRIIEDAQHKTTTRLVRDNDIIVVEDLQVRNMTRTPQPKPDPLRPGHYLPNGRTAKRGLNRVMQRAALGRVYRMLEYKANLAGVTLIHVNPAYTSQTCSRCGYVAKENRENQAVFHCGECGLTMNADANAATNILSKGLRETEPYNPSDWGTGHVPGRGASDVHTAMSRMNAVPDEAETTMRKETPKHGIPAL

SEQ ID NO: 54190 - protein, 544 aa, unknown
  TnpB Polypeptide
MLERLTTFEQRADSVDTMLTPICADMEQVQLSAIAGSQAESSETISQDKSPSCGKSSRKRRSSKTLALASTSRGADCVPYWSDQCAEISSGLWLPTETVYAASDSILFASSSSGQEAKSWFSTTRKQAPTKSLLTISYQSSTSSLAASTGVEITRTRRNRLRPTPGQRQLFKSWIGCGRFVFNRTVEHLKQPGTKANWKAIKGPILASLPDWAKATPYQIKSLAVEDACKAVTAAKKKYRETGLISEVHFKTRRDPRQSINIPGSAILPNGIYPTISGKGLHYVEPLPNKRVGKGSKNGNATMADGRLLFEYERWYLCVPETVTVHQPENQGLRIVAIDPGIRAFATFYSADECGQIASGDYGRLIRLAQHLDDLLSRLDKKRKDGRVTARRRQGMRKAANRMRAKFKDLVDELHWKTIRFLVDNFDVILLPTFETSQMVQRGARKIRAKSVRSMLTFAHYRFSQRLEWKAASLGKTVIRGSEAYTSKTASWTGEIIQIGGRKTIKSGGVTVNRDINGARGIFIRMVTWALGDHPTFFKWSVQC

SEQ ID NO: 54191 - protein, 362 aa, unknown
  TnpB Polypeptide
MGTCRYIYNFYLTHNKELYNKVEQFMSSNQFRVGLNNEYRPKHPECFWIKEAYSKAVTQAVNNGQTAFTRFFKHQSSFPRFKKKNRSDVKMYFVKNNPKDCRCQRHRINIPSLGWVRMKEKGYIPTTKDGYVIKSGHVSIKAGRYYVSALVEIPNNKIANSSKEGIGIDLGIKDFAVVSNGKTYKNINRSARLKKLEKQLIREQRNLSRKYENLKKGESTQKANIQKQRLKVQKLHHRIDNIRTDHINKTIAEIVKTKPSYITIEDLNISGMMKNKHLSKAVASQKFYEFRIKLQAKCNENGIELRVVDRWYPSSKTCHCCGAIKKDLKLSDRIFKCDCGYTEDRDFNAALNLRDATTYEIA

SEQ ID NO: 54192 - protein, 374 aa, unknown
  TnpB Polypeptide
MILTYRYRLLPLKSQHRALERLCAAQRELYNAALEERIDCYRKTGKTRTYIDQCKALTECRRELPEMGALPANLQRWTLKRMDDAFQGFFRRIKARSGKAGFPRFRGRGRWEAFGFAEFSGIQFDGRRLRFSGMPGGLKVHLHRPLPDGADIRSCVFRRDGRGWHVCLQIAVAEAQKRSVASAVGVDLGLKVFAFCSDNVVIPNPRIAQRAEKELRRRQRALARCKRASNRRLKVRVQVASLHRKIADTRNTWLHQKSAELVKRADLIAVEDLKVSNMVRHPTLARSISDASWSRFVSMLDYKAAKAGGHLIRVDPRNTSQKCSGCDELVPKLLAVRTHACPTCGLKIDQDHNASLNILRAGIGAGALNVIGWR

SEQ ID NO: 54193 - protein, 407 aa, Microcoleus sp.
MRTAYQYRLRPTKQQVIEIDKWLSMLCAQYNYLLADRGNWFEQNRSPVNACPLVCHLPELRDNPDYYSQKKTLPQLKKTHPWYSEIYSQVLQDVVKRVKVTFDRFLKGDSNGKRSGKPRFKARNRYRTFTYPQIKEGCLQGNQIALPMFGKVKVVLHRPIPGGFKIKTASVTKKADGYYLTLSLEDKTVPEIKPDFNPDKITGIDVGLKEFLTTSDGETVSIPQHYRKAQKRLRVLQKRVSRRKKGSNRRQKAVKQLGKQHKKVADKRKDFHFNTANHLLSKYDVIAHEDLNVKGLARTRLAKSVLDAGWSSFLLIVTNKAVNAGLLVVPVSAHNTSQDCSTCGEKVPKKLHIRWHDCPHCGCSLDRDHNAAINIRSRAEGHPVLKAQRLLSNSRIGCEARALSVLR

SEQ ID NO: 54194 - protein, 292 aa, Planomonospora sp.
VCGRSPTPGSGRPSSSAWSRAGDSPRTSNGLQEAHANGLPYISDGDLSKRVITAAKQTPQRSWLGEVSAVVLQQALADLNTAYRNFFASVSGKRKGPKVAAPRFRSRKDNRQAIRFTKNARFAVTAGGKLRLPKIGDVDVRWSRSLPSEPSSVTVVKDAAGRYFASFVVEAGEEPLPEMAAEVGIDLGLTHFAVLSDGRKIDNPRFLRRAAKKLRKAARHGRTLIRIDRWFPSSKMCGACGTLAESMPLDIRSWTCPCGAVHDRDVNAAKNILAAGRAERLNACGGTVRPAA

SEQ ID NO: 54195 - protein, 439 aa, Halopenitus sp.
VVEETFKYAATPDSEQTAAAAWSDIQICREVYNHALTQEYRPRPGYDKPSYTEMQNKLTGPNGWKQRWPEWKDVYSKCLQMAIRRIKQSESVLESLQARSYDVGRLKWKPPREFRSIVYNQSGFDVDHNTDRAGHAVVNFSKIGDFHLNYHRPLPEDGDITQVILKKKKTGAWTVSIVVEHDPEYPDKPAVKDIDPADTVGIDLGITKFIHDSDGHSFESLDEQRDRDRIERRHRDLSRKTYGSNNWEQARQKLAQAYERLRNRREDYREKLAHEYTTRYDAVFLEDLDVKAMTEDARNSRNVAAMSWRQTIQAFKRHGKKNGCYVIEVPPEGTTKRCSQCGCETDKPLWVREHSCPSCGFEADRDYNAALEIKRLGLEKLGVEVHTMTVGQGIAESTPAETALPRDTEAPTDDVSPKRVVETGSPCLKDPPKATSRQG

SEQ ID NO: 54196 - protein, 414 aa, Halopenitus sp.
MEVRRTAPVKLVVPDERRDDLHESARQFLYCANRAAEFCWDADSHTNCITANSTARDALYAELRDETDLTANLVQEAIRRAVHATKGCVERWKQGKRVSQPEFTSWSMVYDKRSATFYRNNVSLSTVNGRVECDFELPADSPTPYEQYVLSEEYEFRASTLQYDEVTDEFYFHITTRKYDDDESEVSADTEHQTVLGIDLGVNSLAVSSTGRFWQGDDYDHWCREFEKRRGEMQQRGTQAAHNALLRLGKREEAWRKQYIHTVANEIVTEAVEHDCDVIVFEELTDIRERLPDAKWHHIWAFRRLIEYVEYKAPEQGVSVEEVEPNHTSQRCSRTDCGFTHEANRHGEHFECQKCGYEVNADYNAAKNIGLRYARQRKHRLRSSPKSGGGDALVDVRITGGIVNGEGYQPIAGD

SEQ ID NO: 54197 - protein, 417 aa, unknown
  TnpB Polypeptide
MRMHLTHKIALCPTPDQVDYFKRACGTARRVWNWALKLDENGRPWLRDIHRDAHAQPFAHLAKAWERFFADLKAGKEAHAPRFKKKGRCRDSFYVANDKFRLDGKTIRLPKVGDVAMTEELRFKGKILGATVSRTADRWFVAIEVEVPDAQFYRRRTAHEVNGIDLGLKAAATISNGEAIEAPKPLNAALRRLKIRSRRLSRKLQAAKEMAGFGRDACLPKGTRLPVSNNRQKSAAALARLYARLANLRADFTHKLTTRLCRENQAVVIEDLNVKGMLANERLARAISDVGFGVFRSQLEYKAKRYGTHLIIADRWYPSSRLCSICGWKNEALTLRDREWVCAECGTHHDRDLNAALNLKRLATETALPVASPTSNGGAAAGMAPVAVGKVTPVRYDGGQQDTSGQEEKCAHFCALS

SEQ ID NO: 54198 - protein, 401 aa, Lyngbya sp.
MKVAYTQSWSRIFSPLFTSSAVESIDSGSTVKKSKKIKIYLDKSQKQMVNQWLGVSRYVFNKTVEILQDGSVKANWKRIKTEILNNLPEWCKAVPYQIKSIAIKDACTAIREAKKKYQKTGQVNRVRFRSRKNPVQSCYIPKSAVTAIGIYRTKLGELSFTESLPDHICDCRLTSTNGNYYLVVPYKAAPKKAENQGRVVALDPGVRTFLTFFSENSVGKIGEGDFSGIQRLCAHLDKLVGKISFSKGKQKRRMKKAARRMTIKIQNLVNELHHKAARFLVDNFDVILLPTFETSQMSKRGSRKIHSKTVRNLMNLAHYRFKQFLKHKAFETGKQVLDVCEAYTSKTVSWTGELVKIGSSKIIKSKVDGQRMDRDLNGARGIFIRALVDTPWMRNHLALAG

SEQ ID NO: 54199 - protein, 400 aa, Acidobacteria sp.
MLRKQGYKFEAQPNGEQLRNLRRFVGACRFVYNKALALNKERYEEKAKRLGYAGLCALLPRWKTEFAWLSDVPAQALQQSLKDLERGFSNFFEKRAEFPAFHKKGRKDSFRIPQGFQVDNHNGRIQLPKIGWMRYRKSREIAGTPKHVTVSLVHGKAFLSIQTEREVATPMHPSKSSVGLDWGIKRFYTLSNGEYEEQLSPLQQFAVKVAKLQRVLARKKKFSKNGKKAKFKVAKLHNQIANIRKDFVHKSSKDLSKNHAVVFIEDLSIRNMSKSARGTQEQHDKNVKRKSGLNRAVLDASPFELRRQLQYKLTWRGGLLVAVPPQNTSRRCPACGTVTAENRRTQEKFSCVQCGFTANADFVAAVNIKEAGLALLACSQSSAEVRPSWQAPTEGIRAYA

SEQ ID NO: 54200 - protein, 250 aa, unknown
  TnpB Polypeptide
MGISISDNTIKLPKLGCVKCRVSKEVKGKILSATVSQRPSGKYFVSLCCRMDDLDKLPTTGNTVGLDVGIKNFAISSDGIEYPNPKYYRKSERKLARFQRRLSRKSKDSKRREKARIKSARFQEHIANRRNDMLHKLSTEFVRKYDVICIEDLKIKNLQKNHKLAKAISDSSWGEFRRQLEYKANWYGKIVSVIDQFYPSSQICSSCGYQWSGTKDLSVREWICPECGVIHNRDINAAINILNEGIRILA

SEQ ID NO: 54201 - protein, 500 aa, Rhodococcus sp.
MTATAVLADPTADTAAPDPSRVVIRAFVYVLDPTPGQVEALRSHCGAQRFAYNWALSQVKANLDQRTAERSYDVPDAELTPSMSWSAYSLRKRWNTVKDDVAVNPETGKEWWPENSKEAYSSGIANCAAALSNWSDARSGKRKGSMGFPRFRSKRAVLSCRFTTGRFGLVTDGGDRRHVQLPRIGAIRTCESTRKRARKTIAGSARIRSATLSYRRGRWQVSFSVEITLPARALPPVAAGPRSVVGVDVGVKHLAVLSTGEMIDNPKHARKQAKQLRRLGRRASRRVGPDRRTGQQPSRRWQRTQDQIRRVHTRITDGRRDYLHEFTTRLVRDFDTVVVEELNVAGMTRSGGAYKRGLNRALHDAALAEIRRQLTYKTEWTGTGLHVADRWYPSSKTCSNCQVVKNKLPLKVRVFLCDACGYRADRDHNAALNLAALAAVVDGGASSASCGRDVKEARQKPTIRPATRRADGIAAGTPHSGERGRGNPAAHAECTKQHSA

SEQ ID NO: 54202 - protein, 490 aa, Rhodococcus sp.
MAGRVVKRAFKYRFYPTAVQAEQLARTFGCTRYVYNRALAERSRAWSQEQRRISYSDTSKMLTGWKRDTETAWLSEPSKGPLQESLRQLQGAFDRFWRKQSRYPHFKRKGRSKDSATYYSNCFTYRGGQIRLAKQSEPLDIRWSRPLPEGATPSQVTVSRNARGQYHISILVEDTITEHPSTDEVVGLDAGITSLYTLSTGEKITNPRHELRDRERLARAQRVLARKAKGSRNRAKARLKVAKIHGRITDRRRDYLHTLSTRLVRENQVIAVEDLSVRNMVRNRSLSRAISDASWSEFRSMLEYKADWYGRRVVAIDRFCPSSKTCSVCGAIASEMPLKVREWTCRCGAVHDRDVNAATNILAVGLTSSTTRPLSNTPAIHSRGLGALVEQLRGAGRQRSDTRATVELHEVWITHHRRSTLITCDRVAQRELPGSLVVPLSFRHHDARPQRQSYPTDLTFVAQDSSPSIAIEEPLSPRPCCGGTRSSRSC

SEQ ID NO: 54203 - protein, 385 aa, unknown
  TnpB Polypeptide
MLLAHKVELRPTANQLDFLFQSTGIRRFTYNNLLAHFSKDGAKWSKKEANNILKEMKLANKWMANVSARTSRNVIDDLDKAFCGFFKSVKQGKKPAYPKFKKKGVKDSFSIREKEKFSIEGRKLRIERLGTPIKTRNKLRLKGTAKQCTVSFKGGVWWASILVDVTETPWTKVDEDAREPSVGVDFGIKVFAALSDGTIFEANQPLKRQLNKLAKLQRKMAKQTKGSARRQVTKRKITRLHYFITCRRNSIIHEFTDFLTRKYNRIVIEDLSVSGMSKNHKIARALLDVGIYEARRQLEYKSHFRNCELVIADRWFPSSKIINCCSYKLSKLSLSEREVTCPKCNTVWDRDHNAAINLNNYGEDTLKPTTKRTKEISKTVDVLAA

SEQ ID NO: 54204 - protein, 437 aa, unknown
  TnpB Polypeptide
VKLTRTIVLESYPLTKRKFRAIKEVYDEYSEILKFLTDYAVENRIKNPLKLRKHFYDELKEKHSLPTHYYYTVCQDAVTRAKKFIELKKKGEARTEKPVIRNVSLWLDDVLWDYKRFPQFNTLRNGRKILVIGLTTKIGRIKLPLKPHKLFFKYINEGWNVKAGVKLRIVEKERKTLAYFVFEKEFDELEVTGSFLSVDYNVDNVSFGTHEFLIQVGTDLGRLTRFYSDVRKNIQESHLVGWKRKLPSGKSRKLLKKFGQRKMNRRVDLQRKLAKRLVELARELNVTIVLERVPKNFNQKVTKKRGKNEKRLRNTLHNIGMNGFQRFVLEKAVEFGVPVVFVNPSYSSQVCPHCGAFRIKPDDDALRRRVFKCPVCGFSLDRDFVAVLNLLWLFPFSLKADEPPVEGSVSPVMLVVEANLLHHKNSLVVIGQGLQQK

SEQ ID NO: 54205 - protein, 374 aa, Microcoleus sp.
MQRTIRIQLQPDIETAKVLSQTIEQYTWSFNAVCKHGWENDLANGVELHKATYYDHRAITSLPSQLVCAARVKATEALKSAKSLKKKGKTVSCPTSKRCPIRYDGRSYTVWFDRSEVSILSVNGRVKLPFEIAEYYRQYLNWKNTSAELLQDRKGRWWLHVVMEVKSPELRATDEVVGVDLGIASPAVDSRGSKYGSGYWKEIEDRTFELRRRLQSKGTKSAKRHLKKLSGRQRRFRKDCDHVLSKRLVRSVQSGATLVFEDLTNIRGRAKMRKAQRRRLHGWSFAQFQAFVTYKAEVRGINVGFVDPRYTSQKCSQCGHIERGNRPSQAEFRCKKCGYECHADHNAAVNIREDFLKLRASVNVPIVVCPELGI

SEQ ID NO: 54206 - protein, 369 aa, unknown
  TnpB Polypeptide
MNCAYKFRIYPNKKQEKQIAKSFGCARFIFNRILELSQKYYKRTGKNLSKYTWINYCNRIIKKQYPFLKEVDKFLLTNSIFDLMDAYKRFWTGVSEFPKFKSKFNDKNSYRTNFTNNNIKVDFENNRIKLPKMDWIKADLHYEFKDHIGFATVSKTSDGNYFVSFNTDEEKLQFPELENAIGLDMGVAEFLTTSNGDIYENPKILQKFENKIKKLQRKLSKKKKYSKNYNKQRIKLAKVYRKSRNARLDKLHKLSHKIVNENQVIVSETLNVKDMMHDSTLAKYIADASWYEFMRQLEYKSKWYGRTYIKVDPYFPSSQLCSNCGYQNKEVKDLSVRNWICPECGTVHNRDVNAAINILNEGLRMLKAS

SEQ ID NO: 54207 - protein, 390 aa, unknown
  TnpB Polypeptide
MEQYISYMYRIYPNDKQKELIAKTFGCTRLVYNTILSLRTPLYNICKMSFSFYEWRNFMVKCLKKKHDFLNEVDSVALANSLMDQEQAFKNFIKDHNQYGYPKYKRKNETHLSYRTNLTNGNIKVDFQQNKVKLPKLGWLDAKLHREFTGKIKHATITKLSSDEYYVSICVIEDISFLPTVNKQVGLDLGIKALCTTSDGVKYNYDFDFSFYENKIKRLQKYLSKKKQGSKRYRALQLKIAKIYQKVTNKKEDTLHKIVSTLVNENQVICVEDLSVKRMMAKNKNKRKNKSKENTSSKNYLSKSIGRMSWSTFTKFIEDKCKLTGRTFQKIGKFYPSSQICSCCGYQNKKIKSLSIREWVCPECNTSHDRDVNAAKNILNEGLSLLEKSA

SEQ ID NO: 54208 - protein, 340 aa, unknown
  TnpB Polypeptide
LLENWEYSKHCIDSTINSVIGLAKGWIRLYNREKSKSKSKVTRKTIYIKNTLFSYKNGVLKISIEPRRRYLEVDLTRHDYLSKDFNSIGGLLLTEGELIITFKKNVKNIEPRGWASFDVNLTNITALINGKIVRYDLKRLYHIHRVYEEKRRRIQKLSNHKPKKAKRLMEKYSRREKNRAKDFMHKLTTKIAEKFGEMESGAILENLKNIKSRVLRKSKNLNRKLSKRNARQFQFMLEYKLKWLGLPVKYVNPTKSSKTCPLCSGSMATYESRLMKCKKCGLVLDRNVVAVLNLQMWGLGVTPKALIAHLRAMMGKRLIDQNSHFIYKSLSTVNPINKIL

SEQ ID NO: 54209 - protein, 420 aa, Mycobacterium sp.
LDSRLGKEMPLSSLRHVVGGLAYVADVSRFRLLPSPEQAAGLAEHCRHARLVWNLAVEQQRHWQPGRKAPTYHEQCAQLTAARAEYEWLAAGSQTVQQQALRDFAQAMRNFFNGTHRRPTWRKAGRHEGFRQVGFKPRYLKRLSRRYSQVWVPKVGWVRFRWTRAIPATVKSYRVTLDRSGRWHIAFAAIPEPVPGRGDGSVVGVDRGVAVSVALSNGELLRAPGLRAGETKRLRRLQRRLARAQRGSNRRARTKRAIARLRARETDRRRDWVEKTTTELARRYDTIRVEDLHVRAMTRSARGTRDCPGTNVAQKRGLNREISRQGWGLLVARLKHKASGRLEFVPAAYTSQRCSLCGHIAPENRKSQAVFQCVACNAGPCNADVNAARNIAAGRAVTARGDLGTSRSANREPQPCSPAG

SEQ ID NO: 54210 - protein, 351 aa, unknown
  TnpB Polypeptide
MIAVRKALNYVSNYVFENKCFSQHKLNEATYYLLREKFSLKSQMSQSVMKTVLAKYKTIKSNNQPFTKVQFKNLEYDLVWNRDYLLTNGIFSINSLEGRLKIPFETKGMEKYFDGTYTFGTAKLVYKFKKYFLHIPMTKDFIQTTPFQINKIVGIDLGVNFLATVYDSYGKTTFFSGKAIKSKRGHYKILRKDLQELGTKSAKRKIKSIGTRENRYVTDVNHSITKALVEHYGQNTLFVLEDLTNVRQSTERVCINNRYTIVSWAFYQFRKMLEYKAKLNQSIVIAVDPKYTSQTCPKCGHIEKSNRDKKNHIFCCKNCGYQSNDDRIGAMNLWRKGIEYIEKQNSKEVVE

SEQ ID NO: 54211 - protein, 330 aa, Escherichia sp.
VAKKSRRYGWLKEYDSIALQQAVINLDVAFSNFFNPKLKAGKPTFKSKHGRQSSYHCVGIKVLDGAIKIPKILPIEARLHREITGMLKSITLSRSATGKYYASLLCDDGMEAPAKPALISNVTGLDMGLAHFVIKSDGNKIASPRHLINASRNLRRKQKALSRKKKGNANRRKARIQLAAVHERVASARADFQHKLSRAIVDENQAVIVETLKTVNMMKNHHLARAIGDAGWSGFITKLEYKATEKGVHLVKLDQWFASSKTCHCCGHKMSEMPLHKRIWQCPECGVEHDRDINAALNIKRRGILELQAAGLVVSAHGGQHKSVTQTVAA

SEQ ID NO: 54212 - protein, 366 aa, Fischerella sp.
  misc_feature (361)..(364): Xaa can be any naturally occurring amino acid
VDKSWFSKTLYTVPNQNLPRIFSPSSTSSLVECTDSGNTVKKSRKIRIFLKATQKQIIKQWFGVSRFVYNTTVKLLQDSTIKANWKAVKTDILNGLPDFCKSVPYQIKSIAIKDACKAVSNAKKKFKNGGGISKVKFRSRKDPIQSCYIPKSAVSDKGIYHTILGEVTFKEALPQSFGDCRLVKAYGDYYLTVPEEVSRQQSENQGRVVALDPGIRTFITFFSESNFGEIGISANIQIQKLCFRLDKVISKIAKAKCKSKRRLKLAATRLRGKIKNLVDELHKKTARFLVDNFDVILLPTFETSRISKKAKRRIRSKSVRQMLTLSHYRFKQFLKHKAFETSKVVIDVNEAYTSKTVSWTXXXXQA

SEQ ID NO: 54213 - protein, 409 aa, Halorubrum sp.
MNYNYRYRLNPFDDLRGRLAWTVDTCRQVYNHFLHRLNRRDDTSSYSEQKRLPDLKDWWTDLRDVHSKALQKVVQRLYDNLSTLKGRKKNGYNVGELKWKAPGEYQSFTYSQSGFKLKNTSGRTRLWLSKIGDIPITFHRDLPDDATIKTVTIKREPTGKWYAILGVETPDDPPEKPDEVTDAVGIDVGILKYVHDSDGIAVESPDLSDERERLERAQRNLSRKKHGSNNWEEQRKTVARRHAELKRKRRDFLHKLSGYYASEYDLVAVEDLDAKGLVELPGNSRNRAGASWGTFLRMLEYKCEREGTQFVAVDPRGTTKECASCGVETDKPLWVREHSCPSCGFAADRDANASWNILSLGLEQIGAGCPESTPVETALPTDTDSVSAKRVMEAGSPTLKERTASAVSE

SEQ ID NO: 54214 - protein, 166 aa, unknown
  TnpB Polypeptide
MVRKARVGSKRKKQKAGLNKSILSVGFGSLNKMIAYKIEQKGGLMLVLPTKQIKPSQRCPKCGKIHKTWAELSNRYHICDGCGFETPRDRGSVMVMYNVATNQQPGLGMSLVDCGCSSSTNSTKKRKHTGSMKQLGQMKRQKPNPVIDGGKLETPSKAQGWGSSYL

SEQ ID NO: 54215 - protein, 412 aa, unknown
  TnpB Polypeptide
MTKAEQIKDTLKETKQRRETQRLVVYELKLQNLSKRKSDVLRRAFLEAKWLYNWLVSDTERLNIPANKVSVVEVKAGDSYEQRELIVLGSQIKQEIADRLKDNLRALGKLKRNGYKVGALKHKRFVSSIPLKQYGVTYSLDFARNRLRIQRLGKFRVLGLHQIPAEAEIANAVLIQRPSGYYLHVTCYLPKDSHTSQNTVRNVVGTDFGVNSKLTLSNGLKIDFEICETPRLKRLQRKLARTQKSSRNREKVRFLLRKEYEQLNNKRRDAQNKVLAFLKLYDMVIFQDDSIKGWVKLFGRQVHSSGIGGLKSRLRASLETAIPVDRGETTTGECFACGRRHRLSLSDRVIECDCGWKCDRDVNAALVILRKGLGLDPEQAVGLDRPDLKPLEREAAARILGSSPYIRVSSSQ

SEQ ID NO: 54216 - protein, 404 aa, Tolypothrix sp.
MLVFEFKAYGKAAQLAAINEAIRTAQFIRNSCIRLWMDVKSTGKNDLQKYCAVLAANFPFANELNSMARQASAERAWSSIFRFYENCKKGVSGKKGFPQFQKDCRSVEYKTSGWKLAPDRKSINFTDKKGIGKLKLKGTRDLHFYQINQIKRVRLVKRATSVYVQFCIDVERSENIEPTGNTVGLDVGLKEYYTDSNGEMIENPKFLRKGEKVLKRSQRRVFKKTKGSNNRGKARQVCRLRHLKISRQRKDHAIKLARCVVQSNDLIAYEDLRIKNMVKNHCLAKSINDASWYQFRVWVEYFGKVFKRVTVAVNPQYTSQECSSCGEVVKKSLSTRTHACKCGCVLDRDENAARNILSRGLSTVGHTGTFALDANNAWGDETSTLVGANLLEQVMSRNQESLHL

SEQ ID NO: 54217 - protein, 155 aa, unknown
  TnpB Polypeptide
LSKKQKGSKNRAKARAKVARIHAKISDCRLDGLHKLSRKLINEDQVVCVESLKVKNMIRNPKMSKAIADAGWSEFVRQLQYKGEWVGRSVVAIDQFFPSTKRCSACGHTLPKLALNVRLWTCPECAATHDRDVNAAKNIKAAGLAVLACGESVNP

SEQ ID NO: 54218 - protein, 396 aa, unknown
  TnpB Polypeptide
MSNKLVAPIETQHRALKLRIYPSNEQKVLIEKTFGCVRQIYNNRLFERNQFYENVIKPAKHEEHKTLWKQAHFSSEKEMKQKFPYLAEVSAQALCSATMFAEQAYKNFFSSLKGTRAGSTVGKPRFKSKKAHDFSYRECVVSEKALIWNERKIKVPKLGLVKFRHSGNKKGKLDFFLRDGANLKSITIKKNPANEYYAVLLFEREYCHKQKVYEGCENQAIGLDFSPADFYINSDGSSGKDFGYIAQKQANLKKLTKLQRRMMRKQIGSNNREKARVKVARMEHYIAECRNDWIEKETKRLVSTYQVIGIEDLNLKGMMKFSKNAKNYGDASWGNFTNKLLWKSSLNENNCQVIKADRFFASSQICHCCGFKNPITKNLSVRSWICPECGTEHVRD

SEQ ID NO: 54219 - protein, 449 aa, unknown
  TnpB Polypeptide
MLKQKYTTVTQLHEVNNKDIIEYFENASVYFCKLQRKAFHIFKNENITGKKTEYKKFRQDFMKEHNISRRTADSILKDVQGRMKALAELKKYEISQKEQKIEKLKEEIEKLDNKILKFQEKMKNKIKVSYFRYWNLKKSRAFKKMKLNKFQMRLEQLKWQIETGNYKLCFGTKKLLKSNISEFLLQRDNQMSYIGSQDEKGRNHMLQLNYNNRNNQFEIKMRKDFGFDTETKYVFGKCYFNNHKNKLIEALKNKNSTPLTYSIIRKNGRYYLHCTFEYRIEDKSSFLTRKTYGTIGVDFNKGFLTVSEIDRNGNLVKTDILKYRFGKGDKTQSDLENCISKILKRALETGKDVCFEDLNFNNKKSKTSKGKTDKGKKYNNMLHSLAYSLYDKLITNMAFRNKIGIIKVNPAWTSWIAKNKFCERMKLNIHIGAAFVIARRGLGIKDTVK

SEQ ID NO: 54220 - protein, 367 aa, unknown
  TnpB Polypeptide
MEKAYRFRFYPTKTQIEKLNCTFGCARFVYNYFLSLKQELYNKEKKSMSYNECCKALTALKQEKKWLKDVDKFSLQNSLKDLDKAYKNFFSGSGYPKFKSKKDNRKSYRTSYTNNNIELLDKWIKVPKLGKLKIRDKMKPQGRIINATIIQVPSGKYYISLCCTDVEAEKLECTNKNVGMDLGIKNFAITSDEILIENPKYLQKSLNKLAILQRKLSRKPKGSSNRNKARIKVARLFEKISNQREDFLQKLSTELIRKYDIICLEDLQVKNMLRNHKLARSISDVSWSEFSRMLEYKANRYGRTIVKVDKFFASSQICNCCGYKNEEVKDLSIREWICPACGVVHNRDINAAKNILKEGLRILGINA

SEQ ID NO: 54221 - protein, 443 aa, Halophilic sp.
MKRANQFNVRLCSKKEREVFKHWLDASASLWNETNYARRQAFLEDKSVWDVDTGKLEGKYKNVLSSSVAQQIIRKNSEAWRSFFSSNEKYHAGKLEDKPSPPGYWGNEEDGRVLRSYVRKDQYTIEFGERSRLEIPIGSELKDKLGLNRNERLRVEIAGDPKWHGEQNRLELVYDETADTFRAFQPVTVDDSRLDSPLASEEAALDVGANHLVACTVSTGTQYLYEGRDLFEQFRETTEQIADYQSLLDNQRESSKRIDRLYRKRTNWRNHAQDSLVRDLVERLYNEGVSTLYVGDIKGVLDTHWKPRVNAKTHNFWAFRRFIDRLEDVCEEYGITVAEESEAWTSQECPACGEREDTIRHEDSLTCPCGFEGHADLVASASFLRRQTNEVGSMARPVYLKWNNHEWRDHHSPPSPVETTANEEYTNQSTTERNIALGASQTD

SEQ ID NO: 54222 - protein, 428 aa, Halophilic sp.
MDYALKYRLFPTEVQREQLDWVRDTVRQLYNHALHQFNRIPESAGTVKQRVRKVRGEIPELKDWWTDLNDVYSTVLQQAVEQIATNVENLGKLKRAGYDVGSLNWKAPEEYRSFTYRQRGFELDEKSGPNGRGTLTLKKVNGETLDVPIRLHRPSPDDTDVKHATVKKDKTGAWYACLNIERDAPEKPNPGDIDVEDTVGIDLGILSFVHDSDNRAIGRLDLSDDRERLEREQRNLSRKEHGSSNWEKQRLVVAEVQKEMRNKRRDFKHKLAYAYTTVYDAVFVENLDVKPMLEGDRNGRNIHEVGWRDFITILKHHGRKHGCHVVEVDPADTTKACNRCGVKTKKPLWVREHSCPSCGYTTDRDHNAALNVWERGLSKLGVVHSESTPAETGTAVDADDFREVSASAVVETGSPCLKEPPKAANRQG

SEQ ID NO: 54223 - protein, 237 aa, Halophilic sp.
MTALDIGANTLVACTTTTGEQYLYEGRDLFNRFRETTREIARLQSKLEDWRYSSERIRRLYRKRTRRRDHAQEALCRDLLERLYEDGVDTVYIGGLIDVLDTHWSVETNAKTHNFWSFRKFTERLVCTAEEYGISVEVRSEAWTSQECPQCGSRDRTTRHQDTLTCPCGFEGNADLTASETFLKRHTEQAVRPMARPVRFEWDDHDWSESPHSHRPKEQRTDPSTVHHNGNVAFGDS

SEQ ID NO: 54224 - protein, 369 aa, unknown
  TnpB Polypeptide
MQLFARTFGCCRKVWNLMLSDKIESYKTTGKFVAVTPARYKSDHPYLKEVDSLALANTQLNLQSAFRNCFSKTRKKCNAFPKYKSAKHSRKSYTTNNQKGTVAILENAIRLPKVGAVKAVIHRVPDPDWILKSATISQDSDGKYYASVLFAYESNSAESAPYIEIGTENAVGLDYSSKSLYVDSNGDHGSDHKYYRESRNRLAKEQRRLSRKVGSKKGESKSSNYLKQLRRVNKIHKHIANQRKDHLHKLSTGIANRYDIVCVETLNMKSLANKSFGNGRSTLDNGYGMFLNMLEYKLSDRGKCMIRVNKWFPSSQLCHCCGTGNPKVKNLDVRKWQCPSCGELHDRDINAAKNILKEGLHIYKQQFVT

SEQ ID NO: 54225 - protein, 404 aa, unknown
  TnpB Polypeptide
MLKAYKYKLLPDEEQTTLLNKHFGSIRFIYNHFLNERKVEYETNDNTLNYYDNAKVLTIIKKSDEYIWLKEVNSQSLQYSLKCLDGAYQNFFKFKKGFPKFKSKHNKNSFTVPQFVKVIDDYINIPKFKNGIKMIKHRDFKGDIRSCTISKTATNEYFVSILVETTHNVLPKTGKSVGIDLGIKDFVITSNGYKYKNNRYTKTYAKLLKEKQQHLSRKTKNSNRYKNQKLKVASTHKKITNSRLDNLHKVSTDLIRKYDVIVLEDLNIKGMIKNHKLSKHIADASWGKLIELLTYKAEWNDKTIVKIDRFFPSSKTCNCCGYINQNLTLSMRTWVCPSCNTKLDRDLNASINILKEGYKIISSGTDDYRRGDEIRPAKAGTIRETSKIQNLVSEAHPIAYGVGG

SEQ ID NO: 54226 - protein, 514 aa, unknown
  TnpB Polypeptide
MVYKTLMLQLYRPSRHKRDLIDRALLRYSRALQMLLSRCEAPIDALAASGARVSQKGLLAMVDRKTSRDLNEFHVQPFKDSLKIEFAALAAAYVRQKRKHPGARYPFVHLDAPRYRAAVSRCVDRLDRGLISRAKFESDCAKLIDREGRLRPLYFGRYAVDRDYCLLYDEFKDRFYAKLYLLNSADGYAGKTAASSLSLRYLAEGLPPMTDRNGKKRYIVVPLAFGKKQYADLKRAVENPRLLHTARLAKRDGRYYLLVNIACEPGPALPAASTMGVSRGPAGGVVYTVCGPGGELLKQGGIAERAEPGQIVYVLCKRIVDVARENVSQVILEANGGKNDRMPSPKEADGPVLSNRRYAELAAVLRYKLPEKRLPPPIEVSANGLFSTCPRCANRTARNRISDELFACVECGYASEMKWIGSENLAGRLIKYRRDKVPLTVSKQNDSLLFYNKNLGFRYRLPVNVTDYKPMYDELDRYLRSLDGTFQKDARKYAVWKKLRQSPSVRDAVRLVLK

SEQ ID NO: 54227 - protein, 299 aa, Anaerolineae sp.
VVENDGRWFRRCSTGPRGGYVCLPLCVPAKWRDRMQSVYGDAQLFERNGDGYVMLPWRIGHDAPPVCDGEPTFSGVDLGIVRWGTVRTSGAVECFAGKAVRHRREHVSDLRRRYQKHNRLDRVKGMGGQERRWMRDSNHQMSRRIVDLAATYERPVMVFETLNRIRSRVGGSQHFHRRMSSWAFRQWIDLVTYKAARAGIPVVSVDPRGTSKACSRCGHSWRSNRPDHSHVRCVSCGYQLNADPNAARNIAALGLDALPQGPSDTAQSNDQTGEVILRPDGASGDTLSVSSNSNRSSSL

SEQ ID NO: 54228 - protein, 406 aa, unknown
  TnpB Polypeptide
VIIAHKIALDPNDRQATYFAKAAGVARFAYNWALAEWKRQYKARLEDPSLPAPSEAALRKLLNSVKAEQFPWMAEVTKNAPQQAIKNLGAAFNRFFTGQAKYPRFKKKGEYDSFRADPGPDKNHPHAVDVSGKRVKLPVIGWVRMRESLRFRGKVLSAVVSRIADKWFVSLTVEVPDIIPDRESQAVGGVDLGVKALATLSDGSVFEGPKALRSNLARLKRLSRSLSRKVKGSANRHKAKAKLGRLHARIANIRQDGLHKLTTELVRRFSVIGIEDLNVRGMMANGKLSRAIADMGFHEFRRQLDYKAPAAGSRIVVADRWFPSTKTCFDCNHVVDVLPLSVREWTCPACGMVHDRDLNAARNLEKMAASSAVSACGEEGSGRGRKTKVKPSSVKQEPTSGIFVHE

SEQ ID NO: 54229 - protein, 425 aa, Proteobacteria sp.
METVNRRATYRLYPTPAQDAALQTQREAHRLLYNAALEQRRAAWKRQRVTVGHAEQCRDLTALRHEESSPLPAQAAQHTLKRVERAFQAFFRRLKDGSDAPGYPRFKSRKRFKGWSYPTHGDGWRLLPREGMQHGCLRLSGIGHVRIRGDARTSGEPKTCDILSRHGTWYASIVLVCQPERFHGVDTIAFDWGVETFATIASTDRHPASMAHPRFLAQSAARLKAAYQSRETKTKFSHGWRLANKRMAQLHSKIARQRLDFHHKHAASMVDGAGAIFTEQLQPANMVRRPQPKHGETTGQYAPNGAAAKAGLNKAILDSAPGQFLGILRDKAAEAGVVYVEAPTRSLKPSQRCHACDAVLKKPLRERWHVCPCGASCGRDVNSALVLLAWGLEHVLSIFFAALWLHNGSQELTVGLGTQNLHPEP

SEQ ID NO: 54230 - protein, 438 aa, Spirochaetes sp.
MSFRGVPTYLGEHNGTPLYSGNPEKVAGWLCDAFRTRFNQHRSQRCKYVYQDGQQLLDLNGDPLLTPIGSTVTTVTDKQARQQFPHLAGVPSLVLQAPERLESTEWFAAVKRRKTVGGKLPGFRSRKRGDKRFSCWFNGGRNAVFHRTGRRSGMLVISGQNPSTVSCKGRWELRIHVRVSQPIREYTSVQVDLSSRKVLFVNAAPTVNRSTASGVVGLDRGVAVTVATSDAEMFTVPETPELDAKVVSLHRTLARKRRTNPNWKTSTRYREVRTACANTQRVRASVKTDAIHAFTKRIAENYETVVAEALTVEGMSRKGTGSRKATLNRKIRDARWTTLLRQLAYKTGGNIVVVNPAYTSQRCHHCGHIERENRESQAVFRCVECSHFDNADVNAAKNIKALHLQGWATPTSRTVKSTGVTAPVARSVKRKPPVPSTP

SEQ ID NO: 54231 - protein, 401 aa, Spirochaetes sp.
MLDHVSIKQRAYPIDGVQTDTLLMHVSHARFVYNIGLEQRNMRDKSARERGVPIGVAIQMRELSEARKYFDWLRDGSTVVQQGALRDLDRAFSNFFSGRTDYPCFRRKDTHNTFVIRDVSLKRYNRKYAAILVPKAGYLKFRLTRSWTDAKAATSARVSFKHGQWFVSLTTMPPEKRTGGSGLVGIDRGVTVTAMTSDGKAFQAPTLTAAEQNRFVSLERELARKAKRSKNRECTRLKMGRIRTVLDNRRHDWIEQTTTEIARTYAVVGLERLPVKNLVKRPKPKPDDEGGFLPNGASAKSALAQMIHASLWGKLGQRLSDKVDVIKVPAPNTSRCCYECGHIAAENRKSQAEFRCVRCGHEDNADLNAAKNIRRLAVCGGALREWVESPTRDDTHLQIAS

SEQ ID NO: 54232 - protein, 481 aa, Spirochaetes sp.
MGNESDVSVTPSQTIHRAYVYVLDPTPSQASQFESHCGGARFAYNHMLGLVKSTLEQRDAERTYGIPEDQLTPSMSWSQISLNNTFNARKDVAAPWNRENSSRVYLYAMESLATALKNWADSRKGKRKGRGAGFPNFHNKRSRKSCTFPGANIKMSETRHRISFPVIGSVHTIESTRKLSRLVEQGKATIKRATLSYHRGRWQVALLAEVAAPVRKRKTNPTVVGIDVGVKDWLVAGTADGSEILRVGVPDKIKELDTRRRVLQRRNRNRQAPRKGVAPSKRWLDAQRKIAKLDWKMAAIREDALHKATTELAKRFDIIVIENLNVKGMMSKGGSRKRGLNRGIAQASMATTHHMLTYKSLELIEAGRWFPSSKTCSFCGAVKTKLGLGERTYICDHSACGHTMDRDLNAAVNLAKYGEDMVYKAGSPSASGRGAERKTGDALRGPSSAAGSEASTPLGESETGNGLTPACIVVDSALSCV

SEQ ID NO: 54233 - protein, 415 aa, Spirochaetes sp.
VSIRQRAYPTPEQTEMLYTHIHHTRFVYNIAVAQRMMFDRQSRERQRVKDTDDPSKLRLNLRHQGHDLAELRQELPWLGEGSSAVQQSALRDVEKAFSNFFARRASYPHFKRRDDAKSFTVRDVSVRRLNRRFGVLTVPKAGSLRFRITRDWDDIRKAKSARVTLRNNCWNVSFTTDPPPRRETGDGVLGVDCGVAITLATSDRDMLHVPTLSGGERKRFVSLERELARKPKKKGEPDSANRTKTKHKLGRLQQRLTNRRKDFIEQMTTFFAESYEVAVLEKLQIANMTKRPKPKPDRVKTGQFLPNGAAAKSGLNRAILASCWGMFNQRLSDKMLVVKVSASYTSQQCHRCGHTAEENRKSQAEFCCQQCGLVDNADVNAAKTIRNRYLQQPRDTGDRVEAVATATVETNLQIV

SEQ ID NO: 54234 - protein, 423 aa, Moorea sp.
MRSAYQYRLRLTKNQIAKVEKWLDMLRHQYNYLLADRFGWYKQNRCSTNACPLVCNLPDLRDNPDYFSQKRTLPQLKKDRPWYGDIHAHVLQDCVKRVDLAFKRFLKGDCNGNRSGKPRFKNKNRYRSFTFPSLSKNPISGNVLTLPKFGKVKMIYHRRVPDGFKIKTATITQKADGYYVTLSIQDDSIPEIIPIDDVNNPVGIDMGLKSFLIKSDGMEIPIPQYYRKAQKRLNKIQKAVSRSKKGSNNRKKAVLKLGKAHKKVADTRKDFHFKTAKELLDNHVRVASPSANLIAHEKLNIKGLAKTKRAKSVLDAGWGQFLSILSVKAVRVAWPTALKAGLITKAVNPRNTSQNCSNCGKKVPKKLKDRIHSCPHCGYVEDRDVNAAKNILKLAVGHPVRSKAYRASVRAGSAKADTVGWSW

SEQ ID NO: 54235 - protein, 500 aa, unknown
  TnpB Polypeptide
VPYAAFDKNGVPLNLDDVLNGIRADAELVAHYALEEMTEQNLALVTYFNGIKPAEAGRQMNLKLPAEVKKQFKSGASRLEKMFQEQVVSNLRSWAARVEVMTQTSTKYVSAGWKRAASDSKPTFMSPRLALSATDLGYHKNFSVTPKRISLEMVVQGSWVTLHFPTPPQLLEVGCEPGVPDIWVDKDNRVVFGFHGKTDPGRPNFSERYVVGVDLGVTNPAAYVVWDTEKKEIVEKSLLGQRARSLHNKIKRTQTQVASLQKKNRSEEAASHREHLSNRRRELSILIAQELADTSWHYDNAIVSFEDLSHIKNTMKYGRWFRGEVYRRTRDMVEADGGRVMKVNSAYTSRRCHVCQADLDMSNYGSPVCESCGITHHRDLNAAANIAQRVNVKKACEIRNKRATKTKRVRRSKCHVKPLKHPGTKNRPTPKAPQNQKKKAHAPTYPPLPSKEVSKEMCPADNRVSVVDHDYKEWFQTTSGTTNPKENLSINTVDWVYPQE

SEQ ID NO: 54236 - protein, 445 aa, unknown
  TnpB Polypeptide
VGIRKGVVGEGVIGGSFKYSKLNQTFKGMFPMKKEVQITVVGKVWNANKGKILALNKCLDEYFKAVKFFLSFNSTSKTYLHRNGYEKAKQLFNLNTALIQTARDKAVEILKSFNEKKRDGKVKSERPKLKRISIRFDRRCYSFAKTTNVLTPYWLTLSLNRRIRISLPIKFGKRQQKLIEDALQGIWQFCTVEMVKRNGEWFAHFVLKKEVELVDEPETFIGVDLGEWNIAVAVAILKHNPSKPMKGQFWSGAKIRCIRGKYAHIRRNLQRKKRIDLVKRIGSKEGRIVNQILHTVAKEIVEYAKQFSKPVIVMEKLKNIRENMNGSAKLNRRLHTWSFRKLQTYIEYKANLEGIPVVYVNPKNSSKTCHRCGHVARKVNGREFRCPKCGLVYNRDLNSAINLARSLTRGAGWGCREPALNSRMKSSAVKADGTGEAPLTFRGAG

SEQ ID NO: 54237 - protein, 442 aa, unknown
  TnpB Polypeptide
MSKIKKSMGVQQVLLRPDNETKSILGYLCQQSGKLYNNGVYYARQIFFKTGKLLTSKFDLIYEESISKSMVAQSMPSTPMQQTLMSVSEGFKSFKELRSLFLKGQLHFKPKAPDYLKGSKLFKVAYPNSGGQKPILINGQLRFSLGLTVKRWFGISEFFLPMPSNIDYSKVKEFTILPKNGAFYLEMSYEVEKEKLDLDINQALSIDLGTADNLAACVDTRGNSLLVDARAMKAMNQLWNKKVSTRKEGKPEAYWDNWLDRVTRKRNHQMRDGINKAAKLIIDHCLKYNTGTLVIGWNEGFKSNANMGRLNNQKFVQMPLGKLKDRLKQLCDLHGIRFQETEESYTSKASFLDGDSLPQYGQKPMGWKASGKRIERGLYRSANGSIVNADLNGSANILRKVASNLSLDLGLLGRRCLTTVARVRFWALPKFTLSAESQRLQP

SEQ ID NO: 54238 - protein, 282 aa, Acidovorax sp.
VKAVALSYRAGQVHYQGKAISLWDSFGLADYELRSGSFSEDARGRWYLNVTVDVKQPAKAPGAGSIGIDLGLKDFAALSNGQTIQAEQFYRDLEPALAVSQRAGNKRRTRAIHAKIANRRKDFLHKLSTRLVKEHGAIFIGNVNAAGLAKTNMAKSVLDAGWTMFRTQLQYKGDSAGSWVREVNEAYSTQECSGCHARTGPKGQEGLAVRQWTCSVCQAVHDRDTNAAKNILARGLVEWERDFSTAGEAKAVEAAVNEVVGASAITGAGHGPLDAGIPFQVV

SEQ ID NO: 54239 - protein, 505 aa, Lachnospiraceae sp.
MHTLRFPLKTGRQKEQVLSKGFTAMGKLHNVVVKECKKRLRMLSRDPEYRALKKAYAKTDSASRREAGAAMNALIRSYGLTENSLHAFIRPWQARNRHLVSSHQAQEEASRVYAGVEKVLYGNGRDVHFKKSADIHTIASKSWNGLQYYDPLHTGYYKKSVRPVYPEEIFYLNTHFRVVIDWNDPYVRESLDHPVRYAQIERKMFPSGWRYYVVLYLEGEAPVRHTSTDAVAGLDPGVSTAAAVFDEACVLEELAPDCKGYNRKITRLSRQIERSVRVHNPDNYDEDGRVRKGHHRWKITGTCRRWKRLLKTVFRQKAAYTKQSHEELADRLVERANVFITEEMDFRALQKRAKRPPERQDSTSVIVKKDGTRQPVRKFKKKKRFGSSIRDRAPAMFLAILKRKCLLQGGDVIIADTKVVRASQYNHVTDSYKKIPLSCRMKTVGGHRVQRDLYSGFLLKHVTKENCTIDRSGCITGFEAFLQAQEQCINDIRASGAGYPACFGF

SEQ ID NO: 54240 - protein, 393 aa, Bifidobacterium sp.
MKSHIAVRFRAYPTEEQARLIDRTIGCARFVYNLMLETRIAHYQTTWESCHPTPALYKDTYPFLREVDSMALCNAQLALEKAYRRFFDNGCKGFPRYKSKRRGKAAYTTNRIGGNIGLDDKARRLKLPKIGWLAVRQHKHIPNDWKLKSVTVEHRPSGRYTATILFERETQTPEQVEPVRIVGLDYASHGLYVSSDGGKAEYPGYYRKTQDKLARELRRLSRMVEGSANWHRQKQRVGRLSEKTADQRRDWQHKKANGIAAAYDMVAVETLNLKGITAKPKPKPDPDHPERFLPNGRKAKSGLAKNTLDNAYGMFCTMLEYKLARQGKRLVRVDGWFPSSQLCHDCGYRNPQTKDLDVREWTCPQCGVLHDRDVNAALNIRDEARKTVERRDS

SEQ ID NO: 54241 - protein, 381 aa, unknown
  TnpB Polypeptide
MMIKAYCFKLYNSKKNKHLIDLINLSAEIYNHCIALHKRYYRLYGSHLNKIKLQAHIAKLKKQNKYNHWSNLNSQAIQNITDRIENAYTLFFRNLKRKGKTAPPSFKKRRKYKSFTLKQCGYKLFDDNSVLIAGKRYKYFKSREIDGVIKTVTVKRDSIGDLYIYFTCEIADNTNIIRTGTGKIVGFDFGLKTYLKASDGNDVISPLFFKESQAKIKKLNRSLSHKQKGSNHRKQAKYNLAKQHIKIANQRKDFHFNLANELCETYDIICLEDLNIKAMQRMWSKKISDLSHSSFVNILKNKAVEYGVHVVEIPRFYPSSKTCSNCGSVLDDLTLKVRSWICPVCGVEHDRDFNAAVNILRVGASTLGRDAVSTALVGVCR

SEQ ID NO: 54242 - protein, 381 aa, Alteribacillus sp.
MLRHKAYRFRIYPNKKQEMLIVKTIGCSRFVYNYFLDMWNKTYSETGKGLTYASCSKKLTELKKQSETEWLREVDKFSLQNSLRHLSDSFSRFFKRQNNKPTFKRKNHPIQSYKTQFTNNNIAIVGRHIKLPKLGFVKFAKSREPQGRIIQATIRRNPSGKFFVSLLCEENIKPFKKTNTAVGIDLGIHDFAVFSDGRKKDNHRFTAKMEKKLKREQRKLSRRAHLAKKNGIHLSEAKNYQKQKKKVARLHEKVFHQRTDFLNKLTTDIIKNHDVICIEDLHTKGMLRNRKLAKSISDVSWSSFVAKLKYKAEWYGREVIDIDRWFPSSKKCSTNDCDYIAPSMPLNTREWTCPRCHTTHDRDINASKNILAEGLRLHSLT

SEQ ID NO: 54243 - protein, 404 aa, unknown
  TnpB Polypeptide
MLVLEFKTYGKSSQFKAVDDAIRTAQFIRNKALRLWMDVKGTGQNDLQKYCAVLAKDFPFANELNSMARQASAERAWTSISRFFENCKKGIPGKKGFPQFQKDCRSVEYKTSGWKLAENRKTITFTDKCGIGRLKLKGTRDLNFYSVDQIKRVRLVRRADGMYVQFCVQIDRTEEIEPSGTAIGLDVGLTDFYTDSNNQTVENPRFLRKGERRLKKAQRRVSKRVKGSKNRGKARLILGKRHLKISRQRKDFAIKLARCVITSNDVVAYEDLRIKNMVRNHCLAKSINDASWYLFRVWLEYFGKVFKKITIAVPAPGTSQECPRCHAIVKKSLSTRTHACQCGCVLPRDYASALIILRRGLATVGHTGSYGLEPCNALGESTSTLAGAILSEQVGSLIKESSRL

SEQ ID NO: 54244 - protein, 444 aa, unknown
  TnpB Polypeptide
MKLTSSYALKLNGDLTTLENTITIYRDVLRFVIPIVNAHWDEMKHFKYTNQRMMYVEKLIHSTKTNQALFDFDKQFPKLPTYLRRSAIAKALGIVSSYRSNLKNWEKDPKGSKPKLSLNHFAYPAYYKGGLFRNFDPVHQTIELKVFKNGDWVYEVYRLKTYDCTYYQTYLIGKKQNVPIIQKKGRRFYAAFSYEEETTLIPEESIAKICAVDLGLGTDATCSIMDKDGTVYARKFISFSKEHDRLHTQLGRIKRNQKQGSRHNKTLWRKVAGISQDIADKTVRAILDFGNEHGVDVFVLEHLDFKGKNAVKRAHFWRYNRIYKVLCHKAHQHGLRVARVNARNTSRLAFDGSGWSKRGREITSDTPYAIMQFSTGKIYNADLNASYNIGARYFIKHLLKTVTVTQRLALEAKVPQVAKRSTCTLSHLISLRSELTVLTARTQA

SEQ ID NO: 54245 - protein, 444 aa, unknown
  TnpB Polypeptide
MRLTSSYAIKLNGDLKALENSIDIYRGVLRFVIPIINIHWDEIKYLTYTHQRMTHVEKWIHNTRTNQALFDFDEQFPKLPTYLRRSAITKALGIVSSYHSNLANWEKERKGQAPKLSLVHYTYPAYYKGNLFRNFDPIQQTIELKVFKNGDWVYEVYQLKASDCRYYQNYLAGKKQNVPIIQKKGRRFYATFSYEEETQLIAEESIDKICAIDLGLRTDATCSIMDKDGTVYARKFISFSAEHDQLHTQLGRIKRNQKRGSRHNKTLWRKVAGISQDIADKTVKTILDFGNEHGVDAFVLEYLDFKGKSAVKRAHFWRYKRIYKVLCHKAHRHGLRVARVNARNTSRLAFDGSGWSKRGQEITPDTPYSMMQFVTGKIYNADLNASYNIGARYFIKHQLKTVTVTQRLALEAKVPQVAKRSTCTLSHLINLRSELVVITTGTQA

SEQ ID NO: 54246 - protein, 460 aa, unknown
  TnpB Polypeptide
MTTQKEYLRAEHTFVDYDERLDAMTEDSVALHDQGLYFLRQEYFRCRDLGWTEKPKYPAKFDLYELVIPTEAFQKSKMDINVKKMSIAQARDEWNSWTKAKEDYKVHPEKYTGEPKMPRYMYRKDQHNVVSIDKTRFRGKEQDKITLPCSDYKVQIPSNIKKEWIVMLKIKFTKNNKFKITFIYDRNLKYIDELKENKVKDQPVLSEKKCLGIDLGVKNLMTCVTFGLEKEVSFIIRGSELKQKINEVNDTIAHLRSCALVSKNKELTKVSKKDNQLKLIHLSIQMEELLQKYENFKYNYIHNVSSMIRDYCLEEGIKTVVVGHNEFWKNESNMGTENNRMFCSIPHSELISKLKYKLKEVRIELIEVEESYTSKCDHLANETMEHHDSYLGKRTKRGLFKSSTGKLMNADCNGAVGILRKANVIQDSALSRLLDRGDVVSPCVLNVRGFNRRLGVSTNV

SEQ ID NO: 54247 - protein, 390 aa, unknown
  TnpB Polypeptide
VWSGGFVLSYKFPIYPNKEQREKLDFAFDMCRFTYNKLLEELHKQDKIDRGEIQHKLLELKVQNPDLEGVYSKTLQYECYRLFSNLSALTRLKKNGRKVGRLRFKGKEWFKTITYNQSGFRFERKTDKRGIIHLSKIGEIKVKTHRPVSGNIKQLTLKRSDGKWYIILQTDSNRTDLIHGYSEIGIDLGIESYLTDNTGKKIDNPKTLEKYQSKLSIMQKNLSKKKKGSKNRQKARRQLAKMHQKIVNIRNDFIQKTTTDLVRNCRFIAVEKLNIKGMMEEPYHNAKNISDASWNRFLQTLRYKAGSAGCEVAEVDPRNTSKMCSNCGAIKEMPLYIREYRCNKCHINIDRDHNSAINILKKASVGPERACAEGMKAYPMNQEASGFSPR

SEQ ID NO: 54248 - protein, 406 aa, unknown
  TnpB Polypeptide
MILRAYKVQLDVNNKQQNLLLQHIGCARWAYNWALSNKKESFDKKEKIPNAIELHRELNKLKQSDVPWMYNSSKTSPQNALRDCDKAFQNFFIRCKKKVKGKKGFPKFKSKKNEKQSFRLDGVISVESGCIKLPRIGKLKLAEKDYIPTDCKILSATVSKRAGKWFVSVQVETPDREHSDAKNEVIGIDLGIKTLATCSDGTAYENPKALKNNLKKLKRKQRQLSRKKKGSKNYGKAKQKLAKLHFHISNIRKDCLHKITSKIIDENQVIVLEDLKVSNMMKNHCLAQAISDVGLHEFRRQIIYKAEWNNRKVIFADTFYPSSKLCSCCGWKNSDLKLTDRIFECKVCDMKIDRDLNASLNLKQIYRESSSRIDASGDGSSSNASLVSPSLNEEFNKKSRVYILKI

SEQ ID NO: 54249 - protein, 457 aa, Beggiatoa sp.
MKATRILKSKNLNKGKYQQLEEQAERLGKIRSEVWHSFCSISGVSIKSDRTIRGSWLKEKRQFNVSANAWKETLRDAFGNIKANRESAKEKVRKIIYKQVSDDKKRVELYKKLKSDNWTSDNYLRRLMRKHWKHGRNHTYNQIVVRSDNYTTFQLGGHAWIKIPSLQKGKRIAIPLNTTVEPTGTLRLILKDSEVEVHYTIEITETHNCGSATIGIDKGYTEVFVDSEGEHYGEGLGKLLTKHSDRLKKKYQARNKLKTIITKKPHKKTNIIENNLGRKKLNRQNIKVKCQVKDKICQATHKLIDKASVIATEDLTSPIASKKFGKNVTRRLSAWTKGVIATALDMISRRRGSSVILVNSAGTMQMDSRHGVLLGKRSGDSFHGFDGVVLQADENAAQNILARLHDPEIDRWTPWQKVKSILLKRTERQRLGLLNQDSSCNPSGLSTESELHIHSFE

SEQ ID NO: 54250 - protein, 384 aa, Beggiatoa sp.
LWFDALNLFRRAYNLTIEFMRKGRKPHSDFRTQICDWCIVECEQNETRYNSNLVQAAYRKACETRSAVIKNRMKGEKASMSFMSRNAPQQYFVVQRLSANKQIFPRILGECAWTETAPNEAVGKTTIVTYTNGQWFASVKFEQSVTQTKTKELSIVSLDPGVRTFQTAFSPQDATQYGEKFIETKLVPLMLALDSLLSTREKLKQEDKSKQWVKERLKNLNNRIHQIRVRQQNLVTDLHRRVAYDLVSNYDVILLPTFEILKMVQKKHETRKRFIRRKTVRSMLGLAHYKFKQTLKWMAKKYGKTVIDVNESYTSKTLWDGSVLNNLGGKASILFQGKRVNRDIHGARNILIRFLTKVIEVLSPQEAYSLNITEPLFGGFGVFK

SEQ ID NO: 54251 - protein, 465 aa, unknown
  TnpB Polypeptide
  misc_feature (219)..(225): Xaa can be any naturally occurring amino acid
MTRCATSPAVQGGERARTAEPSLPFGFSVVSAAVRCTGARWRSAHRRRMRRSKMATLILPMQRLQAFKYELMPNGQQARQMRRFAGSCRFVFNKALALQKERYERGEKKFGYAGLCKLLTEWRNSAETAWLADAPIHPLQQALKDLERAYSNFFARRADFPRFKKKGRRDSFRYPDPKQIKLDQGNSRIFLPKLGWLRYRNSPGGAGHGEERHREPVLXXXXXXXQPIPQGGSETLQAAVGIDMGVARFATLSDGTFFAPLNSFKRHETALRKAQQAMSRKCKFSSNWRKAKARVQRIHARIANARRDFLHKASTAISKNHAMVCIEDLQVRNMSKSAAGTADAPGRNVQAKSGLNKAILDQGWFEFRRQLDYKLAWKGGHLIVVPPQNTSRTCPCCGHVSADNRQTQARFECVECGFEENADVVGAINVLRAGHARFACEVSGAVGPPAAGTRRSDSGAAQCRA

SEQ ID NO: 54252 - protein, 232 aa, unknown
  TnpB Polypeptide
VKIKKTRVPKGRLLSATVSQVPSGKYYVSLCYTDVEEVLFPLTYNETGIDLGIKDFIILSNGEKVENPKYLKKSIEKLKKLQKQQSRKTKGGRNWIKNRIKIARLHEKIANQRMDFINKLSTRIIREYDIICIEDLKVDNMLKNHNLAQSISDVSWSKFTTQLEYKAKWYGKVIKKVDTFYASSQICHCCGYKNEETKDLNVRDWTCPKCHSNHDRDVNASINILMQGILAN

SEQ ID NO: 54253 - protein, 409 aa, unknown
  TnpB Polypeptide
MKIDLVSSAVLVRRTFRYRIYPSDEQAIRLARWEDAMRFLWNLANEQRLMGLARPHGERKYYSAFDQINELRGLRSDLPWLADVPRNACAQMLIVLADSWRRCFEGSSGRPQWKKKGVDGVVLCEPHSKSWRLEGGSLIFPKLGRIRAIVHRPLEGRSKTCSIVKDIDQWFALIVCEVQVPVVRRRDSVVALDVGCVDLIADSDGNKISNPHWLRSSSGQIARAQRSLSRKKLGSRNREKAKVRFARLHRKVRRRRDHLLHEVSARYAKSHGVVVVERLKIKNMVAEGGWRKAGLNRSIMDSGWRTLVSMLRYKLILEGGILVDVPAAYSSQTCVVCGVVDCESRVSRSLFRCSKCGHSDDADVNAAKVLKSRASHSVLPVEGKLPWSSRRSRKSSTTGISLSSQGAAL

SEQ ID NO: 54254 - protein, 469 aa, Firmicutes sp.
MITISFEHTTDYDLTSLFQEASKERRLAYNRIEDGLSEKEIRAYLKSMSPNSMLSAYMQDSVIKSMVALKKSIDALNDENKKKNIANEKKYLKSREDGKPIKQPKKLNENIKPIFGSKKNWDLTCKKKRTREEWKKDRLKNGLTIQGEALCKGNRHFELHIDEDYVLFKLNRKEHIKLNIKSLGKKWKKELLKLQALNNVKVGEQGYTYTVRITFDKVCISFEEFKQPPRKLNKNNYAGIDLNPSNIGFSICNNKEVKFATEYNFKKIIDEICNSKLASDDAKNKHLQNKLDHETYEIPKTIVRQCLHHSVKFLFVEDLQFKTTSNDKGKRYNRRTKNLWKRNKFLNNLEKRCNEVDIKLIKIDTEHTTFIGNLMYSYVDSVNASLEIARRGFEVIIKKVKNSFYPPLTADGLKHQWKEFLGENINSWVDLNKQIKNSKLRYRVPLKDTLYEGFKMSSKKSRVERLVFT

SEQ ID NO: 54255 - protein, 528 aa, unknown
  TnpB Polypeptide
MARRSHTSSFSCELPLILSGDDERALGVRLDCARQVYNAVLGESLKRLELLRQAKAYQEARTLPRRTQEERKARAAAFRALDERFGLREYDLHAWAGQFTQSWVGQHLDANTIQTLATRAFGAVREYQFGKRGRPRFKGKGQLLSVEGKTNKQGIRWREGRVRWGPLALAARIPADDPVVAHALASHIKFVRLIRRVLNGRVRFFVQLVCAGTPYRKAKHPIGTGVVGIDPGPRTFGLAGEDWGAQVDLAAPFAGEKQVQRRLRRKLDRQRRANNPANYLPDGRVRPGPKRWRKSQNQRATEGKLAEALRREAAHRTSLHGQLANAVLRLGDAIRIEKNSYRSFQKSYGKAVGQAAPATFVTLLTRKAVSAGASVTVLPTSLRLSQTCLCGTIARKPLAERVHCCDCGITVQRDVWSAYLARFAQAECGPDGPIWRLDAESARQAFSGAESRLPAASSPVSVQAFTAWAQDHQPASAAPSGGSHLPHGGSERVAGAVVTRAREGADAVPPQAGEPGRARRVATRTPRL

SEQ ID NO: 54256 - protein, 500 aa, Thermosporothrix sp.
MLIYEDKLDGSKAQFAAIEEAIRTTQFIRNKCLRLWMDARGVSRNDLQRSCAVLARQFPLRSPSTLRPGKLPLIRRGLPSPASMSIASRRNQERRAILPFQHDCRSVEDKQTGWKLDPDGVHIRFTDGCGIGRLRLIGSRDIMTFPLSQIKRVRLLRRADGYSCQFAVAATRRVEHQPSGKQVGIDLGLRAFFTDSEGNTVAPPQDLRKAERRLKRLHRRLSKTQKRSRNRRKARQALSKASLKVQRQREDVARKTANALVSSHDVIAYEALQIRHLVKNCHLAKRIADAAWGRFLSWVRYDGTLHRVPVIGMEPAFTTQNCSRCGQRVKKSLRMRTHLCPGCGLLLDRDHNAALNILHKALQGTVEQTRTDEEVSSNASGQPAVRVVALRRLARIQAEGRIPALLAWGVSISIPFKEAIAFDESFDPSRVPVKGSPCEGAEVPWSPDASLRLKEEVIDLLSNLRLPLSLSPLSLHADNKGTLDPFPDKMMYSNAFWKRG

SEQ ID NO: 54257 - protein, 184 aa, Thermosporothrix sp.
MLIYEYKLDGSKAQFAAIEEAIRTTQFIRNTCLRLWMDARGISRNDLQRSCAVLARQFPLRSPSTRRPGKLPLIGRGLPSPASMSIASRRNQERRAILPFQHDCRGVEDKQTGWKLDPDGVHIRFTDGCGIGRLRLIGSREIMAFPLSQIKRVRRLRRADGYSCQFAVSATRRVEHQPSGKQAG

SEQ ID NO: 54258 - protein, 397 aa, unknown
  TnpB Polypeptide
MPRYRLEPTREEETTLLRHCSDARYMWNLAVEQHAWWRPGRRSAPGYLEQCRQLTAARADNPWLAEGSQTVQQQALRDFARAMAGLFAGTHGRPSWRKAGMDEGFRVTGRRGRQWDVRRLKRNWGQVRVPKAGWVRFRWSRDVPADVRSFRVTRDRAGRWHVAFAVIPDPVQGPGTGQAVGIDRGVMVSAALSTGEMLTVPGLSTREQARFRRLQRRLARAGRGSARRGEAKIAVARLKARERDRRRDWCEKTSTDIARRFDVIRVEDLRIRNLTRSAKGTAEQPGRNVRAKAGLNREISRSGWGLLVRRLEDKAPGRVEKIPAAYTSQQCSACGHVDGRSRESQARFHCTACGYACNADVNAARNIAAGHAVKARGGDGAGRPVNREPQLLASRRA

SEQ ID NO: 54259 - protein, 485 aa, Caldivirga sp.
VPRVVPPKGGLAYSDEPVGRLPTLFTTLGTRSSRARGKGDKEQNRRTIRLRLLPNGAQERKLRRIADATAKLWNELNYARLMQFRASGKVDFKGTGRELYHKYKDKLGVNAGQVINLNNWAWDSFFETLKLHRQGKLPRFYGKPSPPGFWKDRLLGKRELRILVRNDRYYLEPTNGGEGYVILKDWNLRIKYAGRIKWSGKQGTLVIKLEDGRWFAYVPIEVGGKPAKSNPRGYVKGTHEKVQIEEPKGNNKAFIDIGLNNLFAVVFNHTDTAILIKGSTIKAEYYWWKRETKTYQSLTDWLRNHGFESWRKYHMFYLHAEYKQHERLRHYYRTAIRFLAKTLHGMGVDEVFIGYPYMLSQDDGNEYNTNVWWFSKIINWLGDVLEEYGIRLHIVNEYGTSKQCSICNTNHENGRVKRGLYLCQTTGIKINADLNAARNIAKRVGYEVPIPTKILSYIITTNGVKPLTPKEGATVETPTVKTSPF

SEQ ID NO: 54260 - protein, 407 aa, unknown
  TnpB Polypeptide
MSDSQQFKRAYRFRFYPTPEQENLLRRTVGCCRLVYNKALHERSTAWIREQRKVSYKDTSALLTGWKKTDDLDFLNEVSCVPLQQTLRHLQRAYANFFNQTGDYPVYKRKSHGGSAEYTRSAFKWDGRSLTLAKMNEPLDIRWSRTLPRKAQPSTVTVSLDAAGRWHVSILVEEGISKLRKKSTAVGIDLGADSFAILSTGEKIDNPRHRNRDAKRLAKAQKSLSRKQKGSRNYEKARLKVARIQAHTKDRRTDFLHKLSTRLIRENQTIVLEDLAVKNMSRRCKPKPDPEHPDRYLPNGQSAKRGLNRSITDTGWREFRTMLEYKSIWYGRTLTVIDRWYPSSQICSTCGENTGHKPLDIRQWDCPHCGTHHDRDINAARNILAAGLAVTVCGDGRSRRDNAGSAR

SEQ ID NO: 54261 - protein, 398 aa, unknown
  TnpB Polypeptide
MSKIHRTYRFRLYPNKVQTDLLAKHFGCARFVYNYFLDQRIEQYKVTGKSDNYYAQAKCLTELKKQESTAWLNEVSSHALQFSIRCLEVAYINFFRKRSNFPKFKSKRSKNSFTIPGSASIANNRLFIPKFREGIKCSVHRKIKGKVGKVTVSKTPSGKYFVSVFTEEDYITPHRKTNKSVGLDMGLKDLVVTSEGETFNNNKYTRKYESKLAIAQRHLSRKKKGSIGFENQRLKVARLYEKISNSRADYLHKCSNSLVRRYDTICIEDLNIKGMVKNHRLAKSISDASWGSFVTMLTYKAEWNGKRVVKVDRYFPSSQTCSACGHINKQVKDLSVRDWECPVCHTNHNRDINAAINILNIGFNNISAGTVDYTDGEEVRTNLSKGHSSMKSETHGSF

SEQ ID NO: 54262 - protein, 436 aa, unknown
  TnpB Polypeptide
MFKIISKNNNMYNVLDTEDGVVESYSFLDIISYTQSGVDIQGVSLVNDEYVFEIDNLTVHRAIKGYKFRLYPNKKQQTFFQKCFGCCRFLWNNMLADKIAYYEEHKESLDTQPPAYKSEYPFLKEVDSLALTSEYRDLNTAFKNFFRDSSIGYPKFKKKHDNHKSYTTYNQKGSVSIVDKYVKLPKIGYVKMKQSQPILGSIKNSTISQVPSGKYFISFNVEIWAAKLPKIDKEIGLDLGIKELVITSDKEHFENPKTLYKYGKQLAKLQRQLAHKQKFSKNWYKQKHKIAILHEKITNIRKDNLHKISHKLVQDNQLIVSEDLKISNMIKNHHLAKSIADVSWYELTRQIMYKSDWYGRTYVKVNTYYPSSQTCNCCGFKNSSTKDLSVRYWTCPNCGAYHDRDENAADNILAEGKRIVELKITSSSPDEFQIAS

SEQ ID NO: 54263 - protein, 657 aa, unknown
  TnpB Polypeptide
MPTSSEGLRTVGVSFAKLVPDEGHVVAIRDAVDRVHKATLLATELLNLYVRDRLQNHAGSGLDLVCDANWLLNAFNEVTSGQRKTREIKALRETRDAHMPAFDPVERTGLTQILTYECRNLAAVASTNVWMHFRRRVLNHVKLRLAIDDAAFAALTKAEKRTRRLALMQVADDVLRLPNAPNRSPPQHHAWIAAERLRIGIDAAVGKWDGKPIDYHLKAKPQAFLRPMHLMTTDRESAGRSAFALFPLRRTMVPCHVRFDQKALRDLLKLGGSEHQKQRDKEARQAAKRRKTEAGSVDLEAAPEGPKARTRRPKDALVDEKAALFAEVVDLKAAKLRQRDRFDFAFTTDGVCARLQCAVPKGTSAKVGVAPTRGRFAIDELRRQSRRELGHFHVVGVDPGKRELVVAVDQDDPKASPVRYTQRQRQRDLRSRQYADECRQSLPAAVALAESELSEFNSRSADLQRFRAYVAERRKCLDATLAHYAGIDHRRRRWKTYIKTQQSESRLYARLRGMHDPSDPRTLVLAYGSWGAVAGRPGGVSNKGSAPCIGVGLMNKLAKRFVVALTPEQYTSKTCCKCLHPCGPWEEMEAKMDRRIRGLRVCQNEECRLPQNRDRTGAANIGTQFCRLYEGKPPIRQPTEDDVEFHRLNLALCASCD

SEQ ID NO: 54264 - protein, 657 aa, unknown; identical to SEQ ID NO: 54263
  TnpB Polypeptide

SEQ ID NO: 54265 - protein, 343 aa, unknown
  TnpB Polypeptide
LKKGRAHTSKPEVRRVTIVYSDNQDWKIESGSLKIRTHRGWVELKYGNNRQLHRYMYGGWIPSSELKLKTGGGRRVLAYITFVKVYPVFYDKKNVIAVDGNENNITIAVFRNGVLVEVIRIETGLGKIVIAYAVRRRRMSKGKSTKTREIKKKLRRLREGDRKKDILYKVARFIEELARENNAVVVIGDISGDDKERMEKNKSRKLRHRIHQWSIATLIKLLEDRPVHVVRVSEGGSSSVDPFTGKRIDGYSPLVIRTAVRGANGRYKVVKIVLRVAYVDGRVVERDVVGAINIGLKYLSSDGSPMALGSTGAHEVWVKLVNPHQGPTPLTEIQVFGNTIKYR

SEQ ID NO: 54266 - protein, 176 aa, unknown
  TnpB Polypeptide
LFFQQNRIAIRKANRKLSKKQRHSNNRRKARKSLERLHKRVANKRSDFHWKLANELTDKYDFMFFETLNIKTMQRLWGKKISDLSFSSFMLKLKYLASVKGKTVFCIGRFVPSSKTCSVCGYIYKDLELKEREWRCPECETLHDRDRNTSCNILRVGASTLGLGDVSPLPTMAISA

SEQ ID NO: 54267 - protein, 394 aa, unknown
  TnpB Polypeptide
MSKETATHKTYKYRLEPTPEQAQTLENILWQCHTLYNIALEQRKTWWQRGQNVGATYPQQKAELPDLKAAFPDLASVHSQVLQDVLLRLEMAFKRFFARVKAGEKPGYPRFQGKGRYHSFTYPQYGNGAVIDGGLLSLSKIGRVRIRVHRPWEGTPKTVTISKEADGWYCCLSCEGVPIHPLPKTGEVTGIDVGLKVFYVTAQNEICDNPRYFRKAEKALRRKQRKLARCQRGSKRRQKVKQQVARHYQKVKRQRADFHHKEALKLLRQYDTIYLEDLQVANLMRNHHLAKSINDAGWAQFRHILEYKAACAGKRVMAIPPHYTSQVCSRCGAYVQKSLSVRTHICTECGLVLDRDHNGAINVLQVGLEQDRREQAKTTLACSDSSGGGTAFRG

SEQ ID NO: 54268 - protein, 370 aa, Methanomicrobiaceae sp.
MTVIRTLTFKLLLPEGGRAALISTMKAYTAAFNESSRWGFENHTYNKFRNHTATYGHVRESVPDLPSSLVQSARDCACDALKVVKCKRLPERIPLAAMRYNQRVITVNLIHGIATIASVRGRIKSTFTIPEHCKKYLHGVIKSSTLSYRKQSRQFFLHIQLEFPSPELITEPLTTLGIDRGIVNIAVCSDNTFFNSKPVKNTRAKYTRLRSQLQSKGTRSARRKLRVVAGRERRFVTDVNHCISKQIVNSSYTVFALEDLSKIRVQKRRGREFNRRLNNWSFYELEQFIRYKAEELGKQVILVDARYTSQKCSVCGHTYKGNRNGSDFRCRKCGFKLHADLNAARNIAQAGISCLSRLTCQPAECSVSLT

SEQ ID NO: 54269 - protein, 424 aa, unknown
  TnpB Polypeptide
VDNQQRIDKNESIRQAMINTHNKRKSQICKTYKVKVDMSALSSLQKEQFIRMFLEAKWLWNDILNWSSLSEENTPFNYKINKTVQVKLPNGTFEERELTTIQSQMKQEIQKQICSNIKTLATLKKKGIQKPGLLKFKSEVNKIHIKQLQKNFIRRGEHFIKIPNIHGEVRVNGIKQIPKDVDFACAELLNTPKGYYLSIVTYIDKDKISKKSLIKDTLGIDFGCQTNFTTSKGKKINCIVEESERLKRLQKHLAKQVKGSNNYKRTVHLIQVEYQKLSNKKNDIANKIVHDFLQYETVVIQDEQLANWHKFNHGKAVQHSIMGRVKSKLLQNDNVVVLSKWLPTTKLCTNCGKIHNEIKLYDRIFNCDCGISEDRDIHSAKTMIWLNKVGVGRTDIKRVEFEALLDTVFSKKQPKTMKHEDSNL

SEQ ID NO: 54270 - protein, 399 aa, unknown
  TnpB Polypeptide
VQKLCLKYRLFPTKEQIRKLEDTLETCRLVYNSLVNDRVFQYGTAQVSVGRYQQQKMFPQWSKDFPEVKAVYSQVLQNVSVRVDLAFRAFFQRVKEGKTLGFPRLKGRGQYDSITYPQRGFKVGGSTVSLSMFGKPVQMKAKLHRPVVGTVKTCTVRRYGKKWFVCFSVEQEDEFLPPCAEAIGLDAGLNSFLALSDGDFVDNPRFFRRDEKELAKAGRKQAKTKKRSKERKKANKVLSRIHERVRNRRHDFVHQTARRLVNRFGIIAVEKLNVKNMLGNHCLAKSIADASWSMFHSVLTSKAESADRDAKGAALREVIAVNPAYTSQDCHACGYRAKKKLSDRWHFCPKCSASLDRDTNAAINILQLALTYSLRGTSLDGITSSQGKPVEAPTFRSGE

SEQ ID NO: 54271 - protein, 348 aa, unknown
  TnpB Polypeptide
MQKWCVDGHDGFHSMTAQAVNDQFYDALKSWHGNGRKGNPPKGRQKQWNKICWKSYAIKLRNDGMLRLSCGRGNDPILIDWPVDKEPVFVEIGWNRGYEVRATYKVKPENRTTGNKIAGIDLGEKHIAAVSTGEDCFLFNGGKLRGLRHHQNKTKARLQSKIDKKKRGSNRWKKLVRTKNKQLQKIDNQIDDLLHKLSRKLIEMLLERGVSTVVIGELEEITRSVSYGSQMNQRLGQWAHGKFAQMLEYKAKGAGMDVEYADEAYTSQTCPCCKHRHKPSGRNYSCPNCGFEAHRDAVGAENIRRKYVGHEPTGSTARLPGAMASPSGVRFRPHLQCSSAPGDVRPTD

SEQ ID NO: 54272 - protein, 265 aa, Halobiforma sp.
MIFSEPGFELKNTSGRHAILWLSKIGDIKIRYHREIPDEADIKEATIKKETTGDWFVSFRLETEDDSLPEKPDVDSLDASNSVGIDPGILNHLRTSDGKTVDWLDLEDEYERLRREKRALSRKEKGSNNYEKQQVATGKRHIRQKMLDYQHKLKTWLVREYDAVFVEDLNVKGMLEQSHNACNKQDTAWRQLIILLEYKADPYGCHVVQVESEGTMKECACCGVETAKPIWVREHSCPSCGFETDRSTNVSRNVLQRGFSELGLG

SEQ ID NO: 54273 - protein, 363 aa, unknown
  TnpB Polypeptide
VNKNFKVKIYPNQEQIQLIEKTFGCVRYMYNFMLNLKQKLYNFYKINLTYYDMCKILTELKKQKPWLCEVDAVALQQCLKDLDTSYQRFFGCISGFPNFKSKRDKNSYRTNNKLKFDQDNKMIRIPKVGWIKFKDKSNFNGLKKIYNITISKTPSGKYFANISAEVDIPAFAKTKKSCGVDLGLKDFCILNDGTKFDNPKFLVNNEKRLRLLQKSLSRKVYGSKNYEKARIKLAKFHEYVANCRKDYLHKISIQLVKEYDVICAETLQVKNMIKNHKLAKAIQDVGWSEFCRQLEYKCFWYDKKFVQIDIYFASSQLCSNCGYKNSDIKDIKIREWDCPECGSHHDRDINAATNILNEGLKLL

SEQ ID NO: 54274 - protein, 420 aa, unknown
  TnpB Polypeptide
MGSVFKAFKIRIYPNQAQETLILKSIGCARFTYNYLLAERIEVYKKLKDDKRALYEYKYKDEVSLKKEFEWMSEVSKFAIQSARRDLSTSFQNFFNSLKGLRKGEKVGFPQFHRKGQNDSYREYITNNNITVDFQTRTVKLPKLGKIKFRDSRIFFEGKIKQATVSRTKTGKYFVSVLYEQDLDLEGVEVRDGMKVIGLDMSLQKFYVDNLGNSPDYQKPYRSNQKKLSHYQRKLSKKQKGSKNREKARLKVAKVHEKIVNSRSDFVHKLSTKLVKENDVIVVENLSLKGMSQALKLGKSVMDLGYSEFVRQLQYKALWNNKTFLKADKWFASSKTCNFCGFVNKDLLLQERVWECPNCHEIHNRDTNAGTNLKNYGLKELGLVQPKIKPVESSDLLTESKESVKVQTVKQEAFGSLDRR

SEQ ID NO: 54275 - protein, 400 aa, unknown
  TnpB Polypeptide
MKTYNIELQFPAPQDQQDWIQFLETERTIYNEISEITFSEKTPLSLKLIHDRNYYPLREKYPTRSSQMIIKSEQAVLSSYKTIRTLVSRKLQKPLQQPILKTQLSMRLDKAIYSKFSKDSISLISSKPNHRIQVKLNLYPKVLELFEKFQTKDPLIFERSGKLFLAVTFDVPSFELPKPEETVLGVDLGIRRLAVTSDGLMVSGKEFSKHKRKIRYLKRCLQSKNTQSSKKHLKKEQRHEANFSKNYTHQVANEILKTNKTIIVLEDLTKIKERTKETKEGFKRTKHNNRMSQIPFLLLKQTLTYKALHLKKRVETVNPYMTSQDDYRGLGKGTRKGCRYYAVDTKILDADGNASCNIALRYCKHLSSFFPSMDGSYKPRKQGSVNSPIEGRLKKSFLQA

SEQ ID NO: 54276 - protein, 418 aa, unknown
  TnpB Polypeptide
MSNDSKFVRSYKYRIYPNKTQEACLTRLFGIARHAYNCILIEANARRERGEKFDETAIRDLFCSQRYEFADLKFLPRDTVDDLVRRYAKALRAYWKRLKECAPEDREKVKITYPKAKNNRTFTGLGYVYGKGSKFIEDRPKVGRLRLFSVDGLLRIQLHRPLPTDCKIKHVMVTRDGEQWYVCFQLELPAPAVLPSNKPAVGIDMGLVSLISLSDGTQIDNPKWYDATQYKRSKYQVRIDRQRRANNPQNYNENGTSKEGVFIWHKSARQKVNEKLARKVDRKAKNQRWYFWHVVTTWLVQNYGVIVLEDLNLDFMLKNGHLARRAHDAGLGAFMSLLESKAAANGVQVVKVDPAYTSQTCSCCGHVTPENRTTQALFKCVSCGHEENADVNAAKNILARGYIGAVQTPQDTLADEAA

SEQ ID NO: 54277 - protein, 414 aa, Hyella sp.
MYATQKNQLRRLSKQEFNALVALTRLSKNLFNVALYECRQYFFEMRKRLSYESNYHIVKSNENYRLLNTDIAQQTMKVVDRSMRSFLGLLKAISIGRFDQKPQLPRYLPKEGYFPLIIPRIRLKDGMFTIPMSREFKKEYGEVRIQLPERLKDKKIKEVRIHPKYSARWFEIEYIYEEEKVETFVDSNKAIAIDLGVNNLCACIDSIGHQFLIDGKRLKSINQWYNKRNAQLQSAKDKQGIKSFTNKQARLYQWRNNCVRDYLNKAAKLIINHCLKHQIGKLIVGYNPGIKQEINIGRSNNQNFVQIPFWQLRRKLEALCSRYGIEYIEQEESYTSKASFYDRDEVFVYNADNPVKHKFSGRRIKRGLYRTKNKHLCNSDINGSGNILIKSKHRFSFERVCSGFLANPLRIFIS

SEQ ID NO: 54278 - protein, 445 aa, Nocardiopsis sp.
MLATVSHDILVKRQVGHRARLVLSPAHVSTLDGQAHAARALWNMLHEWWTMVGENRRVDLRDADAAIRRARKDMDFLAVLPAQAAQAVLKTYFRAWRNCWAGRADEPTFKSRIRSVMSVDVPQGQHLNIVRVHRRWGMANLPKIGRVRFRWTKDLPVGKRANAENRITGARLIKDALGWHIAFRVQTLEAEPEAHTGPEVGVDVGVTVPLALSDGNHQGHGRPARTEDGTADRDKWLNAKEKTKLLRLERRAAQRKQHRKPGERTSHRLHRTYDQIRGLRARSTRRHQDWQHKTTTALAQQYGTVVVEALTITNMTRSAKGTVEEPGANVAQKSGLNRAIAQEAWGRTVTMLAYKLAWRGGTLVRVPAPGTSQRCSECGFTTPGNREDQATFVCKKEGCGFEANADDNAALNILHLYRIGHVVEVPAAGRAVVRRARRVKPTTER

SEQ ID NO: 54279 - protein, 316 aa, Nocardiopsis sp.
VVEDRPLAHPPAGPQGSGCACRDHGTFGVRWRAKGRWKPSFRFPDGGRMSIQRLGRKWGRLKLPKLGWVRFRWSRSPKGTVRSVTVSRDGAYWYVSILCEDGQTTPRAHERSDSAVGIDRGVVVAVATSDGDLFNRTFHTPKEHECERRLRRRLSRQHKGSANRARTQAALSKLTGRVRARRADFAARTARVLCGQNAVVVLEKLHTTNMTRSAKGTVDAPGTHVRQKAGLNRAILARGWHGFKLAVVNAARRTGTQIVEVNPAYTSQTCHPCGHVAPENRESPSVFRCVVCGYRAHADVNAARNTRARGWTSPSG

SEQ ID NO: 54280 - protein, 372 aa, unknown
  TnpB Polypeptide
MANRAYKFRIYPNNEQMILFARTFGCVRMVYNHWLNRRIRQYKKNKTNITYTVCAKEMAEMKKTEEYAFLREVDSISLQQSLRHLDTAFQNFFKRPKTGFPRFKSKKNHKNSYSTICINGNITISDGYLKLPKIGQVRLKQHRSVPKGYRLKSVTISQTPGGRYYASILFEYEDQIPEKEMHSFLGLDFSMHGLYRDSNGNEPAYPGYYRNAEKRLAREQRRLSKMQKGSNNRNKQRLKVAKLHEKVSNQRKDFLHKQSRQITNAYDCVCIEDLDMKAMSRSLKLGKSVSDNGWGMFTAFLKYKLEEQGKKLVKVDRFFASSQMCSACGYKNAKTKDLALRQWDCPQCGIHHDRDVNAAINIRNEGMRIVTA

SEQ ID NO: 54281 - protein, 373 aa, Clostridium sp.
MIKACKIRLNTTKEQEEKLWQSVGTARFVYNWTLARQEENYKNGGKFISDNDLRKEITILKQDSLNWLNEVSNNVAKQAVKDACNAYKRFFKGESEKPRFKSRKKSKPSFYNDNIKLKVKDNAVLIEKIGWITVKKNSIPMNCKYTNPRISFDGKYWFIAVGIEKEEPIIELTDESIGIDVGVKDLAICSNRMTYRNINKTKKVKKLKKTLRRKQRQCSNKYEKNRKGKEYVKTESIAKLEKQIRLLYRRLANIRSNHIHQATNKIVKTKPSRVVMETLNIKGMMKNKHLSKAIAEQCLYDFKIKLKYKCEFYGIEFVEADRFYPSSKTCSECGHVKTKLSLSERTYICEECGYVIDRDYNASVNLSRYELVG

SEQ ID NO: 54282 - protein, 435 aa, unknown
  TnpB Polypeptide
MGLFLSSEVKNRFRSGASRLERMFQEQAVTALRSWAARSGAASGDYTGYVSAGWKRTVRDSKPSSMQPRLSLSAADKQYREMTVTPERIVLEMVVQGQWVTLHLPVPLQLLEAGCEPGVPDIWVDKNNRVMFGFHGTVNPGRPEFSSRYVIGVDVGVTNPAAYVVWDTEKKEIAEKSLLGQRARSLNNKIKRTQTQVSALQRKGKDEEATPHREHLSHRRCELSILIAQEVADAAWRHGNAIVSFEDLSHIKNTMKFGRWFRGEVLRRTRDMVEADGGRVLKVNAAYTSRKCHVCHSDLDMSDYSQPRCTACGITRHRDVNAAANIAQKVNHAKACQTRKRHATKTKRIRRSKCRIKPLKHPGTKNRPTPKAPQNQKKNSVRSSLPSGEVSKGMCPADARVSAVDHDTWFQTTSGTTNPKDSPSVSTVDWVYPKE

SEQ ID NO: 54283 - protein, 501 aa, unknown
  TnpB Polypeptide
VSRTYPRTPYAAFSKIGEPLDLGEVLDGIRRDAELVAEYALLEMTEQNLALVTYFDKYKPAEAGRQMNLKLPVEVKRQFRSGASRLEKLFQEQAVTALRSWVARSRVTSKRYTGYVSAGWRRTVKDSKPTSMQPRLSLSATDRQYREMTVKSDRIELIMVVQGEKRVLHFPTPPQLLEKGCNPGVPDIWVDKNNRVVFGFHGKTNPGRPAFSSKYVIGVDVGVTNPAAYAVWDVEKRTIVEQSLLSQRSRSLSNKIKRGTRQVAALRRKGKDKEAAPHRVHLSNRRRELSILVAQEITDAAWRYGNAIVSFEDLSHIKNTMKFGRWFRGEVLRRTRDMVEADGGRVLKVNAAYTSRKCHVCQSDLDMSDYGNPACHSCNITHHRDLNAAANIAQKANHAKACQTRRKHATKTKRVRRSKCRVRPLKHPGTKNRPTPKAPQNRPKTLAYSSLPKREVSKRMCPADSRVSAVDHTEWFQTTSGTTVPKKNQITNTVDWVYPKE

SEQ ID NO: 54284 - protein, 412 aa, Epulopiscium sp.
MKQQVKQFSKEDYKTVRELSRIAKNLTNQAIYNVRQYYFQEGEYLNYEKNYALLKNSENYKLLNSNMAQQILKEVDGMFKSFFGLLKLAKQGKYNFRDIKLPKYLPKDSFTTLVIGFIRIRDNTLALPYSNLFRKTHNKIAIKLPPKLADKIIKEIRIIPKSNARFFEIQYIYEVEAIQRNLNQQKALAIDLGVSNLATCVTNTGESFIIDGRKLKSINQWYNKENARLQSIKDKQGDLRRYTNRQVKNVSKRNNRVNDYMSKTARLIINYCLDNDIGILVCGYNESLQRGSNIGKRNNQNLVNISFGKLREKLEYLCQLNGIKFVKQEESYTSKASFFDEDIIPIYNSDNPQKYVFSGKRVKRGLYKASNGYTFNADCNGALNILSKSNVVDLRVLYGRGELNTPIRIRGI

SEQ ID NO: 54285 - protein, 447 aa, unknown
  TnpB Polypeptide
MPWRWTPAARSWCAWAGRVGGRGTATGRRRDLQRLVDALHRPTHVGALMSATVHRQVTYRLLPQTRGNWRRLERVLEAQRQLYNAALQERCDAWRLAGVSLSYIDQAKSLTVCRREIPEMAAMPVVIQRGTLKRVDEAFRGFFRRVKAGQPPGFPRFRGRRRYDSLSIVSGVRVEADKLRLPGFGWMAVRRRGGNPYPDGRPVSAVLKREAGKWYAVVCHAVILPDREDEGTMIGVDMNARQVATSAGRLFHAPDTRRLEVRAKRLSRKLARQKRGSGRRERTRIRLAKTRRRLAGTRRNWRHRVSREIADSAYTVVIEDLRVRNMTRSARGTVEEPGTNVRAKSGLNRVALETGWAALRAMLEYKAGRTVAVPPHYTSRTCAACGHVDAASRRSQAAFQCVACGHADNADANAARNIRRRGLTLLHGEAAGVPGRRTVKTQRAMAA

SEQ ID NO: 54286 - protein, 414 aa, unknown
  TnpB Polypeptide
VSANYVRRTAVTRLSVTQEQRETLEATIAEWKRGCQLATDLAWNRCHAKREVQPLAYDTVREKTTLGSQHAVLATQQAADAISGCIERKRMGKKTSKPHFTAPTVTYDARSMTLFDDGTVSLATVGDRIRCPLVLPDDEDGYQWQFLDSDEWALTESTLRARDGAYFLHLGFRRPKTERTTAEDGTVLGVDLGIENLAVTSTACFVNGRELTHRLREFEKTRAGLQQNGTRSAHRTLERASGRQLRYVRDVLHNAANDIVREARRYDCDVIALEDLAEIRTHTGAAWGHRWAFRTLSEYVSYKAEAVGIAVERVAPANTSRRCSECGFTVAENRRSRDEFRCQECGAEANADYNAAKNIGLRYVRRGHQSSRRTGDGRLALQSGTVTPNGGFTAYPDGFEAEFTDESAPSEAKS

SEQ ID NO: 54287 - protein, 316 aa, unknown
  TnpB Polypeptide
MDIKKDMLKQLPDWCKPIPFQIKGIAIKEACNAFWKAKGNPSFRTRKNPEQSCFIPKTALSSKGVYPTISGKGLYFQESLPDNPKDSRLIWRYEKWWMAVPYLEKLIIGESQTRIVSLDPGIRSFITFYSLEHSGHLGKGDFSRIQRLCSHLDNLISKRDLTKNKQKRRSLTKASRKMRAKIKNLITEIHHKTAKFLTDNFDVILLPTFETKQMSNKAGRKIRKKSVRSMLTFSHYKFKQFLKWKAFQTGKLVVDCCEAYTSKTHPQTGEIKNIGSAEWIKLLDGSRANRDIVGARGILLRALVDSPMRKRAVNES

SEQ ID NO: 54288 - protein, 195 aa, unknown
  TnpB Polypeptide
LFIKKGKLFIEFFFEKEAPKLKIEGEVEGLDLGYVNLAVCSNEQVVGEGISSYVKSFSKREKHTHKQIEQRAFHELKELDLSNIRTLTIENLKNVKSRTRGMFSREHNRRMSHWLYARVTKWLEQHCGESGVQLQRKSPWKTSQRCPLCGNWDRRNRRGDRFHCIKCGYEDGADHVGAINLKLLGLAGVYSLRSV

SEQ ID NO: 54289 - protein, 425 aa, Halomicroarcula sp.
MLGSNRLTKTLVFQLDVESGNEDLIYDAVLEARAVYNETIRLAKQGVEWQAIPDRVADDADLVKNTTQRIVAKALAAMKNYYEHDDFGQPSHTKDGAYPLRANYEEGYDLSLTSAGEVAFRISAKPYKHIEGILKGNDAQLDILKTALTSDEWKLTTAETLWCDGNPELHVNVTNTEKRVRDKQNSQTIVGVDVNEDNVALTALSADGVEDTLVIDFPEIKFERHRYFTIRKRIQKARKDSIHTVLEGRERRFVRDRLHKISRHIVEWSHQFEKPCIVFEDLKEMRESIDYGTRMNRRLHHLPFRALQFYTTYKASFAGIPTAWINPEYTSQRCPMCEHTERANRNKKRFKCRSCKHQDHSDRSASVNIAVKGIEKHQNWNVPALNSLPTVRKMRRQASGAVNAPAVTHDAVRGHHTDGSVGVSK

SEQ ID NO: 54290 - protein, 443 aa, Moorea sp.
MNRWLDMLRSQYNYLLRDRIESYSQVKAPRLGNYCDLKSKGEVCPLTCSVSKSHSVGYPWKSNTKNPRRTAYEAQSSSLPILKKQRPWYKGINSTVLQQALRQLDVAFSKFFKGETGYPKPKRRSRFRSFKYSTGQVKLDGNKIYLPGIGWMSFYNSRLIPEGFKLNSVTVRRKTRGWFVSIQIEDKSVPVPPVKSKDEINPQKVKGCDLGIKKLISLSSGETVANPAIQTSFKPRERRLKLRQRAASRKKKGSKNRGKSYTRVASLHERITNSRSAYHWDTANKLVDGADALVFEDLNIKAMKSRCKPKPNENGGYDRNGQSAKRGLNRSISNAAWGELVKKIEVVAAKSGIPVVKVNPKYTSQKCPKCHHTSKENRKKEKFVCTNCGHYDDADVNGAVNIKLRGLKKLGIDPSQLPPVRGKVTPTEITATNVVVPGNPHPS

SEQ ID NO: 54291 - protein, 390 aa, Filamentous sp.
MLKASKYRIYPTAKQRQHLAQSFGCCRFAWNLALNLTNETYKATGFGLNRFAIQKEIAKLKKEYEWMKEPYSQCLQVVALNLSRAFINFFEGRAAYPQFKSKHRKQSISYPQNVSIVENGMKFPKMGIVYAKLHRPIEGKIKTVTVSMNAKGQYFASVLVDDGKDTPEQSTEGKAIGIDLGLTHFAITSDGSKFDNPRWLRKHERNLKNKQKRLSRRQKGSNNRNKTRKQVAGVHNKISRCREDFHHKLSRRIVNENQVICVEDLAVKNMVKNHCLAKAISQVGWGQFCTMLKYKAEWEGKVYLEVNRFFPSSKTCNVCLNQVKSLPLDVRFWRCKKCQTNHDRDLNAAKNIRDEGLRILSPRTREIAYRPGVSRDSRGRKKSTISHSAG

SEQ ID NO: 54292 - protein, 223 aa, Hydrocoleum sp.
LQSIKDKQGIKGLTKKQISITVNRNNKVRDHLNKAARYLINWCSKNRISTLVVGVNPGMKQNINLGKKTNQKFVQIPHHNFRFKLKAMCDRYGLTYKEQEESYTSKASFLDGDEIPVYNADNPTEYSFSGKRIKRGLYKTREGKLINADCNGAANIGVKSNLNGRGLYKTREGKLINADCNGAANIGVKSNLNGFTPDRLEASLAMPLRVKFDVTSVRQICST

SEQ ID NO: 54293 - protein, 426 aa, Nocardiopsis sp.
LSHRPANLSDVGTPRVEEEGGRRMNRAYKFLLRPTKRQQAVLTQMLRDHCSLYNGALQERRDAYAHASKTKIKYGNQSAQLKDIRAFDPERQGRWSFSSQQATLRRLDEAFQAFFRRVKAGQKPGYPRFKGAGHFDTVVFPKDGDGCRWDSTPNDPVTRVRLQGVGHVRVHQHRSVKGHVKTISVKREGARWYVVLACDRVPVEQLEPTGRVAGVDMGVASFLTTSEGEHVDNPRFLTSCAEKLAAAQRDLDKFPKRVKARNRTRKHRKAQERVSKLYAKVRRQRLDHHHKTALDLVRRFDAIAHERLNIAGMTKSPAPKPDGEGGHLPNGAAAKAGLNRSVLDAGWGVFLEILAYKAGSAGRELIPVDARNTSRTCPREACGHTSADNRKTQEKFRCMRCGYTEHADRVGALNVGIRAGLVLPVA

SEQ ID NO: 54294 - protein, 411 aa, Streptomyces sp.
MACALRAVGLLEPYALKGARTVLRGAEHGNMLRLPDNLALAARTEAWTRRQERVNYNATSAMLTVWKKTEELAYLSEVSSVPLQQCLRHLQGAFVNFWQKRGKYPRFKSRKKSRRSAEYTSSAFRYRNGVLTLAKMTDPLEIVWSRPLPEGSVPTTVTVSQDPAGRWFVSMLCEDASVKPLPVTDAVVGVDAGITSLVTLSTGEKVTNPKFERRDRVRLAKVQRELSRKPTGDGANRAKARRKVARIHARIADRRRDHLHKLTTRLVRENQTIVIEDLTVRTMVKNHSLARAISDASWTMMRSMLEYKAAWYGRNLVAVDRWFPSSKLCSACGTLAKKMPLNVRTWTCEGCGTAHDRDVNAAINLKAAGLAASVCGAGVSSCCRTDLGVCRSHGSPDWVVAGCSAHTSRAS

SEQ ID NO: 54295 - protein, 402 aa, Streptomyces sp.
LIRAFTFRLRPTVRQAQALSEMLRDHRSLYNGALQERRDAYRHASKTSVTYGDQSAQVKEIRAFDPQRQGRWSFSSQQATLRRLDKAFTAFFRRVKAGQTPGYPRYKGAGHFDTVTFPKDGDGCRWNSTPHDPVTRVRLQGLGHVRVHQHRPVKGRVKTVSVKREGKHWYVILACDDVPAEPLDRTGAIVGIDLGVTHLMTTSEGVHVANPRFLQASADALAEAQRALDAFPQRTRRRTKKHRAAARKVAKLHAKIRRQRLDHHHKRALDLVREHDVIGHEQLNTAGMTRAPKAKPDPDNDGAFLANGAAAKAGLNRSILDAGWGQFLAILANKAESASRRVIPVNARNTSRTCPQCGHVAKENRTTQATFECTSCGFLANADHVGALNVLDRAGLALCAAA

SEQ ID NO: 54296 - protein, 407 aa, Streptomyces sp.
MQLRYAFRLYPEPGQRLALARAFGCARVVYNDAVRAREDARGAGEPFPTAGELSKKLITAAKQTASRAWLGEVSSVVLQQSLRDVETAYKNFFASLKGERKGAKTGAPRFKSRKDSRQSIRFTANARWSITGSGRLNLPKIGAVKVKWSRTLPARPSSVTVVKDAAGRYFASFVVDTDPGADAARMPGTDQTVGIDLGLTHFAVLSDGTKIDSPRFLRRAEKKLKKAQRELSRKQKGSKNRAKARLKVARAHAKVADARREFHHQLSTQLIRDNQAIGVEDLAVQGLARTRLARSVHDAGWSAFVNMLEYKAARYGRTLVKIGRFEPTSQTCSACGIKDGPKPLNVREWTCTACGTVHDRDHNAAKNVKTAAGRAVTACGAPVRPGLVPAQREETGSHGFPPEPCAA

SEQ ID NO: 54297 - protein, 556 aa, Streptomyces sp.
VNGVGALREMAEPFVASGPTGVAVHTRLKHLTSGDEEVLRLVGAHLGALASKDLKSRCREGLEHTADAWAVRKRELTAVSSSRWAGAITKASHDQWALARRGQLAHIQNLEAGIRTIARRLSLPVGQKGSKEAPGGYRSRQEWHAKARRLHVLEDRLAAERADREAGVVHVVRGGKRLARTRHHLDAAQLTKTQWRRRWEAERWFCQADGESGKRYGNETIRVSPDGEVSIKLPAPLRHLANAPHGRYVPASRVTFPHRGQEWADRIATNRAVAYRIHHDTDRDRWYLTASWQIPPTPTIPLDAALGQGVIGVDTNADHLAAWRLDVHGNPTGTPRRFFYDLSGTAQHRDAQVRHALTRLLHWATACGVKAIAVEDLDFGAEKTREKHGRKKRFRRLISGMPTGRLRARLTSMADQTGIAVIAVDPAYTSRWGAQHWQKPLCSTTRKTTRHDAAAVAIGRRAQGYPIRRRTAPPPHDQSDRAGHRTVQARRGNPGREETRPRIPGPRTRSVRAGCGANAGDQCAQHRSGHTAEHRSWKQEPTPAQSLGTVVCCCER

SEQ ID NO: 54298 - protein, 184 aa, unknown
  TnpB Polypeptide
VGVDLGIKTLATLSSGETFANPQPYRTAERQLKRLQKAASRKVIGSNNRQKANQKLAKQHAKVANIRSYTLNKLTTHLAKNHGQVVIEDLNVSGLMANHKLAKSISDLGMYEFRRQLTYKCKLYGSKLITVNRFYPSSKTCSCCGHIQEMPLKERVFNCSGCSISIDRDLNAALNLEHQAFILA

SEQ ID NO: 54299 - protein, 564 aa, Microvirga sp.
MEENQLKEITIRQYGLLSPLDWGEDCEEELLRMNQLWNRLAEIEQVTREKYNTSIMTDQDVESIYQQIASSSDFQSSLIKERRSIRKQNGRKVETHNLDEQIRDLSHKIADLRNTAASSRKLAREKAGKRIRALEVERRAAVKLARQESGLWWGNYNAIVKAYERGRRIALRNGGQLQFKRYDGTGRIVNQIQGGMTVADLFGATHSQIAVDALPGDAWTHPSRGERRRLQRTRLTATIFVRSGERRTVTWPMIMHRPIPEDCLIKEVVVTRRKLGPSWQWQVTFTCTRSGSKQNRHTSTRRVVAVDLGWRRLPEGIRVATVVRNDDTPADFMIVPADIVDGFALIKTLQSRRDTMKNNIIAWLKTLDWAAAPEALTIHLPALQDATFISAGRVASLAIAWRNHQDWDAEGYRHLEKWRLADKRLWLWEVNQREKLIARRTDLYRRLSYNIVVNTDVVVINHLEIEKMSRLLLPEGKENPLFKAARHYRTVAAPSYLRKWIEIQARKIGATVVTQDMENWVCHACGAITMPARPYDLQQTCAHCGITCDRDMNTCRVMLKSFNR

SEQ ID NO: 54300 - protein, 442 aa, unknown
  TnpB Polypeptide
MSEKDLFMYRTDRIYVTENHELYAYLDGFAHKAKCLHNAALFRVRNAFTAHNKTALTANEKEVQGELALLKGQKSYCVLGYGILQRLMRITNNPDFFSGLPMQTAQHVIRQVCTDFKGWLASLKKYRKDPSGYTGKPKMPGYCRNDTASYLFTNQDAVIYDGKLKLPRIKIRIPVRRRHGRLMEVKVKPVSGGYELLLVYQVKAASVQSGRHAAAVDFGVDNTMAVVSDTGKSILFKGRFIKSVNQYFMKKKAERISLMSKGKETTERVWSKYLDRLSAYRTSYIRDCFHKMSRKLLVWCHRNDIGCLVLGSNAFWKQNSSIGTVNNQNFVSIPFEMLKSMIELKACEYGVTVVRNEESYTSKASFLDSDDIPVYAEGDGTKHHFSGKRIQRGLYRSSDGTVLNADINGAANILRKAGCDTSSVMLTNLLNPEVFAFADLNR

SEQ ID NO: 54301 - protein, 389 aa, Turicibacter sp.
MILATKIRLNPTKEQEVLFWKSAGVSRWAYNYFLAESEKYYQEYLEGKHEKKTINEGEVRKYINNVLKKTTHTWLKEVGSNVMKQAVKDADNARKRWFEGLSEKPKFKSRHKSKISFYVNYERLKRVNGGFRGEKIGFVRTCQPLPKLIGKQKYSNPRISFDGRNWFLSVGYEVDVEEVELTNKSLGIDLGVKDLAICSDGQVFKNINKTQEVKRLEQKLKREQRKLSRKMEFNTLKRTKNGKPIYKKPLKEMKNIQKQTCKMQNLHKRLTNIRNNHLHQATNKIVKTKPSRLVIEDLNVSGMMKNKHLSKAIAQQKLHEFRQQLEYKTKKYGIELVIADRWYPSSKMCSCCGNIKSDLKLKDRVFKCDCGFVADRDYNASINLANYQI

SEQ ID NO: 54302 - protein, 471 aa, unknown
  TnpB Polypeptide
MKRTVKIKANCLNNEDEILLIGEIQRNIKNYVWSRYSGISSLLKQSGWTIRDELIQKNLLSNKITKTLSRVAIEKSASTIKTNWIATKKKVKKAIMQNENLNEDDKRYLFLCLKHTPTLYNILNYKKVDYTTDYLKDLKIDVHRLNNLLRRYIRRYKIKSYTNKANVILTSNLYKFKTNNKTFMFSGKTKNSRITINLIGNVPKLKGTLELVKNQKSNQYYLHVPLDRIIKQKEVTEKSEILGLDVGITDLITLSNGSIYGANSSELFYTLSDNLVNKNRFRLFSYKRKLEKRISTEQDESKKSILELKLKNLEENNLGLQKRNSKIRKYKSRIVSHINCELNKMIKEEDLKEIVREDLNWISKKKNIRKKQQNRFSTWSKGTLLERLSIKLIEKGIKEIIVNPAYTSQICSKCNHLGTRNGKEFKCTNCNLNIDADFNASINIKKRKYIKEINIYTPYKQVKKYYENTHV

SEQ ID NO: 54303 - protein, 498 aa, unknown
  TnpB Polypeptide
MKSKTNWKSFNIRMPNELIPIYDFLQDELNFILSNNETRAILNKIDLSQHRGNVWRELRDNLKWRIKDWTIHNKTWHSYILFENIRRELQSKQEAISIWNELVENNFNIDENLFDTLHKLKIYPTRSRIYNIKRGDKIPELSYGATLNLDYTISEKQIFKMKSSNICQIKINKKDWIDYEIIFPSSIDSRFTGRIAKPRFIKRKRDNQYIGICSYEYEIGDYNLEDKILGVDIGKIKLFSSVVMNKDGTFSDEYINTKRSQKIEDKINRLYENKQILFNKIKAYDDLGLTDKSKYNTWKFLYTNISNKITNSKDYQSKLISNEIVQLALQNKCKTIHIENLSWLNSQGGKWNHSQIHSKIIEKVSMYGIKVKKVSAYNSSKEHPITKEIGTVKDRIVEFTTGVIDRDLLASINLAIRSTNIKIKKSLPVKVKTKRVRTKSNKKEIKEKVDKLKGNTQIVVFLTNVLNSTIKVELRVHPLNEVSVCNSLLGSYYQKCQL

SEQ ID NO: 54304 - protein, 378 aa, unknown
  TnpB Polypeptide
MQILKAFKFELMPNGAQVHKMKQFCGCSRFVFNRALAYQNEQYEADKSFKFSYAKIANLLPEWKRELVWLKDCHSQVLQQSLKDLESSFRNFFAKRSDFPKFKRKGEKDSFRFPQGCKLEQQNNRIYLPKIGWVRYRNSRAISGRLKNVTISQKCGKWYVSIQTEWETETLKPNGGEIGVDMGIVRFATLSNGEYFEPINALKSLKGKLAKLQKQFKHKTKFSKNWQKLKAKIAKLHHKISNIRKNHLHQISSQISQNHAIVYVEDLQVANMSKSAKGNAEQHGKNVKQKSGLNRAILDQSWSEFRRQLAYKLAWNGGFLFAVPPQNTSRCCPSCGHTAKDNRQTQANFECVECGYQNNVDVVGAINILKRGQAIQAV

SEQ ID NO: 54305 - protein, 331 aa, Helicobacter sp.
MSAISITHKIALKPNNKHITYFKKAFGCARFAYNWGLAKWKENYQLGIKTNHLQLKKEFNALKKSQFNFVYEVTKYATQQPFIHLNLAFNKFFRDLKKGLVSYPKFKKKREFQGSFYIGGDQIKIIQTANTDYLKIPNLPPIKLTEKLRFQGKINNATITQKGDHFYVSISCGVDKSEYKRTHKLQESHNKLGIDIGIKSFVSLSNGLNIYAPKPLDKLTRKLVRISRQLSKKIHPKTKGDKTKKSNNYLKHSKKLTHLHEKIANIRLDFLHKLTSSLIRHSSSFCLESLKVKNMFKSHKLAKSLSDVSMSMFNTLLEYKAKYSNLDNTIP

SEQ ID NO: 54306 - protein, 620 aa, unknown
  TnpB Polypeptide
MIPSISSVPSSSSSPPKREVKRRKRPDRSAKVIGRKEFSETVVKSSLLRYIQGDGDVKSKIFNAIKERVEAYSKRMNLASIAISECIKELFISVEDVRNVVIPDLLDQTFIRQFIIGTDGAQQAIPMVAQFYRRHPEYQIVKIRHSADRNIYSSGAIKYITNLKNAFNIPFISRVRKFTSEYSTLHGLSTIDQKAMMCLINGWNIPKQYGKCFPLNEHIVTTIYTHRRVLDLAEDAQVSTKWLKKRSNMKNIVRYFGLLNRFKEENGLPTFNIVPMCRMGAHFMTIDSSSLYGIMKDLQLVNSNVETFLELADDHWRSFINISKLEGKQNKFTGTIETDGISMCSHFKRPKNINDEVTGNNTIHICPNDRVIAIDPGRENIFFGAELLENGKYKSYRLTRRHYYQQAGIFEARKKSEHWNLGVQQELSDLSLVSSKGIDLVNHIFYRITYLRHFDSLWSEYLKPRWARQRLRLYGGKKRVFANFFNKIKNGGDTSRRVVIAYGSAKFAPGGRNEISVPTTRAFKDCSIAFPTIVVDEFRSTIIHHEDDSVLQYIKRRDKDTTLRGLLWCNSPNNNKFVNRDLNAAINIRRCAVSQVRPIILQRLETNVKLAKVIGKVIKC

SEQ ID NO: 54307 - protein, 313 aa, Burkholderia sp.
  misc_feature (269)..(269): Xaa can be any naturally occurring amino acid
MAGMILVYRYRVKSLNGLLNKQSRAVNYVWNFCNDTQKHALKWGKKWPTGFDLNVLTTGSSKALGIHSGTVNATCEQYAKSRSQHRRPYLRYRGRKSLGWVPLKGRDLKREGDAFRFAGHTFRVFNSRPLPEGKIKDGTNFAQDARGNWFLNIVIERPEVPARPIRSDVGIDLGLKDFATLSTGEKLPNDRFGRRAADKLAKAQRARKHKRHIAKLHAKVANARADFQHKLALDLVRRFDYIAVGNVSAAKLARTRMAKSVYDAAWSSXSSVTRRSRTEPHSRKWTKAVRPSPVRRAGRKTARRGRKVSRDCE

SEQ ID NO: 54308 - protein, 397 aa, unknown
  TnpB Polypeptide
MKARRTYKYRIYPNREQRTCLEEWLETCRVLYNDCLTERRDAWSVAHKSISYYAQANQLKEIKTFDENLKEVYAQVLQDVLKRIDKAFKNFFRQVKRREKAGYPRYKPRSRYSSFTYPQTGFKFSKDGKKLILSKIGSINIKKHRGIPELANIKTCTIKKDLDRWYACFSVEIEVEEPDKDKGITNPIGIDLGITHLLTLSNGDTEDNPRYLSKSEKKLKRKQRRLSKSKKGSNNRSKRRFEVAKTYRKVREQRTDLLHKISRSLVDTFDLIVFEDLKVKNMLKNHHLAKSISDVSWSQLTNFVSYKVEETGGKVEFVDPKNTSQECSNCGKIVKKPLSQRIHRCPFCGLVVDRDENAAINILKKGLKNVGQELSELKPAEFSKRTMNQEASSTRMG

SEQ ID NO: 54309 - protein, 405 aa, Planctomycetes sp.
MKRLQAFKFELIPTGEQQRKMLRFSGCSRFVYNKALVLQKENFEAGNKFMTYVSMASHLPVWKRDLKFSWLKEAPSQALQHALKDLEKAFRNFFSKRADFPSFKRRGRGNSFRYPDPKQFKLEQENSRIFLPKLGWLRYHNSRCVLGDLRNVTVSQSGGKWFVSIQTQREVLATPSGATSAIGIDVGIARFATMSDAQSIEPLNSFKKHQQRLARYQRRMSGKVKFSCNWKKAKAKVQKVHTDIANARKDFLHKTTTVISKNHALVCIEDLQVRNMSKSSKGNSEQHGKRVGQKTGLNRAILDQGWGEFRRQLEYKMLWNDGILLAVSPHNTSRTCPCCHHISKENRLTQTKFLCVSCGYENNADVVGAINILERGHRLLACGELAQSGLSAKQEPIEVTQAQVA

SEQ ID NO: 54310 - protein, 489 aa, Clostridium sp.
MLEKRCIKFYLDESVNDIKKDRILFFLNECREMENNLLEHYWSNDNYHLLIDNPKWMDFYKNRVMLDNPKMRFQHYMQVLHLTYMELMSIHSRIKNSIHFKFDDKEQQAIYNYCSKFVFEWTGLEKYISKQIKLYKKKDTKYYDFISKVQVLINNKEEYELLKTDIENRFYEIKDKFKQPVKKELQVHCNTAHTTKVETKEFQWIFTIDSNTVLSGRRNKAIFEKLIIPVKFSNYHKQVLEGSKLANTFTLRLNKYNRIEIIGCYEIETDKQDKNEVKDIIGIDIGLKKLITCSDGEIVEQNEAILNKLDRIVKKQANRQRLEEHLKIKLQDENYKLSDNRYLRSQTKLSTFVKTDNRYRIKQFLKGRENDLIVMENLEIGYSKTHSKQVNYLLKRLKIQNIKTDLLKYCDDFGINTAKINPAFTSQQCPVCGSISKENRKTQETFCCVNCGHTNNADLNASENIKNRYGDNRINLNTPFWMVKSILEQ

SEQ ID NO: 54311 - protein, 232 aa, Allochromatium sp.
VNLRDGRVVKYAKHWYVAIPVTKSTERTENQGRLVSLDPGIRTFQTFFSDQFAGHLGQQDFQRIARLAKHLDDLLSRKDREKSKRKRLSLTNAANQIRVKIKNLIDELHWKVARFLTDNFDVILLPTFDTQQMVVKTARKLRKKSVRSLLSFSHYKFGQRLEQKCIERGKRLIRVCEAYTSKTVSWNGKLLNIGSAKMITSDGITVNRDINGARGIFLRALVDSPILLENAR

SEQ ID NO: 54312 - protein, 296 aa, Limnochordia sp.
MIKSYKVKLLLNNRQKTLLSKSGGTARWAYNFFLARQKENYDDGGTFISDGELRKEITQLKKTDEYDWLGEVSAPRVKFDGINWWLTVGVEVDDNQVNTQKTEAIGIDLGVKTLAVCSNGMIFSKPDIRDEIEKLRRLQKRASRYYEKLKQQGGENRCKSARLKKLESEIRKVHQRITSLLQNNIHQMTTQLIKLNPEAIVLEDLNGSGMLKNRHLSNSVRQAKFYEIRRQLDYKCKWNHVEFVLANRFYPSSKTCSSCGLIKRDLRLSDRVFVCECGLEIDRDFNASLNLKRLAG

SEQ ID NO: 54313 - protein, 445 aa, unknown
  TnpB Polypeptide
VQSSKLTQTLSFGLDIDTGSGDDLQTGCLEARRIRNEANRLDKRGWDWEEIKSVVVDNANHVKNTTQLIVDKALGEIETYHDNKDDGWGRPYPYIDESYPMVMNHEEGYRLFPKDNDTIQFRITATRGTHVKGELRGSPNHFDQLRTAFNDEDWRVGTAEVVHKHDEWRLHVTVTHENHRVASKHDADTIVGVDVNEDCIALAAMGRSGSVKDSVVFEYPSVKEQRHEFFTKRKRMQNAGQTAFETVVQTEERDYVHDCLHKVSRKVVEWGSQFSNPVIVFEDLKDMRDSIDYGTRMNRRLHSLPFDALQEMVSYKAAWDGIPSDEVDPEYTSQRCPRTECQHTERANRHKKRFKCRQCGFQDHADRKAAVCVVQNWVDRETGNVPSLKTLPRVRTVRRAASGAGGGPDSHGHSSCSGVTSAGEARGFQSQAREDLKSVALAVQD

SEQ ID NO: 54314 - protein, 432 aa, unknown
  TnpB Polypeptide
MKRQSDEKTENAFTRTLVYRLYPSKADQVRFQRYCDYRRYVWNEYKDENDHAYQRYRYERTYYAKVGIKVKAKEFCSKYPTFARTKKQVNHDKKAWEYKYPSKIALMAMTDYDNAMSNFINKAMPDWGKPKFRSKRSPRQGFKLPAESLKLNGRTITVAKGRKDKKHGNLVLKSRQSFLDYPIGTASFYTEKGRYYVAVPYLIPKEELKSDDKLKGKAGIDLNVDHYNIYDGKHKLIDLNMRQLKFYYDRIKHYQRLLARKREFDKKNTGSRNYLETRAKLQRDYRRVADIQNDVLQKLVLGLCQKYGQIVIEDLDVKHMKMGVASKGLHRSMFGTFRSILTYKSEQYGNDLVVSDRLYPSTQICSKCQYRKTGDEKITLWGNKKHHTKHNEYVCYNCGNNIDRDENASINLYQYLDSKWYKEKSRAEKQMA

SEQ ID NO: 54315 - protein, 505 aa, unknown
  TnpB Polypeptide
MHESALLSQVHRSGERRHTRLLGVFPFATAAVSVASGTITGVPRDAAVEEPSLVLVSHTGVPLSRATTFRFTLDPNCEQHQRLLAHAGAARLAYNHHLWRVRANLAQRDAERSYGVAEADLTPPLSCSKVSFINHMNAWKDGRAADTSVSVDAGGNKVRGLPWRSEVSADVFECASVNAAAALANWSKSRQGQRAGKAAGFPRFKSRHKSPPAFRLRSKSKPGQTSPVRVAGPRALRLPKLGELRVREHTGKLTKMLGSGRSHVYAASFRLERGRWVVSITGVAAQLHHQRRSPKNRYPARVGVDLGVKTLAVVADEHGRVLHTWKGVKALRHAQARLKRANQSYSRTKRDSAGRKKAAQRLGKVHARVAHLRANLLHNITTELARGYTSVTIEDLNVAGMLRLCSLARYVSDAAFGAFRAQLEYKATWYGTQVVVADRWFPSSKTCSECGTINANLTLADRVYHCAACALVIDRDVNAAVNLARYTPPPKAAQPRKAPPLPAAA

SEQ ID NO: 54316 - protein, 505 aa, unknown; identical to SEQ ID NO: 54315
  TnpB Polypeptide

SEQ ID NO: 54317 - protein, 400 aa, unknown
  TnpB Polypeptide
VDIKRTITILLPNDDDLRATMLAFQQVQQQLSPVCFNNGEPLRALALHHACYLQVVGALNSQMTCSAIRLTAGAYASAKSNGHAITKPFGFHRARALFLVGKRGRDADFRPDGTLSIWTTAGRKRLAYRVPTAFQDTFTQAKEIDSLTVIERNGTLLGRVTLTLEAPEPNGVLPVGIDLNETNALVAVDADDRVFFVSGKKVKVRNKRTYKTKKRVQKKLAAKKAEGTHQDTRSVRRVLKRLGRKQANRTRTFAKTAAKQLVDWAPANAVLVFEALSVPQPRKGVVKGKATRRRLSQWQRHLIRQAVESKAQERGMVVAEVNPAYTSQLCARCGLLGIRKRHVFVCPHCGHTAHADINAAVNVRDRYTVFRDGGHPVSVPRSPDSSADSSTGALRASPSL

SEQ ID NO: 54318 - protein, 425 aa, unknown
  TnpB Polypeptide
MERRKVTYKLYPNARQAARLEAWVRLHCELYNAALQERIEAYRKAGKSISYYDQQNVLPEIKAARPEFVELGSHALQQTLRRLDLAFQAFFRRVKAGQTPGFPRFKTSKRFSGFCYPDPAGWKLLRKGGRGATLRIGSGKDALMLRARGQHRFGGEAKPNDLTITRKNGEWFASITLRVPEAACARVRTDHQHRGVDFGITHWVTFDNGKTLENPRWTREVLPKLAALQRQRARKQKGSGRYKRLSRQVARLHERIANLRRDFVHQKTSELVRTCAVIATEELAPKNMSRSAKGTVETLGRQVRQKAGLNREILSAAFGMAHQMLSYKAAEAGTRLHLANTRQLKPSQRCSGCWEIVPKTLAQRVHVCPHCGLTMQRDQNSALVVLIDAYTPGTGVAARPKPLAWQRAKSKSTTRETPATTTQGV

SEQ ID NO: 54319 - protein, 486 aa, unknown
  TnpB Polypeptide
MIKTYALHSELNESKQVLVNEVLVEYRILAKLIASRQWEHFFKNGRFNKNLDCKDINTKLSARYIQACQYQVVSMLNSYLSNLKVLYKKMVFRSSIPVIDHVYLFSINKFGKWFSDELILKEKLVDKELMFLAKKVFKMAMSRNRRPSFDRINLALDEKVAQLQENKNSTEFDYWIRFSTLRKGKPVMIPVKSNRYFDSIDGVLKNFVQINFDFCGKMNGVSFMKDVQDKKKNYKPKLKKIAIDIGLKTLIATDHGDLFGRGWLKKLEKYDKIIVNLQAELQRQNIKPNNSKRFKQANKKLKAFIKNEINRVFNRFVKIHAPQKIVVENLNFYNPNLSKKMNRLIRNFGLSAITNKLNELNITYGIEIKYINPAYTSQECSKCGYTDKKNRKKQETFICRFCDKKMHADVNGSKTIFGRSENDEIGNIYLKKTKILELLVKKFINNLSETQLRDDRIARLLNTNPYFGKVLQEPKFKTLCKNQCFE

SEQ ID NO: 54320 - protein, 390 aa, unknown
  TnpB Polypeptide
VCKTQKNKLESILKIKSGSEVKSVEKAYKYRIYPNKKQKEIITKTFGSCRFVYNKYLAKRIEMYEKNKETFSYVQCANDMKTLKLELEWLKEVDSTALQSSLRDLDSAYQKFFKEHTGYPKFKSKKTHRYSYKSKCVNGNIKYCNKYIKLPKLGMVKTKNKLIPQGRILNATISQEPSGKYFVSLCCTDIEIQPLPKTKNAVGIDLGIKEFCITSEGEIIPNPKYLKKSLDKLAKLQRELSRKSKGSSNRSKARIKVARLQEHIANQRKDFLQKLSTKIVRGNDVICIEDLQVKNIIKNHKLAQSIVDVSWSEFVRQLEYKSNWYGREVIKVDKFFASSQICSVCGYVNKETKNLNVREWDCPCCHTHHDRDINAAINILNEGLRILEVA

SEQ ID NO: 54321 - protein, 370 aa, Frankia sp.
VWNLAVEQQSWWTPFRGKSPNHLERCRQLTAARAEFDWLRAGSQTVQQQALRDFDQSLRNFFNGSHRRPTYRKRGQSEGFQVVGKNARVEKLNRRWSHCWVPKVGWVKFRVSRRVPDFRSYRVTRDRAGRWHVAFAAVPAPIDAPGTGGVVGVDRGVAVSAALSTGELLRCPGLRPAEASRLRRLQRRLARATRGSNRRTRLTGQIARVKAREADRRKDWVEKTSTDLARRYDLIRVEDVNIRGMTRSARGTVEAPGRNVRQKAGLNRGILANGWGQLVQRLEQKAPGRVEKIPAAYTSQRCSACGHTAPGNRESQAVFWCAVCGHTANADVNAAVNIAAGRAVTARGGAVLTAPMNREPQHCAPPLVGV

SEQ ID NO: 54322 - protein, 353 aa, Marinobacterium sp.
MLCIYTVMKQTKTLKVRVRDKYIPLLNEMARSVNFVWNYINELSDRAIRERGLFLSAYDIQKYTDGSSAELPLHSHTIQEIGKEYATRRKQFKKRKLAWRKSGGVRRSLGWIPFKSGAAKWKNGQVYHNGHSFKVWDSYDLSRYRFKAGSFSEDARGRWYFNVAVEVEVEIPAGQDRIGIDLGLKDTATCSDGVKLEASRYYRDQEAKLAVAQRAGKRQRARAIHAKIANRRKDVLHKFSRALVERCGVIIVGDVSPTKLAKTKMAKSVLDTGWGLLKTMLEYKCDSAGIVFKVVGEQYTTQTCSNCGTLPDSRPRGIAGLGIREWSCSACGVTHDRDVNAARNILALGHERP

SEQ ID NO: 54323 - protein, 248 aa, Limnospira sp.
MIVLEFKAKTKPLPALAIDEAIRTAQFIRNKALRYWMDNQGVGRYDLSRLCKELAEEFPFARKLNSMARQAAGERAWNAISRFFENCRKGIKPVGYPKFKKHSRSVEYKTSGWKLLEPKRIKFTDGFAIGELRLIGSYDLAHYDESQIKRVRLVRRADGYYVQFCIKADCRVQTKPSQKAIGIDMGLRYFIATSDGSVIEAPQFYRKAEKQLNRANRRKSRKFRKGAKPQSQNYHKARNRYAREHLRA

SEQ ID NO: 54324 - protein, 356 aa, Limnospira sp.
  misc_feature (161)..(233): Xaa can be any naturally occurring amino acid
  misc_feature (284)..(305): Xaa can be any naturally occurring amino acid
MAKHAGYARFVFNWGLHLWRSAYEEGLKPNINSIKKVFTNYVKPQYPWMSELSSKVDQYAFINLGDAFKRFFKGISSYPKFKKKGHHDSFTLDNSGQPFNLSGTRHKLPFVGWVSTFEALPESWVKKVTITRQAGEWYISFFVEIPQEITPKCRERIGVDXXXXXXXXXXXXXXXXXXXXXXXXXXXXXXXXXXXXXXXXXXXXXXXXXXXXXXXXXXXXXXXXXXXXXXXXXLAKNHSQVVIEDLNVSGMLKNHCLAGSIADASFYEFRRQLGYKTERYGSKXXXXXXXXXXXXXXXXXXXXXXMPLNQRTFECQNCGLVIDRDWNSSINLEKSPGFDDYTCGRGAADSPGRSKK

SEQ ID NO: 54325 - protein, 395 aa, Limnospira sp.
MLVFEFKTYGKPSQFIAVAEAIRTAQLVRNSCWRYWMDNPQKNKYDLNKYCAVLAATFPFADELNSQARQASAERAWSAISRFYENCKKKIPGKKEYPKFQKDCRSVEYKSTGWKLADDRKSITFTDKKGIGKLKIKGTRDLHFYQVSQSQRVRLVKRADGVYVQFCINVDRKENTAPTGNTIGLDVGLKEYYTDSNGVTVENPKFLKKCERTLKRSHRRVSKKVKGSKNRGKARQILGKHYLQISRQRKDHAVKLARCVVQSNDLIAYEDLRIKNMVQNHCLAKSINDASWYQFRVGLEYFAKAFERVTVAVNPQYTSQECSNCGAIVKKTLSTRTHVCKCGCSMDRDENAARNIRSRGLSTVGHTGTFGVPSNALGDKSSTVVGEILHQQVVS

SEQ ID NO: 54326 - protein, 556 aa, Limnospira sp.
MLHPALPPGEDGKNSAQLKPFVPLATNEDTSSKKPRNKSPLSVMQESAPIPKRMTSLDRLNFYAEHTQQHKFLQKLAVDSILNGENSSLYWNEYTKEISAHLSSLTPIGLSVSDFHSLNGYVQKVDVNSWFSGKRVSLQNKNSLAISCPSSTVSLLGFTDYESTKNQPVKNFKKKPRHQTSKMTPNSLRKVRLYPCQELHAVWKRWLAAYRWIYNYTIATLKHGYQGTCFDCQKLVRDSDKPEWVKFLPGHQLQEAVADAFDAFKQANAAGGQVKFKSCRAPSQIIKFKVNNFKNGTWYTRLTKGLTFTSPQAIPKNCLYGTQLKYARGKWYGCFPEYQERETTEQKRVMALDPGVRSFLVGYDGESITEFATNDIGKINRLCYHLDLLMSRISQCKIKRKRDQMRKASHRMRERIRNLVDDLHKKVAHVLVNHYKLIFLPTFNSSEMVLKSRRKLNSKSVRNLLTWSHYRFAKHLMQQAERKGVLVVRCNESYTSKTCPHCGQIHEKLGGSKVFKCPNCGYTAPRDWVGARNIMLRALQATAVVFQDNAILFQSA

SEQ ID NO: 54327 - protein, 325 aa, Limnospira sp.
MQSDLPAWVKETPCHIRQNAIFDAYQALTASPDARFRSCRDSSQGIKFNNTNFSSGSWYPRLTKGLTFMVSEAIPKTCGQGTQLVFTKGRWLAIFPEPVAVTPTEANGVIALDPGVRTFITGFDGSRFLELGSGDIGRITRLCQHLDDLMSRIAKEPCRSRRRRMRQAAQRMRTKIRNLVDEAHKQIAHYLTHNYSLIFLPTFETSDMVAKAKRKIRSKTARAMLTWAHYRFKLTLRHQAEITGTTVVDVTEEYTSKTCTHCGHVHSQLGGSKVFRCPECGFTLPRDWNGAFGIFLKALRDTASVTLTGNSAIVALSGNSRINVA

SEQ ID NO: 54328 - protein, 313 aa, unknown
  TnpB Polypeptide
LTILKKTEEFKWLSGVSNNVAKQSVKDGCEAFRRFFKGLADKPRFKSRRKSKPSFYNDNVKLKVKENSILIEKVGWVKTAEQIPMNVKYTNPRISFDGKYWFLAVGIEKEQPVVKLTNESIGIDVGVKDLAICSNGMTFKTKKVKQLEKRLRRLQRRVSCKYLKNKEGSKFVKTSNIIKLEKQIKLLHRKLANIRSNHNHQATNKIVKTKPSRVVVETLNIKGMMRNKHLSKAIAQQGLYEFKRQLQYKCELNGIEFVEADKWYPSSKICSKCGHIKPKLSLSVRTYICEECGCVIDRDYNASINLSRYQLVV

SEQ ID NO: 54329 - protein, 395 aa, unknown
  TnpB Polypeptide
MIVSYKYPIFPNKVTQFKLAESLDACRWLYNRLLQDLNEAKEKGIKLKTYDTQNMIPSLKLVNPKLNLVYSKVLQMVNYTLWSNIKGLSASKKKGRKIGHIRFKGYGWYNTLNYNQSDFKIDQDHGILHLSKIGDMRIKIYRKIEGCIKAIIIKREGERWFAIVQADQVPQPLPETEEAVGLDVGLTSFVVDSEGDDIENPRCAEQSADKLAKLQRKLARAVKGSNNYKSLKDKIAKLHKRINCQRDDFLHKLSRMYVNNFDIICVEDLDVKGLKEKGHNNGMHRSIHNASWSKFIFMLSYKAQSAGRKLIKVDPRNTTQRCSACGSIVKKELSNRVHECPYCGLSCNRDYNASRNILIAGMEQPVAPIEPKPLHHISVMQVLAMTWEAAPFRTR

SEQ ID NO: 54330 - protein, 381 aa, unknown
  TnpB Polypeptide
MKTAYKFRMYPNKQQEAQLELTINTCRHLYNLALADRKNAYELESINRTYEDQAAMLVAEKKDGNFTGVFSQVLQDVLRRLDKSFKAFFRRVRSGEKPGYPRFKGEGWYKSFTYPQVGFKLDGSKLTLSKIGTIRIFKHREVEGRVKTCTIKKDHLGHWYATLVSETEDVPQIEPKTALGVDLGLKSLVALSTGETIEYPRYYVQAENKLAVAQRNLSRKKKGSSNRRKANARVAKISQGIQNQRDEFLHQVSRKLADSADLIVFENLNISGMLKDHHLTKHIQDHAWGKLIQFTQSKAAKAGKTVELVDARYTSQKCSKCGIIVPKTLAERTHLCLNCGLEMDRDINASLNIRTLGLRGRAYQDPTPTLSKLSKQVRSMT

SEQ ID NO: 54331 - protein, 451 aa, Desulfurella sp.
MKTSFKKESIGPDEELRTFSIRINSNKLNKKVLSLIYSYRHFENILLILLKQNYEPFAQSKGSSDFKYLTNKQTLRNALLDYKAKNSKDADCLNGKYKDNQLWQDLKKAAKIIKQHNFVYIVDRVKSNYKTYFANTALWHKNHELFTGKPQHPKPKKLSKLTNYAVDIDKSDIGVNNLAAVFVNDKTTPSLVIDGTPFKRYNAKFNRLVSKLNEAKSKEVSNTQYPIEYTQKGKNIIRFISFLHSKRNKYFYDQFHKVSKRIVAYLQFANVADLYLSKSLSELKNNGECKLRKVTKQNFMQIPFFIKLLKNIEYKAQEKGINVHWINEVYSSKSSCISDNVVDIQNNPQLTNAFNGRRVKRGLFLDTWLNKTFNADINGAVNHIKIATAKNFEWLKSSLYKLCNPIKLKSDYKFCRLLKHLQNSGLGKSVFFANQNEKGVVSVIGVENGRK

SEQ ID NO: 54332 - protein, 301 aa, unknown
  TnpB Polypeptide
MRQVERHIITDNRYEEICYKSGLLYNYCLYVFRQGIFTENYVKEYDLSTKLGKGNQVDFRSLPCHISQNVVKQVGKNIKSWIKAKKEYEKHPDKFQGKPKLPKYKKGKKLNAVVFDETNCRVKEDGYVHFVKKIIEPIKTNVKSDELVQVRIIPQATCFVVEVIYERKEVDLGLDKDNFLSIDLGLNNLCSCISNVESNSFIINGRVMKSVNQWYNKKKAKLMSFIGNVGTSNRIKRITLFRNCWIEDKLHKISRYIVDFCKSNNIGTIIIGLNKEWKNEIIIVPIAVILIGVILTLKIFD

SEQ ID NO: 54333 - protein, 465 aa, unknown
  TnpB Polypeptide
VTENYRVQLILIDLPPFETEVLKFICQRSNSLYNQAIYFVRRNHEMTHPGLLPNIPYSVLCSELKDLWNYSMLCAQAAQQTLKSVHEGLDSYKGLMSLWLTGGLESRPREPSYRKRGGLFPVTYPAAACTFYLDRSEVRIPLGNGVKDDSGLAELFIPCPHGVKPEQIKEVQILPRNGTFYAVYVYKTLVFTADVDFNIALGIDPGLTNWLTCVSTDGKSFIVDGRKVKSLNQHYNKRVATLKKGKAQGFWSDELAAHVSGGSTPPGTLRAITEKRNRQLRDAINKAARFIINRCLASQIGTVIFGWNQGNKDSIDIGKKNNQEFVQVPTAKLKDRIAQLCKQYGLRFVETEESYTSQSSFLDDDFLPIFGEKPESWKPSGKRGQKQKGVRHNLGRGGYQTADGSRINSDCNGAVNIIRKVATQLNLCLAKVVRAVLALPQRYNLDSLSRSYRKKYYKARLKPAL

SEQ ID NO: 54334 - protein, 297 aa, Leptolyngbyaceae sp.
MLKATKVRIYPTEEQIIQLSKDFGATRWLWNQSLSLMSETYKETGKGISAYDMKKRIPELKKEFEWLKETYSQCLQQSILNLSQAFINFFEGRAKYPTFKSKFDRQSVQYPANVKIAGGDAIKFPGNLGTVKARIHRDLPIGKVKTVTVSKTPDERYYASLLIDVELRSTEGVGMAKAEITSEGKAVGIDLGLIDFVVTSDGSKFRNPKHLKKHAKNLKRKQQKLSKKTKGSKTRLKARRIVAKVHGKIARVREDFLHKLSRKLVNEKPSCGGGKSGSEEHGEESHPSQGYQRCWVG

SEQ ID NO: 54335 - protein, 386 aa, Clostridium sp.
LKKAYKIEIKPTGEQITKIHQTIGVSRFIYNFYIAHNKEVYKNEKKFVSGMDFSKWLNNEYIPNNQDKEWIKAVSSKATKQAIMNGEKAFKKFFTGESGFPKFKKKKNQDVKVYFPKNNKTDWTIERHRVKIPTLGWIRLKEFGYISVDSVVKSGTVNQKADRYYVSILVEENIISKSKPYSEGIGVDLGLKDFAICNNGISKKNINKTKIVKKAEKKLKREQRKLSRKYESLKLRNKKEKGEATRQNIQKQIVNVQKIHQRLTNIRTDYINKTVSELVKQKPSFIAIEDLNVKGMMKNKYLAKAVAQQKFYDFRTKLISKANQNNIEVRIVDRWYPSSKLCSCCKAYKKDLKLSDRIYKCECGNVIDRDLNASINLANTKKYKIA

SEQ ID NO: 54336 - protein, 558 aa, unknown
  TnpB Polypeptide
MARSKGVTIAVKVPITWEAMTASTKQRLRQTVGRDTRVVRAFLGIIEQHEDELLTGRNRDRIDECKLHKLTMTALKVKSGYEQRLSVPHDLKVRFPRISQNEMTECRQTAVSLYESYLKLRMKKERRDSRPTSTNCSRRIPRWVFSQRFKLIEKHTSTSRWWLNIRDSLDSVKEGRTHHDRLRIPLKMSPFHLNQIKRGEVKALQLFTYRKRKWWTALAVRVAIDDSRKDTFPVAILGIDLGVEKAACSTLLTPETTRETRYLVQREKVKIIKQYDRLVADLQKEMYTRKNSGHPYDKVARKLRRMRSKRENVSKEYDRVLVHQILEYISELSKRYTLYIAIGRLKNIRMRAKRGNYKGRRFRGMIHSWAFARITDSLKHGLAQLGWKVEGKDARFRAVPEAWTSIICWKCGNKGVRPKQNCFHCPSCGQKTNADRNGSINIAARMLMLTKSLHSVRGLGLWTRVLDKARRARPKARKKKPSRGKSLLSEREHTSGSRESAAVHHAQTSLLSFSDEAGKGDDDPAVERTVENLSVAGSDGPAIAQEKEARSGGGIPSR

SEQ ID NO: 54337 - protein, 434 aa, unknown
  TnpB Polypeptide
MLEAVRVALDPTPRQERLLESHAGAARFAYNAGLAHVKAMLGRQEKPEWSYYALRRWWNANKDALAVSMETGKPWWPENSKEAYNSGLESLADALRNFSKSRKGQRKGRRMGFPRFKSKDRAVPGFAYTTGSFGLIDCDPYALRLPKIGRVHCMENVSKRVNGAKVLRMSVSKRGGRWQASLTVERADLPVPSPPKGGSVGIDLGVKELATLSDGTVIRNPHALRSNLGRLKKAQRNLSRKRKGSNRRRKARAQVARLYARVANLRSDALNKTTAMLAHAYSDIGIEDLNVAGMVKNHGLARSIQDAAFAEFRRQLTYKTARTGARLHVIDRWYPSSKTCSNCGTVKAKLSLSERVYHCEECGLVIDRDVNAAINIQVVGSAPETLNARGGSGRQAHPKGGTMRHPAKREPSGGGSRVRLGAGLGNEAMQMTSL

SEQ ID NO: 54338 - protein, 435 aa, Deinococcus sp.
VKVTLTAKLKLNHTREQKAALDAVTLAYRDALNYTSQKAFEMGKSSNAAKIQKEVYTTLRERFGLGAQMACSVPRYVGAAYKTLWARAKQAKAARERNPKARRYKGLDNAPKFVSRTLSYQYGRDYSFKKDQQVSISTLNGRLVLRYEGYAKHLEYIAQGADIGAGKLWYSKARKQYFLLVPLSIELPDPEPTAHKQVVGVDVGMRYFAVASSTSNKTLFKSGKAPLRTAERYANARKSLQQKGTRSAVRRLVALSGRERRFIADANHSIAAEILSRFPNAFIGVEELTGVRDRTEKRSRKGSSEKTRKANRRRARWSYAELLGFLAYKAPLRGSMVVKVDAYYTSQTCPRCGHCSRNNRPKKGLLFVCENCGYSLHADLVGSRNVCLRALVVRQDWAATGCLSCTPDVSDVEAKAERLQRYSELRWSPDASPRL

SEQ ID NO: 54339 - protein, 408 aa, unknown
  TnpB Polypeptide
MSNVMILCERHLIKPHHPFYGECDRLTFLAKNLYNATLYYQRASFFNKDFKNYYDVNKVFTHSNQKDYRALPAKVSKCVQQLVDKSFKSYFALVKKKLNGGYSKNVHIPKYLDKTNGRCVVPYPKDALSLKNKGFVKLSKTDIKIKTNVSKESVKAARIVPKGNHFVIEILYKATVKPLKSNKPKKVAFIDPGLNNLLTVTSNCFNPILYNGKPLKAINQLSNKTIAALKSELSSRGLRTSPLLKSVWNKRSRRLTDLLHKITTQLVSHLDSHDIDTVIFGHNIGQKQDISLGKVSNQNFVQIPFTRLMQLLKYKCELRGIKFILIDESYTSKCSFLDKEKICKHASYCGQRVKRGLFRTRNGKLINADVNGSLNIGRKYLMKVNMYTKKIHRDLTKFMVNPKVVTII

SEQ ID NO: 54340 - protein, 370 aa, unknown
  TnpB Polypeptide
LNIAYRFRIYPTEEQKILLGKTFGCCRFLYNQMLNDKIREYKKTKKLLKNTPAMYKKEYSFLKEVDSLALANVQLHLEKAYKNFFRDPKVGFPRFKSKHHSKNSYTTNVVNGNILVEDKRIRLPKLKWISMKKHREPAENCRLKSVTVRMEPSGKYFASLLYEGYSCENQAADEDYSNAKILGIDYAMQGMAVFSEEIEMEEAGFFRKNEKRLAREQRKLSRCVKESRNYVRQKKKVARCHEKIRSQRRDYLHKLSRRITDQYDIVAVEDIDMKAMGQCLHFGKSVQDNGYGMFLTMLDYKLRDRGGQLIKVGRFFPSSQLCSHCGFKNPLVKNLSIRHWDCPNCGTTGIDRDVNAAKNIKKEGLRSLTA

SEQ ID NO: 54341 - protein, 442 aa, unknown
  TnpB Polypeptide
MGENLLMKMVTSYTIAFKDGYDAVKKTTVIFNDAIRYLTDVTLEQWESISCINGLLCRKQYIEHLVHSTKNRKAVYNFDRKFYKFPCYLMRAAIAEALGNVQAYMSNIDSWVKNGYRGAKPKLDRGGHVLPCLYRGNMYREGFGDEAYIKVFRNRDWVWQKIRLDHSDRKYLEKKAKCATVSAPSIVKKYGKYELRFALTKEVELSSKEIYEQKACAVDLGITTDATCCVMDAHGTVLSRRFITCGREKDQVNRALRRVSEFQREHGSHDSGRLWNLAKRRNLNLAHLVAHKIVDYAIENGCDVIVFEHLDTKGRKRGGKKQKLTMWKHADIQNTVTSLAHQNGMRISRICAWNTSRLAYDGSGTVQRGKEVSDDTPYDMCRFANGKIYNCDLSASYNIGARYFVRELIKELPDIMAEVPDIGSGTARTLSTLWKINSIMSI

SEQ ID NO: 54342 - protein, 171 aa, Thermoanaerobacter sp.
MSYVGNRGSSNRIKKLSIKRDNKIKDLMHKISRFIVNWCKQYDVDTLVVGYNSGWKQEIELGKINNQNFVSVPFYDFINMLKYKCEEEEINFILVEESYTSGCSFLDGEEVNKTNYNPHRRIKRGLFKSNKGILINADVNSAYNIIRKVFPKAFAEGIEGVGLHPVRLNIA

SEQ ID NO: 54343 - protein, 385 aa, unknown
  TnpB Polypeptide
MNTIHRAYKFRFYPTPEQAVQLARTFGCARFVYNHFLRVRADGFFKDKERIGYNETAKRLTVLKQQPETAWLCEVSNIVLQQSLRNLDAAFQNFFQKRTKYPTFKSKHDKQSARYQIGGFRFKEDGLWLAKMNAPLDMRWSRKIKGVVSNVTISKDKAGRYFASLLSTEEVELLPVAKSVIGIDLGLKDAIITSEGQIVSNPKFYHKAEVSLAKAQRLLSRKQNGSKNREKARIKVARVHARIADSRNDWAHKLTTKLMFENQMVSAESLNVKGMVKNHCLAKAIHDVGWGKIVQQLEYKAAWYGRTFVQVDRFYPSSKRCSACGYILPSLDLSVRDWVCPECGASHQRDINAAINIREAGIAILAGVDMLRIHEHQNTAGHAGI

SEQ ID NO: 54344 - protein, 324 aa, unknown
  TnpB Polypeptide
LRRHADFTHQLVASESRPVSVKGSGEFLGRAYRRAFIDYRRGAKAARALKQPHKPGHLHAELIDSAEIQPPRKATGFDLWVMIRGTKEKGGFYVPAKRHHGINKTLALPGASLNESAEVFRKNGKWYCRVTVSVPVKAPATPKGFLGCDVGVRKSVVRSDGHTGPDLRPVLKKQRDRRAMQQKHGIDKRSNGTFQKQTLAREARRAVSVAQRTGQGVSLEDPKRLPRWKQWAGRFFAERVVLLCQMVGVSVQLVAPPYTSTTCSRCGSAEAGQRHKELFRCWCCGFTHNADLNAARNIAAGAYRATAVSPGLLRLVPRSGDATE

SEQ ID NO: 54345 - protein, 402 aa, Escherichia sp.
VKRLQAFKFQLRPGGQQEREMRRFAGACRFVFNRALARQNENHEVGNKYIPYGKMASWLVEWKNATETQWLKDAQSQPLQQSLKDLERAYKNFFRKRAAFPRFKKRGQNDVFRYPQGVKLDQENSRIFLPKLGWMRYRNSRQVTGVVKNVTVSQSCGKWYISIQTESEVSTPVHPSASMVGLDAGVAKLATLSDGTVFEPVNSFQKNQKKLARLQRQLSRKVKFSNNWQKQKRKIQRLHSCIANIRRDYLHKVTTTVSKNHAMIVIEDLKVSNMSKSAAGTVSQPGRNVRAKSGLNRSILDQGWYEMRRQLEYKQLWRGGQVLAVPPAYTSQRCACCGHTAKENRLSQSKFRCQVCGYTANADVNGARNILAAGHAVLACGEMVQSGRPLKQEPTEMIQATA

SEQ ID NO: 54346 - protein, 397 aa, unknown
  TnpB Polypeptide
VRASMYKGFKTELRITKQKHIDKIHQSIGICRFLYNSYLAKNQELYELFKEGKIDKKQSFMSANDFDKYINNEVKILEEFKWINNCGSMARKKAIVNAETAYKRFFKGQGKFPKFKKKKSQNIKIYYAKNNKTDWTVKRHKVKIPNLGYIELKEKGYIPTDEKVVSGTVSMKAGRYYVSVLCEIADYNNYSPSENEGIGIDLGIKDLAIVSNIDEPFKNINKTDNVRKLKKKLKRLQRQVSKKYEMNKDGKKFIKTKNIIKLESQVKTIYKKISNIRLNYSHQITNTLVKSKPEYITIEDLNVKGMMKNKHLSKAIAEQNFYEFRRQLTYKCSLNNIELRIVDRYFPSSKLCSECGSIKSDLKLSDRGYVCKECGIILDRDKNASINLKNAKEYKVV

SEQ ID NO: 54347 - protein, 493 aa, unknown
  TnpB Polypeptide
MAKEIRAYKFFVDSNKNKTQYIETVILKEWRRVATVLVKKHMNFFYKNNHISESNEIYKDVETFFTERYKDAINRQVAGMIKSKISNFKNRFIKIVMKSDNLSEELKKDLCIVNKRDLFFVNEDNVGKKYKVSFEAIKLARWIFKHFFGKIPSCKHINIVYQSKNVEIQKPNNENNNKHDFILRLASGDKNIYGKFINIPLKKNEYFHKFDGKLSTSCQFNFDKNNKLTSVSLFKERKFNKPKLNDVKISFDIGLNILIADNNGNCYGRQYMKKLKRLDEERENIVKKIKAENGDKAKLSLFKEYTDITTYIKNYSTNEINRIINRIYRKYQPKTIIVEDLDFKGAELSKKINRLLCNFGLGIITKKLTQLTTDYGVDVKYIDASYSSKTCSKCHYVDANNRKEQKTFKCKCCGTKMNADVNASRTLSYFAERFSNNKVYGSADRAKKKHLLVEDFIINYKVWTNNNRGLFNVLLNNRYFSDYHAILREKLEK

SEQ ID NO: 54348 - protein, 404 aa, Symploca sp.
MKARYRYRIYPTPSQQMALAKLFGCVRVVWNDALAFCINQYQDGQKKPKNAELQKQFITQAKKTIERQWLSEVSNIPLQQSLNDLEQAYQNFFKSCKGQRKGKPVKPPLFKKRHAKQSARLTRWGFKIHTTSVYLAKIGKIKIVWSRPLPSEPSSVTVLKDAAGRYFVSFVVEIVFEVLPKAPNSVGIDLGISTFATLDNGQKIDAPKPLKKRINRLRRLSKNLSRKTRGSKRYELARKRKAKLQAKLKDTRTDFLHKLSTQIIRENQTIVLEDLNVAGMVRNRKLSRAISDLGWQQFRTYLEGKAERYGREFRVISRWEPTSQTCSCCGFRGGKLELSVREWTCLNCGTTHDRDINAARNILVAGGHSETQNGRGGRHKSTVKVAATCEASTHREYVQLSLFG

SEQ ID NO: 54349 - protein, 400 aa, unknown
  TnpB Polypeptide
MEILQAYKFQLRPKTGQESLMRRFAGCCRFVWNKALALEKETYENEGKRLGFSLLCKFLRDWKKENATSFLSEAPSQIMQQALKDLDRAYKNFFEKRAGFPRFKKKGLHDAFRYPQGFKLDERNDRIFLPKIGWIRYRNSRKIEGTPKQVTVSLSAGKWYVSIQTEREVPEPVHPSQNIVGIDMGIARFATFSDGSCIKPLHSFRKHEKKLAKLQRKLAKRVKFSANWQKLKAKIQRLHRIIANVRNDFLHKTTTIISKNHALVVIEDLKVRNMSRSASGTVEAPGRNVRAKAGLNKSILYQGWFEFRRQLEYKLKWLGGKLVVIPPQYTSQTCSHCGCVDRANRPTQAKFKCTACGFECNADHNAALNILAAGQAVTACGAGRAQAPALKQEPAYGAAR

SEQ ID NO: 54350 - protein, 452 aa, Acidimicrobiaceae sp.
VTTPVLERTSTSTESVVTRAYVYAIDPTPEQAKLLRSHVGGSRFAYNALLGLVVANWAENRAKKEAGIEVAQEDWVDTSHFGLLRLWAKHRDELAPWWPENGASTYNDAAQRLAKAIDNWRKGRAKFPTFKRKGQGGSVRFTNQAVRIVDSHHVRIVRIGDVKTYESTRKIYRHLERGTAKIMAATVTQRSGKWQVSFTVEVIRQFPATRAPGRIVGVDVGLTTLYTGATTDGAHVLNVANPRHFVKAEKKLAHAQRIASRRQGPKKGVAPSKRWKMANARVHKVHAGVRNARKNLINETTTRLAKDYDVIVIEDLNVAGMVKNHSLAKHIEDAAWGEFGRQLEYKTKWYGSTLVRVDTFYPSSKTCSQCGAVKAKLPLDERLYHCGACGLVLDRDLNAAINLARMGLPGTSSGTGRGGEVRPAQQKLVATAHPDEASTDPSSDDGVGDTSV

SEQ ID NO: 54351 - protein, 422 aa, Natrarchaeobius sp.
MEYSPRYRLFPTTEQRESLDWTRNIVRQLYNHALHEFNNIPEADGTLRQRVWQVRDELPQLKQQWTDLKQVYSTVLQKAVERIRTNINNLDKLKAKGYDVGSLNWKSPREYRSFTYRQSGFELDKKSGPRNRAILRVKKVRGDTLQIPIRLHRDLPEHDAIKEVTVKKEPTGAWYASFCISTNEPEKPNSDGIDTEDTVGLDLGVLNFVHDSDGRSIGRLELSDDRERLEREQRSLSRKQYESRNWENQRRRVAAVHARMSNKKRDYKHKLAHFYTTEYDAVFVEDLNVKSMLESDGNARNKAEVGWRDFITVLTHHGRKNGCHVVKVEPHGTTKECAKCGVETEKPLWVREHTCPSCGFEVDRDWNAALNVKSRGLDKLGVVHSEATSVETATAVDTLSVSASRVVEAGSPCLKEPATAGE

SEQ ID NO: 54352 - protein, 408 aa, unknown
  TnpB Polypeptide
MVVCQAYRFRLKTNSEIEQKLAQFAGCCRFVWNKALELVKYRLDHDRPVPWYNDLAGSLGLWKRSEEYGFLKEAHSQILQQTLKDLDKAIRSAFTRGNGIRFPKFKKKYLHDTFRYPQGVKVSGRRIYLPKIGWVRFFKSREIEGKIKQVTVKREYKHWFVSIVVEKEKTCVERKDNPVGIDMGVRRLYTLSNGEFQNPLDLGKLERRLKREQRRLSAKKKFSRNWYKQRSRLNRIWFKVRNTRYDCLQKLTTTIAKNHGIVIAEDLRVRNMTSSARGTIENPGHNVRQKAGLNRSILRQSWGLFLRLLEYKLKFSGGELIFVNPNHTSQRCPRCGLVSRSNRKSQSLFVCENCGYRDNADHVAAVNILARGHVPPGRRDMKPVEIAESAICEAGTSGKPRGSTAPVT

SEQ ID NO: 54353 - protein, 262 aa, Cyanobacteria sp.
  misc_feature (238)..(251): Xaa can be any naturally occurring amino acid
LSQHFGCARWWWNHALNLCIETYKATGKGLNQSALNTFLPKLKKQEETQWLSECYSQVLQATTLNLVTAYKNFFDGRAKYPRFKAKKNRQSIQYPQSVKVIDGCLKFPGRVGVVKAKIHRPIKGTIKTVTVSMTPSGKYHASVLMEIEGGSSVSSTDGKVAGIDLGLKDFAIVNDGVKTSKYTNPKHLAKHERNLKRKQQKLARKEKRSKSRDKARILVARVHERVTNTRQDFLHKLXXXXXXXXXXXXXXFMSKAWCVTIN

SEQ ID NO: 54354 - protein, 427 aa, Microcoleus sp.
MFGCQQVLIKPDQELQAILEFICGEANKLHNCAVYYGRQMYFKAHQFVRPFDLINKLKRNPHYGALCAQAAQQVCGAVGESIKSYKGLIKLFQEGGLEHRPKLINYREKDGLHLIAYPKQALGKKLLDGQIVIPLGQKVQAWFGLKNFKLAMPANLEYSEIRELRILPRNGCFYAEFVYKVRAIDVTLDPLLALGIDPGLNNWLTIVSNAGTSMIVDGLHLKSLNRWYNKQVSTLKDDKPQGFWSKRLAAITEKRNRQVRDAVNKAARQVVNHCLENHIGTVVFGWNKAQKDSANMGKKTNQKFVQIPTARLKTRIAQLCQQYGIQFVETEESYTSKASFVDADLLPTFGEKPEGWKESGKRTKRGLYRTAQNWYINADCNGAANILRKVSMTLGLDLSRVSRGALTRPTRSHIWVTVQRKSGETRL

SEQ ID NO: 54355 - protein, 339 aa, Rhizobium sp.
MYGRSVLLDLTIMKGLAGKVLRQVALLASEKKINVMFRLDDEKIHVTFDPEDLPDHPQRRLPVRPLAGRCLGIDLNPNWIGMAVAANLDDPSILSATSLLEHALVKLDLPIDASPELVRETLAAVADRAIGLARKHRCGTIVLEKGLGKLRSRGKNRSLNRLLNYWARTIFVQMLTRRARLAGIQVIEVWGGYSSTIGNLAYEAPDACAAACEIARRGIARLAKAKDVLPVYEEGCVSRLWKNGEVPAELKSWRDAHRSIKAAKIGYRRPHPDRPQGWRDTDATTLASDGHAVVRLRRHHRPGLLFRPMASPKPDAIVRNLSVQRRRAPAQLPSTSKVG

SEQ ID NO: 54356 - protein, 394 aa, unknown
  TnpB Polypeptide
MTAQPVLSITIWLPAAMNVGACQSLQGWFRFSRNGWITCLPFHKILPVSKMPYLYGSEVDDQAVTNAIRNYHSAWKNQKELHMGVPVFKRKSSEQSYQTNAHYHLNKKKKLVSNVRFEDANHLTLPKLGRIRFGGSPKLINALLSRTADTRIGTITVSRDAVGEYWASLSIASEEPFHEPLPKTGGQLGIDLNLINLVNDSGGGSSENQRFYGSSQKKLAKAQRKLSRMQESAKREGRSLASSKNYQAQRRKTACLHRKVQRQRMEYLHVLSKREVENQDFIAAEDLKVRNMVKNHCLAKAVSDAGWRTFLTMLQYKGEFYGKTVVLVPPAYTTQTCSCCGYVMKGKLSLTLKDRVWVCPNCHTFHDRDTNAAKNILTKGLQLAETCGPSLQSN

SEQ ID NO: 54357 - protein, 489 aa, unknown
  TnpB Polypeptide
VFDVIVPYNKGISKMFHEPDGRRHRMDISTCYVCKIQSQLDAAADKKTRELVVTGKHPVDDRLMRLTADVCLEALKFCVSVILEEWDGIITAAASTLLRKRLVDTMIHGTKKNVPKYPEFDKQFPDLPAYTRRTIIADAYGMVKSYRSNLKNWKETSPAERGAEPSIGVPSRYELTFYDQERKMSHLADGQIGLKLFNGCSWDWYYFQVSQSDADYISRMSRNRKMLSPTVYKVRGKYRVRFAFRESRKLVQDGDRLACRILAVDLGINAAASWCVMESDGTVHAKGVIRLACEEGRLNRMINRKRMYQQAGKKSRCVYRWVTEANRRLSIETAKALMDTAVLYSVDCIVFEHLDSDGKVRGRKYRERIHMWRKNDVQDRVELQAHRHGMRVSRVCAWGTSKYAFDGSGPVDRHSVYRYQHGRKIYNYSVCTFRNGKVYNCDLSAAQNIGARFFLREYERNGVEGLPPTPQRTLCTLRLLVSNGLPLAA

SEQ ID NO: 54358 - protein, 395 aa, unknown
  TnpB Polypeptide
MKLVERHIVKDNRFEDICLKSGLLYNYVLFNVRQGIFDGNYLKEYEFSTKLCKENQYDFRNLPSTVSQQVVAQAFSAIKSWMKLKKEYEKNPSKFNSKPKLPKYKRGKKQNMAVFTTSACRLKEDGYIHFIKNIIPSIKTNIGDNKLCQVRIIPQATCYVVEVIYEKKEQDLNLDKNNVLSIDLGLNNLCTCISNVGIKPFIVNGKIIKSFNQWYNKKRARLMSYIGDKGISKRLRRLNNYRNFWIDDKIHKVSRFIVNICIENNIGNLVVGLNRGWKNGINLGKITNQKFVEIPFSKLIDKISYKCKLVGISFQTNEESYTSKVDHLAFEKLCKHDVYLGKRKKRGLFQGSIGKLINADINGAIGIGRKVFGDSYISGIIDSGLAFNPVRVNIL

SEQ ID NO: 54359 - protein, 423 aa, unknown
  TnpB Polypeptide
VFGCQQVLIKPDKELKAVLEFICGESNKLHNCAVYYARQMHFKARVYVRPFDLINELKRNPHYGSLCAQAAQQTCGAVGESVKSFKGLIKLFREGGLEHKPKFPNYRTKDGLHLVAYPKQALGKKLQNSQITIPLGQKVQAWFGLKNFTIQMPSNLDFASLREVRILPRNGCFYAEFVYPVSAVKVDVDPAKCLGLDHGLNNWLTGVSNVGTSFIVDGLHLKSINQWYNKSVARLMSGKDNGFWSKRLANLTEKRNRQMRDAVNKTARLVVNHCLENRIGTLVFGWNKGQKDGANMGKKTNQKFVQIPTAKLKTRISQLCEQYGIQFVETEEAYTSKASFLDSDSLPKHGEKPEGWKASGNRVKRGLYKASNGFRINADCNGAANILSKVAMMLGLDLSGISRGDLTAPLKFRFWTLQESPSL

SEQ ID NO: 54360 - protein, 364 aa, unknown
  TnpB Polypeptide
VINLSDKHHITIHHIKLYKPSKIKQRQLNKLLKNWNKAIRSALKIVKQWGFTAYTKSHKHTYRVSRNNFNLPSQVAIEANRKAIETYKSAENAEFHRQVEVSLVNKKGFELVKKNDRYIAKIPIEGRKSIYCPLAFGKYQLNKIENPKYKLKTAKLYKYNNEWYLDLIMEYKQPKRETDTILGIDLGIVKLATFSVIDKQETILHQECVSGKELRFKRMRYKQKRKAKARSSGSNATSLITENRLCKELNFKIANRIVELADEHNSLIVFEDLKNIRKNVTNDNTLNNYEKNSWAFYQLKQLIKHKADLKGIPYQDINAKDTSTTCCVCGEKGYRLSQNRFLCDNLHLQNADYNASINIAKKAI

SEQ ID NO: 54361 - protein, 408 aa, Frankia sp.
VKAALSQRDAEKSSGIPDDALTPVPWTLPALRLEWNLEWNKAKATVAPWWAECAKEAYSAGLDQLASGLKNVTASRNGRRKGRRVGFPRFKKRGKARDSFRYTTGSYGPDGDRHVQLPRISRVKVCEPMGALTGRLADGRARLLGATVSRTTGRWFVSFTVEVDREVPAGPSRRRRTARPVGVDLGVKHLAVLSTGETIANPKHPAGSLRRLRSASRAYARSTPGSSGRRKRAARLARIHARAANQRRDGLHTLTTRLAKTHDTIVVEDLHVAGMLRNRRLARAVCDTGMAEVRRQLAYKTVWYGSTLVVADRWYPSSKTCSGCGWRNPGLTLSDRTFVCRSCGLVIDRDVNAAVNLRNLVAGSASETENARGADRKTHPGGRVAVKREPGTASAGQTGSAAPQGTAA

SEQ ID NO: 54362 - protein, 390 aa, unknown
  TnpB Polypeptide
MERAFKYRFYPTPEQETLLRRTLGCVRLVYNRALAFRTEAWYQKQERVGYSQSSAMLTEWKRDEDLSFLNEVSCVPLQQGLRHLQTAFTNFFAGRASYPNFKKKRNGGSAEFTKSAFRYRDEQVYLAKSSVALPIRWSRQLPKGAEPSTITVKLEPSGRWTVSLLVDDQTIQPLPPIDKAVGLDAGITSLITTSDGEKIANPKHFAKGFKRLRRASKALSRKQKGSCNRDKARLKVARAHAQIKDSRQDFLHKLTTRLVRENQTIVAESLAVKNMVKHRKLAKSISDAGWGEIVRQLAYKALWYGRNFIQLDRWFPGSKLCSQCGHKVDSLPLNIREWDCPKCDAHHDRDVNAAINHKAAGQAVLVCGATVRPEESKSRKAGARKQKPKS

SEQ ID NO: 54363 - protein, 367 aa, unknown
  TnpB Polypeptide
VLKAYKYRVYPNKAQEELLAKTFGCCRFVYNQTLAYRKEKYEREKKSVSRTDCNNYCNRELKAQHEWLKEVDKFALTNAIYNMDAAFQKFFKEHAGYPKFKSKHENHKSYTTNFTNGNIAADFGNGKIKLPKLKQVKAKLHREFEGQIKSATVSQAPSGKYYVSILVETEHEELPHTDKNTGLDLGVKDLCITSDGTKYWNPKTIRKYEKKLAKLQRQLSHKEKRSRNYYKQKKKIASCHEKIRNTRKDYLHKVSHEIISESQVIVSEDLQIKNMVKNHHMAKSISDVSWYELTRQLEYKAEWNKRKYVKINTFYASSQLCSVCGYQNTKTKSLSVREWTCPVCGAEHDRDINAAKNILAEGLRQIA

SEQ ID NO: 54364 - protein, 402 aa, Shigella sp.
VKRLQAFKFQLRPGGQQEREMRRFAGACRFVFNRALARQNENHEAGNKYIPYGKMASWLVEWKNATETQWLKDAPSQPLQQSLKDLERAYKNFFQNRAAFPRFKKRGQNDVFRYPQGVKLDQENSRIFLPKLGWMRYRNSRQVTGVVKNVTVSQSCGKWYISIQTESEVSTPVHPSASMVGLDAGVAKLATLSDGTVFEPVNSFQKNQKKLARLQRQLSRKVKFSNNWQKQKRKIQRLHSCIANIRRDYLHKVTTTVSKNHAMIVIEDLKVSNMSKSAAGTVSLPGRNVRAKSGLNRSILDQGWYEMRRQLAYKQLWRGGQVLAVPPAYTSQRCVCCGHTAKENRLSQSKFRCQVCGYTANADVNGARNILAAGHAVLACGEMVQSGRSLKQEPTEMIQATA

SEQ ID NO: 54365 - protein, 528 aa, Escherichia sp.
  misc_feature (318)..(318): Xaa can be any naturally occurring amino acid
  misc_feature (520)..(520): Xaa can be any naturally occurring amino acid
VKRLQAFKFQLRPGGQQEREMRRFAGACRFVFNRALARQNENHEAGNKYIPYGKMASWLVEWKNATETQWLKDSPSQPLQQSLKDLERAYKNFFQKRAAFPRFKKRGQNDAFRYPQGVKLDQENSRIFLPKLGWMRYRNSRQVTGVVKNVTVSQSCGKWYISIQTENEVSTPVHPSASMVGLDAGVAKLATLSDGTVFEPVNSFQKNQKKLARLQRQLSRKVKFSNNWQKQKRKIQRLHSCIANIRRDYLHKVTTTVSKNHAMIVIEDLKVSNMSKSAAGTVSQPGRNVRAKSGLNRSILDQGWYEMRRQLEYKQLWXEMRRFAGACRFVFNRALARQNENHEAGNKYIPYGKMASWLVEWKNATETQWLKDSPSQPLQQSLKDLERAYKNFFQNRAAFPRFKKRGQNDAFRYPQGVKLDQENSRIFLPKLGWMRYRNSRQVTGVVKNVTVSQSCGKWYISIQTESEVSTPVHPSASMVGLDAGVAKLATLSDGTVFEPVNSFQKNQKKLARLQRQLSRXISPVWEDS

SEQ ID NO: 54366 - protein, 556 aa, Escherichia sp.
  misc_feature (395)..(548): Xaa can be any naturally occurring amino acid
VKRLQAFKFQLRPGGQQEREMRRFAGACRFVFNRALARQNENHEAGNKYIPYGKMASWLVEWKNATETQWLKDSPSQPLQQSLKDLERAYKNFFQKRAAFPRFKKRGQNDAFRYPQGVKLDQENSRIFLPKLGWMRYRNSRQVTGVVKNVTVSQSCGKWYISIQTENEVSTPVHPSASMVGLDAGVAKLATLSDGTVFEPVNSFQKNQKKLARLQRQLSRKVKFSNNWQKQKRKIQRLHSCIANIRRDYLHKVTTTVSKNHAMIVIEDLKVSNMSKSAAGTVSQPGRNVRAKSGLNRSILDQGWYEMRRQLEYKQLWRGGQVLAVPPAYTSQRCACCGHTAKENRLSQSKFRCQACGYTANADVNGARNILAAGHAVLACGEMVQSGRSLKQEPXXXXXXXXXXXXXXXXXXXXXXXXXXXXXXXXXXXXXXXXXXXXXXXXXXXXXXXXXXXXXXXXXXXXXXXXXXXXXXXXXXXXXXXXXXXXXXXXXXXXXXXXXXXXXXXXXXXXXXXXXXXXXXXXXXXXXXXXXXXXXXXXXXXXXXXXXXVDIQRTPM

SEQ ID NO: 54367 - protein, 418 aa, Lactobacillus sp.
MKSMAQLEYHYGLKARIYPSDYQKQIIKVNSDASRFVHNEMVAIGKELWQLNRIKLSIDTVQDRIQQLKLRQNAKQMSNHFQFLEDKRIDSLAKANAIQNYHKAWNAFRKVHEAGVPKFHRKSYAWRYQTNCQYPKQKTARLDNGTVCFEDRKHIVVPKLGRLRIKGAQQRLLDRQGETRIGTVTISKDAADRFFLSLQLGSDTPFVPKLSRTNRQIGIDLNTENFLTASDGRTVANPRYYRTIKGKLAKAQRTLSRRQRRAKKEQRSLRESKNYQKQRLLVAKIHARVFDRRHDFLQRTSTALIKNQNLVVAEELRSKNLLKNHALAMSISDVGWRSFLGMLSYKADLYDRQFITVSPKNTTQTCHDCGFVMGSDGTEKLTLADREWICPQCHVHHIRDYNAALNILEKGLQKQQKA

SEQ ID NO: 54368 - protein, 359 aa, unknown
  TnpB Polypeptide
MKLTAKVKLQPTPEQFSALKQTLETANAACNYISEQAWEHKRFSRVPLHKLVYYDVREQFNLTAQVVIRCISKVVDSYKIDRKVRRTFKSTGAIAFDSRILKWYVDLYEVSIWTVEGRQRVSFVCGARQKEMLQGQRGESDLALIKGDFYLLATCDVETPEPQDVHDVLGCDLGIVNLAVDSDGEQFTGEVVDDNRRKFEHRRKNLQKKQTKSAKHKLKKISGKQARFQSNTNHTISKRLVQKAQDTQRAIALEDLSGIREAPVRRKQRSKHANWSFYQLRSYIAYKAELAGVPVIFVDPKYTSQTCPVCGCVDKANRPNQSTFSCVSCGYSAPADHNAAVNIAARAVVNQPLGSILSG

SEQ ID NO: 54369 - protein, 403 aa, Escherichia sp.
  misc_feature (44)..(47): Xaa can be any naturally occurring amino acid
  misc_feature (275)..(278): Xaa can be any naturally occurring amino acid
  misc_feature (309)..(358): Xaa can be any naturally occurring amino acid
MVKNLTSVSGDKDQVNMHQENTMLPRRISVSLFIDQSIIWPVKXXXXLPRQISVSFFTDQSIIWPVKRLQAFKFQLRPGGQQEREMRRFAGACRFVFNRALARQNENHEAGNKYIPYGKMASWLVEWKNATETQWLKDSPSQPLQQSLKGLERAYKNFFQKRAAFPRFKKRGQNDAFRYPQGVKLDQENSRIFLPKLGWMRYRNSRQVTGVVKNVTVSQSCGKWYISIQTESEVSTPVHPSASMVGLDAGVAKLATLSDGTVFEPVNSFQKNQKXXXXATETQWLKDAPSQPLQQSLKDLERAYKNFFXXXXXXXXXXXXXXXXXXXXXXXXXXXXXXXXXXXXXXXXXXXXXXXXXXGQIQQQLAEAETQNTATAFLYRKYPQGLPSQSHNDRQQKPRNDSH

SEQ ID NO: 54370 - protein, 189 aa, unknown
  TnpB Polypeptide
MLASNLFAVDSNGKEYPNNKYLQKAEAKLKREQKKLSRKKKGSANWEKQRIKVACCHEKVTNKRKDALHKLSSTLVKENQIICVEDLNVNGMVRNHNLAKSISDVSWGEFFRQLDYKSSWAGRVVVKIPTFYPSSQTCSCCGYQNKEVKNLNVRHWVCPKCNTSHDRDKNAAENILKKGMDMLAMPAVS

SEQ ID NO: 54371 - protein, 309 aa, unknown
  TnpB Polypeptide
MYQVRRVNIGKTDQLDELAHECGRLYSQTLVSFWRTVRHKGIWLKPKHLMRWYTSEKLHAHTSDACVQAFFASLKSWRTRRKSDPSAAPPRKRKWYFRIEYRSSALHHNDGVLTLSNGKGNAPLVLKWPWQTPKTVVIRWTGTQYEAVATYKTVVQGHPQGDRVAGIDLGEVHMAVSHDGEQTHILNGRLLRSKRQYQNKLKKIKSQIKDVEHKQTTHLISTLHVQGVQTVVIGDVREIRQDNDTGSTHKQRIHQWSSGSVRHHLTYKAEQLGMRVALGDEYTISHRSTVKVRERLDKREFWQRRKKKG

SEQ ID NO: 54372 - protein, 383 aa, Chloroflexi sp.
MNTFEYRMRPNKRQEQALMAVLIASRKLYNQGLEEMIAHYKETGTYLHLYEQDKRHGSKEHPDLPAVVVDTVLKRLHRSFTNFFHSRKVGFPRFKSANAWNTIQFRDKYNHLDGKYFVAPKHCGGRIRVIVHRPLEGKFKFARIVLRPSGWYLQCVCETEPHPLPKKDNAVGLDMGIRYLVADSNGQIIENPKHAKKSAKRLAKAQKRLSRCKKGSNRRKKAKHTVARHYERIANQRKDTLHKASHHYIKHYQTMVIEDLQPANMVQNHCLAFAIADASWGMLRHYLEGKAESASRQVIAVAPHCTSQKCSSCGEYVHKSLSVRTHVCPFCGYIADRDTNAARNILQRGLQVVARTEPASSGREGPEQSGESPSTLKREATGL

SEQ ID NO: 54373 - protein, 316 aa, Lactobacillus sp.
MLKGIKLRLYPTRTQEGQLWQLFGNNRFVWNQMLAMAKARYKNNPSSHFINEYGMNNLLKALKMEYPFLKLSDSTSLQVVNHQLAQAFSMLFKHCGGQPRFKSRRSAKQAYTGRFPASTQLVVAKRRVKLPKLGSIKTSKTGQLTTGFVKRYTVSHDATGRYYLSLQVEFPEPTPLPKTGVQVGIDLGVADLAITSDGQKYPKFQAPWEEQQGTAWQRKFDRRKHQAKVNVIQWNHNKAHLIKLELNDYKNWQQARQIKARYQRKLANRRKDYLNKLTTQLVKAYDMIVIENLKVKNLMHNHHLAKSIANASWYQF

SEQ ID NO: 54374 - protein, 442 aa, unknown
  TnpB Polypeptide
MKQRPRQKGPYDPQRITTAVTHIRLEAANGGKLAALDELAQVYLPLCQQYVTLFCTEERPNKLRAPLFATALSERWQRVAIQQAAGIARSWRTNRAQAYQDYADDLLVYHEQETEGTLETGAQEPTWREWHIPTLRQTCIQANVNVAVLEPAQDSTFDYWLTISTLEFRKQVLVPIKLAAYHREALKGKTINTSVTLNKRGDGWWLTLSYDRVVPVRTEPPAPVVGVDVGIANFLTTSDGKHYGTFHGKLRERQQRDREKRRRKAKLRTCLEKKGVKKLPSTSSKSGQRLARHVRQSINRAVNQCFKEHEGCQFAYEHLSVATMKYKARAMNAYLYASNLAHIPKQLAWNAAKRGVAAIRVKSAYTSQECSVCHYPDRANRPNQQTFCCVVCGHSTHADLNAAINIERRLGDVELQACKDRKAVKALLLQRHEEWKTQNGWP

SEQ ID NO: 54375 - protein, 546 aa, unknown
  TnpB Polypeptide
MRSINEPFVVAPPAGVRIQTRLRLSAGDEAVVQAIGDYLGRLAGNDLAWRCRLGREQDRRAARKRALTSQTSSRWAGSITRTSNDQWQRAMANLTDRRIALRRASRTIRSRLAVPVGCKQGRVRGYASRSERFAKQARLQHLQTELAQVEGRLASGRMSVCRGGRRLAKQRHSLDQAKLTEAQWRARWPTERWFLTADGEADKRWGNETIRVHPDQRWCEVKLPAPLAHLANQPHGRYRLACPVQFSHRGEEWAAQVACGAVRYDIDFLPDRGRWYLAASWRRPTPPAVTVQQAIAGGVLAIDLNVGHLACWQIDRHGNPVGVGIDIPLVLDGVPASTRDGRLRGAISRLLEVAQQRGCTAIGIEDLDFADVRQAGRETLGRGHGGRRFRRLVAGIPTRQFRDRLVQMAANRGIAVVAMDPGWTSRWGAAHWQRPLQAKYPTRTITRHHAACVVLGRRALGMRARRRPGVPAPHRRMEAAPAPRGAGVESYRPGRVHTRVRAGHDPPATRPGSSVQERKTSSGDRTRVRAQVAQDRLVSPVSADRP

SEQ ID NO: 54376 - protein, 159 aa, unknown
  TnpB Polypeptide
LQQVGTHSARRRLKKLAGRQARFQKDVNHCISKTLVLTAKGTKRGIALEDLTGITRTTVRREQRAKRGNWAFAQLEFFIVYKANQYGVPVRFVDPAYTSQRCYACGHTERANRKSQSVFLCVACGHQTNADTNAALNIALRAAVNQPMASTDRQVSAEK

SEQ ID NO: 54377 - protein, 509 aa, Nocardiopsis sp.
MNDSSGEANLLATADPYVEYQPGPDNKRKKRGFKPRPGSMVQAYRFALDPSSAGEMRLRSHCGAARAAYNWSISYVLASWDQRRAEASYNLPEDERTPWRRWSLPSLRKAFNASKRNDPRFCKWWSDNSKEAYNTGFAHAAAAFDNYVKSKRGERPGTRTALPRFKSKHKARLSCRFTTGTIRLEDDRRHITLPVIGTIRTHENTRKLQRRLTNRNARILSATVSHTRGRWFVSLQVEVERAIATPKRSEAVAGVDLGVKSLAVVADHTGQVHHVANPHHLKNELKRLRRASRKVSRRQGPDRRVGKEPSNRWREANTERRRIHHRVANLRQDSIHKLTTSLAREYGTIVVEDLNVAGMMKNRILARSIVDTGFGEIRRQLTYKTAWNGGRLVVADRWFASSKTCSRCGATKDKLPLHIRVFDCDACPLVLDRDVNAARNLAALASCTAGTGVAGDRGARAPKPRGADRKTRTTRQSRKAGAGWAGGATPAVRGKEAGDRRRSIQLTLW

SEQ ID NO: 54378 - protein, 361 aa, unknown
  TnpB Polypeptide
MKLTAQIRLKPSAAQANALLGTLEQINLACNYVSAKAFESETFNQYALHGLMYHEVKKKFGLGAQAVVRLLAKVSDAYDKDKKVLRVFKPRGAAAFDGRILTFKSDRSVSIWTVAGRQRIPYVCGERQAKMLEGRRGESDLVLRAGKWFLMATCDIAGAVPKPPVDYLGVDLGVVNIATDSDNNVYSGEVVEKVRKRNAGLRAGLQSRGTRSAKRHLKKMGNREARFRKDVNHRISKLLVARAEGTCRGLALENLKGIRERTTVGHKQRARQSGWSFGQLRAYVEYKAELAGIPVLLVGPRNTSRTCSVCGHCEKANRKSQSEFLCKHCGYSSHADFNAALNIRAGALVNAPIVAPRHKAG

SEQ ID NO: 54379 - protein, 398 aa, unknown
  TnpB Polypeptide
MGKHTKIRAKRPKLAKKVYDNCRSFQYKAEVSQQTRQNLIRTLISCQKLYNDCLNQKKQAWSRSRTNINYNDQQNELPDFKLEFPEHKDINAFILQDVLRRLHKAFANFFRRCKEGSEKPGYPRYKSRSRYKSITLGNQSGWTLTDNILEVKNLGRFKLFLSRSILGEIQTINIKLDSCKDIFVTFICNHVPKKIYPEVKTNPNHEDNSVGLDMGLIYFLADSDGQTIKAPKFFRKAEKNIVKKQRSLSRKKKGSHNRSKSKILVAKAHRKVSRQRRDFLHKVSTKYIQNYHTIYIENLSIKKMVLNHLFSKSIHDASWCLFFTYLTYKAEEAGRSVVEVDPYQTSQRCSQCHKLVPKTLSNRIHKCPYCGLILDRDTNSAKDIKWVGTTLRSKTIGP

SEQ ID NO: 54380 - protein, 342 aa, Nocardia sp.
MRDSVRGCSFGTTSASIRRPVDRLRWPGCARVVYNDGLRIRQRAHVADRPYITDSALQTRVITEAKKTPERTWPAEVSTVAPVQALGDLHTAYRNFFASVPGRRKGAKLTPPRFRSRRDNRQAIRFTRNGFSLRSNRRLYVAEVDELALRWSRELPSDPSSVTIVKDASGRYFASFVVQTDDSPLPPVQAEVGIDLGLSTFAVLSDGKTIASPRFLRQAERRLRKAQQDLSRKEKGSKSRAKARTRLAKSVHDAGWGMFTRMLEEKAHRNGRTFGKVDRFFPSTRMCSVCGAMGGKKPLHVRVWTCACGAVPDRDVNAAIIILAAGRAERLNACGGTVSPAA

SEQ ID NO: 54381 - protein, 403 aa, Cyanobacteria sp.
MLTITHRYRIYPDATQEQQLIEWMEICRGAYNYALREIKDWCDSRKCLADRCSIEKEYILSPELKFPHEIQQLNNLPKAKKEFPKLSEVPSQVLQQAIKQLHRGWEYFQERGFGFPRFKKFGQFKSLLFPQFKENPVTNLHLKLPKIGAIPINLHRPIPTGFVVKQARILRKADKWYASISLQCNISVPDPIPHGHPIGVDIGLSKFLATSDGVLVKPPKFFKRLQSRLKVLQRRLYRKQKRSKNYEKQRIKVARLHHQIDNTRKDFHYKQAHALCDAGDMVFMEDLDYRTSAKGMFGKHMLDAGFGQFRTIVKYVCWKRGKFFGVVDARGTSQECPECGGEVKKDLSVRIHDCPHCNYKTDRDVAAGQNIRNRGIKLISTVGQTGMETACADDLPGAGATGA

SEQ ID NO: 54382 - protein, 441 aa, unknown
  TnpB Polypeptide
MKATTATRLRALVFRLEPDRQQEAFMERIGDCSRYVFNWALGYREDVWLAARGAGATGVACSLRYNHLAGYLGQLRESCPFLKEAPYHCLQQALKDLDRAFDRFFAKEARYPRFRRKGRWTPSFRFPDPKQLEVNGRAIKLPKLGWVKLRRHGRPIPGVVKQVTVKCVAGRWQSSVLIEEEYALPAAPTGPAIGLDAGVVHSAAIVGTDGSERIVSLPVATPAEEATLRRMARTVARRTRGSHRHAKALLRRRRYQRHIISRVMDARHKLTTQLAKNHGLIAFEALAIKSMTQSARGTVESPGKGVRRKAGLNRGLLAQGMGETRRQLLYKALWGGGKTVQVDPAHSSQRCSCCDHVSAENRPTRECFVCTSCGHAEHADINAARNHLRAGLDIIQRGGTAVPVRGGPPKRGRRSEYLPGRRTTSIALPDSGIPVKIANAI

SEQ ID NO: 54383 - protein, 534 aa, unknown
  TnpB Polypeptide
MGKDYTNKYISTVKHETLTNQGKIDNLDPLWSHYQTLLGQFIHDMNFHLVRGQEVLKYTKAKPYQGELTVLFERATKAYQKALENGAELEPLEDILTDIEANAVQTPLSARYVQCCYSQAHEAYLSWTALLAEQVKTYLGLSSVDDSLIDGQPFLTTCYRINKDKRWYQKPILAWALDADGNLVVPTKENPAAIELEVPTEIMKFMRHLVKQARKSISLPDLSNVRTLKLDEKVAKLEVSTNAPHVNFWLKLSTLDKGKPVYIPLKNNPYYMELLKTGERVPFVQVCLNDGKLTVSPILAHEKSPLRTVGDELGLDFGMVTMFTTSTGERHGITSFNKLKIWDEILLKKTKELQAQGKPFKSDPTYNSLQSKIRSFIKNEIGRILNKLASKGYAVFIVEKLDFRGGGLSRRMNRLLARTYRNVIKDKLARLEEKFGITTVEVNAAYTSQECSKCGFVSKGNRKSQSAFHCACCGHKINADVNAARNIVKRRSFDVELRAYAREQNVRITRCLILERLLHKHKRLCRNNLASCHL

SEQ ID NO: 54384 - protein, 514 aa, unknown
  TnpB Polypeptide
MRAQTPSYVVSIKLYLPESVANLLEKSFRISNSAYNEALSFGLKRFEALKRNPTYQELLEALRLARKGIARLEKAEKTAKGLKQQVKCYNKVLFKLRKAYSLTESELQKHLAQQRRRAGSSYRQLGAGEIQVIAGQAMKTLEKVLFYQIKPHKVRFRSKFDLDVSYRNRVNTEATRLVPSDRKDMAYRLYIHKASTFVDIPVKAFNNYQQLSLLRREKIKYVQIIRKTIRGKKVYTLQIVCQGFPPSKVTKGDGVVGIDPGISTVAFASPSEVALVDLVPKNITRKEKLLKQLDRKIERSRRVNNPECYDECGKIKKGARFKRPSKRQVRLRNRRRMVYRSLSEERKKLHGQLVNRLVSQASRIRIEELGVKGLQKRSRDIRINPKTNRPYSKKRYGKAIFRAAPSALRTALETRAFQLGIEVEVISPKEVKPSQYNHVTQTFEKKPLSTRVYDLSSDYPGVQRDLYSAFLIGHIENGHYQQAQLNQDFPDFYAQMKDFLQQPIETKRLAWYLN

SEQ ID NO: 54385 - protein, 449 aa, unknown
  TnpB Polypeptide
MITLKFKYSVENEEINNRISSFQRQYSSCLHFFFNRYVENQKVSEIELRNLSKSLNHIELLDSWFIQCSIKEAKQLYENRKSLNSLDDSKKFKLIFGGKNLFSKRTKGLISKEEFKNQRLNPLYSIGEADKISNRKFRIQSSLDEICFQPNRKEHFILKLKGVKGNRLFTLKKLYELQCKKDITISYKLSKEHLYLSFEEEKLSTFKSKKIENRILALDLNPNYIGWSIIDWKSSNEFNVVSKGVFNLSRLNKKTSNKKKFENLEISKNLISKAIHYQCSIVSMENLSIESSDKGKGKFFNKLCNNDWLRTALRNNLLKRCNLFGIKFLEVRPEYSSFIGNFLFRNLNLPDMILASIELSRRAFEFYNQYISKKLKIQKNIIQPNLLDFKILYVKSLEEFGLQDVYKDLVELYYFLKKSKIMYRLSVQPWSEQFSRCFSRQSLVFKLEI

SEQ ID NO: 54386 - protein, 421 aa, unknown
  TnpB Polypeptide
LRLVQQHIIKPSHKDYQELDHLLFLAKNLYNKALYEVRQYYFQSKEDSSIKYKYLNYYALDKLLKEKNDVDYRALPTNNSQEILKLVNQNFCAFFKLLSMKRERISSYPNRVQIPKYLDKVKGRQVLVYNRTQLSQKLLKQGIFRIPKTNIKIKLNCSEKISQIRMVPKNGYIVIEVVYEVQEKEILKDNNRFLTIDLGINNLATCSSNVIEPFIIDGRKAKSINQFYNKHKANLQSSLEKNKKTSKRIQHLTNKRNFKILNYLHKASKFIVNQAVSNQLNTIVIGYNKGWKQETNLGKKHNQNFIQIPFEKLVNLISYKARLQGILVFLQEESYTSQVSFLEGDYIPTFSKDDNKKNPSGKRIKRGLYSSPKGLLNADINGSLNILRKFLASNNEDFNSPVGKSHIDWPVRIFNPQRIKF

SEQ ID NO: 54387 - protein, 400 aa, unknown
  TnpB Polypeptide
VLIAHKIALDPNNVQATYFARATGTARFAYNWALAEWQRQYEAWKLDNSQAKPSQMALRRQLNSIKGERFPWMLEVTKNAPQMAIIQLGAAFKNFFAGRAKYPKFRKKGVHDRFSLTNDQFSIDASRIRIPNLGWVRMRETLRFTGKIMSATVSRVAERWFVSITVDTQDDLPSPKAENQGAVGVDLGVSALATLSTGESIAGPKAHKVLLSRLQRLSRGLSRKVKGSENRKKAKARLSRLHARIGNIRRDGLHQITTDLTRRFHTIGIEDLNVRGMVKNRHLSRAVSDMGFFEFRRQLDYKAAQRGGMIVVADRWHPSSKTCSACGHKLEVLLLSVREWTCPECGSIHDRDVNAAINLKNLAVSSTVSACGEEGSGSGRKIGTKPASVKQESSSKATYR

SEQ ID NO: 54388 - protein, 374 aa, Hamadaea sp.
MFPDPSQEAALRATLDLCNQAANFTSKLAHQRRVFAKQSLQRLAYGQLKAMGLSAQPSIHVTRKVAGAYAALSANIAAGNLGKPGSKRRETVEGRPVRFRRDAAQPFDDRCLSWQLAARTVSIWTTAGRQAGIRFGCSDSQHAMLVAHRRGESDLVFRDGKWFLYATCDILDPEVKEPDGFLGVDLGIANLATDSDGHYYSGKAVNRVRHRSQRLRTKLQAIGTKSAKRLLKKRRRQESRFAADVNHQIAKCIVTEAERTGRGIALEDLGGIRGRVRLRRPQRVTLHTWAFHQLGQYIAYKAKQAGVAVVHVDPAYTSQECSACGYVAKSNRPNQAIFCCRSCGFAEHADRNAARNIGTRGVAVWAAVSLPNAA

SEQ ID NO: 54389 - protein, 381 aa, Nocardia sp.
MQLRYNFRVCPTPGQQIALARAFGCARVVYNDALRARRRAFEAGQRISDAELSKQLTESKATPERAWLAEVSAVVLQQALADLNTAYRNFFSSVTGKRKGAKVGPPRFRSRKDNRQAIRFTRNSRFAVTAGGKLRLPKIGDVPVRWSRELPSDPSSVSIVKDATGRYFASFVVQVDDQLLPPIDAEVGIDLGLSTFAVLSNGKRIASPRFLRQAERRLRKAQRALSRKEKGSKNRAKARIRVAKAHARVADTRRDGAHKHSTAIIRENQAVFVEDLCIKGLARTRFAKSVHDSGWGMFIRMLEEKATRCGRTFGKVNRFFPSTQICSVCGAPGGKKPLHVRTWTCTCGTTHDRDLNAAINILAAGRAERLNACGGTVSPVV

SEQ ID NO: 54390 - protein, 446 aa, unknown
  TnpB Polypeptide
MKKKDYTFYDFFLTILCYFTLNIIIITMIKAYKYRLYPTKEQEVLLSKHFGCVRFIYNWGLDFKTRYYKETNKNIGYMQIAGKAGALSNIKKENEWLKEVNSQSLVSALGNLDRAYNNFFNHRAQFPKFKKKSNKQSFQVPQHGWFDIKNNRLHIPKFKEGIYCKIHRKLPIGRQGTITVSKNPSGRYFVSVLVEINEILPEKQLPVKETTIGIDFGLKTFLTTSKGEKIYSPEFLKKNLAKLQKLSKKHSKKQKGSKNKEKERIRLARLHEKISNQRLDFLHKLSSKLISENQTICIEDLNLQGMSKLWGRKINDLSYYTFTQMLLYKSVWNGKTLIKIGRFDPSSQICHECGYRNHNLKITDRTWKCPNCGSDLDRDVNAAINIRDFGLNEFNLRQELSEVKPLERKALAKRNRKKSSSETGLDELGKKKSHSEMEARVALATL

SEQ ID NO: 54391 - protein, 405 aa, unknown
  TnpB Polypeptide
MKLTLKFKLKYDTDIIKTMSAYIAALNYVSSKEFNLNSKITNPVELSKKYYSVIRDKFGLPAQHTCSIFRDIAAAYKASRTKKHKLKNPIYFKRPFFSVVRNRSFSFDLNKLIVKITTNNGRKSFDIKLSDYHRRYINNSISYCDSTVSQDRKGRIYLNLTIDIPETEISTNGNTMGIDIGLTKFATCCTNNGKTLVINGGSIKDKRIKFLNLRKRLQHKGTLSAKRLLRKLSGRENRWMRNVNFCAIKAIINFAKENNVSYIGIEDLTNIRNSSKKLSKNLRRTINSWAFYQFKEILCYKTKMNGISVIQVDPRFTSQACSKCGYVNKENRKSQKCFKCISCGYAHNADINAASNIELLTRITRSNELSRGAINHPYTKDVDSKGLFRQLRTSLTCKLTSLSSE

SEQ ID NO: 54392 - protein, 371 aa, unknown
  TnpB Polypeptide
MKLIRTVKLKLENVNPTDLLPTFRAYTEAYNYICEIGFKEHNFDKRKLHDQTYNYCRTQFSLPSELTTQVRDQAAESIKATTKLERKKHKKFKCPKSKQMALRLTKNSFNIWFDRSEVSVLTLNGRLRCKVNLPDYFQQYFSWRRKGATLSLKKGKLFLHIVFEKEVENVSQNYDNVLGIDRGIVNIATLSDGTTYSGKHVLQVKQRYQAIRSKLQSKGSKSAKRHLRTLSMRENRFVTDMNHCISKDIVHRCVPGTVLVLEKLNGIRENSKKLRKSERAKVNSWSFYQLEQFLTYKALAKGCSVQHVDARYTSQKCSICGHTVKGNRITQSHFKCKKCGYECNADLNAAINIANNFRASVNKPIVASPSA

SEQ ID NO: 54393 - protein, 199 aa, unknown
  TnpB Polypeptide
VDLGVKSLAIVSDGRIFENINTSSRARRLEKRLRREQRRLSRKYEMRKKKGGSTATASANIEKKRLSVQRLHQRLANLRRNHENRVIHALVEQKPRFITVEDLNVTGMMKNRHLSKAVSEQRFYSFREKLRRKAGIIGIEFRIADRFYPSSKACHACGHVHKGLKLKDRIYVCPACGYTEDRDLNAALNLRDAKNYRIA

SEQ ID NO: 54394 - protein, 408 aa, unknown
  TnpB Polypeptide
MSDMMILCERHLIKSTHPFYKECDKLTFLAKNLYNATLHYQRDSFFRNEFKNFYDVNRVFVHRNQKDYRALPTRVSNQVLMLVDKSFKSYFALVKKKQSNDYSRSIRIPRYLNKTSGRCVVPYPKSALSFKNEGFVKFSKSGIVIKTKLSRKDIQAARIVPKGNHFVIEILYKAVVKPLKSETPKRVAFIDPGLNNLMTVTSNCFNPIIYNGKPLKSINQLSNKTIAELKSKLSKQGLKTSSLLKSIYSKRSRRLTDLLHKITTQLVNHLDSHNIDTVIFGHNIGQKQDINLGKVTNQNFVQIPFTQLMQLLKYKCELRGIRFIETEESYTSKCSFLDEEKICKHSSYQGKRLERGLFQTSTRKLINADVNGSLNIGRKYLTKVNMYTNQLHKDLIKFMVNPRVVTIK

SEQ ID NO: 54395 - protein, 302 aa, Desulfovibrio sp.
VYWDILAIMEILQACKFQLRPKAGQESLMRRFAGCCRFLWNKALAMEKDAYEADGKRSGYHALAGKLKDWKKEEETVFLAEAHSRILQQALKDLDRAYRNFLAKRADFPRFRKKGVHDAFRYPQGFRLDEGNIRIFLPGIGRGRYRKSRRIEGTLKNATVSLSAGKWHVSIQTEREVPEPVHPSQRAVGIDMGVARFATFSDGSSITPPHSFRKHERKLASLQRNLSKRTKFSSNWQKLKKRIQRLHRKIADVRNDFLHKLSTTVSKNHALVMIEDLKVRNMSRSASGTLGAPEKMCGPKPA

SEQ ID NO: 54396 - protein, 312 aa, Streptomyces sp.
MARRGIGGRTPVVPARLGDSNFFASKKGTRKGPKIGPPRFKKKTSRQAVRFTKAARFSITGEGRLRLPKIGDISVRWSRELPSDPSSVTVTKDAAGRYFASFVVETDDKPLPELDREETDTGIDLGLSSYAVLRGRKIASPKFFRRQEKKLRRAQRKLSRCAQGSSNRRKAKLAVAKIHARIADQRRDFIEQETTQVVRESQAAYLENLNVKGMARGRFGKSVQDQSLGMFARTLEVKCARYGRTFVKVDRFFPSTQLCSNCGALTGPKGKKGLPIRTWTCDCGARHDRDQNAEYNLRLEGRSIMAAGRADT

SEQ ID NO: 54397 - protein, 384 aa, unknown
  TnpB Polypeptide
MKAIRVIKLKFTGNHKADRILPNWLDACNWLSKIVYEQKDTNSNRLAKIYYGTVREKFNLPSQLTCTLFRTVTASYMSQKTQHKKWSLAVFNKSSIPIIWKRDFARPKQKGVTLWADKITFNDSRSLPENWKDSKISLHGKQWFFNLSYEIDIPEPKTQGVIVGVDQGIKRLFVATDSNGDKLFYKANHLNNKLSNIRKTRAKVQAVGTRSSRQLLRRMSGHEASVTEHAVHVASKRLVNWADSVGARKIVLEDLSNIREASKSKGKTLRSKINRWPYGKFTFCVTYKAASKGISVEVVSPKNTSRMCSKCGHIDKSNRDGFLFKCTSCGYTADADWNASKNIAGRFMSIGLNSIDTGRSKSPRKPGTIEMVSHNCVTCSMPVV

SEQ ID NO: 54398 - protein, 359 aa, unknown
  TnpB Polypeptide
MTFQYRLYPNKAQRKQLEFTLERCRMLYNRLLEERILAYRLERQSLSYYDQANTFSERKAHIPALKQVHSQVLQDVARRLDKAFQAFFRRVKSGETPGFPRFKPPQRYDSFTYPQGGYAIRGNKLQLSKIGALKIKLHRPIAGQVKTCTIVRKNGHYYACFSCECVTQPLPASSAQVGVDLGLLHLAATSEGETFAAPKHLCRNEKRLKQLQRAVSRKQRGSRRRKKAVGRLARLHERIANQRKESAHQISRQLVDRNGLIAFEQLNTQGMLKNHHLAKSIADAGWAQLVQYTTYKAERAGRVVVQVNPHHTSQICSHCGQIVKKTLAIRTHRCENCGYTADRDVNAAINILQRARAAS

SEQ ID NO: 54399 - protein, 395 aa, Lactobacillus sp.
  misc_feature (328)..(391): Xaa can be any naturally occurring amino acid
MLYHSLFYVQSAQQTLKEVNTIWSAWLKALKAYQANPGKFTGRPRMPKYLAKGQRHVFFVTNQNAKVKDDYLIIPKLGFKLKLTPHLKAIQRVAFKPVYGGYKAIVQYKTNRDIDYLPDNGRYMGIDPGVDNAFACVANIQKAPLLVNGRAIKSVNQYYNKERSRLKALQARYHQLESIVDTQQGKKPVYRETKAMRRITAWRNRKIRQFAHKASKRIVDYALSCGANTIVIGNNKSWKRSSDMGRKNNQNFIGIPHKVMIDMIQYKANLAGISVIRTNESYTSQTSAVDHEKPCWENGNQSRKRQGKTPINRRIHRGLFQSNNGRLXXXXXXXXXXXXXXXXXXXXXXXXXXXXXXXXXXXXXXXXXXXXXXXXXXXXXXXXXXXXXXXXYILV

SEQ ID NO: 54400 - protein, 413 aa, unknown
  TnpB Polypeptide
MPPCHSDGKIFGPCEILQVHYAKMLYNINVTTICVKYRIYPTHSQERFLCDTLEVCRGIYNSLLNTRKFEYEVNTKSLSLHDQINAVTGYKKDFPELTSIHSQVLQNVATRVDLAFKAFFRRVKTGETPGFPRMKGDGYDSFCYPGTGFTINTESIRLSKIGVVKAVIHRKVEGNIKTCTVKRQGQKWFATFAIETTVIPLPENDKAIGIDVGIEKFAAISDGTYIQNPRFFRKDEKALAKAQRKTEKYRKRSQERTQAKKVVSRVHERIRNRRHNFIHQESRKIVNEFGLIVVEQLNIKNMSKAPAPKPENEGQYLPNGASQKAGLNKSILDASWSMFRFALAYKAENAGRKFLEVNPAYTSQDCHSCGYRAKKKLSDRWHLCPKCGTSLDRDRNAAINILSLGIQRLGVNP

SEQ ID NO: 54401 - protein, 172 aa, unknown
  TnpB Polypeptide
MLRKQCRFSSMKAGRFYVSVLAEIPDSKITTNDYSEGIGIDLGLKDFAIISNGKTYKNINKSARLKKLEKRLIREQRCLSRKYENLKKGESTQKANIQKQKLKVQKLYQMMKNRHLSKTVASQKFYEFKVKLQAKCKEKRCEDLRSCIMKRKRKYVPKAISGIDDCGVYRNL

SEQ ID NO: 54402 - protein, 411 aa, unknown
  TnpB Polypeptide
MQLVEQHIIDRHDPRFAVIDPACFASKNLYNAALYILRQAYFAHEHVPNYAKLAHTLKDTAEFRALPAKVAQWTIRQVCGDWNNFWKAHSAYAKCPAKFTGQPKLPHYKPKADGRNLLVYTRQAISGPALEDGKICPSQLAIKVQTKKKEVQQVRIVPHASHYVVEVVYPVKPKSRTANKLYPKWAASLDLGIDVLAAVTSNKKGIIPFLVNGRPLKSVNAYYNQCRADLQASLPKGQYSSHRLTALTDKRNRKVDHYLHWASRTIVNWMVRERLGILIIGHTQGWKQAVNIGRVNNQNFVGIPHSRFIHMLTYKAQLAGIKVIVKEEGYTSKCPFLDLEPIRRHAEYCGRRIKRAEFISAQGHLIHADVNGSYNILRKALPTAFAHGIKGVVVRPVRVQPVRKLVHWHCL

SEQ ID NO: 54403 - protein, 389 aa, unknown
  TnpB Polypeptide
VTTLTKTLELKLVEPNAHKRRKLRETREAYQQALHDAFDAGCTTQTEANDVVVNYKLSGYAKNALKKYVPQLTTTYNAGELHDAHPVRFTNEGLRLDHKPENAIEWYVKIPHHEDYHLWMPAQPNPEQRDWLEALNAETPRWARVGYSSGTERGIFTSPQPATQRAVPRCPTKNGHPSVSILGKRRSSRCVTVTTTVARPLPNYGPTKGRPFVGSARPTSPPRGDFRHAVANVSRESFGDDLWNQIDDVFHRVTREVVDYAESVKNPVLVLENLTYIRESMDYGEYMNRRLHGWGFAKLHAQIRYKAVEKGIPVKTVNPRNTSKECHACGEVGYRPQQATFKCTNDACWMGEYQADVNGAVNIADRYLSGESRFREHENDDDSAEDGGV

SEQ ID NO: 54404 - protein, 442 aa, Mycobacterium sp.
MSRFEVPHGWCVQAFRFTLDPTEEQARLLARHFGARRKAYNWTVAALKADIEAWHSTGVETEKPSLWVLRKRWNSVKNEVCVNAETGQPWWSECSKEAYADGIAGAVDAYWSWQNSRAGTRNGRRVGFPRFKRKGHDTDRVCFTTGAMRVEPDRRHLTLPVVGTIRTHENTRRIQRLIRAGRARVLAISVRRNGIRLDASVRVLVQRPQRPRATQPDSHVGVDVGVRRLATVASADGTVIERIANPRPLDTALRKLRRLSRARSRCMRGSRRYRKRTVELSRLHRRVNDVRTHQLHVLTTRLAKSHGCIVVEGLDTAGMLRQHGLSGARARRRGLSDAALGTPRRHLSYKTGWYGSTLVVATRWFPSSKTCHACGHVQEIGWADTWRCGSCSITHQRDDNAAINLARYEEPDSVVGPVGAAVKRGADRKARRSRAGGREARK

SEQ ID NO: 54405 - protein, 288 aa, Campylobacter sp.
IPNLGEVKLREKLRFTDKINSATISQKANKFYASFNVEIDDSEFKRTHKVKIENNRTLGVDIGLKSSVSLSSDLEIKAPKPLNKLTRKLIRVSRQLSKKQHPKTKGDITKKSNNYKKQSIKLSKLHTKIANVRKDFLYKLASHLVRNYANFGIENLNVSGMMKNHRLAKSMSGVSFFEFKRQLTYRVEYYGNNVIEADRFYPSSKTCSFCWGIKNNLILKDRIYVCNNCGLKIDRDYNASLNLARLATQKIGLVQAEFTPEDLKALLDDLAINNLITSKVETGIQQKS

SEQ ID NO: 54406 - protein, 377 aa, Streptomyces sp.
VHGVKVRSCSCSSVTTTGCTRTPRSAARWRGRSGVLGWVWNDCLRDREEAHAAGLPFVTSAELFRRRITQAKRTTERAWLSEVSAVVLQQSLRDLDAAYKNFFDSLKGTRKGRKVALPRYKSKKDTRQSIRLNTNAFAIRTNGTVYVAKIGSIKVTWSRPLPAAPTSLTVTKDCAGRYFISFVVDTEPDILPELDAEVGIDLGLSTFAVLSDGTRIHSPKFLRRAEKELKRLQRELSRKARGSKNRTKARIRVARQHARVADRRRDWHHKASTQIIRDDQAVYVEDLAVSALARTRLVCGVKGGPKPLHVREWTCRECGTVHDRDDNASRNTLAAGRADRLNASRSAGKTGTKVPAQRVEAGSHPDGHPTVAGTPGS

SEQ ID NO: 54407 - protein, 262 aa, unknown
  TnpB Polypeptide
MLSDKIDYYKETKQKLNNTPAQYKKEFEWLKEVDSLALANAQMNLQTAYNNFFKRPEVGFPKFKSKKNHNYSYTTNNNPRNDGGKGSIQISDRYIKLPKIGLVRVKKHRDFDGLIKSVTVSQNHSGKYYISVLVNQEDKEKLPISNNEIGIDLGIKEFCITSDGEMIKNPTYLRQSEKKIKKLQKDFSRCEKGSKNREKCRIKVAKQHEKIVNQRKDFLHKLSTRIIRENQRIESDWKFDMRNEKEMKKNWNKFRGLADDKM

SEQ ID NO: 54408 - protein, 406 aa, unknown
  TnpB Polypeptide
MKTLSQHIRKLNKKQFLVLRELCRHSNSLYNCAVYCIRHHFNQTNSYIGYAKLYHELKVNEHYLAMPSKMAQQTLRLADKDMRSFFALLNRKRKGEYGADVRIPRYKKANSFFNLILPNDQVSLRNGMLKLTRDIKLPFTHDIKGTIKQIIISPHMEGKRFSMCLQYEEATTLPLAINKNNFLSIDLGINNLIACASNVGPSFLLNGRPLKSYNQFYNKRISEMKSELEKTTKKKWSMSMERLSLKRQRWINNYFNQSIALLMKYCLKHEIGMVIIGYNAEWKQEVNLGKTNNQKFCSIPHFLFKRKLQDKCANLGIEFIQQEESYTSKASFLNGDPMKNGSEFSGKRIKRGLYCSKDGRIINADINGALNIARKVFPEFSDEGIEALIVEPVKLNINSQNLVFVQ

SEQ ID NO: 54409 - protein, 368 aa, unknown
  TnpB Polypeptide
MKLVANIKLHPSKEQEILLRSTLERCNEACNWLSEQAFGAKTIRQYDMQKAFYRELRARFELTAQVAIQCIKKVADGYKIDQKSMREFRKHSAQPYDDRIFRVMTGDMISIWLLGGRQKIAFVCGDHQRKLLEHRKGEVDLMLVRGKWYIACVCDFDDPALLTPDGMLGVDFGIVNIATDSFGNEYSGAKIEAYRERAVKRRATLQRIGTRAAKRRLRKLSGIQQRFQKHENHCISKAIVSTAERSGLGIRLEDLTHIRSQVKARKEQRKRLHNWSFGQLRTFVQYKAKQAGIPCEIVDPRNTSRECAECGHIDKRNRKSQSEFRCVACGHSNNADHNAARNISGRGAITHPMFAHTFVPCVVESPRL

SEQ ID NO: 54410 - protein, 395 aa, unknown
  TnpB Polypeptide
MLRGMKIALDLTDEQEQQMWKSVGVARWSYNYAITRCKEQYLKYLDDNTLPKTLTEGQIRKELTVLKTTTHPWLKEVGSNVIKQAVKDWSDARSRFFKGLGKTPKYKSKTTSKPSFYVNYESLIRVEGGFRGERLGIIKTTQPLPRIPNGTHYKNPRISFDGKYWYLSLAYEVPEISVELTDLVIGVDLGVKTLATLSTGEFIENINKSRRVMQLEKQLRREQRHLARQLQANTKGYLTTENGGRKPIYKRSLELCSNIQETKRKIKLLYRKLHSIRMNHLHQTTSYLVKQLPKGIVIENLNVRGLMKNRHLAKHIQNAMFSEFRRQLDYKCLQYGIYLVVADRFYPSSKICSYCGNIKSKLNLNERVYKCSSCGLKKDRDLNAAENLAYYFYRG

SEQ ID NO: 54411 - protein, 370 aa, Nitrococcus sp.
VKQRWTFRCYPTCEQEQTLVRTFGCARFVYNRFLAERTAAFRRGERMGYSQSSAALSKLKRDPDYLWLNEVSSVPTQQALRHLQAAFCNFFDKRTGYPSFRRKDGKQSAEYTRSAFKFEIGNQRLVLAKLGRIKVKWSRRVPVDPTTVTLIRKPSGRYFVSLVIDVQPAPLPVTGESVGIDFGISRLATLSNGERVANPKYSYRYQRQLKRQQQALARKTKGSNRYRRQKQRVARVHDKIANSRSDTAKKLAWSLVTRFDTIYVEDLNLRGMVKNHSLARSLSDAGIGQAIRTIETKAAMHGKSLVKIDRWFPSSKMCSACGCLRSSMPLSIRRWACDCGAAHDRDENAARNILAVGQAVTGRGASVSLH

SEQ ID NO: 54412 - protein, 362 aa, unknown
  TnpB Polypeptide
MLKTFKYKLDPNRTQRLALEKTLDICRELWNLALEQRKMQPMSPFAQMRELTELKQAFPKYKQIHVHVLQNVVKKLHRAFERMWELGAGFPRFKSKRRYRSFSFNNTGFRLSGEHLQLSKIGNVKVRLSRPIPEGSVVKSLIVKQTASGWYACIAVEVPIQPLPPSDLAIGIDLGIENFAALSEGTMIPNPRFYEQSQDELRVAQRRVARRKKGSHRRRKAVVILKKIHEHIQNQRLDWMHKITTDLVNRFDTIVLENLHVKGLAQGILGKQVHDCGWSKFITLLKYKAESAGRRVIEVDGRYTSQECPACGSKKKKSLSERTHECSECGLVLHRDTAAAQVILGRMCPLDAKIGEVIPCLV

SEQ ID NO: 54413 - protein, 362 aa, unknown; identical to SEQ ID NO: 54412
  TnpB Polypeptide

SEQ ID NO: 54414 - protein, 213 aa, Clostridium sp.
LYCIKTPSNKYYVSILADTENIKLPKVENKIGVDVGLKEFAICSNGDRYDNPKWLRKSEKRLKKLQKDLSRKKKGSNNLYKARLKVARLHERITNQRKDFLHKLSTKLIRENQTIVIEDLKVKNMMKNDKLSKAIGEVSWFEFRRMLEYKAEWNDKKIVIAPSNYASSQLCSDCGYKNKEVKNLGLREWTCPKCNTKHDRDINASKNLLKLAI

SEQ ID NO: 54415 - protein, 374 aa, unknown
  TnpB Polypeptide
MNRTITYRLYPTDEQAVLFAKTFGCCRKVWNLMLADRERAYAEEKRTIKPTPAQYKADYPYLREVDSLALANVQLDLEGAYRRFFTVKGTGHPRFKSRKHGKESYTTNNQNGTVAIRTDISTIRLPKLGFVKAVLHRMPEDGAKLKSATVSRTPSGKYYCAVLFELPNPVPQEIEDHTANAIGLDYKSDGFYVASDGTCPGSPKLYRKAQKKLAHAQRGLRHKVKGSHNYEKQKVRIARKHEKIANQRKDFLHKESTAIAKRYDLVAVESLNMRAMANKAFGNGKATLDNGWGMFIDMLDYKMSERGKVLVRVDKWFPSSQVCGDCGCINPDVKNLNVRKWSCPACGAIHDRDINAAKNILKEGVRMYRETVNT

SEQ ID NO: 54416 - protein, 385 aa, unknown
  TnpB Polypeptide
MSLKGYKIRLYPTKEQEEKIWKHINGCRFIWNYMLELQIKNHEAGNKQIKNNDLIKLIPQMKKTEEYAWLSELSNGSMQATIGKLTDAYSRFFSNIAGYPKYKSKKSAKKSYQIRSDCMYFKENTVFIQKIGHVRYKSDFVFKTGPNIKHYNIRLHFRNNKYILTFTMESENQATTCKSGSMGIDLGVKELATVAFNDECFVFHNINKSKRMKTLDKRIRTIQRSISRKYKEAKKKTGRFEKSNNIIKQEETLRKLRNKVTNIRLNYIHQTTRFLVNKNPERIVMEGLDVAHMLKDKHLRKQIQDQNFSEIFRQMEYKCQSAHIDLVKADRYFPSSKLCSSCNHLKPELKLSDRIYTCQYCGLRIDRDYNAAINLMKYMTQTEES

SEQ ID NO: 54417 - protein, 378 aa, unknown
  TnpB Polypeptide
MDMNIKRSVTILLPDDHDLRATVAAFQRVQQQLAEPCYNRGQPLSAIALHHAMYAKVIGTLNSQMTCSAIRLTAGAYVSARSNSKPAQSPFQFHKARALFLVGARGRDADFRTDGTLSIWTVAGRKHISYTVPKAFQATLAAATEIDSLTVIERHGRLLGRVTVTLDAPEPVGIHPVGVDLNETNALVAVDPDGKTLFVSGKAVKVANKRNYKTRKRVQQKLATHKAEHMDTRSVRRVLKRLGRKRSHRTRTFAQTTAKQLVTFASPDAVLVFEALTVPQPHKGVVKSKATRRRLAVWQRQLIRQAVERKAQEVGMVVMTVNPAYTSQQCSRCGLLGVRKRHAFTCPSCGHTAHADVNAAVNIRNRYTAFRSSGLPVS

SEQ ID NO: 54418 - protein, 390 aa, Oscillatoria sp.
MTQRAYRYRFYPTAEQEGLLRRTLGCTRLVYNRALAARTEGWYERQERIGYKETSALLTEWKKEDELSFLNEVSCVPLQQGLRHLQKAFANFWAGRAKYPTFKKKRNGGSAEFTKSAFRWKDGELFLAKCSEALPIRWSRPLPQGESPSTVTVKLEPSGRWLVSLLVDVEIDKLPVSPNKVGLDLGVSSLVTLSTGEKVANPKTFKAKYKRLRQAQKALSRKLKGSNNWHKARIKVAKLHAEIADARKDFLHKLTTQLVRDNQVIAVEDLAVKNMVQNRKLAQSISDASWGELVRQLEYKSEWYGRELVKIDRWFASSKRCSNCGHVVQRLPLNIREWDCPECGYHHDRDVNAAINVLAAGQAVSVCGATVRPEESKSRKAGATKQKLRS

SEQ ID NO: 54419 - protein, 259 aa, Gloeobacter sp.
MKYKIRMNQMLTVSCKLNPTPEQASKIDATLKAFADACAWINVSTPETLTNKTNMQKLVYQDVRAHFGLSANLTIRAIARVCANRKTARLKGRAVKGFVPTSADYDARIFSFNEKNWSVSLTLLSGREHIALAIGNYQRHLLAGQQPTSSTLVRRKDGSYYIQIQADSEPPEPVEPQECLGVDLGRTDIAHTSRGEHFCGQQLKQVRDKYTRARAQLQHKASKGTRSSRRRCRQLQQRLSGRERRFQAHTNHTISFRLV

SEQ ID NO: 54420 - protein, 491 aa, Anabaena sp.
MPTLTYVKGLPTPREELNSLGLTKFEMFLTAYSSVFHKAACETANYLLAANSFNNSSWNTHLQKTYGISKRHANGVISLAQGAVNASKEHRKLHIKTLEGKLKSLNSWITKSEKKLSDSAKFYAKNNWHNSKTGCRFPLSCSLKFRNTNWNNLRFEIHNKKRRAYKLAKQIETLKTSPIQTIIPRNQVFIIGSKDEKFGNQVCQWDGNTLKFRVPACLESKFGKYVQTTLGNFNRLHYRLPEDGAKTWHFFRKHNKWNAAVQFTPKPVERVSKHSAYGCIGIDMNPSSIGWAYVDKDGNLKSHGQIPLQMGLPSGKQDAQIVEACLRLARLAKTFACPIVCEELDFSTKKEQLGERGRKYARMLSGWAYSRFYQLLDSIGSNRGIYLMKVNPAYTSLIGMVKYARQYGLPSDCAAAIAIARRGMRLTENIPSSITAYLSVKDGKHVWSLWNQLNRLIKKSSIKRHDFYAISNWGSLVKRLSEESGTSKPRR

SEQ ID NO: 54421 - protein, 191 aa, Crocosphaera sp.
LRKYADQGKIRIIKNEAGQRLYDVQSYIDGAARASIICYCRVSSSKQRDDLERQVSFMRSVYPEVAKFLTDNFDVILLPTFEVSEMVVKNSRKIRSKSVRQMLNWSHYRFKEFLKHKAFETGKRVIDCCEAYTSKTVSWTGELVQNLGGKKVIKSQFENKAMDRDLNGARGVFLRALVDTPSLKDSLSVHC

SEQ ID NO: 54422 - protein, 337 aa, Lactobacillus sp.
MAQKTKKNKRLRYQRIRQNQTEQQYDYLTERHVIRPSHPKYSVLDHFSHLANNVYNQGLYRARQALFKGVWLSYNKLDASLKQSKRQKDNMIYGSMKSVHLVQQQLKLVARSMDSWNKARKAYAKNPGKFTGRPKLPKYRTKGGLSTIIVDNQTAKLRKNGYVEIPCMDKFKIKLAHPETTAIQEVRIVPQNRRFIVEVVYKTNQTVQYNPDNGRYLGIDPGVNNAFTLVTNVPGITPVIVNGKPIKAINQFYNKQRARLTSIHDLLGQNRSSRRLTSLDFFRNQKMNRFAHEASKRIVDFALSHGLNTIIIGKNKRQKQRSRMSKQNNQNFIGIPH

SEQ ID NO: 54423 - protein, 438 aa, Rhizobiales sp.
VRTAYAQASPNGIPLRQKELRDLVKGRFAGGIVDAWVLHCATLEGLGLRKLNPDGDILFGSRKEFVRRSKGLITNAEWKERRLGPFCSRGDATQLGNRHFRLSSDGRTCIFQLYGRKITLALPEMFGNAGRVLREAAALAAAKKINLTFRIDSQKLHVTIDPQDLPKHPERRSPVAAVRGRALGIDLNPEFVGLSVVSNTVDPSKLSETTLLDHNLVQVAKGGTLPAELVRETLAAICDRAIGMCRKWGANLIVFEKGLGKLRSGGRNRSLNRLLNFWTRSLLINMMKRKAGLADITVVEVWGGYSSTIGNLAFEAPDACASAAEIGRRGLALSAKRKDVLPEFEEGWLSGRWKDQTLPVEFGSWKDLHQAIKTAKIGYRRPHPTPSDPDTVCGRYAVRRLKHRHRPGLVYLARDRVSDGASKRLCAGSDFSDPTFKS

SEQ ID NO: 54424 - protein, 380 aa, unknown
  TnpB Polypeptide
MISYKYNIYKSKNSKHLDKMLRECSFVWNHALYLQKRYYKRFGKYISLGKLKSHFAKRIKRALLHSQTVQEILERLDNSYKKFFKKLAKRPPKFRKAEKFTSFVFKQGGYSLNGNVLTINKVNKRFKFSFSRKYEGNVKQIRILRETCNRYSIVIVTDSKSNVTYGKTRDGASIGIDFGLKTYMTLSNGKSIVSPLFFNRYQKKIKKCNRRLSRAEKGSNNRKRRSFELQQTHRRIKNLRNDFQWKLAHQLCKRYDYIFLETLNVEAMKRLWGKKISDLSHSMFVDKLKYIASKYDVTVHQIDKWYPSSKTCKCDYIYKDLSLKERTWICPKCGSVNERDLLASQNILRKGISELESTGKSGCGNTEVLYDCIQESPMFR

SEQ ID NO: 54425 - protein, 406 aa, Microcystis sp.
IEFKVKATQQQQIAILEAIRIGQFIRNKCLRLWMDSNREDKINYASLCRFVTTLSNDTDTPFVGKLNSMARQASAERAWFAISRFYDNCKKAHRPRRIEFGERTEQEGLAQKGYPKFKKFSRSVEYKTCGWKLSEDKKSIQITDKTGIGKLKLVGSDNRQILDKSLIKRIRLIKRADGFYCQFVLDLERVEPLDSTGKEIGIDVGLNHFLTDSNGEKVNNPRFLRKAEKRLKKAQRQLSKKKKGSNKRQKQQSKVARLHLKVSRQRKDFVVKTAKALIQSNDLVVSEDLKVSNMVKNRKLAKSISDASWSMFTNWLDYFGQIHGKFVIAVNPQYTSQECSNCGSIVKKTLSVRTHICSCGCVLDRDENAAINILHRANTVGRTEIQARLQTTHCLLGESLVDKVTG

SEQ ID NO: 54426 - protein, 179 aa, Microbispora sp.
MARKQRGSNNRAKARAKVARAHTKVRDARADFLHRTSTRLVRDHDLIVIEDLNIKGMVRNRCLARAISDAGWGEFRRQLEYKAQRFGRHLVVIDRWFPSSKTCSACGHLLAELSLSTRHWTCPDCGARHDRDVNAAKNILAAGRAVSACGADVSHSGSSRVRSAAKQEARPVRAGVLRH

SEQ ID NO: 54427 - protein, 289 aa, unknown
  TnpB Polypeptide
MYNACLESWRGSYAWWREHNPAEDAKFPRDRNLSRYDLFKMFTQVRAEDARWAGLDTRVGRGVICRFDRARKAFYDRCNTGRKAGFPRFKARRRWRSIEIPDASPSMVRAPGEGGRWWRLRVKGVPSVRFADRGGRLRTALDQGRLVELRIVRTSLRVELHAVFRLPPVPASTGEPVNPVGMDKGLTNRLALCDGSYEEAREPERAAIKRRQRALSRAKKGSRTRAKKRQALARAWRRETERARNADFRLAHRLVTDHDGIGVEALNVAGMLRGRRSSKNNVRTAMVRS

SEQ ID NO: 54428 - protein, 222 aa, unknown
  TnpB Polypeptide
MYSHTLQQVIINVIQNYKSYIKAKEDYEKSKNKYIQEKIRKLQQINKKAKENREKEKVKNTKRIEKMWKYRKNYMNTYMHKVSKMVIEYAKENKCVEIVIGDLKRIKEGMKGNKSFVQMPLKELVRKIEYKAKLEGIKVNKVGEEYTSGVSAIDKEEIKKENYNKKRRISRGIYISKEGKKINADINGSLNILRKYIKKSSPNQEIAMDNGREQRPLKKRVA

SEQ ID NO: 54429 - protein, 476 aa, Mycobacterium sp.
MARHTTFRFCLDPTVEQREVLARHGGASRFAFNQCLRMVKTALTQRRTDAGVEVPWTGFDLINAFNAWKKTEDAGRIFTVDSQGAAEVAVTGLPWRGEVCQQVFEEAAVDLGRGLQAWSDSRSGKRAGRRVGFPRFKKKIGAIASFRLRNKHSKGKLPAIRVGDDNWARSVTLPGIGQVAVHDDTRRLRRMIAKDRAKILFATVSYRGGRWWCALNVEAADLHPLQQHRPGTEDAGGWVGVDRGLSEFLVAATIDGTEVARISDAPKALAVGLKQQRRLAKSLSRKQKGSHNRKDAAARLGRHHHRVANVRRHFLHQVSGELVKTHDRLVIENLNVAGMLANHRLARAISDAGWSQFARLLKYKQAWRGGQLLEADRWYPSTRRCPQCGVVDNAMTLADRVFTCSCGYCADRDTNAAVNLAHWGQAHHDDLHRTPDPQAGGRATNARRRDGTGQHPRVGETSSNDAGTDVHTAPAA

SEQ ID NO: 54430 - protein, 227 aa, Nostocaceae sp.
LDVGLKEFYTDSNGHSEPNPRFYRTGEKRLKFYQRRVSRKKKGSINRKKAINKLGRVHLKISRQREEHAKRIARCVIQSHDLVAYVREACAKRIDLRIKNLVKNHCLAKSINDAGWYQFRKWLEYFSVKFGRITVAVNSAYTSQECSNCGAIVKKSLSTRTHVCECGFVLDRDWNAAINILKLALSTVGHTGTWILDPFAKRAGGITLQEIRPLLMLEKSCMSKLGL

SEQ ID NO: 54431 - protein, 389 aa, unknown
  TnpB Polypeptide
MMVYMNLRGVKILLKPTKEQEQKFFDSAFYADLMLNTALQWNIDYYNSEGKFYSYFDMLNKLPAFKKENPDFSIPSVIALQGACKDVRNALDRMKSGNRFPRFKKAGKYLSFLVQNGNFPYIRANYVELPKMGKVKCKHCHWLTKDKTECQYIRMKTYNSRVKYDGKYWFLIFAIEVDITADNTTDEVVGLDLGIEKTITTSSGVVYSNINKTRKVLILQRRKKRLQRKIARKYELNKEGKRFIKTKNIKRLEKQVRLIDRKLSNIRENYNQSIVNDIISKYPKRIMIEDLNVKGMMKNRHLARAIQEQQFYRIRQLLTEKALNTINIQIGVVNRFYPSSKLCHTCDFKNKYLKVSDRIFRCPNCGSVIDRDYNAALNLRDCDDYKLAF

SEQ ID NO: 54432 - protein, 368 aa, Actinomadura sp.
MAQLVKRAYKYRFHPTPEQTQELARTFGCVRLVYNKALEERIRAYTQQGRRVSYGESSAWLTAWKRTPEYGFLAEVSSVPLQQALRHLQAAFTNFFAKRAKYPVFKSRKRSRASAEYTRSGFRWRDGELTLAKMDAPLDIVWSRPLPAAAEPSTVTVSRDAAGRWFVSLLVGEKIRPLDPVEQSVGVDAGITALVTLSTGERIANPRHERRDRKRLARAQRALSRKAKGSANRAKARLRVARAHARVVDRRRDFLHKVSTRLVRENQTVVIEDLTVGNLVKNGSLARAISDASWRELRAMLEYKAAWYGRDLVVIDRWFPSSKLCSACGARQEAMPLHVRDWACGCGTVHDRDVNAAKNLLAAGPAER

SEQ ID NO: 54433 - protein, 412 aa, unknown
  TnpB Polypeptide
MRSQKLRLKLTKEQERLAWWYSKVSRNFWNLLVDIDKRNNRGEFDDILSNNGNKSYHSNFYDREIYSLSQSDYTSLAKIVVAKGYEEDSEKWSWYYKPNQSFIYNFLARELVKIRRQNKGKLNFRSKDKVQPNFNVTCCISSNKKRLSRIYLKANGKLQIPSLGDTKFGSVRQDFDLSCKKQVANISFDGKYWYLSYTEDVETQITDLPDYTDGIGVDLGIKTLATMSDGSTVPNIKIFRRVRTLNKRLKRLQRKVARKYLINKCNKHNKTKNIIKLERQIQLIHRSIKNIRINHIRKFVSELVKKQPQFIAIEDLNVKGMMKNKYLAKDIANCSFYTIKEHLIRKAKERYIAVRLLDRFYPSSKTCSSCGHYKTDLKLSQRVYYCNYCQEKIDRDFNASLNIAKTDRYVLA

SEQ ID NO: 54434 - protein, 432 aa, Palaeococcus sp.
MKRSITIKLQPSKTQEKTLKELALISSKVWNRVNYLRRQEFFEGKPIDFLKTEKIVYEEFKAEIGSATVQQICRKNAEAWRSFFSLLRNKRNGELPKWLKPKPPDYIKEEGLIVLRNDQYRIEGNKLILKGLGKFKRLEVQFKGRIHLKGKQGRLEITYDPIRQKWYAHISITLEKKLQGEEWVEVPRQPLGNLSAGIDLGVNNLMAVYVENGESFLVNGRPLKSIAFYWQRRIADYQSKLNKSGAKKSRKLSRMHQKAKLQARHYINTAVRQTVERLYRLGVSRIVVGYPKGIARNPNKGKKQNYLLSHIWRFNTVIKRLKEVAEEYGIQVLVVNEAFTSKTCPVCGKPHEGARFVRGLFKCPATGLIFNADLVGAFNILKKGVKTITPSLPGLTASRGNWPKARPEGFEEPDSSWVLVRTPQTSLSLARG

SEQ ID NO: 54435 - protein, 326 aa, unknown
  TnpB Polypeptide
MLKTHREDGRKTGRLKWQGAGEFRSVAYQSEGFNVNHTTGQEVGTLTLSKIGDVPIRAHRDLPDTENVKRAILKKERTGAWYACFVVEANAAEKPDPADIDPADCIGVDLGVLSYIHTSDDLAVDCLDLSDEYDRYAHAQRSLDRKEHASGNWENQRQAVARAKRRIKRKVLDFQHKLSTWLVKEYDVVAVEDLDVKPMLETSQSARNKQDAAWSQFLDLLKYKGELYGTHVVRVDARGTTKACNECGVETSKLMWVREHSCPACGHTEDRDLNAAKNVLDRGLNSLHVGAGCSESTPVQTVLPAFACQSRRADAKDVVEAGSPAA

SEQ ID NO: 54436 - protein, 174 aa, Exiguobacterium sp.
TDDDTTRFFGNGRKNKYMKRKFRAERKALGKKKKPKAIKRRNQKEQRWMRDKDHKVSRAIVDFARQKKISVIRLELLANIRQTARTSRKNNQNLHSWSFYRLASFIEYKAALSGIKVEYVNPAYTSQTCPSCSVRNKVRDRVYTCACGFKGHRDAVGAMNIRYAPVMDGNSPSA

SEQ ID NO: 54437 - protein, 195 aa, Enterococcus sp.
NLGITDFAILCDGQKIDNNKFTSKMEKKLKREQCKLSKRALLAKNKWSKLFEVKNYQKQKRIVARLHEKVMNQRNDFLNKLSTEIIKNHDSICIEDLNTEGMLRIHKLAKSIPDVSWSSFATKLQYKADWYGREIIKVDKWFSSIQICSECSHKGGNKTLEIREWTCPVCHAHHDRDINASINILNEGLRIQSLA

SEQ ID NO: 54438 - protein, 307 aa, Methylorubrum sp.
  misc_feature (205)..(205): Xaa can be any naturally occurring amino acid
  misc_feature (281)..(281): Xaa can be any naturally occurring amino acid
MSDATQVRSYKYRLRPNAAQSAALDAMLRDFCSLHNACLQQRDEAWRRRRKRLRYADQAAELRGVRAEEPALARWSFTALQQVLRRVEQSYAAFLSGKRGRPRFRAAARYHAATFRVGDGLRLRPNGRIAVLGVPGEIKAVWHRALPPDARLGTAILTRQSGKWHVVLSVEAAFAAPGGAGDVGIDLGLSCLFATSDGHREPIPXGPLQAGLAPPGEGQTAARLCLGADRAPAARSRPQALARTGGGSPPPRLRGPEHGRAQALAPGPVDPRRRMASTRRXRPSRSRCAGMPAPVGVTSTATSPRRR

SEQ ID NO: 54439 - protein, 422 aa, unknown
  TnpB Polypeptide
MLEEKNQKIKNTLSVTRERRSQMDCHVILVKVQESRLSRAKYEKIVRCFLEAKWLYNAVLSSTEDFPRDGIETVVVKGKDTFEEREINTLSAQMKQDVVDSVKQNVFNLSKVKKKGLKVGRLRFKRECNEINLKQFGKTYRIKSHNKISVQNIGVLVVNGLEQINLDEVEFANAKLIKKPSGYYIHLTVYTKKQSEILTEKEILGLDMGIKDQLTFSNGVKVNFYLEESEQLKGLMRKLSRQHKGSNQYKQTLTRIKKIYEHLNNKKNDVVNKLNSVLKQNYVICFQDELLNSWKRKKSKQKFSFGRQIQHGILGRVKSNLRKNTSNVMLESSVPTTQTCPECGCLTKHGLGKRKYHCNHCGYENSDRDVHSANMMVLLSGYGTYRSLNTDTVSTKKMAGLLDCLSELGVVVSTNSMEAHCL

SEQ ID NO: 54440 - protein, 280 aa, unknown
  TnpB Polypeptide
MYFVKNNPKDCRCERHRINIPSLGWVRIKEKGYIPTTKDGYVIKSGSVSIKADRFYVSVLVDILGNPVEVPGDNPDNGFDEGIGIDLGLKDFAIVSNGRTYKNINKSARVKKLEKQLIREQKRLSRKYENLKKGESTQRANIQKQKLRVQKLHHKLDSIRTDYINKTIAEIVKTKPSHITIEDLNVRGMMKNRHLSKAVASQKFYEFRVKIKAKCNENGIELRIVDRFYPSSKLCHCCGCIKKDLKLSDRTYKCKCGYVEDRDFNAALNLKDATTYKVAQ

SEQ ID NO: 54441 - protein, 461 aa, Moorea sp.
VKTTYQYKFYPDTNQKLELNEWLRISRYWYNRQLGDRFDWWQMNRTRVDACPLVSSIAPVREKPNYYTQKQQLPILKKDLVKVLHSGELLDFSRVDSTVLQDISKRVDKAFKRFIVGDSKGGKSGKPRFKSSSSFRTMTFATAQDSWIKLTRENWLYLRLPKLGIIKVRMHRPIPDGFVLKQVSVTKKADGWFIQLILEDVNVKEENHDLIIPTWENSLGMDAVLHEDVYLATSEGEKLPSLKPIAKNQAKLDRISTKRNKRKHGSKARRKLAKREAKQHLRIARSRQDFQDKTAHRLVRTGKKVFFHEALNLKGLTKRNKTKQDKDGTYLPNGQSAKSGLNKSWSDAGFGNFFKTLDYIASKAGAVVISLNPAYTSMVLSYRDEIIFTDCSSRNYWDEQNSLMVERDINAAINLKRLGLGIFPSIKRRSGKLSIVGTIDDSTTKEILHTLHRAARSPHHT

SEQ ID NO: 54442 - protein, 434 aa, Moorea sp.
VLDYIAEYNIERSKVLLNVLKVRIYPNKQQEIALNRNLGCAIFVWNYYLNKTNNQYQETGKGMTYCQMAKDLTQLKKLSDYEWLAESTAATLQQALKNLESAFKNFFENRAKFPKFKSKHKKQSIRYPESCSIRKGGLKLPKIGVVKAKITRKITGKIKSVTLSKTSTDKYFASILFETEDKATINKSKISGIDLGLSSLVTVFDGEKSYSVDPIKPTRKYAKRLRRRQQALSRKAKGSSNRKKAIKRVAKVHENISNTRQDFRPNLSRKLCDENQIVVAENLNLKGLARTKLAKSIHDAGFGMLLNFLGYKLEREGGLLIEVDRFFPSTKLCSCCNFKNDLLTLSIRDWVCPECQTHHDRDENAAKNLRQEGLRILSTNTVGHSEFQAWVETVRLVNTCIKKRMRPSRRRTAACTRTKQHVSVLQESPVKLTL

SEQ ID NO: 54443 - protein, 530 aa, unknown
  TnpB Polypeptide
VRKINRAVKIRIYPNAEQRVQIEKTIGCSRFIYNYMLADKMEHYKKEKKMLRNTPASYKKEYPWLKEVDSLALANVQMHLESAFHKFFREPSAGFPRFKSKKSSRKSYTTNVVNGNIFLEGKYLKLPKMTAVRMKLHRPISEKWKLKSVTVSREPSGKYFASLLFCCENQTAEKRPAEKFIGIDFAMQGMCVFSTGKRAEYPMFYRNTEKKLAREQRKLSRCQKGSQNYKKQKKRVALCHEKIRNQRKDFQHKLSASLAESFDAVCVEDLNLKGMAGGLHLGKGVHDNGYGLFLSMLEYKLEERGKYLIKVDRYFASSKICSVCGKKKEELSLSDRIYCCECGNRMDRDVNAAVNIMNEGKRIFAYEYTGYWKDVGTIKSLWEANQDLIGEDPAFDIYNPFWKIHSRNVGIEPQYIAKDAVLSNSLITDGAKIEGTVINSIIGSSVVIKKGAVIQDSVIFANTVIGEDSIIEYSIIDENVIIGKGVHIGSPKSDDVEIAVVGRDVTIDDGLIIEQGANIEENVKNKGKEE

SEQ ID NO: 54444 - protein, 447 aa, Planomonospora sp.
MIDEAGEVFRLLTGRRYRLELDFGQQLTAERIAAVCRSVWNTALEQRRAYRRRGAFIGYAEQCRQLAEAKKDFPWLADAPAQALQQTLKDLDAACRRHGTWKVRWKTKQRWTPSFRFPTPKHIPVQRINRRWGRVFLPKLGWARLRLSRPLGGAVRSATVSRDGAHWFISFLVEDARSTPDSHARPEAAVGVDRGVVTAAVTSEGEFFDRRHATATGVSAFEPPKESKAGRVADQGYLSAGEAERYARLQRRLARAAKGSARRARVVRALGVIMERVRRRRADFNAQAAHRLTRDYAHIVFEDLNVRGMTASASGTVAAPGARVAQKSGLNKAILDKGWYGLEVAVRSAARYTGSLISTVPAAYTSQTCSVSACGWVEARSRESQALFRCTACGQVEHADVNAAKCIKAKGQTAGPVVSGRGDCGSARVGEASSTRSTARGAPRAAA

SEQ ID NO: 54445 - protein, 412 aa, unknown
  TnpB Polypeptide
MTVVQQVEKHIIKKSHPHYPMFCDYTHLAKNLYNHANFLVRNEFTNTGKWLRHHELDKILRQDVDYPDYKNMPAAQSAQQTLQLLDKNWKSFFNAIKDWSKNKDKYLGRPKLPKYKSKDGKMVFILTNQQVKLRNDLLHFPKSFQGFIIRPRCVHLSNFKKINQIRIVPTNQVFCVEVVYSISINDNLLLDNGRYMSIDLGLDNLATIVTNTGLNPIIVNGKGLKSNNQYYNKKNAHYQKVAKQMNDKFYTNRLYCLTQKRNFKIEDSLHKISKYIVKSALSNNIHTIVIGNNKEWKQSISLGKRVNQSFVNIPHQKLIEKIIYKARNVGINVIITEESYTSGTSFLDKEAPKKEFYDKKRRIHRGLFVSNQGMSINADVNAAYQIMKKVFPNVFADGIEGAVLHPVRVNII

SEQ ID NO: 54446 - protein, 402 aa, unknown
  TnpB Polypeptide
VQLRYNYRLYPSPGQRTALAKAFGCARVVFNDARRLREEAHAAGLPFLTDSELSARLTKMKATPERAWLAEVSAVILQQALADLNAAYRNFFASVTGRRKGPKVEPPRPRSRKDRRQAIRFTANAKFKILANGRLRLPKIGDVEVRWSRGLPSDPASVTVIKDAAGRYFASFVVQTDPAADAARFPASATEVGIDLGLTSFAVLSDGTVVRSPKFLRRAERKLRRLQKALSRKDAGSANREKARVAVARAHAKVAASRRDFHHKVSTAIIRDNQAVYAEDLCVAGLARTRLAKSIHDAGWSAFTGMLEYKAKRYGRYFGKIGRFVPSTAPCSACGVSEGSKPLHVRRWTCTACGAIHDRDLNAAKNILALGRRERLNACGGGVRPGLAPAVAHETGTLRGAA

SEQ ID NO: 54447 - protein, 155 aa, Anabaena sp.
ISRIYARKNQGSNNKHKAKIKLARHHAKVANLRKDTLDKITTYLCKNHATIVVEDLNVSGMLSNHKLAQAIADCGFYEFKRQLEYKAKKFGCQIIIADRFYPSSKTCSHCGYKKENLSLSERIYHCENCGFEMDRDLNAAINLSRLAKACKSTEG

SEQ ID NO: 54448 - protein, 321 aa, unknown
  TnpB Polypeptide
VNDDPQRKTVLNRRLHLERAFTNFFEKRARFPKFKKKRKQRDAFRIPQRVKIAVERVYCPKVGWIRLRLSQAVTVPTKSATFKRDACGDWFVTLIAEREVEAPIAFPINPVGIDLGLKTFATFSGDALDVPAPQFFRNAERALRKAQRVFSRRKKGSNRRAKAKLRVSRVHRTTARQRSDFLHKITTALVAQHDLICIEDLSVKGLVKTKLGKSILDAAFGEFRRQVEYKAAWSGKLLSVIGRFFPSSKLHRTCGTIKADLTLSDRRWVCEGCGGVVDRDKNAAENILAEGLSLVAAGQADTQNAHGANVRLAKCEQLAMK

SEQ ID NO: 54449 - protein, 423 aa, unknown
  TnpB Polypeptide
MSKQQAQKGKKEAEQQKPRKTYLFRLYPTHKQRDVLEEWLGLCCETYNAALDERKSAYRMAGVSLAYEHQCAELPGCKEVRPELGEVPSQVLQDAVKRVDRAFEDFFRRVENAEKPGYPRFRSRSRYDSLTFKQYGNSFHVLSGSKKNKGTLVLSKLGHVKMVMHRAIKGRPKTAIVKRTPTGKWYVSISAELNEEELQEKRLPACPEEVGIDVGLKAFAYLSTGEAIAHPRFFRAEEAALARASRKLSKAPRGSKEREKKRTVVARVHERIVNRRKNFIEQEVCKLIKRFGLFAVEALVVRNMIRNPNLAKSIADASWSMFFTHLLDKAEEAGRVVVRVNPAYTSQTCSACGHRQPMPLSVRVYECPHCGLVIHRDHNGSLNILEEGLKAVGRHSRVIPEAPGLQPWGVVTPHELSSKHKTV

SEQ ID NO: 54450 - protein, 222 aa, unknown
  TnpB Polypeptide
LFATISKTPSNKYFVSFNIETEHEVLTENNNMIGFDLGIKEFIIDTNGFHIDNPRILKQYEDKLAKLQRQQAKMVKGSNNVKKQNIKIARIHAKITNKRRDFQHKLSSKIVHDNQVIISEDLTVKNMVKNRKLAKAISDVSWGEFTRQLKYKSEWNNKIYHKISPWFASSQICSDCGYKNKELKCLSIREWVCTECGTIHQRDENAAKNILKEGLRELGMAM

SEQ ID NO: 54451 - protein, 406 aa, unknown
  TnpB Polypeptide
MLVRAVVFRLESDLPPEAILLLKDFRLAVNCAIRAGLQARVTSRNALNKLAYKDFRKDYPNMYSQHLVSSFEVAASVLKNNRRRLRKGLTAKVPYIRHLMMKAENQAYKLDREKGIIDLPLKAGCHVMLKLVVSQYHRRYLDDRSLSLGSLTVLLDRVIVAFRKETPGVFVPESVLSLDTNERSLDGVFVDEESSTAVKAAFPDVATVQTRHHDRRKRLQKKKAHDRRTSRRLCRREGRREHNRIEYRLHKVADAVLEFADERRSVVVLEDLKGIKHKKNKDLNRRLSLWPRRKLHQIIEYKAQWRGIPVVKVDPRYSSKTCPICGRKQDSRMGAVFECECGWRLDRHVNASINLLQTALSKGLEVAGGLRFDPGAFQHDVMMTLYDPGRGARSEPNGTSCLHVAT

SEQ ID NO: 54452 - protein, 503 aa, unknown
  TnpB Polypeptide
LNGELLDSAAALASLGSEVRDVSGYATYVVRNDEALGDELARVTATAPAEAGRQAGVTMPDFLATGKSGRSRKEKLLQYNVVTSYRSYEERVKAASGESFKYVSQGWKRTVDASAPSYGEDYVNLGAVDCAYANIENNPFADGEIVLKMVIQGTWHRLIFDFDNERFTDGKVALPVIKVQDGAPVFIFTVVTDNPVVQFSGDYTVGVDVGINNYATVVVREVATGRIVYETTLSQRVHSLWNSVSASEAQVRHLRRKADGLFSQRQERMAALDEAQFHREAASRKKRELAILAAQEIAYLSHVWGNAVVAVEDLSWIRNTMQHGRWNRGALVQWLTHYVSQNGGWVVAVNPANTSQLCYKCGSKVTHPTHKDSVCPEHGVMDRDVNAAMNIAARAVPRVAKARATRAKNRKLRPQPPLRTPVARRSLKYPGRDRTKNKPTAKRKDHRRASKGVNLPVCPARAQAQRLEARVLADGGTHSVTGTSKAALKQGNDTYECRLCSLI

SEQ ID NO: 54453 - protein, 408 aa, unknown
  TnpB Polypeptide
MEYSHRYPAYPTQQVAERLDYHIDVHRQAYNHTRYEYTHVDADNIGSAYKHHDRLTEWKDEYPVFKEVHSKALQRTVTRFYQNLSNLSKQRETGYKVGMLKWKSPREFQSMTYSQSGFELKNTSGRHATLWLSKIGDIKIRYYREIPDEASIKEVTVKKETTGDWFVSFGLETDTADLPEKPDGELLDTSNSVGVDLGILNYIHTSDGTTVDWLDLETEYERLRREQRTLSRKEKGSNNYEKQRKKVAKVKRHIRRKVLDYQHKLSTWLVREYDAVFVEDLDVRGMLKQSHNARTKQDAAWRQFITLLEYKAKLYGTHVVQVDASGTTKECASCGVETAKPIWVREHSCPACGFECDRDANAAMNVLQRGFSELGLGWPEDTPVETALPTDIQSVSAKRVIEAGSPEA

SEQ ID NO: 54454 - protein, 430 aa, Haloferacaceae sp.
  misc_feature (45)..(48): Xaa can be any naturally occurring amino acid
VKLADTSTFVGKCTTTHSDSTTLLQMVTNPRTLNFRTSSPRGNAXXXXINSKCLQMAVRRIYSSLSVLKSLKSKGYKVGKLKWKPPREYRSIVFNQSGFDVDSNTGRTEHATLELSKLGTMNVDYHRPLPEDGTIKEVRLKKEKSGKWYASVVVNHDPEYPEKPAVEDIQLDDTVGVDLGILKFVHDSDGTAVTPLDESEDRERIEKRHRALSRKQHGSANWEKARVKLAEAYERLSNKRTDFIEKLARSYTTQYDAVFLEKLNVRGMLEQDSNGRNIASMAWSDAIKTFERHGDKNGCHVVTVPPEGTTKRCARCDVESDKALWVREHSCPSCGFEADRDENASYNVLKLGLEKLGIAYDVDAVVGLGEAESTSAESRYDSDGLGKSPRDFQTPAETALPTGADANDTSSFCVVPAKRVCRGDLDRLSD

SEQ ID NO: 54455 - protein, 413 aa, Nocardiopsis sp.
VPDPRTGRDPGRAGACRPRPVERTPRLVDHGLAEPTGVLEGRRRGDQAGPQGDRFPCRPARPSRPTGVEAVPPSVGELLGGPCRSTPVQVPCPSEDERGHPSGPGPEHHLSVPPLVHRQDPQSRHGPVPCPPGRPRDRDRRPSGARGQRLAHRAAHPLGTVRPRTPHRPHGRYRPGHRGAPGPVGRHQPHPHPVGAPQGSRTAPSPGTQGRTATPHHTRGEQISNRLKATYDTIAALRARLVRRRSDWQHQTTRTLADTYSLIGLEDLNVAGMVRSAKGTVEAPGRSAAQKAGLNRSIQGEAWHQLHTQLAYKTTERGGTVIVVPAPHTSLRCHRCGFSDVKNRKNQAVFACRNPTCGWVGNADTNAAHNIHHAAEQAAKRDPAQGRGVAGRGGRSRPGKRQSKRKGDPYGKP

SEQ ID NO: 54456 - protein, 400 aa, Nocardiopsis sp.
VQLRYTYRFYPDRGQRAALARLFGCVRVVFNDALARQKPLKASNKLLGSPKKRVAEGPYQRVPKNPDLSRELITRAKQTPEREWLGQVSAVPLQQVLRDLDKAWAAHEDSKTGKRQGPKVGAPRFKSRRDRTQSARFTANARWKITDAGKLSLPRIGEVKVNWSRELPSAPSSVTVIKDAADRYFASFVVETNASEVLPETTPEVGIDLGLSHFAVLSDGTKVANPRFLRRAERKLKKAQRALSRKTKGSNNRNKARLKVARVHMRVADARKDFHHQLSTTIIRENQAVYVEDLCVKGLGRSRLAKSVHDAGWSAFVHMLEYKATRYGRFFAKVDRFLASSQTCSQCWAVDGPKPLHVRQWTCTACETLHDRDVNASRIVLAAGRADRENACGGTVRPAA

SEQ ID NO: 54457 - protein, 421 aa, Nocardiopsis sp.
MLAGQRYRIELTEEQEASCIAFGAICRAVWNTALDQRRQYVDRYTRGRDGQFCGYHLQARELAEAKTEETWLRAAPSHILQQTLKDLDRACREHGTFNVRFRAKARWNPSFRFPAGNLITVEKLNRRWGRAKLPKLGWVRFRMSRPISGQIRSATVSCKSGQWFVSFLVEDGQLTPQQHARPDSAVGVDRGVKVAATTSDGTFHDREFTTEGEKTRYLKLQKKLARQEKGSANRSTTLGSMGRISSRAVDRRTDFCAYTANRLARDHATVVLEDLNTKGMTASAKGTAAHPGKRVAQKAGLNRAILDKGWHRLELALTNVARYTGTRIVKVNPAYTSQTCYPCGHVDSESRKSQATFECTACGHRDHADVNAAKNIFRAAGHAVPACGDLGVTWSAKQEPEGTREGVPLQLALPLVGIPRL

SEQ ID NO: 54458 - protein, 663 aa, Nocardiopsis sp.
VSRKIPLAEGQTCRTACAPVVLRAGVDEATGELLSAPVLAERVGWAAEMVAQMASALLVAHWNTADVHTLAAGADAGGRKLPSNAWMALRRLGWATAPPQGVRVNDRIVRMAQEQAGRVLRSAVWRAELTAGVLATWPADPTKRTRAEWDAVRDAVPGGTALPSGVIKSRTRQIASYLRKHDRLPADVFELEPSPRVARMVGLAACDAQQATIERHESDSTRALLRLQLPTRPAPESYRDWTWVACPLRLPPTIPADAVLHLPTLRIVGTQVRADLAYTHPVPKASRAGHTVALGVDWGLNTLLSAGAVRLDEDGRITVLGSGGMFRAGGVLAKQHRLRRQGEFLHAKAACYERLTAGDDQHPLADKHQVLREEFGQVAQRRSNLNDALAWAAARWTVDQAITAGARVIYLEDLRSMEAGGMGRTHNTRLSQTVRGRIAERMRHLAAEVGIAVVTVPAKNTSKHCPNCLTPLRHRKAPDRPTTPGWKWALCPDRAGCGWQGDRDHGAWQRIAARGLTHQTKTVTDRTTGAMAIRSVVDKLEAKAVVTATAPKTRRADRSKTGPTRHRRTQRPAPRRRRAPSPARPQGWAGQRPEGHAPTDRPGLPRAAHRHQGVKTISTPTTRRTRHRPAGAVLGAGFHLHAHATPPRWADPPSDTISLAEDH

SEQ ID NO: 54459 - protein, 226 aa, Nocardiopsis sp.
MKVVTQVKLIPDAAQEAALWETLKLCNQAANHASRRAHKSGVKAKAPLQRLVYGELKAMGLSAQPAIHCVRKVAGACATSKANLKAGNHGPEGSKRRTRVENSPVRFRKDAAQPFDDRSLSWQMDARTVSIWTVRGRMKGVLFTGSPEQVKLLAEYRQGESDLVRRGGNWYVYATCEVPEADEYTPEGFLGVDLGIANIATTSDGTLYSGKRINHVRHRHRHLRRR

SEQ ID NO: 54460 - protein, 304 aa, Nocardiopsis sp.
VEIQRGIKYRLCPTPEQAETLDGQGHAARALWNALHDWWTMASQNRRVSLKDADAAIKQARKEIDFLAALPAQAAQQVLKQYHRAWVNCWEGRAEAPRFKSRVRAKMSVDIPQGRDLNITCLSRRWSTVKIPKVGTVRFRAHRAVPGTVTGARLVREANGWHIVLRTHWEQSDPAPHTGPTVGIDRGIAVPLALSDGTNHTHTLWERPKEAERLLRLERKAARQRPTTPGASRSATGSRPPTTRSPPCVPASCDGAPTGSTRPPAPSPTPTALSGWRTSTSPGWSDPRKALSRPRGAVPPRRPG

SEQ ID NO: 54461 - protein, 146 aa, Nocardiopsis sp.
VLRRLSGRERRFAADTNHRIAKRIVTEAQRTCRGIALEDLGGIRERARLRKPQRVTLHSWSFAQLGSYIAYKAKRAGVPVVYVDAAYTSQGCSECDHVDKRNRTNQATFVCTSCGFAEHADVNAARNVAKRGVVGWAVSHAADDAA

SEQ ID NO: 54462 - protein, 356 aa, Nocardiopsis sp.
VNPVNTAIEPHTGPQTGPEREEKQKKRVKRGFEPRPGHVVQAFVFALDPGARTEQRLRSHCGAARAAYDWAISHVPASWEQRKAETSYGIAEDALTPWRSWSLPSLCKAFNATKHTDPRFAGWWTDNSKEAYNTGLAHAAAAFDAYTQSKRGERQGPRMGQPRRKSKHRSLLACRFTTGAIRLEEDRRHVVLPVVGRIRTHENTRKLHRRLANGTARILSATVSHRRGRCQVSFQVEIARTTRTPSRPQTVAGVDLGIKSLAVVADSEGGVRHVANPRHLNGELKHLRQASRRVSRRRGPDRRTGQAPSRRWVKANTERNRVHHRVANLREDAIHQLTTSLAREYGMMLLQFGRHL

SEQ ID NO: 54463 - protein, 405 aa, Nocardiopsis sp.
VIRAYKFLLRPTKRQQASLVEMLRDHCSLYNAALQERRDAYAHPSKTKIRYGDQSAQLKEIRSFDPERQGRWSFSSQQATLRRLDKAFQAFFRRVKTGHKPGYPRFRGVGRFDTVVFPKDGDGCRWDSTPTDAVTRVRFQGVGHVRVHRHRPIKGRVKTVSVKREGDRWFVVVACDQVPAQPLEPTGRVAGIDMGVASFLTTSEGEHVDNPRFLARSAQKLAAAQRDLSAFPQRVKAKNRTRKHRAAQARVTQLHAKVRRQRVDHHHKAALDLIRRFDAIAHERLNIAGMTKKPAPKPDPEQQGAFLPNNAAAKAGLNKSIMDAGWGVFLGILAHKAESAGRELTPVDARNTSRTCPRQSCGHVSADNRTSQEKFRCVRCGYTEHADRVGAVNVGIRAGLVLPVA

SEQ ID NO: 54464 - protein, 443 aa, Nocardiopsis sp.
MGVSTNATPKRHTGHRARLALSPEQVSVLDDQAHAARTLWNLLHAWWTMASENRRVDLKDADAAIKQARKEIGFLKALPAQAAQAVLKTYFQAWRNCWDRRAEEPTFKSRLRSQMVVDIPQGRDLHLQRVHRRWGMVNIPKLGRVRFRWTKDLPVGKRANKENRVTGARLVKDALGWHISFRVQTLEPVPESHPGPEVGIDAGIAVPLALSDGTTYDHHRPRTNEDGGRADRDKWLNQSEKQKLASLEKQAAHQRSFRARGERISHRLVRTYDQIKALRAKATRRHLDWQHKTTTDIATRYGTVVVEALDITNMVRSARGTIEQPGKNVAQKAGLNRAIGQEAWGRTVTLLGYKLAQRGGTLYKVPAPGTSQRCSECLETISGSRGSQAVFVCKNPACGWSGNADHNAARNVLHLFRAGHVLVPAAGRAVGRRAGRVKPATAR

SEQ ID NO: 54465 - protein, 446 aa, unknown
  TnpB Polypeptide
LGKVITTLSLYDFDVEGGEKEHVINDLKSIILQIQESVHAFINSPVYQDLADLILHGKFNTRYKISSVRKVVPKAVFPCNSSDMNEMLCGSVLSHIDAYAMSLGLFTVLRDNPDETNPKRIREIFKEYYPHSRVPHAYEITSHINRFHNKKQRQASLPGSQAKIYLSYCFSDYLKLTHTSKEITLSFRRLHTAGRWVSLKFTIPDNERFLGDKISKPSVQLVDDKLVFNFAIASTVPDIKPTRVMGVDLGKVEPFIATVIDESMRWHSAPFFASEKIKDLSRKYADLMNRAEVLKTKQERCLVRGHGHKADTLAAHRQGIKNKARRIKNEVTHLIGHEVAEIAHQMNARVVMENLSWLGHKGGTWNFSEIQEAVTNSCARKGVPVKYVSAKDTSNTCPRCGAGVQHVKRDNVCVSCGFRINRDVAASREIALRGTTKKLKGPLRQR

SEQ ID NO: 54466 - protein, 120 aa, unknown
  TnpB Polypeptide
MNTLQKLSTELVRQNDIICIEDLAPQNMMKNHKLARSISDASWGEFRRQLEYKAKWYGKVVVTVDRFFPSSQLCSGCGTQWSGTKDLAVREWICPVCGAVHDRDHNAAKNVLKEGLRLLA

SEQ ID NO: 54467 - protein, 257 aa, unknown
  TnpB Polypeptide
MEYSYKFRIYPNTSQAQQIHRTFGCCRFVWNHYLTMRKDLYEQDGKSMNYNACSKDMTQLKESLNWLREVDATALQSSLRDLDTAYQNFFRQVKKGEKPGYPKFKSKRNHWQSYKSKCVGTNIKALKDAVQLPKLGVVKCRISKPVEGRILSATVSQTPSGKYFVSLCCTDVETDTLPNTGAAVGIDLGLKAFAVASDGTEYPNHQYLAKSQKKLARLQRQLSRKSKGSKRREKARIQAARLHEHIAKAVHRVGASK

SEQ ID NO: 54468 - protein, 332 aa, Cyanobacteria sp.
  misc_feature (326)..(329): Xaa can be any naturally occurring amino acid
MQVFNLTYEFKLKPTQNQIATFEEWLETHRRVYNHALAERKDWYKSRSCQVNACSLHSCYIIPADAPRPTFASQCKSLTAARKENECLQRVNAQSLQQTLRRLEKAFVNMWEQNHGFPRCKKPGRMRSFSFPQLGQNPLSNGYVKLPVIGAVKVRQSRSIPDGGVIKQACVVKRVSGWYVMLTVQWDVNPPSPMPHGKAVGIDVGLTSFVATSNGLLVKRPRFFVDAERQLKLLQQRVSRKRIGSNNWKKAVKKVASLHEYVANCRKDWHRKLSHQICSDTGMVFVEDLNLIGLSRGMLGKHCLDAGFGQFFKIIEQTCFKRGVYXXXXNLP

SEQ ID NO: 54469 - protein, 380 aa, Bacterium sp.
MQRTIRLELHPTKEQADVLFQTLEQHTACFNAVAAHGWQEGIKNGVQLHKDTYSQLRERFPRLPSQLVCAARVKATEAVASALALTKGKKVSGPKSKNCPIRYDARSYRVLREEQLVSLATLAGRQKVAFGLYDHARKAMESALSFHSADVICRDGRWFLHLVVTLPEPVFESSGEVVGCDFGITRPAVASNNRFYGEKRWKNIERRYFKHKRALQSKGTKSARRHLKRLRRKVKRFRIDCDHVVSKRLVQNTSSGSVIVVENLTEIRQRMKARKGSALKRQMHQWSFARLRALMEYKAQAKGIVVVGVDPRHTSQACCHCGFKHRFNRKSQSLFHCRECGFELNADLNASRNIAQKYLAALGKSEGSGVASITLLSGSY

SEQ ID NO: 54470 - protein, 410 aa, unknown
  TnpB Polypeptide
MKFTVPAFVSSTHPEVERLIFAFENARRRAYRMKQKDIDRLVIIRQLNREIRIPARYVSTAYDTIKKMPPHVTFGGKKAQQLRQQDKLTHAQYRLCRNRILACRGEHAQKGNLCLRIVDGHILRVNIGDERWIKLPIQIPKKHQRLLREADVYTVLLKRRMDMRGYDARITVDVAQPEMKPPKRIMALDINSGHVDFAVIDKTTLKLAAFGKVNCHELLDANKGKKRILLHRLVNKVGRIAGHYDAEVVAGKLRSNYTNHRHRFNRRIQGMNQYAMREIMRYKLPLKGRIFTELSENNTTKLGRKLSTLLGLDVHKTSAYAFALKVTDYPRFQSLLRDVTFLHEFCAYEEDGIPSMRQVGGSEHTVPRQSLTRLMCNELGIPLPGEATPNQGTDGWPHRSVQTSILQVKV

SEQ ID NO: 54471 - protein, 371 aa, Firmicutes sp.
LWEVLRLLSSSNTSKAKKTSNKREHTPSFICEIPLRVTRRQEQILEARFEAGRQLYNALLGEAKKRLALVRQSIGYTKAKKSTNKKERQAHFAAARQAHGFSAYSLEAFADEVVRDHKKIRRLQRKQDRQRRANNPDCYDEKGRVIKGKRPTKKSRHQWETETELQELYRREAAHRKTLHGQLANQVMAMGTHIKTEKLNYKAFQKTFGRSIGVRAPKLFFSILTRKAESAGGKVEEFSTYHTALSQVCLCGQKHKKKLSERVHACDCGVVMQRDLFSGYLAKHVQEGRLQVADANEHWQGAEPLLRTAWQQAYNPPASGRQGPFRTLPSSFGTFRSQSGSSEKESLPEHKAQDVVATAQASARACESAKV

SEQ ID NO: 54472 - protein, 421 aa, unknown
  TnpB Polypeptide
MLLAYKYRIYPTKADRILLAKHFGCCRFLYNHFLSYRKSQYEQGNKVSYYMTQKELTKMKAISQYSWLNEVASQSLQMAIQQLDDAYKRFFRQQGGYPKFKTKHESVQSCSFPQRVMLEGNRVFLPKFMKNGIKINIHRELPEGASIKQATISKKNNKYYVSISFDDNLPTPKPVIAQSSIGLDVGINSLVATSKDVKIANPRYTKKYARMLKLASRHLDRKQHSRKKGDTTPKSKRYLKQQLKVARIHEKIANSRSDYIHKITNEITNQYDVICIEDLNVKGMIKNHKLSKHIADVAWGELRRQLEYKSERKGKIIIKVDRWLPSSQICSSCLSPTGKKPLNIRKFTCPVCGTVHDRDNNAAKVIEYYGLLIFFTLGYEHNLSAGTVDYTRGGPSGGDGDSIPIVAPSSYGSVKREALTF

SEQ ID NO: 54473 - protein, 490 aa, unknown
  TnpB Polypeptide
LILEKRAIKFYLDDKVNKAKKEKLLKFLNECQNAQNQMYTYFWDNFNVIIECKNKLDINSYANKNNYRVREPRLKSHHHQQVLQSVFANLKSLESNIVNKIRFKFDNNEKQRIYNYLAKFCFQWDKLERYVDKQIKSTKDAKYKSFLIQVRDTINNIDEYEQIKDTIESKFYEIKSKYKCPEKKELQIQCNSTHTIREIQMKEFQWVFVLDTNTVIGGDEKRGIFEKLPIPVKFSDYHKEVLTGKKLANTFNIKLNKYGKIEIIGVYDAEVEKKENEITDTIGVDIGLNKLITASDGEVVSNNKKIIKKLTKQSLREANRNRLQAHLQSKLNNEDYRLSDKNFQKQRNALLNFIKCDTRHRIKNFLKDRLNTHIIIEDLDIVYSKTWSKEVNRKLRRMHIQRIKDYLIKYCNDLGIKITQVNSAFTSQQCSSCSHIDKDSRVSQEMFSCVKCSYEINADINASNNIKNRIKYKEIKLNTPIWRVKEVLMN

SEQ ID NO: 54474 - protein, 382 aa, Escherichia sp.
MRRFAGACCFVFNRALARQNENHEAGNKYIPYGKMASWLVEWKNATETQWLKDSPSQPLQQSLKDLERAYKNFFRKRAAFPRFKKRGQNDAFRYPQGVKLDQENSRIFLPKLGWMRYRNSRQVTGVVKNVTVSQSCGKWYISIQTESEVSTPVHPSASMIGLDAGVAKLATLSDGTVFGPVNSFQKNQKTLARLQRQLSRKVKFSNNWQKQKRKIQRLHSCIANIRRDYLHKVTTAVSKNHAMIVIEDLKVSNMSKSAAGTVSQPGRNVRAKSGLNRSILDQGWYEMRRQLEYKQLWSGGQVLAVPPAYTSQRCACCGHTAKENRLSQSQFRCQVCGYTANADVNGARNILAAGHAVLACGEMVQSGRSLKQEPTEMIQATA

SEQ ID NO: 54475 - protein, 382 aa, unknown
  TnpB Polypeptide
VLARKSVKQRFIPDQRILQLMETFRLMTNHCIRIGLAEGKTSLKSLSLACYPQLKIYETASAYKLCAISKAAGILSSYRKLSRKHHVKEPYCTRLILTTCYGVKILAGKLRMPNHVEIPLNTYVQRFLSQPKLEVRSVTLTAESVNISVRRYVEAAECTGMLSIDGNLDNVTRADTEEQVVKYDLSKATTIKSQCRQTKRCFLRNDVKVRKRIFQKYGRLERERVSWLLHNVSANIVLNAKLRKQAIVMEDLRGIRKLYRKGNGQGRDYRSRMNSWSYAELQRQVQYKADWNGIPVIYVKPYGTSAKCSMCGHRVLPEENRKLHCPSCGLTIDRDVNAARNILARGLRFKPVGSASEAMVQEPQRMVILKVDADQSSWRPIK

SEQ ID NO: 54476 - protein, 391 aa, Cyanobacteria sp.
MVERAFKFRFYPTPGQETLLRRTLGCVRLVYSRALAARTEAWYQRQERIGYNQSSAMLTTWKRDEGLTFLNEVSGVPLQQGLRHLQTAFSNFFAGRAQYPNFKKKRNGGSAEFTKSAFKFKDGQVYLAKCSEALPIRWSRTLPKGAEPSTITVKLEPSGRWTVSLLVDDLTIQPLPKVDKAIGIDAGITSLVTTSDGEKVANPKHLNRLYQQLKRAQKSLSRKQKGSRNRDKARRKVARVHTQIRDARQDFLHKLTTQLVRETQTIVAESLAVKNMVKNRKLAKSISDAGWSELTRQLDYKAKWYGRTFVQLERWFPGSKTCSSCGHKVNSLPLNIREWDCPQCSAHHDRDVNAAVNHLAAGLAVLVCGATVRPEESKSRKAGAMKQKPKS

SEQ ID NO: 54477 - protein, 381 aa, unknown
  TnpB Polypeptide
MIRTHKIRLSRMSNEHRGFLSRAYGTRRFAYNQAKNLSDRAYELTGNTLSAFDIMAQFQKEFRDVPEYSWLYDIPKSVCQEAVKDYRKSLQAFFKKTHARPGFQKKRHDNGSFTLNNQQFKIDGRYLKIAKFSKPFKLTQPLRFEGKIMRATVSQKGKHHYVSVVVDVPEDKFTVLPHTGNVVGIDLNIHSIDDSDNNSWEHVQFLKRDLELLRKAQKKLSRTQKDSNNRRKARREVARIHERIANRRVDAHHKLSYQIVKDNSIIGVESLNVSGMIKNRRLARAISDASFYSFLDKVNYKALLHGRKVVEVGRFFPSSKLCSQCGSKKINLTLSDRTYVCDGCGSIMRRDLNAAINIRQEALRLLDTDQPAGYAGCVEGP

SEQ ID NO: 54478 - protein, 440 aa, Calothrix sp.
MALRRGTFKLYPTKKVNAVLHYHRKLHKDLYNAAVSNRITSYKKFGKTVSYFEQQNCLPDFKDVWTEYKVINSQALQATLKRVDFAFQRFFKGLGAYPKFKSIRHYSGWTYPSFTGWKVHSNGDNGYLELAKIGQIQMRGKARLWGHPKALDIVHRHGEWYASIILEIDDTLLKNSRPSENGTIAIDLGCNDAIAWTNGEENGLVRAPRFLRSSEQKNKQLGKAKRRKRAPNFKKKIKASRRWKKTQNQVSKLNRKVANQRQDFVHQETTRIISGNSTVVTEKLEVKKMSAKAKKGKRKRQKTGLNKSILDVGMGMIKDALKAKLSDIDGLFVEVPTRKVKPSQTCPKCRHQEKKTLDQRTHVCNNCGYTQQRDIASAEVMLLWYSNNLQGLGTNLLDVDDSSSISPTRKTAGTMKQLGRVKRQKPQLTDGDVETPSSTK

SEQ ID NO: 54479 - protein, 402 aa, Escherichia sp.
VKRLQAFKFQLRPGGQQECEMRRFAGACRFVFNRALARQNENHEAGNKYIPYGKMASWLVEWKNATETQWLKDSPSQPLQQSLKDLERAYKNFFRKRAAFPRFKKRGQNDAFRYPQGVKLDQENSRIFLPKLGWMRYRNSRQVTGVVKNVTVSQSCGTWYISIQTESEVSTPAHPSASMVGLDAGVAKLATLSDGTVFEPVNSFQKNQKTLARLQRQLSRKVKFSNNWQKQKRKIQRLHSCIANIRRDYLHKVTTAVSKNHAMIVIEDLKVSNMSKSAAGTVSQPGRNVRAKSGLNRSILDQGWYEMHRQLEYKQLWRGGQVLAVPPAYTSQRCAYCGHTAKENRLSQSKFRCQVCGYTANADVNGARNILAAGHAVLACGEMVQSGRPLKQEPTEMIQATA

SEQ ID NO: 54480 - protein, 383 aa, unknown
  TnpB Polypeptide
MIQVKTYRYKLAPNLSQQRALGQWLGACRYVYNLSLSYKKTLWEQYKISIGKNDIQKELASIAKDTDWLGCVHSQVLQEVTDRVFNAFDGFFNRAAGRPGKGFPKFARKGQYQSFSFKQGVKINNTHVQLPKFGKIKYRNSRDCTGTIKRATVRECADGWYVCLCVETDIESLPINQNSIGIDVGIKSLLVTSDGETIDNPKHLYKAEKKLKRLQRSVSRKKKGSANRKKAVKKLARQHQKVANTRNDFQHKVTTRLIRENQAIACESLQIQNMLANHNLAKSISDAGWYSLTQMLEYKAKWYGRTFEKVSARHTSQDCSACGYRNTELTLAVRLWTCPSCGNIHDRDQNAAQNIKKKAVGHTVSAWEVYTPVAVVAQESPGL

SEQ ID NO: 54481 - protein, 237 aa, unknown
  TnpB Polypeptide
MCDRRMRQLTRPATAKSTTLDRAQQSRSRTTALKHDPEHNRVRLSKGANLKDGWGDFVLCEYDTRNDVEFSTVDTVQNVRVVWNGEQWQVHFVVKETIETLDSPGDGIAGVDFGVSNIAAVAYPNEYVLYPGNTIKQDTHYFQRKEYNTEGENGPSQQAQRLRQKRTRRETHFYHTLTKTIIEECVDRDVGTLVVGWPKMSVRTTLARRTTNGCTHGRSTGCISISPTRARSVVLRY

SEQ ID NO: 54482 - protein, 322 aa, Streptomyces sp.
LGVQLRYNYRAYPDACQRRALSSAFGCARVVWNDCLRDRKEAHAAGLPYVKSAALSRLRITQAKRTEERAWLADVSAVVLQQSLRDLDTAYKNFFDSIKGKRQGRRVGPPRCKSKKDTRQSIRLNTNAFCLQATAKAKGSKNRAKARIKVARQHAKVANRRRVWHHKASTQIIRDSQAVYVEDLAVSGLGRTRLAKSVHDAGWSAFVGMLEYKAALHGRTFAKVDRAFPSSQVCSACGFRNGPKPLHVREWACGECGTVHDRDHNAARNVLFEGRRKVAAGRVETPNASWSAGKTRTKVPAQRGEAGSPRKGQPTQAGIPGP

SEQ ID NO: 54483 - protein, 422 aa, unknown
  TnpB Polypeptide
MRRKKKEIENQIPTITRTHKIRIYPNKHNQEVFQKYYDYQRSVWNRAIDERNTQYKIYKEMKATGLYTQKELNKNYFPSTNNLRKMEKFDWEDNFYCRIREIQFDNLCQTWDNFFNPSMPNHKKPKYKKKKEIETHKTLSLRGVRTKGKWLLLPKAQKSKPEYRFTKIKMAEELRFDGKITDDFSVLVENDKWYVTITVETPLEEKIAISKQSTGIDVNVGSIDYLKKDGLDKEDKEYDKFYLLSKSLLRQYDKIKFYSRVISKKRNKNPYYKYSKSYHETITKLNNAYTKAYNIQEANLNNIVKYFFDNYSRIVIEDLDVNSMKMNKRLCKSLHRNAFGRFKQKMINKAEEYNNVKFVLANRFFPSTQTCSECGHVKTGDERLFLWGDKYGNDHNTYVCYNCGTIQDRTENAILNLNRYEK

SEQ ID NO: 54484 - protein, 471 aa, unknown
  TnpB Polypeptide
MKRTVKIKANCSNNEDEILLIGKVQRNIKNYVWSRYSGISSLLKQSGWTIRDELIQKDLLSKKIPKTLSRVAVEKSSSTIKTNWSLTKKQVKKAIAQNENLTKDDKRYLYLCLKHTPTLYNILNYKKVDYATDYLKDLKIDVHRLNNLLRRYIRRYKAKPYTKKANVILTSNLYKFNTNNRIFMFSGKAKNSRIEISLIGHVPKLKGTLELVKNQKDNQYYLHVPLDRIINKKEMTEQSETLGLDVGITDLITLSNGSVYGANSAELFYTLSDNLVNKNRSRLFSYKRKLEQRILIEQDLSKKSILEQKLKNLEDNNLGSKKRISKITKYKSRIASHINCELNKMVKEEDIQEIIREDLNWSSKKKNVSRKQQNRFSTWSKGVLLERLSVKLAENGITETIVNPAYTSQICCKCNHLGNRKGKEFKCSNCNLSIDADFNASINTKKRKFIKEIDIDTPYKEVKKYYENLTV

SEQ ID NO: 54485 - protein, 469 aa, unknown
  TnpB Polypeptide
LKVVKTVLLKVYEPNKEKREALDRILSLYADVLVFYLEVIRKAGIYRVVSLKKEQALTFLESITISTKAHPDPQFPIEEKIKTPVQTNIRRSAINKAYGMVKSYVSNLKNWYKEGKELGHNKPSYPDPKNFSLTYYATDVELQDIFLRDGKEFHFVRLKVLSESGDYRKRNYPVKVYKRLFELMDSGYIPKNTATLIRRDKDFYLAVTLEKTIKRKKKPQKPETVINVDLNVERNLACIGIFETDWRKKNSKLKKINFINGELLRLVKKRDYLLHQVRVKQKLTGRSSTREDNKKLWKKINNLNRDIALKAAKEIAKITKECENAIVVFEKLKGLRGEKKKKSRELNRKLSYWLRKKIVDRVQEISIEEGFNVDFVYPSWTSRKCSFCGTKGERFSPSGSTALFKCPGCGYTVNADVNAVFNQHFLYLSHLLKAGGKRESVVSPGISLKSSRKRTQSKGSLKSNSYVCV

SEQ ID NO: 54486 - protein, 685 aa, Firmicutes sp.
MRGYTVEYKSNNNVVYSCKYHVIWCPKYRRPVLVPEVAERLRDIICAVSEECGAEVIELEVMPDHVHLLVEADPQFGIHQLVRRIKGRSSRLLRDEFRWLRSRLPTLWTNSYFVATVGGRRLLSSSSTLNNRSGSERTPSFVCELPLRAAPAETQVLNARLEAARQVYNACLGEALRRARLMRERRAYRKARHLPKGEERTACFRSVRRSVEFTGAALQRYAVRLRQRAFREHLDVHVAQKLASRAFAAVEQWVLGKRGRPRFKGHRQLDTVEGKSNHAGIRWRGDAVEWKGLILPARIDPEDPVIAHALGCRVKYGRLVRRKLGGRDRFFVQLVCEGTPYRKLQRVVGDGEVGLDIGPSTIAVVGEDSALLVPFCEEVARNHRLIRRLQRKLDRQRRANNPDNYLPDGRVKPGPKRWRKSNRQHRTGEALAELLRREAAHRKTLHGQMAHRVLAMGKRIKTEKLSYRAFQRQYGRSVSVRAPGLFLSILRRKAESAGGEVIEFPACTAKLSQTCHACGTLQKKSLSQRVHACACGVEMQRDLYSAFLARCVGEDHLLHADLAQKRWSGAEPLLRAAWSRATQPASGRLVPFSFGAAPRSRSGSLAQEGTAKAEGRDVVAAAQASGESSEEAAVVSPQNSPALAVGRFRSGRTLRLAAGGELWRAGPSQATAAADGWAIEWSRGR

SEQ ID NO: 54487 - protein, 399 aa, Chloroflexi sp.
MRKAFKYRIYPNKEQERKLFWTLTRCRELYNAALSERRDAYTYERKSITYRMQQNDLPEIRDLLREEYQQIHSQVLQDVLKRLEKAFQHFFRRVMNGEKPGYPRFQGRNRYNSFTYPQGGYTLSEKSVTLGKIGTIKCVVHRPMEGQAKTCTTKYESGQWYVVFSCDVKEPERLPGVESEVGIDLGGTHFAALSDGTFIENPRHFRKAEKLLQRRSQVLSRKKQRSHRREKARRLVTKAHRKILNQRRDFHHQQSRQLVDTRSLIVFEDLQIANLTKAPKPKQDEATGHYLPNGAVAKGGLNKSILDAGWAIFQQMCTYKAAWAGRTVMLVDPKFTSQVCSGCGTFRKKDLSERWHSCSCGVSLDRDTNAAVNILYRGKKQLLGVEDANRAKPVEAPCL

SEQ ID NO: 54488 - protein, 421 aa, unknown
  TnpB Polypeptide
MSLFFSIDQTILYAIKRLQAYKFELKPNGDQQRNMRRFAGSCRFVFNKALALQKERFEAGENRLGYAGLCKALTAWRNSAETSWLSEAPVHPLQQTLKDLERAYANFFAKRADFPRFKKKGQSDRFRYPDPKQIKLDQANNRLFLPKLGWLRYRNSRDVLGVVKNVTVSQSSGKWFVSIQTERDVVQPVPTATRAVGIDLGIARFATLSDGSHVTPLNSFKRHEAALRKAQQAMSRKSPFSNNWKKAKARVQRIHARIGNARRDFLHKTTTTISQNHAMVCIEDLQVRNMSKSAAGTTETPGKNVRAKSGLNKSILDQGWSEFRRQLDYKLAWQGGWLVAVPPQNTSRTCPCCGHISADNRRTQERFACVECGFEDNADVVGAINVLRAGHARFACEVSDAVRSPAAGTHRSDSGAAQCRA

SEQ ID NO: 54489 - protein, 381 aa, unknown
  TnpB Polypeptide
VSGVSVKIKCFRYRLYPTRAQETALNATLDTLRLVYNSLLNERKFLYETTGKGVSQYAQEKHFAEWRRQFPELAQVHSHLLQNAALRVNLAFTAFFRRVKNGEKPGFPRFKGVGQYDSLMFKEWGNGVSFKSGKLYVSKVGHVKGKFHRPTEGTPKTATVRRQAGKWFVCIACEVSPEPLPTTHEAIGIDVGLKTFAALSDGTFIENPRFFRRDENALAKAQRKLAKQKRGSRARRKARKVVARIHERVRNRRHDFCHQNARRLVNRFGVIAVEKLNVRGMVRNGHIAKSISDAAWSQFRECLTQKAESAAREVHAVDPAHTSQDCHQCGHRAKKTLSERWHLCPMCGASLDRDTNAAINILNRIGATMRGRYTDQEAVGL

SEQ ID NO: 54490 - protein, 427 aa, Halorubrum sp.
LGESRVEKPRGDDSLADGSTCDGAIGRSRPRDETRPADAGRDGPGTEPERPGSPLWKGTPAVHGGRGRHDDLHSQSSQRVLQELAEAFNGWDGKRRNGDTRANPPGYRKHGDEHPRSTVTFKTAGFKLDTHYNRVRLSKGANLKEYWSDFILCEYQTRSDVDLSAVESVQQVRAVWTGDEWELHFVCKVEIEVSEAPGEKSVGVDLGITNFAALAYEDGHSELYPLNCLKEDDYYFSKRIAECDDSNSEQATRLNQKKSARRTHYFHTLSKHIVQRCVDEGVGTIVVGDLSGIRENEENGESKDWEKHGNLDLHSWAFDRFTDLLTYKAEMEGITVEEVSEEDTSKSCSFCGRTSDTNRVERGLYVCDTCGTVANADVNGAENIRQKVPPNLASDGGDRSNGWLAQPSTFLFNKETGAFAPQEQVTS

SEQ ID NO: 54491 - protein, 231 aa, unknown
  TnpB Polypeptide
VILYSKKVTGKGDRYYVSVLVEIPDVKIANNSNGGIGIDLGLKDLAIVSNGKTYKNINKSTRIKKLEKKLRREQRCLSRKYENLKKGESTQKNIQKQKLKVQRLHHKIDNIRTDYINKSIAEIVKTKPSYITIENLNVSGMMKNRHLSKAVASQKFYEFRTKLKAKCDENGIELRVVYRWYPSSKICHCCGAIKKDLKLSDRIYRCDCGYVEDRDFNAALNLRDALTYEVA

SEQ ID NO: 54492 - protein, 422 aa, Microcoleus sp.
MKQVLTVSCKLEVAPEQSTKIDSTLLAFAAACEYVNQTVPPTLTNELAMQSLVYHDVRARFGLSAQLAIHAIRRVSGNRKTAKKDGKPVKNFAPTSATYDPRTFSFREKDWTVSLTTIDGRERFKLAIGNYQLGLLKGQVPKTATLVKRKDGTYYLNIQLESVPPEPIETDKVLGCDLGRTDIVVTSEGGKFSGKEITRIRNHYAKLRADIQQKATRGTRSSRRRCRALLKRLSGKEKRFQELVNHTISHRLISRATSSSQAIALEDLTGIRERTNSLNRSKKERRLSNSWAFFQLRQFLIYKAIKYGVKILFIDPRHTSQTCHNCNHIHPVRGESYRKGKKFACGHCGYVGDADYNGAKNISALGAVVNQPKGSGLCCSLSSDVERAIESPHHTAIRGMVGVVYNTSFKTKRRKFLEGIET

SEQ ID NO: 54493 - protein, 439 aa, Streptomyces sp.
VQSLEAGITTIRHRLSLPVGQKGSKRAPGGYRCAHEWFHKTRRLHVLEDRLDQVRADREAGRVRVVRGGKRLLGTRHHLDPAQLTEAEWRERWEAGRWFLQADGESGKRFGNETIRITPEGEVSIKLPAPLADLANAEHGRYVLAAQVGFPHRGQEWADRVEANRAVAYRIHYDTGRGRWYADASWQIPPAKSILLEAALAGGVIGVDTKAGHLAAWRLDTHGNPTGRPRRFLYDLSGNAQHRDAQVRHALTRLLHWARSCGVKAIAVEDLDFQAEKTREKHGRKRRFRQLISGMPTGRLRARLASMADATGIAIIAVDPAYTSKWGAQHWQKPLAGPTRKTTRHDAASIAIGRRAQGHPIRRRTTPPRAHRSDVHGHRTVQADRRAPGREGPRPGIPGPRTRSVPPDAASTRATRTPTTVRGVRSDQTWVQDSLLLTD

SEQ ID NO: 54494 - protein, 422 aa, Euryarchaeota sp.
VLKTYSLKHDKGEDIKDLIIAYNEILNSMLEDIWDSIKWKKTQIEGKKQFRILPNYRKDNLFKKELRDKYLKDWKYASHWVDSALKTAFSIMDSWKKNYVKGNRKMKCPKAKRLFIRVKQTLCKLEGDRLRVTISPGKFIYFDLSKRYFKLPKNISSSGIGEPIITLDKLYLPIHEPNKNNVKYLAEKVAWDLNMFSIDGYSPEAGWIKIDTKPLATVHISSFEKRRSIQKKASKSKKAKGVSRKYSKRERNRARKHQVEIARVINSVARNNGFEDLRKENMYRSSRLWNRQISRTDWKNIKNRVNNCIELPPEYTSKKCSRCGCINKDLNGSKVFRCKNCGLTIDRQLNASINLYLSMEGVPHQISWWDSNILPTLVGGYFLTGVEQKTPDELARELYEVVKPKLYFGYDRYSDSYLSMPI

SEQ ID NO: 54495 - protein, 377 aa, Thaumarchaeota sp.
MALGCVGGVKSRAELHKKTYAVFRSRYSVASQLIVEATSYAWSVRKTVDEGIRRCVVRFDKRLFSFKQTKRGNPVLSLRVSSERIGLPVRKDGAYRRLQEHLNDGWKITSIIMKRDLSFLAVLSKDFPEPEGRENWLGVDINSSKIAVSIVSKDKVLKQTYLGQDVSTRQIRFEERRAKLQNHRDKGSSKAGLKLKKLSRKQKNYVNTRIWQIANEVVKLAKRFNANIAVEKLRNLRKHRGEWSKKSRKKVNRIPYALFRHALKCVAEREGTLIKEVAPSYTSQTCPRCGHVSKENWRGYVYFKCDRCGYEADRDRVASLNIALKAAPKVGVPKTYFWSQIPEGGASVSRHALKDEGCGGWHQTTPSFKPTDLSVGS

SEQ ID NO: 54496 - protein, 481 aa, Hydrocoleum sp.
  misc_feature (88)..(88): Xaa can be any naturally occurring amino acid
LYAKKLELKLNNQERSKMAQCAGYARFVYNYGLNMVNGTSGMTKVNKRGQEVSWSYALRILEAKKVFTNYVKKQPEYAWTSNYSSRIXAQCAGYARFVYNYGLNMVNGTSGMTKVNKRGQEVSWSYALRILEAKKVFTNYVKKQPEYAWTSNYSSRIYQSVFQHLGEAFKRYKEGTSKYPQLKRKKDRQSFTVYDGNGKVTINPGKKIKIPTLGTFRLWESIPYTTTSQTFTISRTGEKWFVSFSIEAEKLPVHPLLDERSEETFGIDVGVKQFASIANLELGENALISLPDSIKLEQLKLAKFQWCNRNKQLGGKGKPPSKNGIKYYKKLAKYHGHIANVRRDFIEKTTTLLVSKVKQVCLESLNVKGMMQNGKLAASIARLGFYEFRKRLTTKIVGSGGTVVLADQWFPSSKTCHNCGHINQELKLKDRTFDCPNCGMRIDRDMNAALVLSQYGEVNQFSRVGCTRIYACELEEGDLPG

SEQ ID NO: 54497 - protein, 273 aa, unknown
  TnpB Polypeptide
MTFDGSQVKIDPLEKDNGCPVAKIRVNRRWYRFWYSRPIAGNIKRVTVKKDFVGDWYITITTDAQGLEPASKTGETAGFDFGLKDFLTCSDGTTYQSPEFYKSASILIKRVSRALSRKQKGSQNRERARKDLARVHRKIGRQREDHHWKLALELVRKFDACFFEDLNLEGMKRLWGRKVSDYAFGDFMQKIKWQAKKRAKSVVKIDRWTPTSKVCHACGQVQMFFDLSIRDWFCHNCQIHHDRDINAAINIHKVGASTFSGGDIRPASAGCLL

SEQ ID NO: 54498 - protein, 370 aa, Bacillus sp.
MATQHKAYKFRIYPTKEQKIVLHKTFGCVRFVYNKMLAERIDTFERLKDDKEKLKKIKHPTPAKYKKEFEWLKEVDSRALANAQLNLDKAYKALFKGNAKFPKFKSRRHKQSYTTNVVNGNIQLLDGHIKLPKLKQVKIKQHRQIPSELTIKSCTLSMSASGKYYVSILTVYEKDIAGKEIKKVEGLDFAMDGLFVDSEGKKANYPKFYRQMLDKLATEQRKLSRKKKGSSNWKKQRVKVAKLHEKVANQRKNFLHQKSKELVSTFDAIAIEDLNMKAMSKTLKFGKSVADNAWGMFITFLQYKLADQGKQLIKIDKWFPSTKMCSNCGSVNEVKLSERVYQCVCGLHLDRDHNSALNIKKEGIRLLAIV

SEQ ID NO: 54499 - protein, 374 aa, unknown
  TnpB Polypeptide
MKKQRAYKYRFYPTPEQSQLLAQTFGCVRFVYNSVLRWRTDAFYQEQIKIGYTAASARLTAIKKLPELAFLGEVSCVPLQQSLRHQQSAFKNFFEGRAAYPTFKKKHGKQSAEFTRSGFQYRDGNLFLAKSKTPLAIRWSRELPCEPSTLTVSTDCAGRYFVSCLCEFEAETLPITPRMVGIDLGLKDLFVTDQGERTGNPRHTAKYAARLALVQRRLSKKTLGSANRAKAKLKVARVHAKISDCRSDNLHKLSRRLINENQVVCVETLKVKNMIRNPKLSKAIADVGWGEFVRQLEYKGKWAERQVVSIDQWLPSSKRCSCCGYTLKALLLHVRSWTCPKCHAELDRDVNAAINIKAAGLAVLALGERVSPVL

SEQ ID NO: 54500 - protein, 389 aa, unknown
  TnpB Polypeptide
VLRVYRYRLYPTRAQDAALRETLVRLRELYNAALQHRRDAYRRQGVSVSAYSQMRELVGVRLVRPEYAAIHTHLLQDAITRLDRAFRSFFRRIKAGEKPGYPRFQGRGRYRTFTFKDAANRNGVRLVAGGERVELTGIGRVKVKMHRPIEGRVKQASVSLSGDGHWYVAFVCDNVEAKLLAPTGSSVGIDVGITTFAALSDGSMVDNPRPFEAAQRQLATAQRRVARRKRGSHRRSKAVVLLAKRHDRVVRVRRDFHHKVALDLVQRFDAIAIEDLNIKGLAQMRLAKQVHDAAWAQFRTILTAKAESAGRYLVAVDPRGTSQYCSGCGVEVRKTLAVRIHDCPSCGIQLDRDVNAAKNVQRRGQRRRGGVSSERLEEPRSPYLAVCGR

SEQ ID NO: 54501 - protein, 468 aa, unknown
  TnpB Polypeptide
MPVVAQKIEIKASNKFKTYCRKAFGVSRFAYNWCVERFTKDYQQYLTEWSVYNRKLKEYSSSPLLHTQMPVKPKLPSALDYKKEFNSKKKELYPFTKEVTKYASQQPFINFDRAVSAFIKAGVKGKRKKGLKDCFPKYKKKSYSSGSFYIGGDQVMVKTSVSCSRRLENKSQKQYLKIPKFGYVQLKEKLRFEGYINSVTISQRGDRFFASFSIEISQEEFDRTHKAAVQNKTAVGIDLGLKSALVLSDGMAIKAPKPLKKSLLRLKRLQRQLNRKNHPRTKGDKTKVSKNYIKQSKRLNKIHLRIHYIREDFIHKVTTALVRNYEYICLEDLNVKGMMRNHHLARAISDIGFYRFKSVLMYKALNFNRTVVVADRFYPSSKTCSRCGAIKENLTLKDRVYECKNCGAVIDRDLNAAVNLKNQIKEKIGGATPELTPVELTALQDCFNQNNLATSSVETGIRLKDYNY

SEQ ID NO: 54502 - protein, 216 aa, Nostoc sp.
LQKAFKITLIPTHNQQVLVNKTIGCARFVYNRFLALRKELYSTEKKALNYNACSQRLTLLKKEIEWLKEVDKFALQNSLKNLEIAYKNFFTDLKKAKNKKGVGFPKFKKKYGCKQSYKTNFTNGNIQVTENRLKLPKLGWVKFHQSEQITGKLVSVTVTLTNTGKYIASILCETDIEKYPQATRNIGLDLGIKSYLVTSNGEVVDNPKYYRIQKGS

SEQ ID NO: 54503 - protein, 380 aa, unknown
  TnpB Polypeptide
MSIFYAVKLTLQVQLLPDPDRRAQLLATVERFNEAANWLAGKAFAANLANKVFLQRLHYRELRSRFSLSAQMAVRCIAQVVEAYKRDKRKRPRFRKYAAMPYDQRIMSFKGPDRVSLLTLEGRVLVPIIMGRYQRERFTKAKGQSDLVRRRDDRWFLLVTVDVPDGTPIPATDFFGVDFGVVNLATTSDGKRVSGAGVEAVRVQHAKVRRSLGKKMSAEHKRRTRRNARRAMKHIGNREQRFRRHTNHCISKSLVALATDTGRGIALEDLKGIRERTRFRRDQRARLGGWAFSQLRSFVKYKAKLTGVPVVLVDPRNTSRTCFKCGHCDEANRQSQADFRCRACGHTAHADHNAAQNIARRGAAVNLLEVSEPHQVLSAA

SEQ ID NO: 54504 - protein, 390 aa, unknown
  TnpB Polypeptide
MLKSYKYKIKPNKDQIVLLNKHFGSIRFAYNYFLNQRKVEYETNKQTLNYNNNSAELTKLKKLEEFKWLKEINSQSLQHSLKHLDDAYNSFFKGKTKFPKFKSKHNKNSFKIPQYIKLIDQYLYIPKFKEGIKMIQDRKFVGEIRQCTISKTPTNEYFVSILVETEHKKLEKTGLSVGIDLGIKDFIITSDDFKYKNNRYTKKYSTQLKINQQYLSRKIKGSNRYNKQRLKVAKIYKKITNSRKDNLHKVSLDLVKKYDTIFLEDLNIKDMIKNHKLAKHIQDCSWGTFITYLEYKSLWNDKQIIKVNRFFPSSKTCSKCGYINQNLKLDLREWTCPSCKTKHDRDFNAATNIKQEGFKIISSGTDDNRHGDQIRPTSVGTIYEMSKKLS

SEQ ID NO: 54505 - protein, 412 aa, unknown
  TnpB Polypeptide
MRGKTTLVRVVPRGVYMLTLKAQGLLIEGSLEELRKELYLTQRTAQYVIDALWELDKVPSINQVHQMFYKILREYGFRAHQCKQIYKYALSVVKSAKRNNGRKPVLKKLSARLDRYDTKIDLENQMVIVKLRDKEFRIKLLHSREYTRKFVGKKWYEVIISIDRQRRIWVCIPFKWIYEPHKPRRVLSLDINLKKIVIYNGKSVRRIDTRFTESLYLKHPAENIQKKHSYAWRRNKKWLKIIKALHRRSKNIVVDWSRKFAKYIVLKAKRTRSAIVLEDLDKLWFNASQKSSSLADMLSRFAYRKLQLAIITKAIEYNVPIVFVKPRNTSTTCPEYGAKLNYNHRLALCTRCGLIADRDTVGSMNIYFKSIQVLAPRLGSWSTRSMTDENQPKGGLLIDEPMTNYIHSYKFI

SEQ ID NO: 54506 - protein, 406 aa, unknown
  TnpB Polypeptide
MNLIRTEQIQIEGTDELSSLCHLSKNLWNEANYLIRQEFFMNGNWIRSNTLAATLKTSENYKNLNAQTAQQILKVLDRSWNSFFKAIKEWSKNPDKFIGRPKIPNYKPRDGEALLIFTNQQVTIKDHILSFTKKLPLKIKTRLLDNTNLREVRLIPKGLNYICEIIYKKQSEVGEINKRWYAKIHNGNRVIGIDLGLRNVVTIANNIGEIPIVIKGGILKSMNQYYNKEKAQLQSIYDKQGIKFGTRMSQLNSKRNHKIKDTMHKISRYTIDYCLENNIGTIVIGKNDNWKQEANMGKKNNQNFVQIPHFKLIQMLQYKAETEGITVKLQQESHTSKCSFLDSEPICHQETYKGVRFTRGLFRSENGTILNSDVNGAYNIIRKAIPDAFAKGIEGVGLHPIRSNAL

SEQ ID NO: 54507 - protein, 382 aa, unknown
  TnpB Polypeptide
MVSSCRMRQAYSGAMRLRYRFRLHPTPAQREALARAFGCARVVYNDGLMLREEAYMAGLPRVSDSHLMRLVTTEAKRTPERAWLAEVSAVVLQQSVADLHRAYRNYFAALAEVKAERAKGNKQAKLRVHKPKPKRRRHDQSIRFTANSRFRVLSNGRLRLPKVGDLRVRWSRELPSTPSSVTITLDGAGRYHASFVVQVQEAPLPSTPAQVGIDLGLTHFATLSTGEKVANPRWLRQRQQALRRAQRSLSRRQKGSKNRDKQRRKVAKLHARVADARRDFHHQLSARLIRENQAVVAEDLNVAGLGRSNLARSIHDAGWSSFVAMLEYKAALSGRRVVKIDQRHPSSQLCSACGQRSARRDWAPSSSAPGAALPATPSTTGT

SEQ ID NO: 54508 - protein, 418 aa, unknown
  TnpB Polypeptide
MKRTYKYRIYPTKEQCEALQSIFWFCRFLYNSALEERKAYYKKYGKLLSYNAQAAELLEVKRQFQDETAMIHSQVLQQVLKTLDTAYSNFFRQIKKGEAAGFPRFKSETSFKSICFPQPKPDLAGGCVKKLPNNKLKVSGIPGEIKVKWHRELPEEALAKQVRIVKSAGKYYVAISCENVPQELLAPTGKTVGIDLGLNSFIMTDGGVSFRHPKPYNTSKEKLAFLNKKLARKKRGSNNRKKMLVALQRENEHIRNIREDFRHKVAKQLVMENDVICIEKLNVKGLLAKPDKPDATHQEKAEERSHKNNIQDASWSGFAAKLIYKAESAGRKVIQVDPRYTSMTCSCCGNIQKMPQDVRTYECKACFASLDRDVNAAINIASLGRRAQVAQQPAIKNIGIGMILARAASPPLSEATKL

SEQ ID NO: 54509 - protein, 405 aa, unknown
  TnpB Polypeptide
LYTIDEKALKGNLNLSLVNLKGQWHLRINLGNGEYLWAKLIRSAKRKTDKWVSFISAIEHAEKTDEWFPYTVRLKLRKGKIYAQFSKEEKFPEVTITKDNGVIGIDINAYPFHLALVYTAKDGNLEKYERISLDKLLEGSSEKRAYLSWQTAHQVVEIAKRERKAIVVENLEKLPKGKRGDGLPKLRQKLQKWVYKALLQKIEIVARRNGIQVIKVNPAYTSIIGKLKYAPLYNIDKDTAGAYVIARRGLGFKERLPKNYKGLLKDADFLSYTIAKIEDKITKIKQEIREEKNEYKRNRLKSVLWKTRKELDLLLRYLRESGESESAAQQTVNRKMERVRGRAQTLQKSWQVLTVALAFSCLESLRDLSPLKRVIFARDWVGAAKRDSPSLPGQGTTVLNMYSFV

SEQ ID NO: 54510 - protein, 441 aa, Bacillus sp.
MATTNEGVHIKGTKKALPEGWVTFAFRYAIFPTKEQAKRLERAFGCERKVYNEYVAGLYDYLETVGFEGGPIRYKAPSYTTITANYHYLDSSNDAFVYNDAKLRFQASMKKYNERYGKKPLQYKKSVYKRMRTIGYVPTLRDIKGMPKFHSRKNGKFSYTTNQTNGNIKMTQENGDFYLCVPKFQEGIPIVLHRDMPVDGVIKRATIKREGTVYMVSLSVDFPFVKVKPAEQVKSDKVIGLDYSQHDLYVDSEAQIAQYSRYNKLIEKRQRKMNKSLARKKNHAKRDENGNVIFSQNYQKQVVSYQRVMTKVKNQRRDFLHKKSNQITNDYQAIVVEDLDLSSLSQCLALGKKLHDNGFGLFRRTLQYKADKKGKHYIVVDKHFPSSKTCSECGYKKDKLKLSERTYKCDNCGTKIDRDYNAALNLKQYGIRVLDEMGKLA

SEQ ID NO: 54511 - protein, 365 aa, unknown
  TnpB Polypeptide
MKSKTQIKTLKVRIRDKHANVLSQWAFEVNQVWNAANAISAEYSWVPIPGVGYMNCNTSEYDIQKELKSIRNERELTIGAATVQSVISQHAKSRKQFKKNKLQWRCSSGSKRALGWIPFKAAGVKLVNGQIRFCGEFFGIWDSYDLSKYELGTGSFSQDSRGRWYFNTTVKIEVKPSEGKSSVGIDLGLKAAATCSDGTIFERRRITDEFAVRLAIAQRANKKKRIKAIHAKIKNSRVDAIHKFTNAMIENYGAIFVGNVSSKALVKTKMAKSVLDTGWWMLKTQLEYKAIARSVVFAEVNEKYTTQICSGCGEISVNSPKGRAGLGIREWSCPLCGEVHDRDINAAKNILRLGHQSLAVGIPVL

SEQ ID NO: 54512 - protein, 388 aa, unknown
  TnpB Polypeptide
LIETIKVQLRPNNKQLTKLFQYAGCGRFAYNWAIAREQENHELGNKFLSDNELRKEFTQLKKHKEYQWLSKISNNVTKQEIKDACNSYKRFFKGQSKYPKFKSKKRSKPSFYQDNVKIQFTDTHVKVEGFSTSRKNNKQKLNWIKLCEKGRIPTNCNYMNPRFTFDGLHWWVSVSIETENDTNIPQNKGVGIDLGLKELAIFSDGNTYKNINKSPKMKKLEKKKRRLQRSISRKYETNKKGGCYCKTSNIVKREKELLKLTKRLTNIRHNHLHQITSEIVKRKPSFICIEDLNVSGMMKNKHLSKAIQQQGFYEFRRQIEYKARWNNIPVIIADKFFPSSKLCSCCGEIKKDLKLSDRIYKCDCGNVIDRDYQASLNLKQYGENVLNL

SEQ ID NO: 54513 - protein, 398 aa, unknown
  TnpB Polypeptide
MGMNRAWRYRLYPSKAQQEKLNSYLRECKDLWNSLLEYTKAYYNEIGKFPTRKELYLLTKEAPLFSQIAQNVADRLSKSLKGMMLKKKSGKKAGFPRFKPIERIKSFTYPQFGFMLAERLELSGLGSIPIKKHRTLGGNIKILTIKKMPSGKWFAIFTSEVEASKVRRKTGTSVGLDLGIETFAYMSDGSKIENPRYLRLTEERLRLAQRRMSKKKKRSLNRAKARRAVAVAYEKLTNRRRDFLHKVSRALVTQYALIAVEALNNEGLARGFLAKEVSDCSWAEFSSMLAYKAEEAGCEVVLVNPAHTTSTCSSCGLVQKKSLAERWHSCPCGAEMHRDLNAAINILKRATAGTVGSQACGEETPTHYKHNEQVSLMKQEAHAFLAAFGRWNPESKAL

SEQ ID NO: 54514 - protein, 387 aa, unknown
  TnpB Polypeptide
MILRYDYGMRKTLKYRIYPTKAQTTTLLKQLDECRWLYNHLLEQRKVAFDERGEALSLYAQQATFNALKDERPNLKQVHSQVLQNVAVRIDLGMKAFFRRVKAGEEPGYPRFRGKGRYNSICYPQYGNGAKLTGNVLYLSKIGNVEVVLHRPLEGTPKTVCISVSSTGKWYVTISCDVSNPEPLPVSPEQVGIDVGLKEFAVFSDGRVIANPRFFRVDEKQLAKVSRKLSKQTKGTPARRKARKPVARVHERIAWRRGDFAHQNSRRIVNQYQVIAVEDIHVNRMLHNHCLAKSISDVAWSQFGSLLTYKAAWAGRQFVAVYPAYTSQTCSSCGHRQPLPLDVRVYHCPCCDVTLDRDHNAALNILALGLQRLGIQPVEAPQFIAGE

SEQ ID NO: 54515 - protein, 269 aa, Thermoprotei sp.
IPTYQNKAYILYSKFKIKLLHHRSYIEKFKGRKWYEVTVSIDKHGRIWVSIPFRWEYNPFKPKKIVSLDINLKKIVVYNGRSIRRIDTRFTEALYLKHLAENIQKKHRYAWRRNEKWLSIIRALHRRSRNIVVDLSRKFAKYIVLKARKTKSAIVLEDLDKLWFSASQKSSSLADKLSRFAYRKLQLAIVAKAIEYNVPIVFVNPRGTSTICPRCGAKLTYNHRLAICRNCGFVADRDTVGAINIYFKAIEYLAPCLGSWGIHSMTNET

SEQ ID NO: 54516 - protein, 463 aa, unknown
  TnpB Polypeptide
VPAGRCRPGPGPPRTGQAATGLLPCRSSEPPAETSAFRPGRNPEPGEVGLRFSHNATSDVVFRYSVCMPRCRVYPTPEQETAMLRHCSDARYVWNLAVEQHAWWKPGRKSAPGYLEQSRQLTAARAGNQWLREGSQTVQQQALRDFDQAMRNFFNGTHRRPTWRKAGRHEGFRVTGTRGRGWNLRRLNRKWAQVQVPKVGWVRFRLSGPLPDDVKSFRVTRDRAGRWHVTFAAIPGPVPAPGNGEVVGIDRGVKVSAALSTGEMLMVPGLTAREAARVLRLERKLARAKRGSNRRGNAKNQIAWMKVREADRRKDWVEQTSTDIARRFDVVRVEDLNIRGMTRSAKGTAEAPGRNVAAKAGLNREIGKSGWGALVRRLEDKAPGRVEKVPPAYTSQRCSACGHVAKENRESQAVFLCTACGYACNADVNAAKNIAAGHAVNARGGDRVTGPANREPQLTLLGV

SEQ ID NO: 54517 - protein, 384 aa, unknown
  TnpB Polypeptide
MARRGNKAIRATVPMKIALSEPLLALINNYVKALRFALFWLKENVPNPNENGVLSKVHKVLYEKLRDEYNLPSKVAQDCYREALSIYKGWYNNPRRGRFPRVYRPTVWLTPRASYNVDFEAMTVRIAGVGELPILGYPRNLKDYLSWRMKKARLVIRNDKAFLKVVFEKSREEKVESKESVAVDVNMNEIVVGKDDEHYVRIPTRLEEVHHWKSLAENLQMKYPKRWKENKRILRRIRSFHLKARRITEDFARKVGKWVVEVARMIGANVIKLESLKNLIKSADKLPREFRDKLYLMQYRRVQYWIEWQARKHGILVHYVNPSYSSVSCPKCGKRMVEVSHRYFRCLNCGYENDRDVIAITNLNGRGSLTLSTAPQMRDVSPNR

SEQ ID NO: 54518 - protein, 223 aa, unknown
  TnpB Polypeptide
VNLVFTVEVPPFRRCISVLGVGLGERIMATTVLLHNGCIKQPQFFGRFVRGIRRHHAWLRRRLQKRGLKRVIRRIGHREKRRVEAVLHQISKEIVELADATSSWIAIGDLMGIRERTQKKGRRVRRIIGNLPFHKLTKMIIYKALLRGLPVVMVNEAYTSITCHVCGRRGMRSSQARFRCSACGEYNADLNGAINIARKVERHLGYMPLCGVAREPTLNYANA

SEQ ID NO: 54519 - protein, 425 aa, Halobacterium sp.
MAQEQTLVKTLDFQLNIQSDNESLLEDATLESRWAYNETIRLAKQGVDWNEIPDRVADDADLVKNTTQRVVAKALGAMDNYYEYDDFNQPSHTKDGTYPLRANFEEGYNLTLRDDGTVEFRISAKPYKHVQGVLEGDDAHLDILRAALAGDEWNIGTAEALFHDGTPELHVNITNTERTVRDKHDSRTAIGVDVNEDNVALSALSADGVEDTLVIDFPEIKFERHRYFTMRKRVQNAEKPSMHETLEGREERFVRDRLHKVSRHIVEWCQQFETPCIIFEDLKEMRDSIDYGTRMNRRLHHLPFRALQYYTSYKAAFEGVPTAWIDPEFTSQQCPMCGHTERANRHKKRFKCRDCEHQDHSDRGASVNIAVKGIEKHQDWNVPALNSLPQVRKVRRQASGAVDAPTVALDTVRGHHPDGIRGVSD

SEQ ID NO: 54520 - protein, 276 aa, unknown
  TnpB Polypeptide
VAKAKKLMGVQQCLITPDKDLKAILEYICSESNKLNNCAVYYARQIWFKTRKFVTGFDLVNELGSNKHFSALPSEAAVQTCLSVGESVKSFSELLKKSCKGELEQNPKFPKYRKQGYQLVAFPKRALRLAGNTIRFPLGLQVKAWFGLKEFFLPMPSNLDFDLLKEVRILPRNGVFYAEFVYPKASIETKLDVGKCLSIDHGLNNWLTCVSNVGTSFIVDGLHLKSLNQWYNKRTSVLMEGKPNGYWTKRLANITEKRNRQMRDAVNKAARIVVNH

SEQ ID NO: 54521 - protein, 383 aa, unknown
  TnpB Polypeptide
MPQRPSQWATYTAARVEAARLWSDLVARHHRLRRMNWRWPSKARFQTWAKGRYPGLSAQATQQIIGEFIAAVDATRQLRKNGHNEARYPWKRPRYRDVVYTNQDARIRGHRLVLPNGKSGTLRIPLPADRPLPGRLMEVRLCLGHVLLICEVLDEARHQRTVVGVDLGVNTLIAATDGKKAVLISGREAKATVQWRNKRLASALSKQSTMVKGSRRWRRVQRRKKQMLAKARRRMNDVIHKATHQVVAAFPGAMCYVGTPFNEAAQTMNGVWAQQVSQASNGKIARQLDYKTSGAIQVDERYSSQTCPRCGARHKCRRVYRCRNCGIVAPRDVVGSTNILCIGLHEAMRIGQSLATEVVYVRPVKVFRREPDSSLGHSGHSSA

SEQ ID NO: 54522 - protein, 395 aa, unknown
  TnpB Polypeptide
MKTVLDSLCDYRRYCWNRGLELWNDMYEARLIGLPVELRAKIKASLTNKTVQFSEEEQALRARFPTPSVYVVQNELVAQKADWQYELSARVLLRAIKDLTAAWNLFFKNPKTANKPKFQSRKKPKQGFKTDRARIINGSLMLDRPHAHKGEWSGIRFKGASIPDGKLKLCAVTRTKGKYIATMTIDVEPVVLPKTGKKTAVDANVDHFDTTEDQTSLKPESLDRLYERVHTYQRQLARKRKVNKNYRHSKGYQATRAKLQATYERIRNVQNDLLHKFTTDLYRENDAVVIEDLDVKGMQMKKKAKNLHRSLFGRFRQFMEYKAEKFGKTLIIADRFYPSTQRCSDCGHVKTGDEKITLSGNAKHGTKHHEYVCYECGYEDDRDHNAVLNLLALAK

SEQ ID NO: 54523 - protein, 395 aa, unknown
  TnpB Polypeptide
MKTVLDSLCDYRRYCWNRGLELWNTLYEARLIGLPVELQAKIKASLTDKTIKFAEEEQALRALFPSPSQIVVQNELVAQKADWQYELSARALLLAVKDLAAAWNLFFKNPKTANKPGFQSRKKPKQGFKTDRARIINGRLVLDKPHAYKGDWSSIRFKGANIPDGKLKLCTITRTKGKYIATITMDVETVALPKTGKKTAVDANVDHFDTTEGRTSLKPESLDRLYERVRTYQQQLARKRKVNKNYRHSKGYQATRAKLQVTYGRIRNVQNDLLHKFTTDLYRKFDTVVIEDLDVKGMQMKKKAKNLHRSLFGRFRQFMEYKAEKFGKTLIIADRFYPSTQRCSACGHIKTGDEKITLSGNAKHGTKRHEYVCYRCGYEDDRDHNAVLNLLALAK

SEQ ID NO: 54524 - protein, 514 aa, unknown
  TnpB Polypeptide
MRAQTPSYVVSVKLKLSESIENHLEKSFNMANSAYNEALSFGLKRFEALKQNSDYQNLLEARRQALSGIATLKKAKRKTVGLSQQVKLCNRALFLVQKAYSLTEFGLSTHLSAQRRKDGSSYQHLSAGELQVIASQAYKALEKVFFYQIKPHKVRFRSKFDLNVSYRNRVNTEATRLVELNRNGMAYRLFLHKVSTFVDIPIKAFNHYQRLSLLRCEKIKYVQIIRKTIRGRKVYILQIVCQGFPPSKVTKGEGVAGIDPGISTVAFASPTEVALVDLVPTTITRKEKLLKDLDRKIERSQRVNNPECYDERGKIKKGARFKRPSKRQVRLRNRRRKVYRSLSEERKKLQGQLVSRIVSQTSCIRIEELGVKGLQRRSRDIRINPKTNRPYSKKRYGKAIFRAAPSAFRTALETRASQLGIDVEVISPKDVKPSQYNHITQTFDKKSLSTRVYDLSEQYTGVQRDLYSAFLIGHIEKGRYQQEQLEQDFPDFYAQMKDFLQQPMETERLAWYLN

SEQ ID NO: 54525 - protein, 381 aa, unknown
  TnpB Polypeptide
MAMLRAIKLRLYPNKQQEQALNKVLGCYRFVYNHMLAHKQEAYKVDKTNLGLTELSKYFYNELRKDEQYAWLKGQNTNVMQQAIRQMLTAYDKFFKEHKGFPKFKSKKDKQSASFSKHAISKKNAFDTRKITLTKNLKNIKFRCSDLYHKRLQKYKDNIRSATLSKTKSGCYTLSILVDMNDNELIKFNKTGRDVGIDLGVKDFVITSDGEVFENKHFFKKDEKRLTKLQRQLSKKRKGSSNFHKQCKRIARVFETITNKKENYIHSVVNYLLHHYETIYMEDLNTSGMLKNHKLAKAIQEVGFYKFKMVLSTKALQNDKKVVLIGRYYPSSKTCSQCGYIHKELKLKDRQWQCPNCGANHDRDYNAALNILYEGRRIIAV

SEQ ID NO: 54526 - protein, 185 aa, unknown
  TnpB Polypeptide
LNKSFKVRIYPNKEQQILIDKTFGCTRFIYNFMLNLKQKLYKNFNINLSYNNMSKILTELKRHKLWLKEPDKCSLQNSIKDLDNAYQKFFKGSGYPKFKSKKDKNSYRTNMNINLDQNNKMIRIPKIGWIKFRDKYKFNGLTKIYNVTISKNSSGKYFASISAEVDIETFAKTKKSCGIDLGLKD

SEQ ID NO: 54527 - protein, 571 aa, unknown
  TnpB Polypeptide
LKDRYKSQFSAAFYPILLSDTKRAEIIHRAEEIRAVRNDISEVFFSDMLGFQDMSKFEAFNLFNPTFNTRLSSHYLKKAIEDVWRAYQLRFDAIRKKIEFVKVEELVPSFYKINVKGHKKGDLKSIECHTKKTELTKVLTWLARYGKEETVYWLESAIPTAVESKQKFYRTILAKIRKFGFARLMRLALSRRTSVFSEYEKRGKITFESLTFSGRSRIKRPIVDARRNETGKFDYFIEFSWDWFDQGYRGDSKNTLCMPFKYNKAYHRSLNRYCNGEDTSYTMVVRGKDIHIVLARDGYRYKNTDEITEENTVGIDVNSKHNMFALSTGEFIPHDEELVAELETELLKIDQKQKNYNARFAKDEEHDAFKISHKDKKRIEAITLKLNESNKRRIAAMCKDLYSRGYRHIVMENLTGFQGRRLDSTDRNGMNLGRLHLRIGLSSLKDEVEHIAPKYGESLSLIHPEYTSKMCPVCGAIDDRNRPDQETFDCVECHHQDNADRNSSVNIKFRVTSTVLRGNLLELAGDGGYRYFQPKSLPMWKVRRCLEKCRCSGLFKQAMGNHTILTAGKFE

SEQ ID NO: 54528 - protein, 431 aa, unknown
  TnpB Polypeptide
MKTVRLTISNKIDVLDDMRLFSSIVRVAFNRYQDGMEEKEVRAYCNSMFDHNSWFIQSAVKEAAALYKLNGEKHILFGGKNNLHQYLVGIIDKTTFKYRRMFPIGIQGEKLHKGNRLFAFDLDHQRLTYKPSKDRHVDIRFLPMKKKITSEIAKVQQLVEQNKITVSVKLSEKYVWLTYDESLIYNARFKKLDCRRVLGIDMNPNYIGLSVIEFDKNDEFKVLHKQVFDLSKLTGSSGKASTDSKSKYITSKLRHETIAIAHEISKLVDVWKCKTVAIEDLSIKPKDQKKGKKLNKLCNNKWERRLFVTKLKMLANLHRFDLVEVNPAYSSIVGNFAYGSENTPDMVAASIEIGRRAYKKFEKRWFYPRFNIQFRDEQWKQTLGPVDDWKGLFSRIKETGLKYRFLLRDYVQNAVFSKNYIQKCYNIYTFA

SEQ ID NO: 54529 - protein, 466 aa, unknown
  TnpB Polypeptide
MGQATRTTKLLLDLGKREEGGANAGKRAYLDATGAILTQARAFYLDFFLAHAQKLAERVSYYSEKHLEMRTRAISANELLTWAEGCTVATREHPHPWEGWNFSERFAGMPVVYRRAAIKDAIGKARAYLSQRANWEKSGKQRGKPGLPGAANHPTLYEGAIELDLSGDGKERARFVRLKVYTGTAWQWHNYPVKLSRYFEERWQDPAWESQSPKLILRRKSAALHFPQVKQVAAKKVKASKEDPHLVTVAVDLNVKNLAVITVRQDGRIIETVFVTDHGLDQARFRHLKRIAKKQWQSGKPVKGEHSNQQLWGHVRQMNEDAAHNVSRRIANVCARYPGCVLLFERLRKIKPKGASKSRRMNRRQANQLRGKINRYAKDKAYAQGTVTVEVNPHGTSQYCSRCGAKGERFSYQNGKRIQVKWGKLFRCPVCHFEVDADWNASVNVHRSFYREWHWHPRKKPPPKAA

SEQ ID NO: 54530 - protein, 459 aa, Mycobacterium sp.
MARLKVPEGWCVQAFRFTLNPTQTQAASLARHFGARRKAFNWTVTALKADIKAWRADGTESAKPSLRVLRKRWNTVKDQVCVNAQTGQVWWPECSKEAYADGIAGAVDAYWNWQSCRAGKRAGKTVGVPRFKKKGRDADRVCFTTGAMRVEPDRRHLTLPVIGTIRTYENTRRVERLIAKGRARVLAITVRRNGTRLDASVRVLVQRPQQRRVALPDSRVGVDVGVRRLATVADAEGTVLEQVPNPRPLDAALRGLRRVSRARSRCTKGSRRYCERTTELSRLHRRVNDVRTHHLHVLTTRLAKTHGRIVVEGLDAAGMLRQKGLPGARARRRALSDAALATPRRHLSYKTGWDGSQLVVADRWFPSSKTCHACRHVQDIGWDEQWQCDGCSITHQRDDNAAINLARYEEPPSVVGPVGAAVKRGADRKTGPGPAGGREARKATGHPAGEQPRDGVQVK

SEQ ID NO: 54531 - protein, 423 aa, unknown
  TnpB Polypeptide
MIVTQKNKIRGLSKIEFKILKRMCHESKALYNTSLYYINNYFDINDEYLGYDEMAFILKTNEHYKMLYAACSQQILKVVDREFRSFFHVIKERKKGNYNRVVKTPKYLPKDSLFLLIYPSQKLKINDGKMFIPLSKKMRKETCKKGITIKVPNYITTEMLCEVRIAYRYNHFEIEFIYEKQEKYYKFDENKILTIDVGLDNLLTNVDCISGRSFIIDGRELKSYNRWYNKRVAKYQSIVNKQNITKRTKWLKALDGKRYWFINDYLNQCVNKIIKYCLENKIGTIVIGENKEWKQGINIGKRNNQNFMSIPHGILKYKIKCKCEFHGIKYITQEESYTSKCSFLDDESIEKHEYYLGKRITRGLFKSSEGILLNADVNGALNICRKSKQKINNNNQLCIGLSSSPVRVRVHSIPSRTKNYVIY

SEQ ID NO: 54532 - protein, 424 aa, unknown
  TnpB Polypeptide
MLLTLKYNLNNMDNKKQEIIQDLMWHSSKVYNALLYEIENKQRILNLNKSLNILSSGIYKEYRVSNWHSEYLHSHMLQETIINVVSNYKAYVKLKEMYTKDKALLKGKPNKPRYKNEKSTKEIVFTKYAIRQNKNTLMLSLSKKMQEKYEVKSLNFLIPRKLKKLADFSKIKMIKIIYKKGTYEMNIIYEKEIAESEKEMTNICAIDLGLNNIVAITNKENNNTLLISGREAKSKNRYIQEKISKLQQINMCMLKDSRKHKNTKQINRLYEYRRNYMNTYMHKVSKMVIEYARENRCKEIVIGDIKGIKEKMNYNKNFVQIPLQNLVEKIKYKAELEEIKVKEISERYTSGVSAIDKEEITRENYDKKRRITRGIFITNKGKKINADINGSLNILRKYINKSSPNQEIAMDNGREQRPIKKRVA

SEQ ID NO: 54533 - protein, 365 aa, unknown
  TnpB Polypeptide
MLKSYKFRLFPSKSQVTKLETTLELCRELYNAALSERREAWQRQKKSITYLDQQNALPEIKAIREDVAEIHSQVLQDVLRRLDKAFKSFFQRVKQGKAGFPRFKGKNRYDSFTFAQSGFALKGNKLQLSKLGLFKIKWHREIIGKIKTLTITRSSTGKWFACFSVETTQEILEPTNKSVGIDVGIKSFAVFSDGTEIDNPKFFRADEKDLAKAQRKKNRKRAAKIHERIKNRRNNFVHQVSRYLIDNFDVIVFEKLKVSNMVKNSRLAKSIADASWSKLFELTSYKAENAGRKMIQVNPRNTSQNCSSCGELVKKDLSVRIHSCSSCGLTLDRDENAALNILRLGLESVGNQSVEATSKLCLVVE

SEQ ID NO: 54534 - protein, 376 aa, unknown
  TnpB Polypeptide
MMEIFRQMVNECIRIGLENNCTTLKKLSSFSYSKLQNYDILSYYKLTAISQACGRLIQRKKDIKKGKKPKIPYVEKLFLVSCYGFKINGMLLSFPVRNREFANILLNDYVARNISDTSLKIRSFTMTPESLSLSIQKEVEPIKPEKTIGIDRNLRNITFGNDDKVILVNTAELLKIKENYTYIKSTFRRNDHRIKKKIVGKFGIRQARRIQQRIHKISKSLVEYSKKQKAMIVFEDLKGIQKLYRKGNGQGRKFRRKLNSLSNYELERQTTYKADWVGVPVCHVNPRGTSKLCPRCGGRLQEDRQRRRDLWCGICEKWQDRDVVAAMNISRKGLARLTNPQGDTNEAMRGNLISDSDQEPVILRVDVSKLITELVL

SEQ ID NO: 54535 - protein, 370 aa, Peptoclostridium sp.
MEKGFKVQIFPNKEQKELMFKSFGCARFAYNWALAKEKENYEKGGKFISDMDLRKEFTQLKKKEEFKWLNEINNNVTKQAIKDLCKAYKNFFKKKAEHPRFKSKKKSKKSFYNDVYKIKFDDYKVRIESIGWMDMAENRIPRNCKYQNPKISFDGVKFWLSITCIVEDEENNLPKTEPIGIDMGIKTLMTCSNGMNFNRVSTKKEKKKLKRLQKKASRHYDKMMKTKSSDKSKNLLKLETLIRKQYQRISNVRLNNIHQATTKLVKLNPKAIVVEDLNVKGMIKNKYLSEKIADCSFYEIYRQLEYKCENKGMEFIVADRFYPSSKICSNCGHKKEKLSLSERTYRCECCGNVIDRDFNASLNLKNLAYN

SEQ ID NO: 54536 - protein, 405 aa, Mycobacterium sp.
  misc_feature (85)..(109): Xaa can be any naturally occurring amino acid
  misc_feature (360)..(403): Xaa can be any naturally occurring amino acid
MARFEVPEGWCVQAFRFTLDPTEDQARALARHFGARRKAYNWAVATLKADIEAWRVTGIGTVKPSLRVLRKRWNTVKDEVCVNAXXXXXXXXXXXXXXXXXXXXXXXXXYWNWQNSRSGKREGKTMGFPRFKKKGRDQDRVTFTTGAMRVEPDRRHLTLPVVGTVRTHENTRRIERLIAKGRSRVLAITVRRNGTRIDASVRVLVQRPQQPKVTDPGSRVGVDVGVRRLATVATADGAVLERVPNPRPLDAALNELRHVCRARSRCTKGSRRYRERTTEISRLHRRVNDVRTHHLHCLTTHLAKTHGRIVVEGLDAAGMLRQQGLSGARARRRGLSDAALGTPRRHLSYKTGLVRVGAGXXXXXXXXXXXXXXXXXXXXXXXXXXXXXXXXXXXXXXXXXXXXVA

SEQ ID NO: 54537 - protein, 305 aa, unknown
  TnpB Polypeptide
MLVKAVSFRLEDELPVRAGCHVELKLVLSKYHRGFLDDLSYSLGSLTLFPDRVVIAFRKTEPRPYVPESVISLDTNERSLDGVFVCEGKGVPVKAPFPQVAAIQQRHHDRRKRLQKKKSHDRRTSRRLGRREGMREHDRVEYRMHQVANAVLDFAEENKAAIVLEDLKGVFKPRVDKALNRRLSMWPRRKLHCFIEYKARWRGVTVLKVDPRNSSRKCPACGRIQYSRKGTEFACECGWHLDRHINASLNLLQTAVSKEMAGGLRFDPGALQRDVMMILYDPGKGARSEPNGASREEEAALHAAA

SEQ ID NO: 54538 - protein, 586 aa, Lactobacillus sp.
MIEYEHMTAMRKQLPKMTRKTKRTQTKTIRAYTAKLTDEEIKELDELFAGYGRCKDFLYAQLCGINHMTDVKQWHGPRDRIRKHDGEIKKARKAVKDWKKAYKKNKAQGLKSPDAKTVRLSKQKLLNEQFGIQGRHATEAVKDVCMNLNSMWSNLGLKLKKQVQANEILASAERQYLNYVFTSPYYWQLILQGRENEAKPNEEDSQYPSLRASLTKEQLRHCAGYIRRLTRKHKPYPHSSSARCMLCDEIMWSVVEKDGSSYLEIMTAKRGKKKQFKLTGPYCYANKKKRGDIQLILDKNKKRLEVHRAIKSVVSNKRNLHKKLGIDKGMATLISCSSGQEYGANFSKLVSAEAERINRRNTNRNKYIQPAKELRRQRSNLQKKLAGTGTHSAKTNKRIRCQIGSIERQIAHLEKHHLGNKLYRRQHERKQNNMERMMNVSIRQMLITEEPDVLVKEDLSFTKEKLPRASSRYEAKARRKLSSWAKGTLNKRLEYLCASQGIKTVDVNPAYTSQFCPRCGAHFTERKGMHHETAVCPNCGEMNANTAAAVNILRRMDDKEITLYTPYRKVEKILEDRYANKQAVMA

SEQ ID NO: 54539 - protein, 406 aa, unknown
  TnpB Polypeptide
VSKTKRAYKYRFYPTDEQKRVLAQTFGCCRFVYNWGLSIRKTAYFQHNQKLTYNDLSAMLPNLKKEYPWLGDVSSVPIQQSLRHLDKAFKNFFEGRASYPNFKKKQGKQSATYASNAFTWDGETLTLAKMDEPLVIRWHRDQPHGCKPSSITVSKDCANRYFVSILVEEEIKPLPVVNSQVGLDLGLKSMVILSTGEAVGNPKFYARDEKRLAKAQRRHAKKKKGSKNREKARRKVARVHARINDRRRDSQHKLSTRIVNENQVICVESLAVKNMVQNHCLAKAVSDVGWGEFVRQLEYKSQWYGRTLIKIDRWYPSSKTCHDCKHVVEDLPLDMREWVCPECGVCHDRDINAANNILAEGLSVSACGGGVRPARAKARICMCCLVRTREEKHTIVTLEKPETLVI

SEQ ID NO: 54540 - protein, 486 aa, Bacteroidetes sp.
MKKTIKNYCFNATQSKINELHEITKRYTSVKNEVFQRYGSVSGLQYLSYPRQIRDEWVKTKHAKKFGLQARYWKQAMEESFFTIESNWSNRFSRVKKNIYKNKNYTKDEKYYAFYLIKATDLLHKVLTFQSFNLPEIFKEKDIRRDKIHKYLKNRIRKYTGKKPHQYKQRSFMIDEGMYDVDIDNNNRLWLSVMGLIPRQRIRLLMTSKESLSGNIRIVLKGNRVEVHQTTEIETKDFIKGEARAIDKGFSEVITSSSGRKYGEQFNQLLKTESDRLSVKNKNRNKIRGLLKKYEERGDIVKTEIIKKHNLGKKKYFQQKEFNLNEIKQFINLSLNQFITEEKPAVLVTEDLAFTNWNKRFSKRVKRYFSSWLKGYLQERINYKTMLNGVQQVVVNSAYSSQVCYLCGLFGIRKGDKFYCDIHRVLNADYNAAVNILARMSDPGIGVYTPYRKVKDILQERLRLSNQDSRYSVQTGQSESERAEYV

SEQ ID NO: 54541 - protein, 391 aa, unknown
  TnpB Polypeptide
MQKMLTSLKKDHPWLHLSDATVLQKSLANLDQAYKNFFKKPDQFEKPKFKSRKHRSQSFTGKSQKQKSGKTSVYVAGNHYVYVPKLGFIKVSKTTRINGQIKEYTITRESFGDYYISFQIEEPDRELLVKTKQLMGGDLGLTHLLTLSNGLKFPKFSPGQALALSLKAQSKASKSMNRNSKILTTNELIYLIEKGIFDEDKYDASELSEFKNHEKRMKKSAKAQRKVANKRHDHLHKLTKKLVETYDVIVLEDLKVKNMLKNHKLAKAISNASWATFVRYLRYKCEWYGKLFILVPPHYTSRICHQCSWDSGKKPLDVREWTCPHCHETHDRDINAAINILYRGLETYLQSQLVLLNEQIKNGYFSTVFFQVASQWIKQTISYFNQALEIA

SEQ ID NO: 54542 - protein, 367 aa, Mageeibacillus sp.
MLKAYKYRIYPSKEQEIQLAKTFGCCRFVYNQTLAYRKDAYEKEKNSISKTDCNNYCNRELKKVYEWLKEVDKFALTNAIYHMDSAYQKFFKEHAGCPKFKSKHDRHKSYTTNFTNGNITVDFDRERIKLPKLKEIKAKIHRNFAGQIKSATISQLPSGKYYVAILVETENVKKQETRGKIGLDLGIKDLCITSDGRKYENPKTIKNYERNLTKLQRQLAHKIKGSRNYQKKRKQIALCHEKITNTRKDYLHKISSEIISENQVIVSENLQIKNMIKNHKLAKSISDVSWYELTRQLEYKAKWNNRIYVKVDSFYASSQLCSCCGCQNKNIKDLSVRQWKCPNCGEIHDRDVNAAKNILAEGLRQIA

SEQ ID NO: 54543 - protein, 223 aa, Chlamydiae sp.
LPKIGYVLFRKSREIEGTLKQTTILREGSHWYVSFSCEIEINDPVPAPIAEEKAIGIDMGLKSFAVMASGPNNTAKRIDNPRFFTQDLPRLRVLSRRLCKKVKGSKNWLRAKLQLSKLHARIRHCREDFAHKLSTEIIKSHDIICVESLDIPNLLQTGTRSLSRAIADASWRFFLGCLKYKAKEKGKHFVETGQYFPSTQTCNSCWHRQKMELGDRIYRCIVA

SEQ ID NO: 54544 - protein, 410 aa, Nocardiopsis sp.
MTSKSVKRAFKYRFYPTAAQAAELSRTFGCVRLVHNRALAERGTAWQQRRERVGYSHTSAMLTAWKRTGELSFLTEVSCVPLQQTLRHLHTAFGNFFDRRAKYPRFKSKKTSRASAEYTRSAFRYRDGQLSLAKMAEPLDAVWSRSLPEGARPSTVTVSRDAAGRWFVSLLCEDTIEQTPAANDAVGVDMGVTSLVVLSTGEKVANPRHEQRDRARLTKAQRALSRKARGSANRDRARRRVARVHARITDRRRDFLHKLTSRLVRENQVVVIEDLAVGNMVRNRGLARAISDAAWRELRSMLEYKARWYGRDLVVVDRFFPSSKACSTPGCGYVHASLPLHVRTWACPRCGVTHDRDVNAALDLEAAGLAVVACGAGVRPQRESSRTGRPVTKQEGHGATRDEALASNHR

SEQ ID NO: 54545 - protein, 462 aa, unknown
  TnpB Polypeptide
MKTTYQYKFYPDTKQKTALNEWLRISRYWYNRQLGDRFDWWEMNRTYVDSCPLVSSIADVREKPNFYSQKAQLPVIKKDLVKVFHSGELLDFKRVDASVLQEVSRRVDKAFERFIVGDSKGGKSGKPRFKTEANFKTMTFADGKAIKIQLIRKDWLYLRLPKIGVIKIRMHRDLPAMYDLKQVSVTRKADGWFIQMILEDDTVPEFNSDVVIPTWENSMGLDAVLHEDVYLATSSGEKLLSLKPLRGNQVKLDRISTRRNKRKRGSRSRRKLAKREAKQHQRIARSRQDFQYKTAHKLVRTGLMVFFHENLNLKGLTQRAKTKQADDGTFLPNGQSAKSGLNKSWSDAAFSHFFKTLEYIAAKAGAVVVSKNPAYTSMVLSYRDEVIFTDCGIRGYWDEQNALMVDRDINAAINLKRLGLDIFPSIKRRSGKLSVVGTMDQSTTKEILHTLHRAVGSLPCNL

SEQ ID NO: 54546 - protein, 405 aa, unknown
  TnpB Polypeptide
MITVNYEYKLKPSVSQVKTFETWLSACRKVYNFALRERKDWVNSRKSVVNACSLVSEYILPPDAPRPTYYSQCKSLTAAKQLCPELQLPHIHVLQQTLRQLEAAFVAMWERGHGFPRFKRKMRSFVYPDVKPSAVEPGRVKLPKIGWVKMRMSRPLPQGFTLKQIRVVLRASGYFVLLTYQLGVLVPDVPFSGHPLGVDIGLDKYLATSDGELVARPRFFNALQRQLKLLQRRLKHKKKGSTNWLRLQNKIARIHQKINDTRKDWQFKLAHRLCDSAQAIFVEDINFKAWAKGLFGKHTLDAAYGHFFNILSYICWKRGILFLKVNKDFTSQTCPNCQTITGKKDLNERVHRCRECGYTTNRDVAAAQVIVQRGISAVGQPVESQIASGGVLSGVNGNIDLDKIL

SEQ ID NO: 54547 - protein, 407 aa, unknown
  TnpB Polypeptide
MRIAYQYRLRLTSTQQTTVDEWLELGRRQYNYRLAERFQWWEQNRCDVNACPLICHLPELKDNSDFYSQKRDLVNSKVLFPEYKNIPSHTLQDVVARVDKAFDRWLKGDSNGKRSGKPRFKGKGRFRSIAFPDPVKPEHINGQFIQLPKVGKLKLVLHRPLLDGFKVKMAAIVKKADGYYITLSLQDSSIPVLTPDTPVLENTIGIDLGLKSFLVDDSGEEVVIPQHYRKSEKCLKRLQRSLSRKKKGSNRRKKAVKRVAKAHLKVANQRKDFHYKTAKKLISKGKNIGDEDLNIKGIARTRLAKSTHDARWGMFVQILKVKAANAGLLTIAVNPSGTTQKCSGCGVKVKKELSDRWHSCANCGCEIDRDHNAAINIRNLAVGLPVNKAQITPDGIPGVTEKPALYA

SEQ ID NO: 54548 - protein, 432 aa, unknown
  TnpB Polypeptide
MDISYNFILRRQRNKEVFDYIKDQMFWSARLYNQVLQIHNEMYWNCSVSYNYEMMEKLVKQLVVNNYFYKLKSGVAQQTIKEFYSNLESYFLDLKEYRLDPKKFKGVPRPPKFKGRYNTCVYTYVCLTIEDGIIYPSRNLAIKIPQNNFHNFACTHKGGKHEYNIRDVKFKYLSKNKIKVIFDYETDELNETLDKDNFIGVDLGSRGLMTVVSKDKSFIFDGKYIGKINREYNYQLDKLKSDRDLHKSIFRYDSNQIKELYLKRDFKISSYLHLCSKRLVEFCVAHKVQTIVMGYNPSWKESISKRTSRFQNRRFNEIPFLKLIKLLKYKCQKVGIRLITLNESFTSKCSALHLEKICKHETYQGVRKGGWFKSNKGFLNADINGAINILRRFVKDNDFVKRLISSKHIFNPKRLKLAEICCKQQYCALGFG

SEQ ID NO: 54549 - protein, 440 aa, unknown
  TnpB Polypeptide
MENLEQQLGEKQHYQMLVLTLDPDSNQKKLLDINLNGSRFVYNQCVEQHLDYLNQSEEFKKSNPLKYKDYKDIRAEHEFLYDCDQWNLQQTVIHYKKKNLANRKKRLNGTKVGKPRFKSRKFHDDKCYFNNQCIKVHHNSACKANSWVNIPKVGHVRFLRKFIPQKFLDGQIKQCTVKRVPTGEYRIALSIEINIDKLKKPRKENGHQGLDMSLTSFYVDSFGATAPDLSRLHDNLNYNLKKLDKLNRKFSLTRTKLKDSKDKSSKRHHKHAYNVLRTKIAKLSNHIQNIKVDYINKLAKFLCEHNELICIESLDLDEMRIHHKKSDQDYHAGGNHGKSIQRQKFSFFIKKLEENAEIYGTIIVQAHKYFASTQICSNCGKRNRQMKDVTIRKLKCIHCGFELDRDYNSAINLKKYGERCLQRKLQSDGKDLSHSKGSKE

SEQ ID NO: 54550 - protein, 353 aa, Acinetobacter sp.
MKTLKLRIKDKHCKVLDQLASEVNFVWNYVNDLGFRHLKRKGEFLSAFDIAKYTKGTSKECNLHSQTIQAVTEELVTRRKQFKKAKLKWRVSNKKSARRSLGWVPFKKVAIKYANGYVQYGKHQFKLWDSYGLSKYTLKTGSFVEDSRGRWYVCLVVESPKQDKSTATKAIGIDLGLKDIATCSDGTVISNPKFYRKYEQKLGIAQRARNKKRVRALHAKIANSRKDHLHKASTKLVNENALIIVGDLSAKKLVKTKMAKSVLDTGFSALKTMLKYKCENAGVLFEEVQEAYTTQICSCCGEITSSSPKGRTDLGIREWECMSCGTAHDRDINSALNILALGHKRLAVGITLF

SEQ ID NO: 54551 - protein, 489 aa, unknown
  TnpB Polypeptide
MHDMANSSRKKARKLQDAKKAKAAEKEKTAKKVKPAEEKPIKYTATAKQQTDGTFEFCGGKGGFNITKQKNKALEPYGKCIHNYGVLLELIPGDKQAAINQQIGNARVVHNDYLSKREEYYKETKKALTVSQYKKEYLPALKKEKEYLNDTDKFVYENACRNVDDAYNRFFKGLSGFPKYASKTKPNGNNFTTNFTNNNIELKMIDGIPYAKLPKIGNVRFILPKGKILTDIQPHGVTIKAATVSMEPDGSYRIALRMESVIDKPVFPTVINAREIISVDLGLKEFGVFGNLEESIPVPNPRWIKIHAKRLRRFQQSLSRKQYDHKTHTGSKNWEKARAKVAKEQRKIADQRRDFHHKLSRIITDNCVAFICEDLAVKNMMKNRRLSKSIASVGWYQFLTMVQYKMERAGKYFRKISRWYPSSQTCGCCGYKNTDVKDLSVRKWICPKCGTWHDRDINAQQNIYKIGAKMLQDEGIQITGLPVTNKSAN

SEQ ID NO: 54552 - protein, 379 aa, Okeania sp.
MKSIRTKLKLNNKQKTLMAQHAGYSRWCYNWGLSLWNAAYKDGDKPNVSFGMLRKRKLREVFTNHTKPLYPWMKSLSSRVYQYAFINLGEAFKRFFQGLGKYPRFKKKGRSDSFTIDNCGKPIELNGWCHKLPFIGWVKTYEPIEATTQKITISRQAGDWYLSLAFECTPTSTPKTTNVVGVDLGVKTLATLSDGKVFESVKSYRKFEAKLSRLQYLNRNKNIGSANWRAAQLKIARLLRRVANIRKDALHKLTTYLAKNHGSAVIEDLNVSGMLANHKLAKSIADQGFYEFRRQLEYKCQWYGCELVVVDRFFPSSKTCSSCGHVQDMPLNLRTFDCPDCGISIDRDLNASINLRNAVGLTVDACGRSAADSSGGSRK

SEQ ID NO: 54553 - protein, 352 aa, Vulcanisaeta sp.
MSDDVVDATLLIKYVTVIGRLVPISSEDYMKLVRLAYDFKKAVLYATRMIAKGIDANSILRELRSMLNKAYGDSAYKVAKAIVEGCEYSNGNPRHIKIKRLFIVSDGEASRLGNRNIRLESVGVVKIKYPYDGSWLTFKALFGREYLPLVAELVELARQKRVSYGARIVFRSGRIYLHISIPLELYLKHFKRGEAGGSLVAGFDLNSDRINMVIVDKYGRIRDTKTAWFPEVTSHGFPRNKAKTRRLEALSKLLRYAYYHGVGVVVFENLFAVKKRVFGRNRIANRKIARFAKGELLRHGLVMAMKYGFRVYLANPKGTSNSREHDEVMRRYGLDRHTASAYLIALKGLKQQ

SEQ ID NO: 54554 - protein, 574 aa, Blautia sp.
  misc_feature (207)..(207): Xaa can be any naturally occurring amino acid
MVKAIKVMLIPNNVQKTKLFQYAGASRFAYNWALAREIENYEKGGKFISDAELRKEFTKLRHSDEYAWLLNISNNVTKQAIKDACTAYKNFFRGLQKFPRFKSKKRSMPKFYQDNVKIRFSNTHVKFEGFSSSRKANKQKMNWVRLAEHGRIPTNAKYMNPRISFDGLNWWISVCVEFPDCRETLNDDGVGIDLGIKDLAVCSDGTXQYAGASRFAYNWALAREIENYEKGGKFISDAELRKEFTKLRRSDEYAWLLSISNNVTKQAIKDACTAYKNFFKGLQKFPRFKSKKRSMPKFYQDNVKIRFSNTHVKFEGFSSSRKANKQKMNWVRLAEHGRIPTDAKYMNPRISFDGLNWWISVCVEFPDCRETLNDDGVGIDLGIKDLAICSDGTKYKNINKSQKVKKLEKQKRRLQRSISRSYEKNKKGESYCKTNNVIKKEKLLLKRNHRLTNIRKNYLNQTISEIINRKPRFICIEDLNVSGMMRNRHLSKAVQEQRFFWFRKQLEYKCSDKGIQLIVADRFYPSSKLCSCCGNIKKDLKLSDRVYRCACGNMIDRDFQASINLKTYGEQFAS

SEQ ID NO: 54555 - protein, 412 aa, Symploca sp.
MLVLEYKIKAKSAQYRTIDEAIKTVQFVRNKCLRYWIDAPKEAKLKRFDLNKYSTELRREFTFVKDLNSMACQASAERAWLAISRFYDNCKSNKPGNKGFPKFQKNNRSIEYKTTGWVLHKTKRRLTITDKKDIGELKLLGKWDIHTYPLKSIKRVRLLRRADGYYCQFCLDLECVDVQPKTGQEIGLDVGLESFYTDSNGYQEPNPRFFRKAESDIKHSQRRIYKKQKGSAGRRRARARYSRKHLRISRQRNEHAKRLARNVCKSNDLVAYEDLKVSNMLKNHCLAKAIADASWYQFRQWIEYFANKFEKLAVAVPPQYTSQECSQCKGVVKKSLSTRTHVCQCGCVLHRDTNAAINILLKARSRGGHPRSNALGSSNLYASWRKPARASGYSELRIPVALARGVSTNLSS

SEQ ID NO: 54556 - protein, 382 aa, unknown
  TnpB Polypeptide
MRRFAGACRFVFNRALARQNENHEAGNKYIPYGKMASWLVEWKNATETQWLKDSPSQPLQQSLKDLERAYKNFFRKRAAFPRFKKRGQNDAFRYPQGVKLDQENSRIFLPKLGWMRYRNSRQVTGVVKNVTVSQSCGKWYISIQTESEVSTPVHPSASMVGLDAGVAKLATLSDGTVFGPVNSFQKNQKTLARLQRQLSRKVKFSNNWQKQKRKIQRLHSRIANIRRDYLHKVTTTVSKNHAMIVIEDLKVSNMSKSAAGTVSQPGRNVRAKSGLNRSILDQGWYEMRRQLEYKQLWSGGQVLAVPPAYTSQRCACCGHTAKENRLSQSQFRCQVCGYTANADVNGARNILAAGHAVLACGGMVQSGRPLKQEPTEMIQATA

SEQ ID NO: 54557 - protein, 444 aa, unknown
  TnpB Polypeptide
MQIYTSYKVKIKHYNHIFKDTVKIYRHAVDYLIPICITHWEQLTQLKSQLKDSFDELKFIENLIHATKKNPTPKYDFDSKFYKMPSYMRRGVIHEALGKVSSYKSNLENWNKNPVEKEPSKPQAGLTFPSMYRENMYNQLGDYKAQIKIYIRNTWDWITIDLRKSDMDYIRKHCSERKACVPCLQKLGKEWFLAFPFKEKVGLNNTEIHEQTILAVDLGINTAATVSVMRSDGTILGRHFCKFTKEIDHLTHCLNRIKKAQQHGNRKMPRLWGQVNGINDEIAAKTANAIIELAIRYHADVIVFEHLDSTGKIHGSKKQMIKMWRSNEVQAIVTTKAHRLGMRISHICAWNTSKYAYDGSGTVLRGKDGGFHTYEVCKFPNGKIYNCDLSASYNIGARYFIRELLKSLDVNSRLRVEAKVPQCRKRSTCTFSTLISLNAALMSA

SEQ ID NO: 54558 - protein, 642 aa, Nocardiopsis sp.
MVLRTGVDEKTGELLLAPVLAERVGWAADLVAQMTGALLVAHWNTTDVDTLAAGADAGGRKLPSNAWMALRRLGWTTAPPQGVRVNDRIVRMAQETAGRALRSVKWRADVVAGTLATWPADPKKRTSQEWEAVRAAIPGGEHLPSSVIRSRTRQIAAFERKNDRLPADVFELEPKPGMARMLVLAACDAQQATIERSDDGRRALLRLQLPTRPDPVSYRDWTWVACPLNLPPTIGADALLHLPTLRPQGGRVSIDLAYTHAVPKTKRTGHTVALGVDWGLNTLLSAGAARLGEDGRIIALGAGAMFRAGGVLAKQHRLRRQSEYLHAKAEHYQRLIRQDADHPLSGKHQVLREEFRQVAERRSNLNQALAASAARWAVDQAIAAGATVIYLEDLRSMEAGGMGRTHNTRLSQTVRGRIAERMRHLAAEVGIAVVSVPAKNTSKHCPRCLVPLRHRKAPDRPTTPGWKWALCPTPGCGWQGDRDTGAWQRIAARGLTHQTKTVTDRTTGAMAIRSVVDKLEAKAVVTATAPQTRRADRSKTGPTRHRRTQRPAPRRRGAPSPARPQGRAGQRPGGHAPTDRTGLPRAAHRHQGVKTISTPTTRPTRHRPAGAVLGAGFHLHAHATPPRWADPPSDTISLVEDH

SEQ ID NO: 54559 - protein, 412 aa, unknown
  TnpB Polypeptide
MSAVVKDWMLVRGVVFHLDSSLPTEAKILLEDFRLAVNNAIRAGLQARVTSRNALCKVAYKDFREQHPRMYAQHLVSAFEVACGVLKNHRKRVRKGVTCRIPYVKRLMMKAENQAYKLDRTSGIIDLPIRAGCHVKLRLVVSQYHRKYLDDMALSLGSLTVLPDRVIVAFRKNAPQQFVPASALSLDTNERSLDGVFVEGDVAKAVRAEFPNIAIIQQRHHDRRKRLQKKKAHDRRTSRDLCGREGTREHCRIDYRLHQVANSVLRFAEDRKSAIVLEDLKGMRQKRSKELNRRLSMWPRRKLHQIIEYKAQWRGIPVVKVDPRNSSKTCPICGRIQYSRMGTEFKCHCGWRLDRHINASINLLQTAISKGMAGGLRFNPGAFQHDVMMILYEPAMAARSEPNGTSGVVGVT

SEQ ID NO: 54560 - protein, 392 aa, unknown
  TnpB Polypeptide
MINKAYQYRIYPNKNQQELLEKHFGCVRFVYNYGLSKKIEAYQKDKKRLSCFDLINELAELKKEKEFEWLKEVNSQSLQMSLRNLDNAFTKFFREKKGFPNFKSKKKNINSFQVPQHLKLTDKLSLPKIPDIKIKQHRKLEGKIKTATVSKNPTGKYYVSILTEQIGDFPKKPKISDKTTIGIDLGIKTFATFSDGRKIENPRCLKNSLKKLKKQQKRLSRKVKGSNNRKKQIHKVALIHEKIKYQRSDFLHKITHQLTHDKQVKSIAVEDLNVKGMMKNRCLAQAISDVSWGEFRKQLEYKTDWYGRNLLVIGRFEASSKTCSCGVVNQKLKLSDREWTCEKCGKTHDRDVLASQNIKNFALIPQGLRESTPLERTAVAGSLKEEATRSLA

SEQ ID NO: 54561 - protein, 354 aa, Halobacteriales sp.
MEVRRTVPVKLDVDSDDAALLHETIDEFLWAANHVVDHAWQGEYKTTSKAQLQEETYDEVRERTRLHANLVQNARNKAADAVQSVVARWKQGEYAGKPRFSNPTAVYDKRCATFYDEYVSLATVDGRIEVEYVLPDPARDTPHSRYLVRTKAEVESDTPEQATTGHSTVLGVDLGVNQLAVTSTGVFWSGHEFDHWRREYEKRRGSLQQCGSRYAHENIQAVGRKEAGRFTMMLHRIANGIITEAVENGCTVIAFEELTGIRDRLSGASWGHEWAFERLYEYVEYKAEMYGITVEQVDPEAAKSRSDFATAKNIGLRYLRRNQTGDGGGAPVGVRLNSEGPEVPRTTRTGAVHP

SEQ ID NO: 54562 - protein, 246 aa, Halobacteriales sp.
VCHLPRRVRIAGNRRRTHRSRVRPPRPRPRHTPQSVPRGEWFLHLRTKAEVESDTPERATTGHSTVLGVDLGVNQLAVTSTGTFWTGDEFDHWRREYEKRRGSLQQCGSRHAHENIQAVGRKETGRFKMMLHRIANGIIEEATENGCMVIAFEELTGIRDRLSGASWGHKWAFERLYEYVDYKAELHGIDVKQVDPENTSRRCSTCGFTHPDNRDGESFECLKCGYRNHADYNAVAGLRPAGSKVA

SEQ ID NO: 54563 - protein, 402 aa, Escherichia sp.
VKRLQAFKFQLRPGGQQEREMRRFAGACRFVFNRALARQNENHEAGNKYIPYGKMASWLVEWKNATETQWLRDSPSQPLQQSLKDLERAYKNFFQKRAAFPRFKKRGQNDAFRYPQGVKLDQENSRIFLPKLGWMRYRNSRQVTGIVKNVTVCLSCGKWYISIQTESEVSTPVHPSASMIGLDAGVAKLATLSDGTVFGPVNSFQKNQKTLARLQRQLSRKVKFSNNWQKQKRKIQRLHSRIANIRRDYLHKVTTTVSKNHAMIVIEDLKVSNMSKSAAGTVSQPGRNVRAKSGLNRSILNQGWYEMRRQLEYKQLWRGGQVLAVPPAYTSQRCACCGHTAKENRLSQSKFRCQICGYTANADVNGARNILAAGHAVLACGEMVQSCRPLKQEPTEMIQATA

SEQ ID NO: 54564 - protein, 595 aa, unknown
  TnpB Polypeptide
MGKKKKSDEKMERKDVKLRKETNKETEFTCVKTTFHSLVENNFLNGGIQDIVLNINKICFLSYQLMNYHFTRLIQEKKPLPEITQNLFYQACSAVSIMKERKEKIDETDELVISFSHYKEHVGELPFRDRMGNLINNLNKQQMTMTENHLKLNFYKRFHTYLEIKTGETRKSVIYHWLKDIYANEYTGKNIFIQSMRQWLQFPPTETNIKNNLSHFITIYYKILTTFEKYPYVKHIRTFNLLPTKNSFTLSTIEICSSCLKDIIGYFTKEPVPEFNENKLIYWYEFFKIEKFETKQRKFANAIFTDGKSAVIRLRKPKGGPAKPKDVRKIQYEQYVGIDPGVRSLQTSCNDAGRVLETTTASYRHDCKIKYACRKRERWYKNWEHYEMWRNIPSFKTTKLQKMRDYFHYVYPHLNTIFHFHLYKNFRGLSFRSYCRGKVTMDKLCKSIVEKKKTLVGFGDFSQQHGLVKKHPTAPIQKFKHELRKYCDVIEIDEWGTSKTCHLCKSPIELYKNKVIRKKKDGTYTKGRMSLINSVIRCKLNECTLCCMDRDINASKNILLLLQFQQQGKRRPECFRPKTMNDYDTPLREDKYIVA

SEQ ID NO: 54565 - protein, 384 aa, unknown
  TnpB Polypeptide
VVKAYKIPIEAPRDLIEAYFEVKRKALREVLNHVAYSRTGKAHLNFRAGERRKLRNDLLKDWRYSKHYVDSAINSVIGLVKGWIRLYNRGKAKTKPKITRKTVYIKNTLFSCRSGILRISVEPNRRYLEVDLRKYDWIAKGFDEIGGLILTERELIVTVKKKTVLKEPRRWASFDINLTNITALIDGKIVRYDLKQLYHVHRVYEIKRRKIQQLAKHKPKTAKRLMKKYSRREGNRVKDFMHKLTTEIARELSKLESGAMLENLKNIKSRILNKSKNFNRKISKWNARMFQFMLEYKLRWLGLPVKYVNPKNSSKTCPLCSGRMATYEGRLMKCKKCGFVQDRDVVAVLNLQMWGLRGYPESPIRGISLDDGETIGRRKINLCL

SEQ ID NO: 54566 - protein, 204 aa, Risungbinella sp.
VSTHSTGKQVGVDLGVRHLAITSDGEFFEHPKYFRKSERKLKRLQRIVSKRKKGSNRRRKAVALLAKLHEYIANQRKDIAHKISRYLVDRYDLIAFEDLNIKGMVLNHKLAKSIVDAGWNQLVQFTSYKAEYAGKQVIQVDSYNTSQTCSKCGQIVKKERKDRVHSCSCGYTEDRDVNAARNILHKAVGHVPTLKCGQLELNLI

SEQ ID NO: 54567 - protein, 417 aa, Kitasatospora sp.
VHLRYSYRVYPTAGQRTLLARTFGCARVVYNDALAARKEAHKSGLPYPKSTDLQKQVITVAKKTAERAWLASVGVDPLIQSLRDLDTAYRNFFDAVSGKRRGGRVGLPVFKSRKDSRQSIRFSRNGFRIRGNGKLNLAKIGDVRVKWSRALPVEPSSVTVVLDPAGRYHASFVVDVEPDTLPELDTEVGIDLGLTTYAVLSDGTVIDNPRFLRKAEKRLKAAQRELSRKAKGSKNRAKARVKVAKAHAKVADTRKDWLHKQTTGIIRENQAIYLEDLNVRGLGRGRLAKSVHDAAWSTFRRLLEEKGARYGRTVGIVHRMFPSSQLCSECGYRDGPKPLVVRAWTCGACGVLHDRDLNAARNILAAGQADRLNAPGGPVRPGVAIPRQARPVERGTHLGDLPRTGIRAAGAGGIATP

SEQ ID NO: 54568 - protein, 406 aa, Kitasatospora sp.
MIRAYKFLMRPTVGQAQALGEMLRDHCSLYNGALQERRDAYRHVSKTSVTYGMQSAQLKDIRVFDPQQQGRWSFSSQQATLRRLDRAFAAFFRRVKSGGTPGYPRFRGVSWFDMVEFPRDGDGCRWDSTPHDPVTRVRFQGVGHVKVNQHRAVVGRVKTVSVKREGRRWFVVVTAERERPEPLPSTGRVVGIDLGIANFLADSGGGFVPNPRHGQTAAARLEAAQQALSRFPWVRRDKRGRNHQRAVEKVAALYGKVRRQRLDHAHKTALDLVRAHDFIAHEDLKIRNMTRTPAPNPDPDQPGAFLPNGAAAKAGLNKSINDAGWGVFLTILHAKAESAGREVVAVDPRNTSRTCPRPECGHVARENRPTQEKFHCRSCGHTAHADTVAAVNVLRAGLVRRKANPA

SEQ ID NO: 54569 - protein, 435 aa, Kitasatospora sp.
VPVFASLHRRVLIVGACCYVVLVKIVVRVKLLPTPEQAAALECTLRMVNDAANWVCGVAFERGVPREYELRRHTYGELKARGLGAQAAQHVIKKVRDAYTALRANARTGNLGGPGSKRRVKAESKPISFRPDAAQPFDDRCLSWQYDQRTVSVWSTAGRLKGVRFACSPGALENLRDHRRGESDLIERDGVFYLAATCEVPEKPVNESPAGFVGVDLGIVNIATASTGYRAAGRGLNRHRRRQLDLRRKLQAKGTKSARRLLKKRARKESRHAANQNHIIAKTIVTTAERTGCGIALEDLTGIRSRVRLRKDQRQSLHSWGFHQLASFVEYKARRAGVPLVYVDPAYTSQECSECHHVDRRNRATQAQFACRACGAMMHADDNASRNIARKGEAAWIAGRQSRVPATPRVAQTGEATRQPAAPYLQARPLTAGSS

SEQ ID NO: 54570 - protein, 546 aa, Kitasatospora sp.
VSEKRRLRPIGSPFVVVGPSGVSVRDRLKGLTSEDERVLRLVGEHLGSLASRDLAIRCADGVGHCADGWAARKRGLTPQSSSRWAGSITKATHDQWALSSRGQAAHLDSLDAGIRTLRHRLSLPIGEKGHKHASGGYRSRREWFVKSRRLHALEERRAAVGADRDAGRVRVVRGGRKLLNTRHHLTAAQLTEAQWRQRWEAARWFLSADGESGKRYGNETIRVSPDGEVSIRLPAPLAALANAGHSRYVLAARVAFAHRGAEWADRVEGDRAVAYRIHHDVARGRWYLDAAWTRPVVRTVPLERARANGMVGVDTNADHFAAWRLDKHGNPIGEPHRFPYDLSGSAGHRDAQIRHAITRLLHWAKRCGVNAIGLENLDFADEKTREKHGRKKRFRQLISGIPTGKLKARLVSMAAELDLAIVAADPAYTSIWGAQHWQKPLTTPRRTTTRHDSAAVAIGRRALGHSIRRRTAPPHDDQSDRRGHRTVQAEPGDRGREETRRPVTERAHDARTRTGTKRTRATSRASNTVRDARSDQHWVQDSLLLT

SEQ ID NO: 54571 - protein, 218 aa, unknown
  TnpB Polypeptide
MVKAVIHKLPKDDWKLKSVTVSQDGVGNYFASVLFEYEQEDIPSVSKSSTNAIGLDYKSDGLYMDSNGNKAGVHKYYRESHKKLAKEQIRLSRKAGSKKNETKSSNYFKQMRKVNRIYRKIANQRLDSLHKKSTEIANQYDIVCVEDLDMKAIGNKGFGNGKATFDNGYGMFLNMLEYKLKERGKYFVKVDKWYPSSQICHCCGSVKKTRPKRPSLYM

SEQ ID NO: 54572 - protein, 453 aa, Nonomuraea sp.
MDVQRGNYMSASSVFIFYGHRPDDNVFESGVPGEGVVPVRLRYNYRLYPDAPARELLARTFGCVRVVWNDALALRKQARKAGLPWIGGTDIQKICVTAAKRTPQREWLGEVSPVPLQQSLRDLDAAYKNFFDSVSGRRRGPKMGLPRFKTARDHRQTARFNANAFRLRDSGRLYLAKIGEVEVRWSRPLPVAPSSVTVIKDAGGRYFASFVVEVPDDSQILPGLDADPESGIDLGLTCYAILSNGDKIANPKWLRRRENKLAKLQRELSRKKKGSANRDKARVKVARQHAKVGDARKDFLHQATTSIIRENQAVYIEDLAVRGLARGMLAKSVNDASWSAFLTLLDGKAHRYGRTLIRIDRWFPSSQTCPCCGWKVGKLALDVREWDCRSCGEHHDRDIAAALNILAEGHRLRREQHRKQVAAGLADTQNDCGERVRPGEATPIPAPPETCAA

SEQ ID NO: 54573 - protein, 509 aa, unknown
  TnpB Polypeptide
MPGISMPGGTTLFFAPFLSHYAHSDVIVIMSQKVVIESVQIRGAAPYLGMSATPDGQQVPLYSTNPDIVMRWLCDGWRCRYNQLRSRRTKWDKNLGMSIPLNGRPDMRSDRQVRLECSWLTAMPAMVLQSPNRIENTDWWSANKRRRTLKKKHRNPGMTPRFKKRRDDLYFVCWHNKGSNANYRRLNRNHGEVVITGQNPGAYRLDGQPCRYSIHIRVRVSQPIRDYTSVGVNWTRRTLVFVNDPLPIRRERTGAMVGLDRGCVHTLATSDNRFLDLPKQRLERIDREIRRRQKAQARRIAMSGETVKQYRRHASRTYERTGRELSRLYAKAHRIIDDWQHKTTSMLVREYDLIVLEDLNLQGMSRKAKAKPDPDRPGAYLHNGQSAKRGLNHALRSAGLAGIVGKLEYKTRLTGRNRLIFVNPAYTSQTCSECGHCASRNRESQADFECRQCHARMNADLNAANNILKRGLDHLIGLDEAGHARTESDVQPAYRGKDASAMTCETSTR

SEQ ID NO: 54574 - protein, 418 aa, unknown
  TnpB Polypeptide
MKKRKKNWFEDYNKNQLNTNSWFDINIINNENFVNNTNNIKPINKFLKCKIIKIEPNNIQKDILLKWMDSFIDMYNSTNYFLNHHLYNFNERKVITENKKEYLNFRNLRSKYLKNIKNNYCVNKINKHILDQSINHCVAKHKSSITNFFNGNNKFFRLRNMKKNRRKKILILENGLFSKNKNGFCISVLKEIKSSIPLDFITKTSILQYDKHLRQFNLYVPIGDNSINLENRTKCGIDPGIRTFLTCYSENKILEIGNNCYEKYKKYYEKIDKINNLYSTKKLNKQKQSKALNKNYDKIKNLTKDLHYKSCKLLTNYFDNIQIGKISTRSIVSNEKNLNKISKRAMLSLSHFLFRERLQFQSLKRNVSFKCVNEYNTSKMCSSCKNLYNVGQSKLYCCSNCNLIIDRDINASINIYNK

SEQ ID NO: 54575 - protein, 389 aa, Glycomyces sp.
MGGCEHGHADAFETRSGLARCTGVLLRYRYRIYPTSPQRAALAKAFGCARVVFNDAVAARRAAFAAGEPYPSTSMLSRKLITEAKRTPERAWLGEVSAVVLQQALEDCNQAWRNFFDSRAGKRRGPHIGPPRFKRRTHRQSIRFTRNARFRITEGGRLRLPKIGTIRVACSRDLPSDPSSVTVIKTSAGRYFASFIVAVAAQVEHEPPPADAETGIDLGLKDFAVLRHGKTIASPKFFRSMERRLKRAQQVFARKQPGSANREKARVSVARLHERIRDKREDWLNKQVKAVLDENQAVYVEDPNIKGLARSRTAKSMYDQALGGPGSAGFSARSNIRQSRPVLPFHPDVLGLRGPVRAEGTGRTRGANLGLPVRVGAREGRQRGGQHPL

SEQ ID NO: 54576 - protein, 219 aa, Simplicispira sp.
MLISHKITLDLNNVQAPYMARAAGTARFAYNWALAEWKRQYEAWKLDATLPKPSQMSLRRQLNATKREQFPWMLEVTKNALQMAIIQLGNAFKNFFAGRTKYPKFRKKCAHDRFSLTNDQFSVEDSRIRIPNLGWVRMREVLRFAGKVMSATISRVADKWLVSITVETPDASHLPKVENQGAVGVDLGVSALATLSTGESILGPKPHTALLGRLQRLSR

SEQ ID NO: 54577 - protein, 178 aa, Simplicispira sp.
LSRKVKGSANRQKAKVKLARLHAQISNIRKDALHKLTTDLTRRFHTIGIEDLNVKGMVKNRHLARSVSDMGFFEFRRQLEYKAVQRGGQVVVADRWYPSSKTCSSCGHKRETLSLSIRKWTCPSCSAHHDRDINAAVNLKNMAVSSTVSVCGEDGSGLGCKARVKPASVKQKVSFATV

SEQ ID NO: 54578 - protein, 199 aa, unknown
  TnpB Polypeptide
LSSSLNQWFNKKNARLQSIKDKQHFGKKPTNRQKALARRRNNRINDYMNKTARRVIDYCIDHDIGTLVVGYNETFQKDSNIGRRNNQTFVNIPYGKLKDKLEYLCELNGIILVMQEESYTSKASFWDKDVIPVYKSDDTEEYHFSGKRIHRGQYRTASGQVLNADVNGALNIMRKSSVVDVNILYSRGEVDTPIRIRIA

SEQ ID NO: 54579 - protein, 393 aa, unknown
  TnpB Polypeptide
MLTFKYRVYPSKKQVAKLHRQMFLSKKLYNSLLEKCEAHYKETGKTFSQFDMNKLITRLKKEQPEFKELYSQTIQNVSKRIADAFKAFFRRVKERKQGSKTKPGHPRFKKYVSSLTYPQTGFKFKNERQLQLSKIGSIPIVLHRLPKGAVKTCFVKAYPSGKWFVGFSSESPERTFESNGKKCVGVDVGLTSFVTLSNGERVDPPRFLRKSESKLKILHRRVSRKLNGSENRRKARFDLARLAERVSNQRFDFLHKLSRQQVNAYCLIGVENLKVRDMMKNHCLAKSISDASWATYKQLLAYKAGSAGCKLVQVNPKDTSRTCNNCGIKHDIRLSERTFGCPSCGFSADRDVNAAKNILERATAGLVGSHACGDSASTRFARSGQAVSGKQEL

SEQ ID NO: 54580 - protein, 437 aa, unknown
  TnpB Polypeptide
VVGDEADTRCYKPLSEHKSNQQTAMEYSHRYQAYPTQEVADGLEHHLDVHRQLYNHVRWDYTNSPENDKPSEYDQNNKLPEWKQRWPVFGELHSKAAQATVARFHHNLTVLNELKEKGYNVGRLKRQAPSEYRSVTYNQSGFDLDEKRGHDKYAYVRFSKIGWVKIRYSRPIPDHATVKEVTFKKETTGEWFVSFGLETDDADFPEKPDVDSLDASNSVGIDLGIQNYIHTSDGKTVDWLDLEDEYERLRREQRKLSRKEKGSNNYEKQRQKVATVKRHIKRKVLDYQHKLTTWLVKTYDAVFVEDLDVAGMLQGDGNARNKQDAAWRQFITLLEYKADLYGTHVVEVEARGTTKECASCGVETAKPIWVREHSCPSCGFKTDRDANATMNVLQRGFAELGLGWPESTPVETVTATDADDFREASASHVIETGSLPS

SEQ ID NO: 54581 - protein, 193 aa, Ktedonobacter sp.
VGVDVGLTTFATLSDGTAIANPRFFRAEEQALAKAQRRLAKTAKGSKERAKRRQVVARVHERIANRRENFVQQESRRLINRYGLIAVEALVVRSMAKNPSLSKSISDAAWSAFFAALVAKAEDAGRRVVKVPPAYTSQTCSACGHRQPMPLSVRLYECSACGLVIERDHNASLNILEQAVGRHGCVIPQAPAL

SEQ ID NO: 54582 - protein, 391 aa, Ktedonobacter sp.
MESPVQGQLARRVRWGGCGNVHAERDVTRRVLTQSLQERREVYKYTGKGTNYNAQAMQLPEIKEIREEYKDIHSQVLQDVLRRVEKTFKDFFKRVKAGKKPGYPRFQGRSHYDSFCYPQAGFSIKNGRLELSKIGHVKIKLHRKVVGTIKTCTLKREGERWYACFSCEVERVPRMPYTDVAVGIDLGVSKLATLSSGDVIENPKHYRRAEKTLAKAQQALSRKKRGSNRRKKVVQRVAKLHRKVRNQRTDYLHQWSRRLVNTYETIVFEDIAPANLSRRAKPKQDAETGQYLLNGASAKSGLNKSILDAGWSQFIAFCEYKAENAGRVQVVKVDPRMTSQICSECGTVVKKTLEERWHSCECGCELDRDHNAAINIKHLWLGRSHQEAQAS

SEQ ID NO: 54583 - protein, 276 aa, Ktedonobacter sp.
MSGSVGGRGKRAATRQYLARGLPNPKLGWVNMAEKLRFTGKVTGVRLTRQADWWFVSVTVEVPDEFPLRKGRPSVGIDVGLNHLATLSDGTEFENQRFLKTALKKLRQANKRLHRRKPGSKNREKARRKVARLHYKVACMREDVLQKLTTKAANTFALVGIEDLHIKGLMKNRKLSRSFSDAALGRLLRLLSMKVTHRGGVVVKVDRYFPSSQLCSRCGWRWKDIRLSDRVFVCKSCGLVADRDKNAALNLLQEAQRLVAAFPPCEVDHGTGSDGS

SEQ ID NO: 54584 - protein, 545 aa, Ktedonobacter sp.
MPKKCQGQGKPKEEQEKRPATPTFLLELPLVVDAGQAARLRAHLEAARHLYNALLSEGQHRLRRMRADPTWQEARTFPRTHKTERAAAFSALRKAHGFTEAALHEAVKGLRVGWIAEHVEAVLAQTLATRAYRALNRVCLGKAKRVRFKSRGRGFSSIENKRNDTGLRFVLQPPEDGNAGYLLWNGDQLPALIDWKDEVVTYGLRHRIKYARLIQRPASSKRATGADEEGYRYVVQLALEGKPHHKPKHTVGKGTVGGDLGPSSLALVPQEGEASLEVFCAELAPDARAIRRLQRQMDRQRRAGNPEHYDEKGRIKKQGNKKLRWKQSKRYQATRRRKATKERKLAAHRKSLHGRKVHEVMALGNTIVIEKISYKTWQKQFGKSVGLRAPGMFVELLRRTVASTGGTLVEVSTRTTALSQWCHGCGRRVKKPLSQRWHQCECGIGPVQRDLYSAFLAAYLDPAAPIPSCARYQGYWEGAEARLRAAHERTIQRAKEGQSMPRSFGLTRAGARLPKSSGELPLEPALRLRGEGLEAWNEPLEPPRL

SEQ ID NO: 54585 - protein, 503 aa, Ktedonobacter sp.
MKQAVLLRSEQANWFHATQTLFNQVASFYFEVIQAHPLILDLSSQEALTALERLTHATKQNPHPVMPLSQIAQELPAMFRRATIHAALGAAHAFTTSLAKWRARKEKAQAKQKRFTERPPVPPRTWNRSVSFYAGMWKGRSLGQQAEGPPIQGARPDTTEERACPKILLKLWTGRSWVWTKLRLSGPPLPQGCTPQEAGSPQLVRKGGRWWLHTPLQREIERPQKAQMQLSEQKGTRLCAVDLNIDTHLAACTIQTVEGTVVATRFIRGGKRLHGLRKRQLGRIARNRRATGIIAEGEQDNVQRWAKVRALDEDTAHQVSHRIVAFAQAHGASILVFEHLGHFKPVKGSFSRRGNEKRSYWLRGRIFRYTRYKAFHQGIITCRVNPRNTSREHADCGGAIARYAYGQPAEGYTPGSPLMSCPSCDARDHADRNASRVIGKRLLARFGSCQCHKEKPHAPLQAERSAKAGGGHGSQAAQCAGEPSILGAGYGAVVAQGTAPKKT

SEQ ID NO: 54586 - protein, 401 aa, Ktedonobacter sp.
MERTVCIQLQPNTEQAQALHKTLAQFTVVYNHVCAYGWQQGEKNGVKLHHATYYDTKALCPDLVSDLLIQARVKATETLKSAFTWKAKKEATYSKKVAKAQKQSKPVPVFKPVRCPRSLACAVRYNVHTYSLNWEAQTVRLSTTQGKMSLSFTVPHFSKRYRGCKIATADLLSRNGVWWLHVVVDAPEPVVEYHDEVIGVDLGLNRPAVTSQRHFLGSRHWKEVDRRRFRLRRKLQSKGSKSAKRHLKKISHKQMRFHRDCDHVLSKRIVQNATAGSTIVLENLTNLREGVHHRKGEGQRKLHSWSFAQLYGFIAYKAQERGIAVERVDPRHTSQTCSQCGHQARNNRRSQAVFHCRSCGYQLNADLNASYNIRDKFCLAQGGTSVLGGPLSDGLSSQASV

SEQ ID NO: 54587 - protein, 231 aa, Ktedonobacter sp.
LLYGSGEEGLGDPGMAPGEKLEKIVGREELALDDFPRYLRKAERKLKRLHRRLSRTQKKSANRKKARKKLAKGYLKVQRQREDFARKTANALITSHDLIAYEHLRIANLVKNRTLATSISDAAWGRFLQWLNSYGSMHTIPIIAVEPAFTSQDCSACGARVKKSLSVRTHICPSCGFVLDRDHNAARNILEKAYRTVGQTGTGEAQAPPNASGQTASTRSGRKARAGKRAG

SEQ ID NO: 54588 - protein, 495 aa, Ktedonobacter sp.
VRESELKLLHVLSRTVCQAGGCQRENVAALGPRRQAQSQTNAFWASLLHCMACGTTATREKRRSRMKIAHKIRMHPTPEQVEYLKRACGTRRFIYNWGREQWEKQYQAYKAEQETVPQEQRLLNPPHALALKKQFNEIREQEYPWTYDVTKCVVEGAFDDLKKAYNNFFAGRANYPQYKKKGKSHDSFYLSNDKFTLGSHWISIPGLGRFILDQRQTKKDRGKLLRKLGTVNLAEKLRFVEKGKASVPTKKRNKRKHVVCERVKILGGTVSCEAGHWYVSVHVEIKRECPPKPVPVVGDVGLKHAAVVSDGRRLENQRPLALHLKKLGKLQRKLSKKQKTKDPQTKRTVFSKQYEKQRLKVARKHQQIANIRRDVQHKFTTELARTCGAIGIEDLNIVGMMANRKLSRAVADAAMGQLLQFLKTKVANAGGDLFIASRWFASTKRCSCCGQVKKRMPLKHRTYECVACGLVINRDLNAALNLLWFATEELRQLHT

SEQ ID NO: 54589 - protein, 375 aa, Ktedonobacter sp.
MLIYEYKLDGTKAQYAAIDEAIRSVQFIRNTCLRLWMDDHATRNDLQLYCAVLAKEHPFVFSLNSQARQASADRAWSAIVRFYDNCKAKKPGKKSYPRFQHDNRSVEYKTTGWKLDPDGKHITLTDGCGIGRLRLIGSRDLATRPIPAITRVRLIRRADGYYCQFAIVAERHIEHVPTGKQVGIDVGLKAFFTDSEGNTVENPRHYRKAETRLTRLQHRLSRKQKKSKNRKKARQAVAYAHLKVQRQREDFARKQANALVTSHDLIAFEELQIRNMVKNRHLAKSIHDAGWGQFLLWVKYYAAIHTIPVIAVFPHYTSQECSACGTLVKKTLSVRTHVCTGCGVVLDRDHNAALNILQKALSTVGHTGTDAPVSA

SEQ ID NO: 54590 - protein, 384 aa, Ktedonobacter sp.
MIKAHKIRLHPTEEQKTYFAKAAGTSRFVWNWALAEWNRQYEAGEKPTAFKLKKQFNEIRRAQYPWTWEVTKNASDQPFLDLAKAWAAYFDGLKQGKKTGRPTFKSKKKSKLSFYLANDQFELGDHRIWIPKLGWVNMAETLRFVGNVRGARITKTADWWFVSIQVELPDPVPVKKPVAVGIDVGLNRLATLSTGEKVENQAFLKTALKKLRQANKRLHRRKLGSKNREKARRQVARLHYKVTCLRDDVLHKLTTQLANCYGIIGIEDLNLKGLLKNRQLARSFSDAGLGKLLNLLLSKVGQRGGQVIKVGRFFPSSKACHCCGWKWEAMTLNDRTLVCLNPSCPYYQCAQDRDHNASLNILNEALRLIGLIDQAVGGTGSDAT

SEQ ID NO: 54591 - protein, 231 aa, Ktedonobacter sp.
MSIPFTIPHFSERYRGCKVATADLIQRKGKWWLHVVVAVAEPTVPRNETIVGVDLGLNRPAVTSQRQFLGSRHWKEIDRRRFRLRRTLQSKGTKSAKRHLKKVSGRSLRFHRDCDHVLSKRIVQSVSPGATIVLENLTNIREGVRHRKGEGQRKLHSWSFAQLYNFLVYKAQEQGIVVERIDPRHTSQTCSQCGYQARNNRRSQAVFHCRSCGYQLHADLNAAYVRRFGVH

SEQ ID NO: 54592 - protein, 417 aa, Ktedonobacter sp.
MLLCKKIRIDISEQDTATLEFMQGKCRALYNWWVMRLREGEKWDLYEAKRSLQESKQHDPDLVQVYGKLLQEVYYRLDGAMKAFYRRVKAGEKPGFPRVRPRHCFFTLCYPAMYLKIEGDKLILPTGGKGKNKLYPNIIARLTEVPPEQFKEVAISRDARGNYFASFVRERKEKDCETDGTVAFDLGIKTLATGINEQGRIYTIGGFKGSRWYNKQLDRIRSKRDKCKKKSRRYLHLSKVYKRVSQKKRNKQRDSLHKASHLIAHKLVERTVVIGDLSQRQMVMKEHRERNKHLNRAVYNEWSLYTFIQLLTYKCQFYGKDLHFLDERNTSKQCSGCGNLQAMPLWKRTYGCVKCGLVMDRDENSAHNILARFFARQEPHAQARPECSVLHATQNGVEVTKASCKGQVQQLNLFESV

SEQ ID NO: 54593 - protein, 262 aa, Ktedonobacter sp.
VQIPQAEEAPGTVQATVDLGEIHLAAVTTNTGKAMIVTGRGIRSLKRQRTKQLGQLAKKQSRCKKSSRRWKKLQRAKNKQCRRAERRIRDLRHKATRNVINFCVEHQVGTLFIGNPHSVRDKKSGRHHNQRLALWEYGRDIDYLTHKSKAAHIMSFTGSERGTSSQCPVCGHRHKPKGRNWVCRHCQFSGHRDLVGSVNMHQLSFGFQVKFPQSFTYLRPPGSSRRSSRRADTPQRCLSKEPAQPRIADTVSSETGQTGDVA

SEQ ID NO: 54594 - protein, 375 aa, Ktedonobacter sp.
MLIYEYKLDGNKTQYAAIDEAIRIVQFIRNKCLRLWMDEHATKNDLQCYCAVLAKSFPFASSLNSQARQASADRAWSAIARFYDNCKAKKPGKKGYPKFQKDNRSVEFKTTGWKLDPDGRHITFTDGCGIGRLRLIGTRDIETFPVKQIKRVRIIKRANGYYVQFAAQTDRHIEHAPTGKQVGIDVGLKAFYTDSEGATVENPRHYRKAEKRLKRLQRRLSKKQKRSANRKKARQAVAKAHLKVQRQREDFARKAANTLVSSHDLIAFEELQIRNMVRNRHLSKSIHDAGWGRFLLWVNYYAALHGIPVVAVSPQFTSQNCSACGMLVKKSLSVRTHICTRCGVVLDRDHNAALNILQKALSTIGHMGTDAPLSA

SEQ ID NO: 54595 - protein, 387 aa, Ktedonobacter sp.
MIKAHKIRLHPTPEQVNYFVKAAGTSRFVWNWALAEWNRQYEAGKKPTALKLKKQFNEIRREHFPWTWEVTKNASDQPILELGKAFTAFFEGRARRPRFKSKKRSKPSFYLANDQLELGDHRIWVPKLGWVNMAENLRFQGKLTGARITKTADWWFVSLTIELPDELPEKRQAAVGIDVGLNRLVTLSTAEGYENQAFLKTALGKLRQANKCLHRRVKGSKNREKARRQVARLHYRITCLRDDVLHKLTTRLANCYGMVGIEDLNLKGFLKNRKLARSFSDAALGKLLNLLNAKVEQRGGQVQKVGRFFPSSKTCHACGWKWEDMEVSDRVFLCQNPTCAYHQFEQDRDHNASLNVLHEALRLIGLIDQAVDDIGSGDDVNLTADAG

SEQ ID NO: 54596 - protein, 410 aa, Ktedonobacter sp.
MKCVITAKLKLQTDPTQFAALRETQLAYRDALNHVSRYSFAHGKTSNQRALQHACYDDIHLLFGLPAQMACNVPRQVGATYKTLWTKAKHNAQARKAGHTKKRYKGLDQPPKYVSPTLTYNYQRDYGFKQEQQVSILTLQGRVVLPYRGYEKHVALIGQGASIGAAKLWYDKPHKQFYLLVSLELEVADPTPQTHSQVVGVDVGQRYLAVTATPTGQASFFPGKQVRATADHSVRLRKRLQKKGTRSATRRLLAISGRERRLKHDRTHLISRRIVDAHPQSLIGLEDLTHIRERTKRKRGKKASKKQRRANRHASSWAFAELHGYIAYKALLSESMAIKVDAYQTSQACPKCGHASEDNRPNKGLLFVCQECGYRLHADLIGARNVALRTLLTRQDWVSTGILCAPREAQ

SEQ ID NO: 54597 - protein, 171 aa, Ktedonobacter sp.
MPRRKRARKIETRRVSRSHAFMLVSLIVAVTRLHKLSTRLIRENQTMCVESLQVKNMVKHPTLSKAISDVGWSEFVSQLEYKADWYGRNLVKIDKWYPSSKRCFECGHILTSLPLDIRQWDCPECGVHHDRDINAAKNIVTVGLTVLACGESIRPGRVSSRSGKTQRSRKP

SEQ ID NO: 54598 - protein, 379 aa, Ktedonobacter sp.
MIRAHKIRLHPTDEQKVYFAKAAGVARFVWNWALAEWIRQYETGEKPTTFKLKKQCNEIRREQFPWTWEITKNASDQPFLDLGKAFKAFFEGKARKPRFKSKKRSKPSFYLANDQMEVGDHRVWIPKLGWVNMAENLRFKGKITGARVTRTSDWWFIAITMEVPDEQPTKRSAAVGIDMGLNRLATLSTGEEFENQKYLTTALKKLRQANKRLHRRKPGSKNRERARRQVARLHYRITCLRDDALHKLTTKLATCYGIVGIEDLHLKGLLKNRKLARSFSDAALGKLVNLLTRKVEQRGGQVVKVGRFFPSSKTCHACGWRWEDMQLSNRVFLCQNHQCAYHLFPQDRDGNASLNILYEALRLIGLSDQVVGGTGSDAT

SEQ ID NO: 54599 - protein, 268 aa, Ktedonobacter sp.
MLIYEYKIEGNKAQYAAIDEAIRSVQFIRNTCLRLWIDDHATRNDLQLYCAVLAKEHPFAFSLNSQARQTAADRAWTAISRFYDNCRNHKPGKKGYPRFQHDNRSVEYKTTGWKLDPDGKHITFTDGCAIGRLRLIGSRDLATRPIPDIKRVRLIRRADGYYCQFAVVAERHIEHLLTGKQVGIDVGLNAFSTNSEGNTVENPRHYRKAENRLKRLQRRLSKKHKKSQNRKKARKAVAKAHLKVQRQREDFARKQANALVSSHDPLCL

SEQ ID NO: 54600 - protein, 389 aa, Shigella sp.
  misc_feature (311)..(380): Xaa can be any naturally occurring amino acid
VKRLQAFKFQLRPGGQQECEMRRFAGACRFVFNRALARQNENHEAGNKYIPYGKMASWLVEWKNATETQWLKDSPSQPLQQSLKDLERAYKNFFRKRAAFPRFKKRGQNDVFRYPQGVKLDQENSRIFLPKLGWMRYRNSRQVTGVVKNVTVSQSCGTWYISIQTESEVSTPAHPSASMVGLDAGVAKLATLSDGTVFEPVNSFQKNQKKLARLQRQLSRKVKFSNNWQKQKRKIQRLHSCIANIRRDYLHKVTTTVSKNHAMIVIEDLKVSNMSKSAAGTVSQPGRNVRAKSGLNRSILDQGWYEMRRQXXXXXXXXXXXXXXXXXXXXXXXXXXXXXXXXXXXXXXXXXXXXXXXXXXXXXXXXXXXXXXXXXXXXXXHHVTNASGN

SEQ ID NO: 54601 - protein, 358 aa, unknown
  TnpB Polypeptide
MAIKSHKIALDTTTDQHIWFSKQSGYSRFAYNYALSDYRDEPRHWQELNKRFNIAKQEIDWTQELDQRAALFGIKNLGDAISRYKSGQNRFPKKKRRRDKQSYSTDPATTEIEGKRIRLPKIGWVRMFQKLRFKGEITKVTISRTAQRWFVSITVDTGKPNAPRDTRGLPVIGIDVGINSLATLDTGKQYPNPRPLKRFEKKLKREQRSLSKKEFLSNNWYKQKRKVERTHYKIACIRNDAHHKATTEIVNMASVIGIETLKITNMLKNKNLAKALSDSALGGFLAMLKSKADILGIPIKEAPQFYASSKTCSNCGHKKEKLLLSERQYHCGACGISIDRDQNAAINLKHLAVGLAES

SEQ ID NO: 54602 - protein, 401 aa, unknown
  TnpB Polypeptide
MYNRAYKYRLIPNKEQQVLLSKHFGHCRFVYNHFLQVKIDHYKKTKKTINWQDMATQLPKLKNEYEWLSEVGSQSLQQSILNLDRAYTSFFRSGTGFPKFKSRKYARKSFIVPITNNNIKLNYETKRLVIPKFRNGIKCIFDREAEGTLKQAIISQDRDGTYYVSILVEVNNDFPTKPEPKKTKAIGMDFGVKTFLTLNNGEKIENPKVLKQSSDKLGKRQQELETLTKGSTAHISKQEQITKLHSKIARQRKDFLDKLSHKLTNDNQIGTICIEDLSIKNMQADNYKATNNRIADYAWGKFVSMLQYKSDWYGKNFRKIGRFDPSSKMCNECGYVNHSLTLSDREWKCPSCSTNHDRGVNAAKNILDFSFPKTEFNKGRNYPIETLMLEQRGNPLALAGG

SEQ ID NO: 54603 - protein, 401 aa, unknown; identical to SEQ ID NO: 54602
  TnpB Polypeptide

SEQ ID NO: 54604 - protein, 449 aa, unknown
  TnpB Polypeptide
MMTRRTTFRLYPSKAQTAKLFEARRLHAYLYNACVEHRKTSYQKFGKPISYYDQQAAIVPFKDCWEEYKSLNHGSLQATVKRIDFAFQRFFNGLGGYPKFQSIRRYSGWTYPDARQGFKVHSTGVNGYLELRDLGIQIQMRGKARTWGRPTTCTIVYRNGLWFASITVQCLPIRETGNNAVGLDFGCLTAVAMSNGEMIKNPRFLATTKAKISKASKSKRRKVKPNFKKNGIFGGNNSSQKMPQIKASKRWEKANKKVALLQRKVASQRQDWVHKVAAEIVGSNSLVVTEKLNIKGMTRKAKKGSKRKRQKTGLNRSMLDVGMGALRSAIEYKLAEAGGIFIEVPTQKVKPSQTCPSCGHQEKKTLDERIHKCKLCGYTDDRDVAAAKVMLSWALGTNVLNRREGSSTSNPAERKHCGGMKQLASLKRQKRLLVNTEIGNSDLSVNGSE

SEQ ID NO: 54605 - protein, 909 aa, Anabaena sp.
MPYGCQQILLNPDNDLHAILEFLCGEATKLSNCGTYYARQLYFKTGKIPSKFDLNNELSNNIHFAAMYSQAAQQCLMGVAESFKSFMGLLKGIKNSTVTQKPKLPGYRDGGLSLVTYPAQAIKLKPQGLRFPLGSKVKAWFGIAEFYLSMPSNLDHKQIREYRILPRNGKFYLELVYKLPTIKSDVDFGKCLGVDPGLNNWLTCVSNIGTSLIVDGLHLKSLNQWYNKRVSVLNENQPQGFWSKQLAAITEKRNRQVRDAVNKTARIILNHCLENRIGTIVFGWNEGQRQNINLGNKTNQTFVQIPTARLKDRIAQLCEQYGLRFEETEESYTSKASFLDSDLLPTFGEKPEGWQPSGKRVKRGLYACASGLKINADANGAAKIGSIRETLLELKLMSLTEEILSQLPGDVLGNLRRADDVLKSIRENTAPTPSVVKESPATLETVNWDVIICGGTLGILIGCALAVRGLRVALLERGTLQGREQEWNISRKELEVFVELNLLTPEELKKAIATEYNPARVQFKDGAEVWVKDVLNIGVDPVYLLATLKQRFLDAGGQLFEHTPFSEVVIHPDGVMVNQQFTAKLLIDAMGHLSPISKQARQGKKPDALCLVVGSCAQGFSENSAGDLILSFTSLQNQCQYFWEAFPARDGRTTYLFTYMDAHPQRLSLEDLFGEYLGLLPEYQGVELQQLKFQRALFGFFPSDRQSPLKTPWNRILPVGDSSGNQSPLSFGGFGAMLRHLQRLTLGTQEALQTEQLSATALALLQPYQPSLSVTWLFQKAMSVGVNQNIAPEQINQLLSTVFQEMAQLGTPVLKPFLQDIVQFSALTQTLAKTGLSHPVLVAKIIPQVGLVNLLDWLVHYTNLGIYTALFALSPTLEIWIKNFPPTQQYYWHRLMDAWKFGSGGDYNA

SEQ ID NO: 54606 - protein, 480 aa, Mycobacterium sp.
LADRGQGSDARSRAPVCARRAGRRASDGGAGFQRSHRTGATPRVPVLAPVGEGAVVTVVLRRLGWLRFGIDSAPLYRTPVGRGGVVRRSYVFRLRPTARQHVALAACLEAHRELYNAALQERRDAWLHSKTRIYYGDQSAQLTEIRQACLDQAVWSFSSQQATLRRLNKSFQSFFRRVKTAKPGVKAGYPRFKGKARFDSVEWPKDGDGARWLPEQKRVYLQGIGQVKVQLHRQVVGRVKTIQVKRCGRRWLLVLSCDDVPTNPLPGTGRQTGIDVGIASFATTSDGEHVDNPRWGRKADGRLAAAQQRLGRAKRGSNNRERKRETVAARHRKIANQRKDFHHKQARALVESYDVLVVEDLKIANMLRRAKPVPDPDNPGQYLANGAAAKSGLSRSISDAGWGRFVSVLRAKAEEAGRTWIEVDPRHTSDGCEKCGYAAAENRVTQAEFVCQRCAHRAQADEMAARNILRAGLALHAQAA

SEQ ID NO: 54607 - protein, 486 aa, Mycobacterium sp.
MARFEVPDGWVVQAYRFALDPTPTQLRGLASHAGAARFAHNHMLALVKAVMDQRAAERSYGVSESELTPTLGWSLPALRRVWNQRKADYAPWWPENSKEAYNTGLDGLARGLDAWSSSRRGQRAGKAVGFPRFKTARTPKAVRFTTGVIRVEADRRHVTLPRLGAVRTHESTRKLARRIEAGTARILSATVRRDGAGRWYCALQTIVAAKTRPAHARRSVYPVVGVDVGVKADSLLVIATPDGIEVDRIGAPMSLSAAQSRLRALQRRAARQQGPYDAGSRTKQMPSKRWWATQARIGRAHAHAAAVRRDVLHKATTALAQQHDFVVVETLNAAGMRAGGGSRKRGLNRALADAALAEIRRMLDYKSRWYGSHLVEADRFYPSSKTCTACGRRKPNLTLADRVFECDECGVRIDRDLGAAINLARLGVPTSVGEQSPAGSGPVAGRGATQETEPAPAGDAAGHEASTPHHQQVDQTGTASPQGEAA

SEQ ID NO: 54608 - protein, 520 aa, unknown
  TnpB Polypeptide
VKKSKTPTFLLQLPLAVTPGQTKPLGAHFEAARQLYNALLGEALGRLHRMRADPAWQEARAIPRSLKQERAAAFSQLRQEYGFSEYALHDFAKRANCTWIADHIDAVTAQTLATRAYQAANRVCLGRARKVRFKSKGRGLDSIEGKRNNTGLRFVLQPPEEGNQGWLVWGKDRIPALIDWNDPVVKYGLDHRIKYTRLVRRKASSPKAQGADCQGYRYYVQLVLEGRPYQKKKNTPGQDVIGLDLGPSTIAIVPREGEARLVPLCEELRPDARKKRRLERKLDRQRRANNAQNYDEKGRVKKHGKRRLTWKNSKGYLATRRRLAHQERKLAAHRKSLHGRLVNEIIHTGNDIRIEKVSYKGWQKQFGKSVGMRAPGMFVEHLRRTVAKTGGILHEFPTRTTKLSQYCHGCRMCVKKPLAQRFHDCACGIGPIQRDLYSAFLAAYLDPPDFLPSSAQYTVYWEGAELRLRAALERLYQRAKEGQVLPRSVGITGARARLPKSLVSNQQGLVYRRGRLEELE

SEQ ID NO: 54609 - protein, 397 aa, Actinomadura sp.
VSRYRLCPTPVQEAGLLEHCGRARYVWNLAVEQHAWWTPSRGPAPGYVAQARQLTEARAANPWLAAGSQTVQQQALRDFAQAMANFFKGTHRRPTWRKAGRHEGFRIVGRRGRQWDVRRVSRKVGEVRVPKVGWVRLRWSRPVPAGVKSFRITRDRAGRWHIAFAAIPDPTPAPGNGEAVGVDRGVAVSAALSTGELLHAPGLTRAEAARLRRLHRRLARAEKGSNRRARIKAAVARLKAREADRRRDWVEKTTTTLARGYDVIAVEDLNVRGMTRSARGTVEAPGVNVRQKAGLNRAILGSGWGRLVARLEHKAPGRVVKIDPRYTSQTCHACGHRAPQNRESQAVLRCVACGHQANADVNAAINIRTAAGHAVAAREGPRVTGPVHREPQLILLA

SEQ ID NO: 54610 - protein, 407 aa, Haloprofundus sp.
MDWTRNTVRQTYNHALHEFNQIPEDAGTLRQRVWSVRDTLPAMKEWWPDLKLVYSTVLQKSIERIRDNIQNLGKLKAKGYDVGSLNRKKPREYRSFTYRQSGFELDKKSGPSGRGLLVLKKLKGETREIPIRLHRDLPDHERIKEVSLKKEPTGAWHVSFCIKTEAPGKPAPEDIGSDDAVGLDLGVLNFIHDSDGRAVGRLNLSDDRERLEHEQRSLSRKDSESNNWEKQRQRVAKIHARMSNKKHDYKHKLAHFYTTEYDAVFVEDLNVRGMLETSENARNKAEVGWRDFITILKHHGEKNGCHVVEVEPRGTTKECASCSVETRKPLWVRKHSCPACGFELDRDWNASLNVLSRGLDKLGVVHSEDTPVETATAGDTFSVSASRVVETGSSALKEPAKQASRAG

SEQ ID NO: 54611 - protein, 495 aa, unknown
  TnpB Polypeptide
MSAFIMEFELIAGNQEINFLEKRFNAGSNIYNLCLDHCIKQLNKLKRDKEYRKTVKALKAVNRKLEKKNLSQDEIKRLKEIKISCTNKIKKLEKEYQFTENDIQKYAKVPREFIEKLLNSNIVQKIASTAFVAAKKLQYGKAKKVRFKKKGEITLEGKNNSTGFIFDIKTMKLKLGKKLFCNLKTIDKRQWNCFKNRIKFCRVLKRYIRGKKRYFLQIVFDGMPETDFQLGEGEVGLDIGTSTVAVSSNDEVKLLKLSETEQEARKIRILQRSLDRKRRMANPDNYNENGKVKKKRKEWKLSKNYFRELNKLKEVYRKKKVKDNQHKNILVKFILSQGDTVKTEKTSVNSWKSKSKKTVINKNNGKIMSKKRFGKLVNNNAPGTFIRKIEEKLSYFGKELIKINPFKTKASQFNHISQEFKKCSLEVRFKELKKGIVVQRDLYSAFLIKNIENLSEYNMKKINQQFTEFYEKQLKEVERIKNEGNLKFYVSGKTV

SEQ ID NO: 54612 - protein, 327 aa, unknown
  TnpB Polypeptide
MSVRSAVFYLNGVLAPEARFLMEDFRLATNGAIRVGLHAGVTSRNALCKLAYKDSRKEYPGLYAQHHASAIEVAAGILKNHRRRLRRSVTGNATRSPYLRRLMMKAENQAYKLDRAEGIVDLPVRAGLHIKFKLIVGQYHRHYLDDEAWSLGSLTLLPDRAVIAFRKTSPKTYAPKSVLSLDTNERSLDGVLIREGSGAAVRAEFPDVAIIQQRHHDRRKRLQKKKANDRRTSRTLCKREGHREHHRVEYRLHEVADSILSFAKNQESAIVLEDLRGIRHKKSKDMNRRLSMWPRRKLHQIIEYKAEDMGIPIVKVDPRYSSKKCPI

SEQ ID NO: 54613 - protein, 430 aa, Cenarchaeum sp.
MSVRIHPAMRGKELRRRAVHHTRVYQTRFADYIVLDVFGSHKAWRTKQLTDKHARAPHFRNPVAQTDIFELAFDDTSKRWNGTPSIHVAVYGTGRQNRSWMAFPVPPYVVNELGRPNRTPKTVSINRDEIFITYQENVQDSKAVMWADVDMNAKNNAYSFTDGTVTIVGNRNGSEYNRACSRILKVRRRNDDRIMAKYTGKAWKTYGNRIRNDVHVEAKRLANARCVVGFETLNIHNLYNKNGKMSPYVRGKTKATLNTGQRQAALKNAAESAGLPSVGVEPRNTSAKCHKCGGRLAFHSKRSGEVPLRNMRCGGVCRAMRERDANASTNILLLIIRELMGDSVVSTGTITTSELLQLLKVVVANRTVPHRKKLIDIMRLLEGRSANTLWCLSGVHKPKHRNYVDGDSMGVFGVGDAGRNGPGPPNAAKL

SEQ ID NO: 54614 - protein, 225 aa, Okeania sp.
LIFDKSSRKAFKNFLTIPKRGFPVFKKKGRKDSFYLEGSIKIFQGNYIKLPRIGVVKTYEILPSCRVKNVRISKRADSWYISFKYDFESYPTEKVGETIGVDIGINTLATCSDGSKFANVKAYSQAKKQLVRHQRAVNKKVIGSKNRLKAVKKLAKAHKKADATPRRRQLACGMLTKRGNAHQAVADIRADTLHKLTSWLAKNYSTIVMEDLNVSGMLKNYNPPL

SEQ ID NO: 54615 - protein, 420 aa, unknown
  TnpB Polypeptide
MYIVNMIKTINKAFSFRLYPTLEQEKTLASFFGQARFVYNYFLRQRIDYYATNKGKEKQSLNYHDTAKMLTELKRQPEYIWLNESNSQSLQQSLRHLDNAYNNFFNKRTEFPNFKKKHNKQSFLVPQHFDIDFEKKLLHIPKFEPIKIILHREIEGIMKSINISKTPSGKYFASVLCEVEKVIKPKKKGNRIGIDLGLKSFFVASNGERVDAPQYLRKSEDKLKRLQRHLSCKVKGSNRRNKARIKVARIHDKIFNQRNDFLHKLSHRLVAENQSIFAEGLHVKGIMANHHLAKSVQDSGWSEFVRQLKYKSEWNGVCFGQIDRFFPSSKRCFHCGWINESLTLKDREWICQCGQVIDRDFNAAQNVLLFGQKMVGRELPKLKRSGRGGAVMPLVELRSPFQSLIGGGSSHSMEENNVRI

SEQ ID NO: 54616 - protein, 518 aa, Labrys sp.
LPRAAYVSNQRQIVIRQYGLLSPLDWGDDCNEEMRRANQFWNRLVEIEHKYIETYRSLINENPKILAAQNQIDALIKFRKKLETETKSAHDIHTVAVAKEQIQGVAERINILSIEIKSMRILEKKNNKNNIEINEINRKEAVRLIRKDSGVWWQTAEVAYLRYLDNRQRAMKGGTELRFRSLDADNIQIVNRNRRDLSLDEIFEGKGEFSLTPLPPNAFTHKSKGERRRLQRTQLTLCVYSRRRQPRLVTWPMQMHRPIPDNCTIKYVTVTRKKVGPRTEWKATFTCYCDPEPVLVTSPNATATVTFEPHYFGDCLRVGQVTSSTGDSEWITLPRRELTRFDYVGELIVAQCGARSDLRTALANLEWNNAPEHLQSLWAQIRDAPVSSRWLQRLIQAWPKNDWQDDRRVKFEERFRRDLRNWREITGLRLRLQRARLDHYRKAAHELVHRYGTIIVGDVPSRQCLDQSLRDIDDTKAKTEIRRLQQIAAPGILRQAIIMAARAHHCAIVTSDTPPNER

SEQ ID NO: 54617 - protein, 420 aa, unknown
  TnpB Polypeptide
MQLAERHIINDNHSFYKELDSISFLSKNLYNKANYIIRQEFISTSKEKHQGKKDKANWIRYNKIQKQLQDSKDTDYTKLPAKVSQHVLRLLDKNWVSFFRSIRDWSKNKTKYTGRPHLPNYKHKTKGRGVLTYTIQAISKKELKNGFVLLSGTNIKIRTKQTDIQQVRVVPKIGHYVIEIIYNKKEEKNKNLDINKIAGIDLGLNNLAAVTSNINSLKPIIINGRPLKSINQYFNKKRAKLQSFAGDKTSNKLIKLTNKRNRKIDNYLHKSSRLLVNYLNENNIGTLVIGKNKQWKTEINIGKKNNQAFVNIPHARFIHMIQYKCKLIGIEVIVTEESYTSKCSFIDFEVLNKHDNYLGRRKHRGLFVSKNGSKINADCNGSGNIIRKEFPNAFANGIEGVVVCPLRINLYEFGSYKKVA

SEQ ID NO: 54618 - protein, 378 aa, unknown
  TnpB Polypeptide
MRKTFKFRLNPVRHQRTLLDRTLELCRWVYNETLATRKKAWEQDQKSVSLYDTNKLLTGWKQEKPDLSQVHSQVLQNVQERVDLAYQAFFRRVKAGENPGYPRFKGYGRYNSFTFKQSGFSLKDHGLLLSKIGLIKVIQHRPMEGKIKTLTLQRDGVGNWYACFSCEIEPKPLPPTDKVVGIDLGLTTFAVFSDGKEIKRQRWMKPDSKDVGRLQRKKEKLAKGSAERQKVVHALQHAYQRQTNRRNNFAHQESRKLVNEYQFIAFEALDIQDMQSKGNKIINQGIADVAWGRFVQYTAYKAECAGRGVALVDPKNTTQMCSGCGEIVAKDLNMRVHECPHCGLSLSRDRNAALNILARGLAGLDASPRSHAALAAVE

SEQ ID NO: 54619 - protein, 355 aa, Acinetobacter sp.
MKTLKLRIKDKHCKVLDQLASEVNFVWNYVNDLSFKHLKRTGDFFSAFDMAKYTKGTSKLCGLHSQTVDAIREEYAGKREQFRKAKLKWRVSNKKSARRSLGWIPFKKVAIKYADGYVQYGKHQFKLWDSYGIGKYSVRTGSFVEDSRGRWYVCLVVDSTKADKPTATKAIGIDLGLKDIATCSDGTVISNPKFYRKYEKKLGIAQRARNKKRVRALHAKIANSRKDHLHKASTLLVKENALIVVGDLSAKKLVKTKMAKSVLDTGFSALKTILKYKCENAGVLFEEVSERFTTQICSCCGEITSSSPQGRTDLRIRVWECECGSINHRDLNSAKNILALGHKRLAVGITLLSGG

SEQ ID NO: 54620 - protein, 544 aa, Holophagaceae sp.
MPRAKTQSFVCEFEVLATSKDLGVLRSRKEGGRQIYNAIEGEALRRLARMRHDPGFEQAKAMPKGPEKKAAFEALRKRHGFTEAALHQHPSLAKDCWLRGHLDVHTQQKVASRAFKAVERWSFGGSGKPRFKRYGELESLEGKSNAAGIRFRDGRVLWSGAHGNLDLPMIVQPGNEVQAHALRVAATTFTRTTKDGKAVAETGVKYCRLLTRTIRGRERVFVQLVLRGTPLQKASHHVHDGLVGLDLGPSQVAVVGEGFVKTIPFCPGLDRAESARRRYQRKLDRQRRANNPGNYRPNGAIVPRSQRKPWQASARQKATRGVLAELQRGMAAHRKSIQGKLVNDLLALAGNQVITEQVNVRSWAKLWGRSVGHKAPGLFQSAYARKAEGSGGTFEMVSTRATYLSSRCLCGKRTKKLMSERKHLCGCEFIPEGMHADRDEFSAFLALHCHGGTLDEGSARASWRSWGADCLLRLSSGTTETANGEALPTLRVRESRQSSSTDHEAGPRREAVPVLRTDTDGERRDRKIPKPCKPDLKKESAHVA

SEQ ID NO: 54621 - protein, 418 aa, unknown
  TnpB Polypeptide
MLLSRRSSIKFTEDQANFIGHMCYAASKLWNVCNYERYHYKELGLEQYPDWYYQKKVHKNELWYKQLPAQTAQEVCKQLDKAWKSFYALKKSGGIQAPKPPRFKKENIPVAYMQMGIVHEQGSGSVRLSLPKALKIYMEKTFGIHEKFLYLENKIFRSMDQIKQIRIYPPEKGTSRIIVVYEIPDPEILPDKGHYQAIDLGLHNLMTCYDSGNGKTFILGRKYLALERYFHKEIARIQSVWYGQQSAKGIKYPRSSKHIQRLYKKKQDAVTDYLHKITRYLTEYCKKQGITCVIVGDIGNIRKNKDMGHMTNQKFHGLPYNRIYIMLEYKLKMYGICFVKQKEAYTSQCSPLSPEVTKKYAAPSNRKKRGLYRDNTETYNADAVGAFNILRKYLSVTGEQKELSVKGLKNPEIIKVAV

SEQ ID NO: 54622 - protein, 437 aa, unknown
  TnpB Polypeptide
LEESRRSEASAIAPPKYCYTTLAYKSTYHMSIFDPKLLLTIYIHTMRRVYSFYMDTPEGFLDYLKTCSLIFERHVDWAFENKSTNKVQAHKDLYNILRAEFPNIPSNILQATRDQALESVRRLKFKVKPQKRPYSAVRYDARTIALRGNLLTFSGPGKRIRTMINLPSFFQKYKSWTMKSGTIGYDKFRKQIKVSLIFEAPTPQVVQGDRIVGIDRGLYNIVVLSDGKVFSSQQVRKAKRKFLHVRRQLQAKGTRSAKLKLRQRSGREKRFSSNINHVISKWLSNLPYDIFVLEDLTGIRKQNKGRKMNGWLSNWTFYQLEQFLTYKAASLGKQVVFVDARYTSQKCSSCGETHKDSRNKSQYHCASCGYFDHADHNAAINIRSNYIASLSACDGGELSSPILSAAEKPAEQALVNEPNAVLLNCNVAGSLATSQRL

SEQ ID NO: 54623 - protein, 434 aa, unknown
  TnpB Polypeptide
LDQAAKNKKIKAALKKTRDRRKNQVCRSYELKIDRSHLTTETQRHLVRLFLEAKWFYNNLIAQGKANRDGLWNADYKVPKVMVKRKGVFEERDLLHLSSQMKQEIIGRAKDNIVGLSRLKKKGRRVGSLKFTGRVHSIPLNQYGVTYRINNNRIHIQKIKQPLRVRGLKQIPKTAEYANATLIQRNGDYYVHVTTYQPKKAETFKQKSVGTDGGIRKQLVLSNGIEIEESVPVTEKVRRLHRELSRKAKGKNRAKAQEKLNQAYEELTRQRRDIRNKISGKLTETFEIVCVQDDNVSGWQRLWGRKVLATGVGGLMSALNKAHTPVQVDRFYPSTKTCSRCGHMQNVDLDEKTFRCEACGLVIDRNLNAAINNEREGLKSIGVPVVCREFTPVDTKTSAELVRYFNSIPRVRASLVAEAGSRASARKPTTSVVR

SEQ ID NO: 54624 - protein, 408 aa, unknown
  TnpB Polypeptide
MKRAYRFRLYPKAKQVETLEQTLALCRRLYNTALEHRITAYRSGQSVTYLQQQNELPLIKREVPEYASVHSQVLQETLRRLDRAYKAFFRRVTEKRKGKNVKAGFPRFKGENRYDSITYPQSGFKLLPNGHLQLSKVGEVRMFMHRVPKGKIKTLNVKRDRCDCWYAVLTVEKPPVQRRAARMVGVDLGLRNLVALSNGEALPAPKFLRRSEKKLKRLQRRVSRKRKGSGKRRKAILCLAKERRHVERQRTDFLHNLSRDLSVCDVVFEKLNVAGMLRNHCLAKSIADASWSRLVQFTVYKAEEAGGRVVLVDPKYTSQECSNCHEHVKVLLKDRVFICPHCGLIICRDVNAARVILGRAFSVGRGTAEFTPAENTPLLKSFSKRTQGNGKLPSFRRGRMSPQARYLL

SEQ ID NO: 54625 - protein, 425 aa, unknown
  TnpB Polypeptide
LDRTVKNREIRTTIKKTKARHKNQLCKTYELKIDLSHMNTETQRHLARLFLEAKWFYNSLIANGKTDRDGLWNADYKVRTVKVKKGNVFEERELKCLSSQMKQEIISRTKDNIVGLSCLKQKGKKVGGLKFTGRVHSIPLNQHGVTYWIKGNRIHIQRLRQPLRVHGLRQIPKDAEYANATLIQRNGYYVHVTTFQQKQAETFKQKSIGVDGGIRKQLVLSNGIEIEESVLITKKVRRRHREFSRKEKGRNRAKAQEKLNRAYDELTRQRRDIRNKISGKLTETFEIVCVQDDNVSGWQRLWGRRVLATGVGGLMSALNKAHTPVVVDRFYPSTKTCSGCGHVQNVGLNEKTFRCEACGLEIDRNLNAAINNEREGLESIGVPVVRREFTPVDTKTSAELVGYFNSISGVRASLVEETGSLTASV

SEQ ID NO: 54626 - protein, 463 aa, Exiguobacterium sp.
MTIRSSNDSKRSSVTSAKSSTFDSSPSRVIGTTHIYSCRRCHPSARLTSWRASKASRRSDYERNFPISHISQAFGRDLSSCRRREASPVRPSSVMSRNKKQGGDTVSQTLTVNIKLRPTKEQQSILKRMMRTYIGTTNQLVSDMVQARENLKLTSKNVSSDLPSAVKNQAIQDAKSMFKKAKKKGFQVVPVLKKPYCTWNNQNYSFDFESISFPVMIDGKVKKTAIRAEMVDPDNRNATLLANKLGTLRIIKKSNKWIAQIAVTIPTTEKGGTNVLGVDLGLKVPAVASTDRDKARFFGNGRENKYMKRKFRAKRKELGQQKKLDAIKKLNNKEQRWMKDKDHKVSREIVDFAKENKISVIRLERLANIRQTARTSRKHNKNLHTWSFYRLALFIEYKAKLEGIKVEYVNPAYTSQTCPSCGERNKAKDRTYACPCGFKKHRDLVGAMNIRYAPVVDGDSRPA

SEQ ID NO: 54627 - protein, 394 aa, unknown
  TnpB Polypeptide
MPRFRLLPTPDQQVVLVEHCRHARFVWNLAVEQQQLWQPGRHAPGYNEQCAQLTEVRAQYSWLGAGSQTVQQQALRDFAQAMRNFFAGTHGRPSWRKAGVHEGFRQVGVKPGHIEKLNRRYARVLVPKVGWVRFRRTRAVPADVKSYRITRDRAGRWHVAFVHIPDRIPGPGDGSVVGVDRGVAVSVTLSTGELLHAPGLTPGEQARLRRLQRRLARAQHGSKRRARAKLAIAKLKAREADRRRDWVEKTTTDLARRFDTIRVEDVDVRAMTRSARGTRNQPGVGVAQKRGLNREIRRQRWGRLVARLDHKVAGRLERVPAVYTSQRCAACGYVAPENRKSQAVFSCVSCKAGPCNADVNAARNIAAGRAVPAQGDLANGRSMNCEPQLGSPAA

SEQ ID NO: 54628 - protein, 377 aa, unknown
  TnpB Polypeptide
MLKMFKYRLFPTKKQEKKLNETLEECLWLYNHLLEMRKTAYERDGISLTCFQQQYTFPVLKQERPSLATVHSQILQNVAVRIDLAFNAFFRRVREHAEAPGFPRFKGKNRYDSFTFPQSGFSITHDERVCLSKIGSVKMVYHRQIKGKIKTCTIQRSSTGKWYVFFSVECEPERLPETPTQVGIDVGLKTFATLSTGEEIANPRFFRKEEKALAHVQRKHSTFTKGTPERRKHRKAVARVHERIGFRRDNFTHQNSRQIVDRFGVIAVEDLHVNRMVHNHCLAKSIHDASWSEFFSKLSSKAEEAGRMYIAVNPAYTSQTCSTCGHRQKMPLDVRIFDCPCCHVQLDRDLNAALNIRALGLQSLGLSVEAPGLSHGE

SEQ ID NO: 54629 - protein, 408 aa, unknown
  TnpB Polypeptide
MQRDENCIRKTMANYTYKFRLEPNADQKARLAKHFGVCRYVYNHFLDQRHQVYRNTGKGSTYHKDCAALTQLKKELEWIKDANSQSLQQELKNLDTAFNRFFKKQARFPKFHSKHKDKQSFRVPQFVTVKDKCIHFPKFREGIRLKQHRPIEGEIRYATISMNRTGQYFACICVERDIPTLKPNDNAVGVDLGLKDLATCSNGEVFENIRPYRNLQRRLRRLQQSVSRKVKGSNNYIRAKKLVAKCHQKIADIRSNHLHRVSRSIVNENQVIVLEDLNVKGMMANRRLAKSVADVSLYELVRQIEYKAGWYGREVVKIDRWYPSSKTCHVCDYINEGLTLSDREWTCPRCKEEHDRDFNASMNILAEGLRQRYRTVGTTGLACGEGVRLPLGSGSRRSTEAARSLAGR

SEQ ID NO: 54630 - protein, 626 aa, Prevotellaceae sp.
MTKAIKTYKFKLYAAKRNKKLHRQINAAGLAYNHCIALHKRYWHLYHKSMNKFALQKHLTKFKKIERFSYLKEIGSQALQDVTDRIDKAYKLFWTNLKNKRKTAPPNFKKVRKYKSYTLKQAGWKLDEKHSAVYISKQKYRYFKSRSIEGRIKTLTVKRDALGDIYLYFVCEQKVPEIEPRTGKSVGFDFCFKGNMLVAPDKKDDIAAPSFFQKNKKAIRATCRNLSRRQLRSNNRQKYRKVLARLYRKQANQRRDFHFKLARNLCQKYAIICLESLSMKAMQKGHGKKVNDYGFAEFENILDAKGLPFHLLDILPKSLSAGEDAGLLTPKGAKMIDVSGHLKAGIPVCPPEGDAGTGMVATNAVKQRTGNVSAGTSSFSMIVLEKPLSKPYEMIDMVTTPDGSLVAMVHCNNCTSDINAWVGLFKEYQQLLGVKVDMNELYGKLFNEALKGDTDCGGLISYNYVSGEPVTGLAEGRPMFIRSAGDKFNLANFMRAHLYGAIGVLKIGNDILFKEEKIKVDRITGHGGYFKTPGVGQRMLAAALNSPISVMETAGEGGAWGIALLSAFQVRNSQKYSLEDYLEKVVFAGNQGTSVAPTAEDVAGFDNYIENYKRCLPVEQSAVDHK

SEQ ID NO: 54631 - protein, 500 aa, Cyanobacteria sp.
  misc_feature (3)..(68): Xaa can be any naturally occurring amino acid
MHXXXXXXXXXXXXXXXXXXXXXXXXXXXXXXXXXXXXXXXXXXXXXXXXXXXXXXXXXXXXXXXXXXLSCTLYAMLLAMSITRRVTFRLYPSKTQAQKLSYWRRMHKDLYNAALYHRKTEYQKFGNRVDYIQQQNCLPAFKKEWPEYVELGSHALQATIKRVDFAYTRFFKGLGKYPRFKSIRHYSGWTYPCISGWKIETEGKNGYLTLSNLGRIQMRGKARTWGKPTTCTIVFRNGYWYASITVQCQPQRETGTGSVGIDLGCKEAITLSTGEKIAKPDFLEAGQNKVKNASKRLRRKRSSNRNKRVKASRRWKKERLKVSKLQRKVTRQREDWLHKTTSNIVSGNSLIAGEQLNVKGMTASAKKGKRKKQKAGLNRSILEVGFGIIGDLLTYKAAEAGGFYLESPTRELKPTQRCAQCWELTPKTLKDRTHFCSNPLCGHIEDRDVNAAQVNVIWARGQELASLDGESLSSTSCSKHEATGDEEASETSSMRLAWAR

SEQ ID NO: 54632 - protein, 440 aa, Streptomyces sp.
MCAGCLQRRVARPRGGPHGGAALRHLGEAVQEFDGLEENARTGLARRGVVGGPPAVPEGPGHRVPEFPRRSQGQAPRPRTGAPRLKSKRDNRQSIRFAANAAWRITPGGKLRLPKIGDLKVKWSRALPSTPSTVTVIKDRAGRYFASFVVETDASEVLPETTPQTGIDLGLGHFAVLSDGRKVDSPRFLRRAEKRLKKAQRELSRKQRGSSNRGKARVKAARAHVSACGAQVRRARVPAQRGETGTHPKRPTQFVSEQTGIPGLQAREDVNSTTARWGDGGRRRGRLMAAPHGDHPRHAEPGGHRTGDRHGAACAERSAPRRERTAQGVAGAGRVRAGCGRLRRRRPRTSLPGGDLVEIVEEVVAHGTPPRQGAPAHPVRRAARTPGTGRAHRVLGQPPHGPALEPRRPGSVTQVRGDRGLLRARVTGSWRCAVRARLPG

SEQ ID NO: 54633 - protein, 519 aa, unknown
  TnpB Polypeptide
MSRELRTYQCRIAAGKTEDELLSAYAALYGKAERTLFAKLQSGGNLTDLKREFLPKFGITARQFNALATEVKGKIRSIKERRVGLILEAEQRIAKAKSVLSRITDPGKRHQKKRRLATLQAHLDDLNADHARGAVRICFGSRKLFRAQFNLEANAYESRDEWYRDWQTARSSQFFVIGSKDETAGCQGCVATVAEDGNIALRLRLPNALPRKYLSLRGLRFNHGHEAIVAAVGRNLSQDKKGWQAINYRLLKDEKGWRVFVTIALPEVLRESIRGVGVIGIDINACHLAVTETDRFGNPIEYFSVPCVTYGKSSEQRKATIGDALKSVMAFAVKTQKPLVIERLDFQKKKSALEEEFPRYTRMLSSLAYTQVQTFLRARAFDAGIEVYEVDPAYTSVIGRYKFGGRYGMSAHNAAALVIGRRSSGFGESLPSQLHGTLPLPARNRGRHVWSQWAAVSRKDKAVLAAHGRSGSSRSSLSLIPIRDKSRLVTIPPESVRPRHANRHEHCSSDVMALWNIRP

SEQ ID NO: 54634 - protein, 383 aa, Clostridium sp.
ILGDKKKNLSEKKRNTLLKKLDKRQRKADYFKGFIDNNTIPPVVFGTKKMFLKRCKGLISNEEWKACRNNGIYSRGDKTKKGNPNLRVILSNGISYLQISTLEKTENNRAIKIQVPIYLPQKLSKKTGKVNGTNYRELFLNHLAADNAYQVEMIKKKGKCYCHITFELPKADVIYTGHNGIIGIDTNPDGFALTMIDNKGNYKWNTYLKQHELLYSRSNRRSNLCGELVKQVIFIAKTYNCGVSIEDLKFKNDKDVQSKFARIKHGFIYSKLLAMLETSCYKEGIELIKVKSQYTSKIGLYKYCHQYGMAVYNGAAMVIARRSYKFKERIPKILRDKLVDNIQLFDQKNNWCKWNCIDKIIKRKVGERPDSWIVNRKQILGIA

SEQ ID NO: 54635 - protein, 401 aa, Desulfovibrio sp.
MEQLKGYIFRLKPTPEQAQRFRRTAGCNRFVWNQALGLQKRASKEEQKPIFYVEMSSFLTHWKRDPFPWLYDAPADTLQQTLRDLDSAWRKCIKEGAGAPRFKKRGRCRESFRFPKDFRFDNRRVFLPKFGWIGFFKSREIEGTPRNLTVFELAGRWYMSVCCKQDVPDPVHSSVSVVGLDLGVARFATLSDGSFVQPLNSLRSTEKALTRAQRKYARTQKDSRRREKARLRIAKIQTHIANARKDFLHKVSTVLSKSHAEIVMEDLRVRNMSASAKGTIEEPGRNVAAKSGLNKSILDQGWYALRTMLEYKQRERGGTVTIVPAAYTSQTCSCCGCVDASNRKSQSKFLCSRCGFKTNADVNAALNILRAGGHSVAARGGFGASQPMKREPLNFSGILGL

SEQ ID NO: 54636 - protein, 402 aa, unknown
  TnpB Polypeptide
MRKINRTYKFRLYQNKAQTELLAKHFGCSRFVYNTFLNQRIEQYKLTGKSDNYYEQAKSLTEIKKKEETAWLNEVNSQTLQFAIKSLEAAYTNFFKKRAKFPKFKSKHSKNSFTVPQNASIAGGRLFIPKFREGIKCRVHREIKGKIGKVTITKTPSGKYFVSVFTEEEYITPIKKSGKSVGVDLGLKDLFVTSEGEIFKNNRYTKKYECRLTKAQRHLSRKVKGSKGFENQRLKVARLHENISNSRADYLHKCSISLVRRYDIICIEDLNVKGIVKNHRLAKSVTDASWGTFVNMLTYKAEWNDKKIVKIDRFFPSSQTCSVCGYVNKETKDLSVREWECPVCHAHHDRDVNAAINILRIGLNNNISAGTVDYTGGEGVRADLLGSHSSVKPEAHKLKTCV

SEQ ID NO: 54637 - protein, 385 aa, unknown
  TnpB Polypeptide
VKLVAKLKLVPTPEQVTALLATMERFNAACDWLAGCAYDDRTANKYLLQRRYYRQLRDDFSLPAQMAVRVIAKVAEAYKRDKSLRPSFRPHGAIVYDQRNSNFPGLDRVSLATLTGRVVVPFLFGAYQCSLVGRLKGQCDLVYDAETQTFFLYATADVPTPEPGEPQGVLGVDLGIVNIATTSDAAVFSGARLNGTRRRYFRIRRRLQQKGTQSAKRLLKHRRRKERRFQADTNHVISKRLVQTAASTHRAIALEDLNGIRQRVRQRKGAPNTAPQVQRRLLHGWGFHQLRSFVTYKAALAGVPVLLVDPAYTSQTCPACGHIARGNRRSQAQFQCVGCGFAGPADHIAACNIASRAAVNPPHVGVNVNPSHLATYKLPALAGGR

SEQ ID NO: 54638 - protein, 471 aa, Bacillus sp.
MASPKDRTPSFIATIRLKTDTKAEKQLFVLSECARQLYNACLGESLKRLKAIQYTELYKETVQLFKTVEEEIEKRRANFKHLNETFGFTDYSIQSFGTKTKNDSKFIAAHLGPHICQKISTRAFKAVQKLAFKKAKKVRFKRKGEFVSLEGKNNKTFLTYSNGYLFVGKNLSFKCLIDPKDQWMQHALKQRVKYCRLIKKEVKGKNRFYVQIILEGHPYKKYSLGQEKVGLDIGPSTIAIVGESKAELKEFCEEVVYLDKEKRKLHRKLDRQRRANNPKNYQSNGVVKKGKKKWTNSHRYIRTRSAYRELERKIKEVRKQLHGRDTNQILQLASSIHTERLSYKAFQKMFGKSIGKKAPSMFLKILKRKVDSQGGIFREFPTYSTKLSQSCHCGAVKKRGLKERWHICECGVEAQRDLYSAFLARYVTTTNRLGTKQAKREWVRFSIVLNECITKMKIMKPEKKFVSTFGL

SEQ ID NO: 54639 - protein, 498 aa, unknown
  TnpB Polypeptide
MITDKEHKRHLKQFHKLSDRHILAVETDMPYSDVIKVVAFSDKIRKAGNELVGLMRKNYDQLMRTKRYRKLLFLYGNTKDKDKRKTYAKQLNEMQKAYNITWKYCRTSMIPIGKKYGVDAVFALTKAEDIWRGIEKCLYGNGNAIHFSRYGELPCIRAKQINRGIPISVTDNKLHFKLGRMVFGIQINDRFQQDEVDAVLSYLAESEILDDRAVNTLIKDGYCIDTYRPCYATLVPRMIRGKYRVYLHLTIEGKAKTKYDRFGSPRHKYGKGMIGADIGTQTVAYTSDTEVGLKNLSERGNSIQTSERKERLLYRAMDRSRRATNPQNYNDDGTVKKGRKTWKYSNHYKKLKTKHSELCRINAINRQLAINEDANHLRSLGDVFITEPKNAGKLMRRAKETTFNSKSKFNRKKRFGKSIKNRCPSGFQAAVEQKFKVSGGTYIEVSNDYRASQYDHTVDDYIKKKLSDRMYKLKDGTEYKETGIHHSYYTVMITEPKI

SEQ ID NO: 54640 - protein, 478 aa, unknown
  TnpB Polypeptide
VSAGARRRHRRRGSHDHRRGRGGTRRHHPGGLRRDQPWGPARGHGPGGRAAQPVRRPPAGVPRRGGAAETGAGRRCERGGLTEGSAMQRAWSYKLYPTPAQAAALEAQLELHRLLYNAALEARKGAFDRVRWRYRYGTPAQRAALRPLLPTYASQNRELTLIRRDLPEYRALSSSAEQRTLRRLDKAFAAFFRRVAQGQTPGYPRFKARGRFATIEWTAGNGARLVGDRLHVQGVTPIKLRLYRPLPDDAVVKAIWVTRRASGWWCVLSLALPDPRPAPPELPPVGIDVGLRHFAALSDGETIAAPRPYEQRLKQLRRLQRHLSRQQRGSNRRAETVHQIARLSERIANQRRHFQRVLAADLARRYGLIAIEDRFVAAMTSRDRPGERYPWAKRSLNRGVHDAAWSQFGQILDAKAEVTGQRVVRVDPAGTSQACSACGAPATRTIEIFERWYDCAACGLHLDADVNSARLILQRALS

SEQ ID NO: 54641 - protein, 426 aa, unknown
  TnpB Polypeptide
MYLTQSNIIRGLTKAEYNILRELCSYSKNLYNVGLYNVRQHYFTEKSFLNYENNYHVCKDNDNYKMLQAGISQQILRVVDRSFKSFFNLIKKAKYGEYRFRDIKMPHYLKQGELFPLILSTNAITVTDNRLNIPISNAFKAKYPKQYGTEFRKITIPFPERLIGKTIKEVRILPIYGGQYFKAQYVYEADVENLNLNCDNAFSIDIGLENLATCVNNKNGTSFIMDGRKLKSINHFYNKCKAKLQSIADKQKIKSTKRLNKLTHKRNNQCNDYIKKTTRYIINYCIENDIGTVVIGCNEQFKQSINLGKRINQQFVQISFGALREQLKNLCERYDMKYIEQEESFTSKASFLDNDDIPVFNPYQPDIEYTFSGKRFKRGLYRSKSGTVINADINGAYNILRKSKQNFNLEKLCIGLLASPKRIRLV

SEQ ID NO: 54642 - protein, 383 aa, unknown
  TnpB Polypeptide
VARRKVVEKAYVFRLYPTSSQANQINKTMGCVRFVYNYFLDKRITSYKENKENLGYKKCSALLTKLKQDKEYIWLQEVDKFALQNSLKDLDKAYANFFRERAKGNTKQGFPKYKSKHKTRQKYRTNYTNDNVRLDIEAQQIKLPKLGWVKLHKSKNLIESPGKIINVTVNKTSSGKYFASVLYLAEIQELPETKNNAGYDLGLKIFANSSNDDTIENPRYFRTEERKLTRLQRQLSRKAIGSNNRQKQRIQVARQHERITNLRKDFLHQQSTRIVRENQVICLEDLQIKNMIKNRRLAKSISDAGWGMFRQMIIYKANWYGRTVVIIDKFYPSSKKCNECGEINPMLTLSIREWQCPKCGQTHDRDKNAAQNILAEGLRLLSV

SEQ ID NO: 54643 - protein, 422 aa, Lactobacillus sp.
  misc_feature (5)..(5): Xaa can be any naturally occurring amino acid
  misc_feature (9)..(9): Xaa can be any naturally occurring amino acid
  misc_feature (11)..(12): Xaa can be any naturally occurring amino acid
  misc_feature (26)..(26): Xaa can be any naturally occurring amino acid
  misc_feature (41)..(41): Xaa can be any naturally occurring amino acid
  misc_feature (46)..(49): Xaa can be any naturally occurring amino acid
  misc_feature (51)..(51): Xaa can be any naturally occurring amino acid
  misc_feature (53)..(53): Xaa can be any naturally occurring amino acid
  misc_feature (59)..(59): Xaa can be any naturally occurring amino acid
  misc_feature (63)..(64): Xaa can be any naturally occurring amino acid
  misc_feature (110)..(110): Xaa can be any naturally occurring amino acid
  misc_feature (119)..(120): Xaa can be any naturally occurring amino acid
  misc_feature (125)..(127): Xaa can be any naturally occurring amino acid
  misc_feature (130)..(131): Xaa can be any naturally occurring amino acid
  misc_feature (136)..(136): Xaa can be any naturally occurring amino acid
  misc_feature (146)..(146): Xaa can be any naturally occurring amino acid
  misc_feature (156)..(156): Xaa can be any naturally occurring amino acid
  misc_feature (237)..(237): Xaa can be any naturally occurring amino acid
  misc_feature (258)..(258): Xaa can be any naturally occurring amino acid
  misc_feature (260)..(260): Xaa can be any naturally occurring amino acid
  misc_feature (262)..(262): Xaa can be any naturally occurring amino acid
  misc_feature (266)..(268): Xaa can be any naturally occurring amino acid
  misc_feature (271)..(271): Xaa can be any naturally occurring amino acid
  misc_feature (273)..(274): Xaa can be any naturally occurring amino acid
  misc_feature (317)..(317): Xaa can be any naturally occurring amino acid
  misc_feature (322)..(322): Xaa can be any naturally occurring amino acid
  misc_feature (373)..(373): Xaa can be any naturally occurring amino acid
  misc_feature (383)..(383): Xaa can be any naturally occurring amino acid
  misc_feature (385)..(385): Xaa can be any naturally occurring amino acid
  misc_feature (389)..(389): Xaa can be any naturally occurring amino acid
  misc_feature (395)..(395): Xaa can be any naturally occurring amino acid
  misc_feature (398)..(399): Xaa can be any naturally occurring amino acid
  misc_feature (402)..(402): Xaa can be any naturally occurring amino acid
  misc_feature (415)..(415): Xaa can be any naturally occurring amino acid
  misc_feature (417)..(417): Xaa can be any naturally occurring amino acid
LFRKXKHRXKXXAAKNLIFCSLVFVXSFAKLMFALEVKQMXKTQVXXXXPXKXMQRELXRLCXXRRYCWNLALATWQDMYEARTLDKDNNPSPNEHRVRDELVNNKADWXFALSARCLXXAVKDXXXAWXXFFDKXQPDWGKPHFXSKKAPRQGFXTDRAKIINGKLRLDKPRGIKSWFDIPAYEALKMEEVKIASIFRERGHYYAALSYEEEAGLKAKTGKKTAIDVNVGHFNYTXGKINVLPAKLQKLYKRIKHYXRXLXKKRXXXGKXAXXSNNYLQVRTKLQRDYRKAANIQNDLLQKFTTELVNNYDQIVIXDLNVXQMMMTHVASKGMQRSLFGKFRQVLTYKCEWYGKELILADKTYPSTQRCANXGYVKTGADKXTXQGNXKHGTKXNEXXCYXCGYSNDRDDNAVXNXLALTK

SEQ ID NO: 54644 - protein, 405 aa, unknown
  TnpB Polypeptide
MNLTEKEIIYSDDERFDLIKELCHLSKNLYNASLYDVRQYYFETKSYRTWQSQCPLFTKIKNPDYHALQSHLAVEVVKQVGRQFIGFFNNKTNKKKRIPKYKDKNGYNIVTFPKLTISKQIEFDEDKQLYTYTLCKRSYNLKIQSTQPNVKMVKFVYDEANDLIKCFKIYEVEEPKLKKDNSRYFSIDPGLNNIVSIYNNIGIRPLLYNGRPIKSINQYYNKTNAKLRSELPTNEKSSRRLKQLSFKRNNKIDYEMHKISSHIINEAIKNNISKIFIGNNNGWKKGIKIGKRNNQNFVNIPHTKLFNQILYKGLLNGIEVIFTEESYTSRASFFDKDYLPKYGESDNHNFTGTRIKRGLYRDSKGNIWNADLNGAANIMRKCSDKAYKGIRKTKEMMKRPILITL

SEQ ID NO: 54645 - protein, 500 aa, unknown
  TnpB Polypeptide
LNLNGELLDSATILSQLASEVRGISSYATYVVRNDTKLAADLVQVTAVQPAVAGRRAGVTMPEFLVTGKSGRSRKEFLVQYNVVTEYRSWQERIAATEGTSSKYVSQGWKRTVDASAPSYGDGDFINLGAVDKQYAVIENNPVADGEIVLKMVICGQWYRLIFPFDNKRFTEGKVTLPVVKVENSQPVFIFTVVTDNPVMQFSGDYVVGVDVGINDYATVVVRNSHTGQVVHETTLSQRVHSLWNSVRASERQVKQLNKKADKLLYDRQAHMSAVDEAQFHREAASRKKRELAIVAAQEIASLSHQFNNAVVAVEDLSWISNTMQNGRWNRGAFTQWLTHYVSQNGGWVLTVNAANTSQVCHVCGSKVSHPEHKVSICPKHGDMDRDVNAAANIAARAVPKAEKARKTRAKNRNLQHKVQLKTPITRETLKYPGRDRTKNCPTPKRKKCTAKGVNLPLSPARVIVTTVLADWDASGILETDMAAINQGNVTCECRLCNLN

SEQ ID NO: 54646 - protein, 515 aa, unknown
  TnpB Polypeptide
VLDLNGELLDSVPVMAQLASEIRGISAYATFVVRNDTKLAADLAQVSVSQPAVAGRRAGVTIPPELVIKGELRRNKAGKLVEEKVFGKSRKEWLFRHRVVTEHRSWQERVKAANGESSKYVSQGWKRTVDASAPSYGEDYVNLGTVDKQYAAIENNPFTTGEIILKMVIQGKWYRLIFSFNNKRFTEGKVSLPLIKIQDNQPVFIFTVVADNPVVQFSGDYTVGVDVGINDYATVVVRNSATGQIVHETTLSQRAHSLWNSVRASERQVKQLNKKAEKLLYDRQAHMCAVDEAQLHREAASRKKRELAILAAQEIAHLSHQYGNAVVAIEDLGWIRNTMSNGRWNRGAFTQWLTHYVAQNGGWVVAVNSANSSQVCHICSSKVTHPLHKLSVCPKHGEMGRDVNAAANIAARAVSKVEKARKTRAKNRKLQPQAQLKTPIARSSLRYPGRDRTKNAPTPKRKKRVTGEVNLPLSPARVAMTTVLADWDAYGILETCQAAINLGNVAYKCKLCSLN

SEQ ID NO: 54647 - protein, 512 aa, Actinomadura sp.
MRWPPGRAESGLRAIDPPFVAPGPCGVAVRWAARKRELTGESSARWAGAITKATHDQWALARRCQHAHVRSLEAGVKTIEHRLSLPIAQKGTEGAPGGYRSRQEWFAKSRRLGVLRVRLERERADFASGLVHVVRGGKKLARNRHHLDEAQLTEGEWREQWQARRWFLQADGESGKRYGNETIRATPDGRVSIRLPAPLAHLANAPHGRYVLAARVRFAHRGTEWLDRVEADRAVAYRIHLDAARGRWYLTASWQTPTRPAVTIRAALAEGVIGVDTNADHLAAWRLDRHGNPIGAPRRFGYDLTGSTGRRDAQVRRALTRLLHWAETCGVRAIAVEDLDFAQDKTRERHGRRKRFRQLISNLPTGRLRVRLNSMADRTGIAIIAVDPAYTSKWGARHWQEPLTSKTRKTTRHDAAGIAIGRRAQGHPIRRRTAPPPAHRSDEQGHRTVQARPAAPGREGTRRPATDHAHDACRRAGSVRRTRETSASRTVRDARGAGRWVQDPLMDAVQER

SEQ ID NO: 54648 - protein, 384 aa, unknown
  TnpB Polypeptide
MKKKESFNMKKSFQIFKRDIGRLSKNIVALIVVIGVCIIPSLYAWFNIAANKDPYGNTANIKIAVANNDVGTENDMLGNLDVGGQIVDTLKENDSLGWVFVSEDKAISGVKSGEYYAAIVIPDNFSESMVSFLSGKIEQPEFDYYLNEKKNAIAPKITDTGANTIQQQVNTEFVSAAAGTVADILNGSVSEIGTKLDDVQNDILTKISTVSDNLKEYEKALDSFNKTVDSSNKLIEKSKKSVGNKSDSQANKKYWKKLKYINEDMSHQISRKIVNFGREHGAEEIVLSKYESEYCNGMEVTGKWPLLQLNYCVRTQLKYKAWQDGIFILETPAADIGKNCALCGAAVHKDGEQFVCNNGHKGNRWLNSARNLGKRTYKSLNKRI

SEQ ID NO: 54649 - protein, 511 aa, unknown
  TnpB Polypeptide
MPRKTTPTFVHEMPLRIDRKQRHALVKRFEVMHFPYNVVLQEMLRKIDAMRADERWKKACKMPRATDAQRIARGSAFSKLRSDYGFSEYEAHEIVARHLRASKNLIDLIDSHIAQTLATRAFDACKQYLFGVRGRPRFKRHGTIASVQGKGPTSSLNWKNGLVVWGGRRRDRRITLRPVFDQKDAAGVEAHALASRVKFVRIIRRVMNGEDRFFVQLACEGVPKQRFATRKAEAAIDLGPSTAAIVSHEKAELVSFLPKMKEDLKAKRLLERGLDRSRRATNPDCFNENGTWKKGIRQTVFSKRYRALQAQIREQERRMAERRDRAHGALTNRVLRQFGTTIKAEKLSYKGWQKRWGRRMKATAPGTFMEKLRRKAENAGGALIEFNARTHKLSQRDHTTGDFVKKPLSLRWHEMRDGSGQVVQRDLYSAWLALFVQDDDWDASRADEAWAAAYPLLARAASRSEKAASGTPSLSPRRLDGDRAVRTRKQSAQSSRAPGPKGPGDEASATL

SEQ ID NO: 54650 - protein, 399 aa, unknown
  TnpB Polypeptide
MKQVLTVSCKLNVTPEQAVKVDATLQAFRDACEYVNQEVPEKLTNELAMQSLVYRDVRARFGLSSQLAIHAVRRVSGNRKTAKQTGKTVKQFAPTSATYDVRTFSFREKDWTASLTLLGGRERFKLHIGNFQRGKLKGQTPKTATLVKNRHGEYYLMIQLESHPEPPEKTDKVLGVDLGRTDIAVTSDGDSFSGKEITKVRDHHSDLRSKLQQKASKGTRSTRRRVRGLLQRLSGKEQRFQKHTNHVISHRIVKHARANKQVIALEDLTGIRERTNEMPRTKTERRRSNSWAFYQLRQFLSYKSVKYSVKLILVDPRYTSQTCHNCLHIHPVQGKSYRSGKKFACGHCEWAGDADLNGAINIKNNGAVLSQPGGSGLGCSLSDHVLGLLKSPRLQAGEG

SEQ ID NO: 54651 - protein, 411 aa, unknown
  TnpB Polypeptide
VPARDSDPLEAFRELIERRKRSNKRIVRLRLFPNRYEQETLFDIGLACARLWNELNYEKRQAFFNGELSPGKRDEINKRYYHKYKEMLGVNAGQVINKNDEAWNAFFELLDLRKQGKLPPFMKKLSPPGYWKDRETGEKEIYILIKNDRYHVEPISKNEGYIVLEDFDLRIRYAGRIRWEGKQGRLEIIYEAGRWQAHIPIEVGVDPPKSNKRGYVKPIYDEERKKKKRRIVNPRSIKQRDPIGDKEAFMDMGLNNLFAVVTTDGSVMLIKGGSIKSEYYWWKREIATYQSVRDMLRRLGVSTWIYYHEKYLDAMYKKNERLRHLYMTAIRFLADELYRRGVRKLYIGYPIMLSQNNGNEYNTNIWWFRKIVLWIVDIFMKYGIEVEIVSEDYASRECSICGNKHKNGKET

SEQ ID NO: 54652 - protein, 539 aa, unknown
  TnpB Polypeptide
MTERTQQRLRQTVGRDTRVIRSYLGIIEQHESNLLTGHNKMRIDANKVQQFTLTALKVKQGVQQRLSVPHDMKKRFPRMSQNELVECRQTAVSLYESYLRLRAIRGRKTSRPTQINSTRRIPRWVFSQRFRFIERDSPIAHFWISLRNSLDSEPQRRKTHDRLLIPLKTSPFHLTQLGRGEVQALQIFTDRYRKWWITFAVRLPQESITTTNGLPVAVLGFDLGIKKAACASLVTSEKVRETRFFIQKEKRENIEKYDRLVAELQHELNIRRNSGVAYDGIASRLRENRGKRENIAREYDNVLVRQMLDYIAELSQKYTLYVALGRLKNIRYRALRGNGRGRSYRGLIHSWAFARISQNLKHGLFQIGWTVEGKGSRFRIIPETWTSIICWKCGRKGVRPRQNLFICPTCGNKCNADMNGAINIAARLITLTSSLHGVGGRGKWMDAILRAKNPRPKARGSPSHGKSLLSSGDASSGPRESAVVHSAQTSHLSFSDDTGRSDDDPAVVSTMDILSVAGSDGPAIAQEKEARSTGGATSR

SEQ ID NO: 54653 - protein, 464 aa, unknown
  TnpB Polypeptide
LTFSPAALIKKVVSQVSTMINKNTKIKQTLAETRKRRESQKCFVYKTKINRHKLNTVQKEQLERLFIEGKWFYNHAINFMETHKLSEVDTKVKTVTMLDKNKQPVEHELTALKSSYKQGIKDKIGDSLNALHQLKVNGYKVGKLKFKKEINCLNLKQFGVTHRIKSLHRVELQGFKQSFYVNGLKQFYSNPNAEITTAQLIRKNGDYYIHWTVYIDKKHIPSVEKNNENIGIDFGCATAFTLSDGRNIDFKLQETESMRKLHKKMARQKKDSKQYKKSCELLKKAYDKLGRKKDDFSYKLVNQLKHYNKVVIQDENLKAWHKGSHGKAVQHSVLGRVKNMLKQQANVHVLSRFAPTTKMCFNCGEIHKDIMLWDRVFECDCGVRKDRDVHAAQCMVWMAENGYENVNKKSKKKKSNTAGRGDVEKQTSTVKSYGGNTIADPCCLCGDSKFVSMKHETNVASARW

SEQ ID NO: 54654 - protein, 351 aa, unknown
  TnpB Polypeptide
MSSVVQTYRFRIKGGSSNRRLDTIAPAVNMVWNYCNATSFKAIRDRSEWLSGFDLSYLTKGSGKELGLHSQTIQAIGEEYATRRKQFKKRKLRWRISKGSKKSLGWIPFKAVAVKVIGNVVTYAGQEYKFWNSRDLPGKPKCGSFSQDARGRWYVNFVVEAPVVDTRHSVEEVGMDLGLKDTATLSDGARVENRRSFAKCEAKLANFQRHGKKRQVQRLAARIKNIRKDFIHKKTLELVRKYQTIFVGDVSGRFLQATNGKSSQDASTGMFRQILTYKAIRHQGVVVDVSEYASTVTCSNCFKKSGPSGLSDLGVREWTCAACSTKHDRDINAATNILRVGRDSLRAANAA

SEQ ID NO: 54655 - protein, 371 aa, unknown
  TnpB Polypeptide
MLLVHKIQLKPNKKQEEFFLKSAGVARFAFNWALAEWQKQYEAGEKPNEAKLRKQLNSIKAVEFPWMLEVSKTVPQQAVKNVGIAYKNFFRRVKAGEKPGFPRFKKRGISKDSFRPDNGCSKDKDALVISNKKVRIPKIGYVKLAEKLRFNGKIIGSIISRTADRWFISITVDSDTLPHVRKNHGSCGVDVGINCLAALHDGTRYQPAKALKAFEKRLKRQQRILSRRKKGSANRKKSVRKVAKLHYKMRCLRQDVIHKATTDIVLNNDFIAIEDLNVKGMVKNRKLAQAVNDASMSEFHRQLEYKSAMYSGHVHKIDRFFPSTKLCMNCGTTHDMPLNKRVFKCECGVEEDRDIHAAQNILSQAYIEFAA

SEQ ID NO: 54656 - protein, 402 aa, Serratia sp.
MKRLQAFKFQLRPNGQQVRDMRRFAGACRFVFNKSLALQNENHETGNKYLPYVKMAAWLVEWKKMPDTAWLKEAPSQPLQQALKDLERAYKNFFQKRASFPRFKKRGQSDTLRYPQGVKLDQENNRISLPKLGWIHYRNSRQIVGEVKNVTVSQSCGKWYISVQTEYEADESVHTSTSMVGLDAGVAKLATLSDGTIFEPVNSFKINQNKLARLQREMNRKVKFSNNWKKAKRKVQNLHSRIGNIRRDYLHKVSTTISKNHAMIVIEDLKVSNMSKSAVGTESQPGGNVRAKSGLNRSILDQGWYELRRQLEYKQFWRGGQVLAINPAYTSQKCACCGHTAKENRQSQSQFECLVCGYTANADINGARNILAAGHVALACGEMAALGRSMKQEPTEASQTSV

SEQ ID NO: 54657 - protein, 442 aa, unknown
  TnpB Polypeptide
MKLRQRYQRHGTPQRITKAVTHIRLEEGNTGKLAALDNLALVYLSLCQQYVTLFCTEEPPDKFHAPLFATRLSERWHRVAIQQAAGIAQSWRTNRANAYQDYLDDLLDYHEQQADGTLDAQAEEPSWKEWDVPTLRQTCIQANANVVVLESSHDSTFDYWLKISTLDFRKQLLVPIKLADYHRKALEEKTINTSVILNKRADGWWLTLSYDEVVSVQTEPNAAVVGVDVGIANFVTTSTGKHYGTFHGKLRERQKRDREKRRRKAKLRKCLEKKGVEQLPSTTSRSGQRLIRHVRQEINRAVNECFAEHKGAQIAYEQLSVATMKHKARAMNAYMRASNLAHIPKQLAWNAAKRGVQATRVKSAYSSQECSVCHYPDRANRPDQQTFCCQVCGFQTHADLNAATNIKRRVGDAALEACKERKEIKALLLERHQEWKQQNGWP

SEQ ID NO: 54658 - protein, 377 aa, Lachnospira sp.
MQLSETLKLYMTNEQKALVVMTMNEYISTVNSLVSVAISGISISKYTTADVKANLPSALTNQCIRDAKSIVKKHNKACRDADRKNAKFANQGKDIKIVATVPTLKKPCCYINNQNFKINGDYIEFPVMVKGKSKRLSVKTKMTDNQKSVFANSKLGTMRIVYKGNKIVAQVVYETVEPTYDSEGNVMGVDLGIKCPAVSYTSDGNIKFYGNGRKNKYMRRHYKYLRKKLQKAKHINAVKRINDKEQRIMRDIDHKISHDIVKTAVTHNVKTIKLERLANIRSTTRTSRKNNHSLHNWSFYRLAQFIEYKAKLAGIAVEYVNPAYTSQTCPVCGHVHHANDRIYACKCGFHIHRDILGAMNICNSTEYVGDNDIRHTA

SEQ ID NO: 54659 - protein, 397 aa, Parachlamydiales sp.
LEDSRLENQAAWFNTQYFYDDSGRVIARLNPWHNEVIEYDTQGQAVRIGDRTYCYDHLGQITAEHGFFEALYGTDYNIEELNEKSFCPHQTNDFQYDKNSQLVEAFGKRYSYDLYGRCIRKGGTSYLYLGFEEIASFEEGLCKTLKIPGLGGPVAIEIDGKPYAPIVDAQEVVRKLIDPMNNSIYAENHCDVFGNGLTEEIPYAYRGKRYDQETNLLYFGKRYYNPASHQWLKPNPLGSIDHDNLYQYVYNNPIRYSDPIGYSFWGYALGLGEILAGGALMLRPGFPRFRGAHRYNSFCYPQSGFVLDGGELKLSKIGNIRVQLHRPVEGKIKTCTLRKNTSGDWDVSLSCEVEVWPKAPKEEAIGIDVGLTHFATFSNGEKISNPRFFKKGEEKLA

SEQ ID NO: 54660 - protein, 364 aa, unknown
  TnpB Polypeptide
MNKAFVFRIYPNKEQRILLVKTFGCVRFIWNKMLSDKKDYYETTGRSLRTTPAKYKKEYPFLCEVDSLALANEQLSLEKAYKNFWNGKGKVGFPGYKSKHKDRSSYTTNYVNGNIEIADNKIKLPKLKWVRIKQHRDIPEDYRLKSCTVSQDPDGKYYISVLFAYEETATQQKIEKVTGLDFSMKELYVDDQGRIPEYPGFYRKAQEKLAREQRKLSKCEKGSNNQARQRKTVAKLHKKISNQRKDFLHKQSRQITNAYDAVVVENLNMNDMSMALRFGKSVHDNGWGMFIRFLQYKLTEAGKQLVKVDKWFPSSKTCCVCGKKKEELALSERVYICECGNIMDRDQNAAINIRQEGIRILGIA

SEQ ID NO: 54661 - protein, 441 aa, unknown
  TnpB Polypeptide
VKKKEKIKESIKETKERRKSQLPKVYQLKLQNLSEADIELLNRLFLEAKWLRNYVVSNIENRLTPNTYKLKEVEVKVKDNFEKREITHLGSQIKQSIIERIKDDLDGLSKSKKKGNKVGKLHFKSEINSLILKQYSNTYKIDFKANKVQIQKVKKGLRVLGLHQIPENAEISKGELIKKPSGYYLYVTVFLNEEPAIVKTKKNKIKKKNIEHFNKPLGIDFGVKDQLAFSNGMKIDYEVKESKRLKRLQKELARKKGYRKGGVKSKNFLKTLKKIKKEYEKLFNVKKDIQNRVFAFAKSYEKVYMQNENIKGWKSGLFGRKIQHTSIGGITSRLRDNLETLVLLDRFLPTTQTCSNCGHKQKMFLSDRVFKCESCGIEIDRDINSARDMVLFGEKAPLKNLPEDFWEVTPVEREASARILENNPHICVSYISLKQEALSFN

SEQ ID NO: 54662 - protein, 385 aa, unknown
  TnpB Polypeptide
MKQKRAYKYRIYPTDEQKHNFARTFGCVRFVYNWALRERTDAYYQRGERWYYAQMSSALTALKKQDMYAWLNEVSSVPTQQSLRHLDKAMLNFFEGRAEYPTFKKKSHAQSAEYTTSAFKWDGSTLTLAKQKEPLAIVWSRPLPDGVKPSSITITKDEANRYFVSLLVEEDIQPLPVVNKMVGLDLGLKSMVITSDGHTYGNPKFFAKDEKKLARLQRRQAKKKKGSRNRNKARLKVAHVHKKIADRRRDYQHKLSTQIIRENQVVCVESLHVKNMVKNHCLAKAISDVGWSEFVRQLEYKAQWYGRTLVKIDKWYPSSKRCFECGHILDSLSLEVRSWTCPECGVFHDRDLNAAKNVLSAGLAVRACGEAVRPGRVKTRTGKSQ

SEQ ID NO: 54663 - protein, 536 aa, unknown
  TnpB Polypeptide
MGGRDMERVRRAVAVEVESPPSELYAVEEQYRRIVEEVAAYVTERGRLEKEKYSKLYRKFRGLCLLPSQLIQQVINQGVEIGKSFLELKRDGRVHKPRPEVRHVSIRFAKDSWSYKKAISTAAPVKIAVSLPGGRREVWIKPHRRFWLYWWKVLRREAELASTLILKRRRNKWYAVFVFDVAPKKETPTEAVAFDVNENSVAVARVSLLSTVDAVARWNRRYVDPAVYSIRTDFGRLAKRYEAVRNAKLEELKRKYPFVGRDDEEKIQNVTDTREFRKFAKRLRERRRKEGRMRQVAREVTKSPAVIITEELGKNPQEEMIGGEEKRVKKRELRHRVKQTPFRKILRAVEEKAKETGSVVFYVSSFRNSKVCPIHFVLLKNGGGWHVLHCPSGHAVDRDAVAVLNMLWKITPEGVVKGVWWDVKVARKRLNKGIVPKEAVKRTNPIIPRPVVHAVLASLRSLKASSQWPAMLARAAPMTPAQGADEDGTRAPMNRPSGRGGGQCTNARLRARSARRAVSGMARTAGSMRPVARDAE

SEQ ID NO: 54664 - protein, 329 aa, unknown
  TnpB Polypeptide
LKAGETAWLGEIHSQVLQQSLKDLDSAYRHFFLRVKKGEKPGFPRFKKKGLKDSFRYPQGIKVQDGKVLDSRPTEGEVLQATVKREGEHWFVCLACEVELPDPASIPVTENRAVGIDVGLKTFAMLSDGTEIENPRFLAKALAKLRKAQRRLCRKVKGRSNQKKQVIKVAGLHAGVKNCRKDFAHKVSTAIVKNHDVIAVEDLNIKRMVRNRHLSRAISDAVWGLFMQMLEYKAEWAGKHFVRIGRFVATSQTCSACGERKPMPLDVRSYSCGNCGLVADRDWNAGLNIRAAGLVVLNACGGAQQWRPRLSKNPPALVWLQPWGVSRES

SEQ ID NO: 54665 - protein, 307 aa, Prevotella sp.
MPQMPHYRKRGGMFNLYYTNQSCSIKDGRIKLAKDLFVDIPQWEKYSSRIVKFNQVRMLPNRHNIKVEIVYDYDVQHTDVDTDKCAAIDLGLDNLATMVTEEGCVIFSGKYLKSYNQYFNKTLSHLQSIKDKQGIKRSTRRIIRMYDKRDRYFEDAFQKVSRQIVDMLVEKKIGRLIVGYNAGWKQESGMGKRNNQKFVQMPFARLTSYLRYKCEMVGIDFVEHEENYTSKCDALALEPIGKHEEYLGRRTKRGLFCSSIGKLINADQNGALNIMRKVVGDSYVSRIVNSGHSLCPVRYSNPFVRIV

SEQ ID NO: 54666 - protein, 139 aa, Nonomuraea sp.
MPRPGRAVRDDVPGREARPRPGAGRRGLRSVEDRDGLQGIRERVRLRKPQRVTLHGWSFRQLGGFIDYKAARAGVAVIHVDPSYTSQQCSQCGHVDRRNRPGQATFSCTSCGFAEHADVNAARNIAARGETGWAVSHAA

SEQ ID NO: 54667 - protein, 365 aa, unknown
  TnpB Polypeptide
MNRAYKFRIYLTREQEILIHKTFGCCRFVYNRMLADKKQAYEETKKTIKITPAVYKKEYPWLKEVDSLALANEQLHLERAYRKFFGESKIGFPKFKSKHGSRKSYTTNVVNGNIRISEGKLRLPKVGTVKIRLHREIPAGWTLKSVTVSMDPSGKYYASLLFAFESCENQAGTVREEKVLGIDYAMHGMAVLSTGEKCENPGYYRQAQKRLAREQRRLSHCRKGSRNYQKQKRKVARCHEKVRNQRKDYHHKLSSRLAEEYDAVAVEDLNLKAMSRSLNFGKSIMDNGYGNFLKMLSYKLEERGKVLVKTDRFYPSSKKCSKCGKVKEPLALSERIYHCSCGNNMDRDVNAAINIREEGKRLLCA

SEQ ID NO: 54668 - protein, 364 aa, unknown
  TnpB Polypeptide
MQLTTQIKLIPTSEQIILIKKTMQEYIKTVNNVVNDYVGGNTIKHTSKTVSADLPSALKNQVIQDAKSIFKKYTKNLKVNAKKEPDQQKEIRVPILKKPVAIWNNQNYSIKYGYIAFPVWLNGKSTRIIVKTETIGYQVNLFVNKLGTLRITEKSGKFMAQIAVNAVPMETTGTDSMGIDLGLKIPAVAITEKGKTIFCGNGRKNKYTKRKHRSLRRKLGKLKKQGAINKLNNREQRWMQDQDHKVSRQLVNFAKSNNISTIRLEKLSGIRQTARTSRKNEKNLHTWSFYRLAQFIEYKAALEGIKVEYVDPRYTSQTCPACGTRNKSSDRKYQCACGFKGHRDIIGAKNIISAPVIDGNSLSA

SEQ ID NO: 54669 - protein, 495 aa, unknown
  TnpB Polypeptide
MAKATTTIKQVLNYQPAHAAWFAANQALFNQVVAFYFEVIQAHEQVLDLPNKEALTALEMLTHTTKKNPNPVMPLSDSVEDAPAMFRRAAINAALGSARSFYSHLCKWRSRREKALAKGHTWTLRPPVPPRSWNKSATLYAGQWKERTASSIMLKVWTGTCWSWIKIRITGRELPADVELGSPSLIRRGKQWWLHTPLEKQFSSPATIEQQVTTHAQTKICAVDLNINEQLAVCTIQTVAGTILATRFIGGGRRIAGFRKKLLGRIARNRRKTGMIAEGEQDNADRWRKIRNVDDSSAHLVSARIVQFARQHEATIVVFEHLGSLKPQKGKYSHRGNSKRAFWMKGRLFKYAKYKSYHEGMLTSRVNPRNTSRECAGCHSLVARYEEGQPAEGYTSGAPLVLCQECGMRGNADRNASLVIGQRLITRYHPSSQEKPPTPLAIERGEKSPGVAVCQDATREEGPSIPPARHADRNEHGTAQDGSLGMAERLSDIPH

SEQ ID NO: 54670 - protein, 452 aa, unknown
  TnpB Polypeptide
MWRGSRLLSYRFRLYPSKQTENVVFQQLDLSRWLYNRLLEELNKAKAEGRHLSQKDTQAFIVKLKAEKPELGQAYSKVLQMVNHQLWGNVRALSALKKNGRKVGRLRFKGQWFKTLNFNQSGFRIEGKKLRLSKVGTISIRLHCPIAGNIKGVFIKRELSGKWFAIFQVENSVVHLPQNGATVGLDVGVKHLLSDSDGRQVENTRFYDRSLERLQKAHRVLSRKKKGSRNRAKAKVRLSRVYEKIVNQRDGFLHKLSRLYVNNYGVIAAEDLHIKNMVRNRNLSSEILDASWNRFFQLLSCKAESAGRALVKVNPRGAGREHKHGGLDRDYNASLNILERGLAGLGRPSAPVEIKPLLPVAASQIVEAGSPQPFRGGQFTKKGVMAARCTIQDVHSRTVLWETGARGNRSMLVVRLGDACHGLRDPLYGGLVWQMCCNPVPLDLICTHTSCC

SEQ ID NO: 54671 - protein, 371 aa, unknown
  TnpB Polypeptide
MKLTLKIKLLPTDEQANLLLETMKEANSVCDDISEIAWGKHIFNNFKLHYETYHRIKNSFNLSAQMVVRCISKVADAYKLDKKIKREFKPLGGISYDSRILTYKPTNIVSIWAIGGRLKIPFVCHNQKYIPYIKGEADLVFKKGKFYLFQTVEIPEEDIKNVESFIGIDMGLLEIATLSNGKKFNSKKLTDYREKRQKVRSSLQSKCTKNAKRVLKRLSGKERTTATIINHTISKQIVSIAKKEGKGIAIENLKGIRFSANKKGKKFRSKIGKWNFNQLRSFLTYKCLLNGIKLIVVPPEYTSKTCHNCLHIGNRQGKKFTCNNCNSVFDADVNAAKNIALLGMTINHPEKPSMLYCQVHSFLGLKPIPSL

SEQ ID NO: 54672 - protein, 347 aa, unknown
  TnpB Polypeptide
MVKAALRRRQLDLEIKQKCIAENKPIPNKITKRLNHKPSTPKTDKANAEINSICCSIQDNKHTTFAIWIELKSLFNSNEYGRGYTINIPLRRTRMDDKWKNGEHDVLPSILMSDDTIHIRYRRLVPKCNGTKEVGLDQGVRRMLTASDGTEIPDENHGYKHILNKIARKKRGSKAYRRALDEREAYVCKSIKQVDWSIYNKINLERHFDIKRGKRTSKLLTAFSNPQIRNVLYMRTTEEMGVPIQEVDNICNSLRCPMDGWVHVKNRPNKGVVFRCCMCGYVDDADEVGAINANLHAQGLPNCSHTLVFNLKLHRKSGFFWTNEGFFDEKGNPISVVGSSQSPIGQK

SEQ ID NO: 54673 - protein, 422 aa, unknown
  TnpB Polypeptide
VKLAYRFALDPSPAQERALRSHAGAARFAWNWGLARCKERYVAERKWYSAAELYTLWNAAKKTDPALGWWAENSKCCYQEAFRNLDRALCDFIKSKRGQRKGRKLGFPRFKKRRRHRDSFRLNGTIRCDGSTVQLPRLGVIATHEPTGKLAGRIAVGTARILSATVTRTAQRWFVSLTVEEDRDISARHARPGTVIGIDLGVKTLITGTDNAGKVIEIPGSRPLKAALRRLRRASRAHSRTRPGSARRRKSAARLTRMHARIANIRIDTLHKATSMLAKRYETIVAEDLNVAGMTRNRKLARAIGDQGFGALRRMLTYKTVWCGGALIIADRFYPSSKKCSRCGAVRCGAVRCGESQAAPVRACLLVRQLRPGRRSRHQRRAEPAVPRRQWGGEPKRARRGGETRPSRAHPAETRTRHPIGG

SEQ ID NO: 54674 - protein, 370 aa, Hydrocoleum sp.
  misc_feature (108)..(108): Xaa can be any naturally occurring amino acid
  misc_feature (366)..(366): Xaa can be any naturally occurring amino acid
MLLKYKYKLKPHKRQAVIISNWLHMARKQYNYRLAERLRWFEATRTLLNACPLNVSVVPVEQIYKNIPEFRVQTRDGRKKDSNGNPITKKGDKHPNIVNGYVCWETVXNPITKKGDKHPNIVNGYVCWETVQLADLAQTKKLFPEYKSMHSQVLQDVIQRVQTTMDNFTQPDKKGKTSGRPKFKGRHYYNSFSYPQLSNTNIVKNANGRFCVNLPKIGLVPFVYNRLIPEGFQVKTGTVIREADGYYISFTIEDQTVPYEVVEIQPTEENSKGIDLGLLYYAVTSDGEFVEVPKFFRLSEHRLSRLQVRLAKKSKHSKPWKILKRKIAKLHQLIARQRLDWQFKLAYHLFSDVSVIFIEDLQIANXTLGT

SEQ ID NO: 54675 - protein, 560 aa, unknown
  TnpB Polypeptide
MRTWKMIINPKKNKQDAAFCQYFKTNTADFKCMYNVANFYIRNTMTGIKKSPEERTHLETEVLHYVFTGIQKANEAIGQKRMKKKFEDLKLAQVGGMNCAVIAYSLASQEPFQYPTTKKWFLSYNTLDAIFKFTGNPVYKRMNSQVNQNAIRKVIAAWEGYFESLKQYRTNPAGYTGKPKIPGYKNTEESTAWFSKQVAKLKEEDGKSYLQFVNQKERFCIGKASIYKGLQYIKTEIKPVYGKYCLLVTFDDKVKAVEPPANPERILGLDPGVSNFLGVANNFGAVPFVIKGGAVKSVNQRFNKRRSTLLSVFTRGSDSQHSVKYSEQLNTLSKKRDSFMRDYFYKCAWYICRYAQAAGVEVIVMGHNEGQKQEVTLGDKNNQHFVAIPYLKFITVLKTVAAKCGIAVVIREESYTSRASLLDMDDIPTYKQGDGTKYQFSGKRIHRGLYKSGSGTVMNADINGASNILRKEYLHAFDNVKDFTYLYETTLAIGYKDLYNNAKTMSERPDGYRYHKAGFGSKVRHKYRKRSRIEYCKLFSKSKFVWMADKRDKTQAEHAA

SEQ ID NO: 54676 - protein, 382 aa, unknown
  TnpB Polypeptide
VYIIGTEYTFIGSKIRLLPTKEQEELLWKSAGCSRFIYNWALNKQIENYNKGNKFIKDTELRKEMTLLKKEKDYEFLNEIGSNVLKQSVKDLCLAYKKFFDKKARFPKYKSRKSNISFYVNYESMKKTQKGVQCEKLGNIKTTEPLPKLLKGEEHYSNPHISYDGKYWYIGFTRKVEIHKTELNDITIGIDLGIKNLATCSNKKVYKNINKTKRVRKLKKKLKYLQRKVSKKYLINTVDNKFIKTKNIIKLERKIKLINRTLTNIRVNHTHQVTTEIVKTKPSKIVMETLKVTNMLKNKYLSKAISEQSFYRFTYFMEYKCKLYGIEFVKADMFYPSSKICSCCGSIKKDLKLKDRTYKCNHCGLEIDRDYNASINLANYKN

SEQ ID NO: 54677 - protein, 381 aa, unknown
  TnpB Polypeptide
MEIAYRTLVLKYDLLRLSPETAEKIPKLLKVQEEFRRWATEWALSGGSLPPPDHNPLKYFAMKFLYADKTLDWFKGLKKNGIKVKKMRPPLVFDAQLRLSKERDIGRGVFVDLPKREVRVRKWSGKRGETIVLPLGDKAVKWILARVKEGGGLTLATVWIGASRRNSVMKLYVTLVFRREVAPMEVKRLLVVDFNALHNGLSWAVVEERRIVTKGILRPNVSKIAHMQKVASKLDSVCAKKDKACDGAMAAKSRVWRLLRSWEDEAAKKLAHSALQYRAAIVADAPFDQSIKELKEGGYTSEKKIFLNFGRLRQRLRGLAEWYGVPYREERLYSTLCPRCGRKMEELPNRRVRCACGFEANRDEVPAFWAMKLYPQLVSLF

SEQ ID NO: 54678 - protein, 449 aa, Lactobacillus sp.
MSKRKDKKKKKITKVKAIESQYEYLASEYYIKRTPELDNYAMQAHNLYNAALYTVRQAFFKHKLLSYDDLNRIFKKKVESRENMLYHAFPYVQSAQQTLKEVMAIWKAWFKALAVYRIQPYLFTGRPRIPKYLRKNERHVFYVTNQNAKVKNGYLWIPKMNFKLKLQAGIEKIQRVVFKPMSNGYKVIVPYKTNLEIKYKKDNGKYVGIDPGVDNAFALAANTGVQPLLISGGPIKSVNQYYNKRRAKLRSLQAKNHQLETIIDTKQGKKPVYGETKAQKRITDWRNEKIRQFAHKASKRIIDYALSCDANTIVIGKNTFWKQKSGMLKKTNQNFIGIPHAKMLEMVKYKANLAGIRVIYTNESYTSQTSALDNEKPCWNNGNNSRIKQGIHPAYRRIERGLFKSNEGKLINSDINGALQIIRKVFPKVTLADGIADAVLRPIKWSPTI

SEQ ID NO: 54679 - protein, 441 aa, unknown
  TnpB Polypeptide
MQVVSSYGAEIKNKNIPIRHTLALYREAVRCLTEIYETVWTELSMIDQIKRRFNEAEHLVHETKKNHARFDFDARFPKMPSYLRRAAIQHALGSVSSYHTRLEQWKNGAISGKPKLVYENHAMPVFYQDVMYKPGEESEDAACLKLYDGHDWKWFRTGLLHTDVEYLRRHWSGKKSSAPVLEKRRQKYFLRFSYTEEVTLSKTPVKDQIICSVDLGINTDAVCSIMWSDGTVLNRKFINFHSEKDRLSHVLGRIRRFQKEHGSRQIGSRWAYAKRLNTELARKTARSIAEYARENHADVIVFEYLEMKGKISGKKRQKLHLWKKREIQTMCEHKAHRYGIRVSRVCAWNTSRLAYDGSGPVSRDPKNHSLCVFQSGKQYNCDLSASYNIGARYWIREIIKTLPETERSSLEAKVPAVKRRTSCVYADLLILQNEYGCSKAA

SEQ ID NO: 54680 - protein, 433 aa, unknown
  TnpB Polypeptide
LLERSLSEEGGVPCNSSSSIVSRRVIRAMRPLMLRPSPPKTSIIRLRTTIAKPSSMRASGCRMRKSTTGSSISIAIKPSPRKVSNSILIAADKNWRSFRNALKAWHKDGPSFTGKPRIPKYKHKERGRNILIYDKQAIGLRAFKKTGKLVPSGLPIEIATRITWDQVDQVRIVPRAHGYVVEVVYQQEIAQADVDPAMIAALDLGVNTLAACTSTKPGFQPLLINGRPLKSINQHYNKQRAHSQSRLAKANRFTSRQLDRITAKRNRRVNAYLHAASRRIIDHLVQEGIGTLAVGKNPLWKQQVELGRKNNQTFVQIPHARFIAILTYKAKLVGIEVVIVEESYTSMASFLDLDVLPTYDPERTEKPRFSGKREKRGLYRASDGRRIHADINGSYNILRKAFPNSFVIKSNNYQSIHSIRRQRKPASFNTIDF

SEQ ID NO: 54681 - protein, 453 aa, Okeania sp.
LKARYKYRIYPNQIQITKLNQLFGCCRYVWNSTLAYCNQLYSDGQKKPSYVDLTKQFITQAKRELIWLKEVASTPLQQSLKDLDQAYRNFFQSCNGKRKGIKVKPPLFKSRKSRQAARFVGANYQVFQDKIYLPKVGNIKIIWSRPLASNPSSVTIIKDSAGRYFASFVVETNAEYLSKTNNSIGIDLGISTFATLSNGEKIFSPKPLKKNLKKLAKFQRKLSRKQKGSKRREKARLRVAKLHARIKDISFGMLRKRTDFLHKLSTNLSKKYNEIVLEDLNVSGMIKNRKLAKAISDLGWRKFRTLSEAKCEKYGRKFKIINRWEPTSQKCSFCGFKGGKKELNVSCGMLRKREWTCLNCGTFHDRDVNAAVNILNTQSVVETVTQPITKVKTVKTELLDNPVQLSLFNEVAGGYSETGNKRTRSRRNSTRKTVVDGNDVSTRPEFEQLSLFE

SEQ ID NO: 54682 - protein, 408 aa, unknown
  TnpB Polypeptide
MKRLQAYKYELQPNGDQQRDMRRFAGACRFVFNKALALQIENHAAGEKFIGYVVMAKNLTTWRNGNETPWLKDSPVQPLQHALKDLERAYKNFFAKRADFPRFKKKGQSDSFRFRYPDPKQIKLDQPNNRIFLPKLGWMRYRNSREVLGVVKNVTVSGKQGKWFVSIQTEREIDAPVHPSTTIVGIDMGIVRFATLSDGGYFAPLNSFKRQEKALVKAQRAMSRKQKFSNNWKKAKANVQKIHARIGNARRDYLHKATTAISQNHAMVCIEDLQVRNMSKSASGTTETPGKNVRAKSGLNKAILDQGWYEFRRQLDYKLAWNGGQLLAVPPRNTSRTCPCCGHVAKENRLSQARFECVDCGFEENADLVGAINVLRAGHARLACAETSPAVGASGQEPTEATQAALAA

SEQ ID NO: 54683 - protein, 416 aa, unknown
  TnpB Polypeptide
MQGGKNVKLLSVAIPCYNSEAYMEHCIRSLLTGGDEVEILIVDDGSTKDRTAEIADEYEKRYPGICRAIHQENGGHGEAVNAGLRNATGVFFKVVDSDDWVNEEAYQKVLETLRRFVYRGEALDMLVTNFVYEKEGARRKKVMKYHTAFPKDCVFGWKDVKFFMIGQYILMHSVIYRTQLLKECGLELPKHTFYVDNIFVYQPLPHVKNMYYLDVNFYRYFIGRTDQSVNESVMIGRIDQQLRVTRLMLGYYDATKISNPKLRHYMIQYLEIMMTVCSVLAIKSGTAENLAKKKELWNELKKQNFPLWLRLRWGFLGQGCNLPGKGGRELLILGYKITQKFYGFRTKLQAKCNENGIELRVVDRWYPSSKTCHCCGTVKKDLKLSDRMFKCSCGYVEDRDFNAALNLRDAMTYEVA

SEQ ID NO: 54684 - protein, 392 aa, unknown
  TnpB Polypeptide
MIESIKVRLLPNNKQLTKLFQYASCTRFAYNWALAREQENYKQGNKFLQDGELRKEFTRLKKQEDYKWLTKISNDVTKQAIKDACNSYKRFFKGQSKYPKFKSKKHSKQSFYQDNVKIQFTDTHVKIEGFATSRKKNKQKLNWIKLCEKGRIPINCKYMNPRITYDGLHWWVSVSVEVDNNTNSPPISEGIGIDLGLKDLAICSDGNTYKNINKTNKVKKIEKRKRRLQRSISRRYEKSRKGKIYCKTSNIIKREKELLKVSKRLTNIRHNHLHQTTSEIAKRKPSFICIEDLNVSGMMKNKHLSKAIQQQGFYEFRRQIEYKSAWNNIPVIIADRFFPSSKLCSCCGVIKKDLKLSDRIYQCDCGNTIDRDFQASLNLKKYGEDVLQQSIG

SEQ ID NO: 54685 - protein, 380 aa, unknown
  TnpB Polypeptide
VKGDAIIEITITSKIQIYPSNEQKEILRKTMLQINKAINYISKYIFDSNCFNQSKINADTYYYLREEYNLKSQMTQSCMKTAIAKYKTNKSNGHDFNLVCFKNLEYDLVWNRDYSLNKDIFSINSLLGRLKISYQTKGMQKYFDGSYSFGTAKLVYKYNKYFLHIPMTKDYTQTTPFQINKIVGIDLGINFLATTYDSYGKTTFYNGRHIKAKRGHYKILRKELQERGSKSAKRRIKSIGSRENRYVNDINHTITKALVDKYGANTLFVLEDLTNVRTSTEKVIINNRYVSVSWAFYQFRQLLEYKTKLNNSMVIVVNPKYTSQTCPKCGHIEKANRDKKNHIFKCKNCNYQSNDDRIGAINLWSKGIKYIEQNSKEHSE

SEQ ID NO: 54686 - protein, 411 aa, Geminocystis sp.
MRQVERHIIKESHPHWKEIDKLCFLSKNLYNYANCLVRQSFIFQKTYLNYNQIYHQVKNSSDYRELPSKVSQQILRILDKNWQSFFEANKAYEENPSKFKGKPRLPNYKDKIKGRNLLVYTIQAISKTSLKKGKIKLSKTEIEFPTKVENIACVRIIPRLKQYVIEVVYERVNKCTVNNPNSVAAIDIGVDNLAALTSNQKGFTPILVNGRVLKSINQFYNKIKAKLQSKLKGKSPTSSRIQRLTAKRNNQIENYLHVCSRWIINYLDERGIGQLIIGKNPLWKKEVNNGKKNNQSFVNIPHARFVEMLKYKGEMAGIKVIISEESYTSRASFLSLDEIPTYGEEKEEKYKFSGYRESRGMYKQKGAKKRINADVNGSYNIMRKVIPTVFDGGIEGVVVRPVRITPNQAKN

SEQ ID NO: 54687 - protein, 373 aa, unknown
  TnpB Polypeptide
MRLVVKTYKYKLYNSKKNRYLVRQIELASEIWNFCIAMRRMYYLVYGKTLKANDLKKYIAKICKRRKWAHWHNLGSQAIQDVVERVDRAYKAYFDNKKKAHPTKKSLPKFKKREMYKSFTLKQAGYKFDGKGSVTINGKKYRYFDSRPLKGKVKILTVKRDNLGDIYLFAVTQEECNEILPRAGKAVGMDFGLKHFLNLDDGSVIDSPEWYKASLKELQRIQRHISRCKPGSNNRKKAIKELERIYRKICNQRTDWFFKVAYQLIADYAIICIENLNLAGMQKLWGRKINDIAFGEFVKILEWTASNCGTEVVKIDRFAPSSKCCSRCGYIYPKLTLKQRQWDCPSCGTHHERDVNAAINICRMGLVQMGYPA

SEQ ID NO: 54688 - protein, 412 aa, Rothia sp.
MLKRYRYRAYPKPGQVEPIARLFGCVRVTYNDALAHALETYRLTGTKPSAAELSARLTALKKTEERFWLSEVSSVPLQQALRDLDKAYKAFFATVTGQRKGKRGAHAPRFKKRSHRQSARFTKNSGFIVHETTHRVGFVRLAKIGNVRFVLSRPLPAEPSSVTLIREPDGKYYVSFVVDVPAENIQIPEPSAYAVGVDLGLNRLAVAVNSEGERVFFENPRPLKKAAARLATLQRQLSRKKRGSNRYEKQRIRLAKAHAKVRNTRSHYAHQVANKVVDENQVIALENLNVAGLSRTRLGKSVLDASWGLLRRLIEEKADERHRMVVFADRFAPTSQLCSVCGEPGGRKPLNIREWACTKCGMRLDRDANACVNIMLAAGLAESLNEQKRDVRRLLAGAVAVDAVNPPRAAYL

SEQ ID NO: 54689 - protein, 374 aa, Moraxella sp.
  misc_feature (229)..(362): Xaa can be any naturally occurring amino acid
MTVIRGHIIRLDPTNKQATHFSKACGVARLAYNWALGQWKKQYEQDKNYRDDCQAKGITIDENRLNKPSQGKLRRQLNAIKREKYPFMLEVTKCSPQLAIMQLGDAFKRFFKGESGYPTFRKKGVNDRFSLSNDQFKLKLKKDKPFIQIPNLGLVKMRENLRFDGKILCAKVFTKGGQWFVSIAVELDNNTQVRQLKTNQTLKTLKTGNAVGIDLGITDLATLSTGEKXXXXXXXXXXXXXXXXXXXXXXXXXXXXXXXXXXXXXXXXXXXXXXXXXXXXXXXXXXXXXXXXXXXXXXXXXXXXXXXXXXXXXXXXXXXXXXXXXXXXXXXXXXXXXXXXXXXXXXXXXXXXXXXXXXXXXXVGFLERKTIACS

SEQ ID NO: 54690 - protein, 432 aa, Ktedonobacter sp.
MKTIHIYRLDHLSPALFEHLREVQMEAAQVWNLCVSLHKEARMSHTRWPGRNELQQATKGRYALHSQSVQMIVHAFLANIETTRKLRREHPEMRMKYPWREKRFYPVHWPAQAVALEKGRVILPMGRGRPSIVLPIALPDNAGACTLVWNYGFELHVCVETEQAAQAPGAVQATVDLGEIHLAAVSTNAGKALIVTGRGIRSLKRGRAKQIGQITRKQSRCSKHSRRWKKLQRAKNKVCRRVERRVRDLRHKASRQVIDFCVKHQVGTLFIGNPHGVRNKDSGRHHNGRMSLWEYGKDIDYLTHKSTQARISCFTGSERGTSSRCPRCGHKHKPKGRTWVCRKCGFRGHRDLVGSVNMHQDAFGVHLKFPRSFTYLRPGLLKTGKRSSRADTPLVSQETCCLEQPTAQPRIADTVSPEIGSPVRVVQKPIPF

SEQ ID NO: 54691 - protein, 351 aa, unknown
  TnpB Polypeptide
MPYARKLMLTTCYGFKIHNGCLRLPTKPQEFVYVKLNSHTLQALSGLDVRSVTLTPGTLSIGYSRETVEIKPEGYVGIDRNLDNVTTASTDGTARRFDLSKATWIKANYRSVRSRFKRNDARIRTQVFSKYGEQQRNRVLPLLHGVSKTIVEDAKTRRYGIVMEKLSGIRRLYRRGNGQSRNYRARMNSWSFGLLQRQIEYKARWEGVKVIYVPARNTSKRCSICGYKTLESTHRRLWCPHCGAILDRDENAARNIAAGGLRFSPNGPPGEAVKGNPTTTVIPRVDGGKLSQQANPTISSTETQQNPKMLHMLCYVMTVCCPRITHGGGLPFGSQSSIRLPSGSMIHPNLP

SEQ ID NO: 54692 - protein, 449 aa, Spartobacteria sp.
VLTGRKFRLYPTAKQAQVFSQWIGCQRVIRNAKVEETRLNAWLRRASMFSDRPGNVDSEKAFDQAYSHFATEQNPWLREVPSQILRNGIYRAKTAFVRFWKGEAKHPVFHGKQTEESVLLTGELFSIKDGKLSVGTRRTPLGEVRWKAHRAFQTPKMLTITRCGDGAWFASFSCEDGEALPSSEDLLVQHSFAPEASVLAFDRGVAHPLADSEGNFHDLEPKRQKRLEKIQHRKESLQRKLARQRKGSAARRKTKKRLARAERKRRNQLSDWRHQTTARIAGGAHSVLVLEALKLASMTKAVEPKPNPAASAPGQPSFLPNGASAKSGLNRALLQVGLGEIRSLLEYKARRTGKAVLLVSPQFSSQECSKCAHTSPDNRPTQAEFHCRACGFEAHADYNAAVVLRKRGHALLQSHRPMGTKGRKTPARKRPAPLSNRKPPPQRSRAGGR

SEQ ID NO: 54693 - protein, 370 aa, unknown
  TnpB Polypeptide
MKAYKYELYHQDPLIKIGNLIDDLHSVHVHLLRLQRRYYDMFGKYAFFSRICDHITKLKRTTKPHWNQLPSQAIQQVAKRIDLGYQRFFDNIEDRKKGLRNKKVGRPKIKPNHKYNSVTFTQAGYKIVENRLTLNCLDTTFTFWKHRKWTGEIKTATIKRDKVGDYHLYIVCENPKPTKKLPLTGNEAGADFGMKTFLTLSDGIKIFSPQFYKQSLNAIRSANKALSRKQYLSNGWFRAKRHLARVHKKVADQRRDWFFKLALRFVRRYDNIALETLNLDGMKKLWGRKVSDIAFGEFSLILKWTCAKYGKVFSKSGQWQATTKPCSDCGFKNEALTLDDRHWTCPSCGAEHDRDINAAINILRVGVPWT

SEQ ID NO: 54694 - protein, 396 aa, Geminocystis sp.
MFSLKLELKLNNKEKTLMAQHAGFSRFVYNYGLALMGMINHQEIKGSSSYKIDTIKKLFTNYTKKQPEYAWCNNLSSRVYQNAFRDLKTAYSRYFQGLGEQPVFKRKKDKQSFRVESSNGKVLLEAGKTIKIPTLSTFRLKEAIPFSCVSQTFTISKSADKWFVSFSIDADRLPPRIHPVIEPVGIDLGSKTFATLSDGNVIESPRPFKQAKTKLGQLQYRNRHKQLGNRKKGVKASHNAKKYQDKVRKQHYKVACQRLDFLQQTTTRLCKTYGHIKIENLNVKGMMANHKLASSIADLGMYEFKRQLTYKALWYANRVDIIDQWYPSSKKCSNCEQKKETLSLSDRLYTCDECGLRIDRDLNASINLEKAPEEVIIEKIGWVTAELTSVDSIKPT

SEQ ID NO: 54695 - protein, 262 aa, unknown
  TnpB Polypeptide
MGGRIKVKAQWKGTPDEYRTARFRYRPTDIETRQMVPAYSHHPTGSRPTPSPKNIVGVDLGIRMLATSYDGETTVFQHGGEVKSKRGKYKRLRQQLQKRGTRSARRRLKTIGDRENRWMTDVNHQASKALVNHYDRDTMFVLEDLTGIRNATEQVRVKDRYVQVSWSFHQFRQMVEYKAKRNGQKVVFVDPAYTSQTCPKCGKIRKANRDKKRHLYVCRNCGYRSNDDRIAAMNLRHKGYDLLNSQYAASMTDGVRVQSTTL

SEQ ID NO: 54696 - protein, 465 aa, unknown
  TnpB Polypeptide
MKKDKPILKYKTSKTSLKLSKQYRNILDELCFYSKNIYNSTLYEIRKHFFETGKYLQNEKVYHIIKKNENYKLLPAQVAQQTTHIVDRNMKSFFGLLKLKQKGLYQEKVQLPKYKNKINGRFALIYTPDLFKVDYEKRKLRLSLPKSLKERFGLRFLFFDFPKYIKHGTKIKEIRILPKTYNFEMEIVYINDEQYQQIENYDNFISIDLGVNNLLTIYDEKNHKSFIIDGKQMKSYNQYFNKEIAKRQSSAVKANKKHKTKKIVRLQSKRKNKLRNDLHLISGRIVKFCVENDIGNIVVGYNQEWKQNSNMGRKNNQKFQNIPFAQLINFIDYKSENHGIRVFLQEESYTSKCSALDLEIIEKKEEYLGKRIKRGLFRSANGKAINADLNGSLNILRKFLVENRYKKVDTSKAEFCLSNLEDRIGNRGAVPAPKRIRVAELEKFNFDDQTSLEEKVEFIKNVVNF

SEQ ID NO: 54697 - protein, 376 aa, unknown
  TnpB Polypeptide
MRLTFQYRLLPSKHQRTLLDNTLELCRWVYNETLATRKNAWEQEQKSLTRYDTTKMLPVWKEGKPELSQVYSQVLQEVCARVDLAFSSFFRRVKTGEKPGYPRFRGYGRYDSFTYPQTGFELLDNGLQLSKIGIVKIIIHRPIRGNIKTLNIRRDRVGNWYACFSCEVETDPLPASEKAVGVDVGLESFATLSNNGEKIPNPRFFRKDEKALARVQRKLSKVEKGTPEREKRRKAVARIYQRIANRRKDFAHKLSRSLVNEYGIIALEKLNGKNMLKNHHLAKSISDAAWNQLVQYVTYKAEYADREVVLVDPRNTSKRCSRCGTLVEKSLAVRVHSCPVCGLEIDRDENAAINILALGLQCLGASPRSHPVYGME

SEQ ID NO: 54698 - protein, 463 aa, Sulfobacillus sp.
  misc_feature (393)..(440): Xaa can be any naturally occurring amino acid
MQETTVFTYRVSLPPTEWAKASAARRSAGDLWTRLVKIHRFCRKRHWPWPTEAQLKAHFKRRWPLHSQTIQALIEKFSATIDGVRTKRQNGDKKARYPWRFRRYFNPIFKEQALKMQGSHLRLSLGRGREPIRVRLPEALPTGTMVQAELSYGEIFLTVTRILDDPQPTVSEKAGGLDIGVIHLGMVSDGQEAFAVSGRGLRAVKQGRAKGLAHLQKKRRRTQPGSRRRKRLNRARHRISQNVERVTRNALHHVANQIVAFCLAYGITILYAGDLGTLNHQKRHRRSRRTNQEIGALEFGRLEQYLEYKLRRYGIPLIKISEAYTSQTCPHCGHLTKVAGRTYHCRACDYQAHRDGVGAVNILNKGMHGEIRPGEILVPQRITYRRPVPFKGXXXXXXXXXXXXXXXXXXXXXXXXXXXXXXXXXXXXXXXXXXXXXXXXPPESPPFRAGRFNKKGRVDECQW

SEQ ID NO: 54699 - protein, 227 aa, unknown
  TnpB Polypeptide
LIIITDHNLINSYRKTHDGASIGLDFGLKTYLTKSDGNKIGSPLFFKQYQNKIRKLNKRFSNAKKDSSNRRRRLFELQQAYRKINDLRSDFQWKLAHQLCKQYDYIFIEDLNIEGMKRLWGKKVSDLSHSSFINKLTYVASKYEVTIHKIDKWYPSSKTCECGCINKGLSLRDRTWVCPACGAVNDRDILAARNILRKGISELESKSNSSDSNIGVSCACIQESHLL

SEQ ID NO: 54700 - protein, 173 aa, Paludifilum sp.
MSRGNRVKYSQLPLFSLDKAYQAFYRRVQNGGKTGFPRFKGESRYRSFTDPQSGFSVEGKYLKLSKIGEVRIRLHCQIAGTIKTCSIVKKNGRYYACLAVGQALKPLPKTGKEVGVDLRIKPLAVTSDEQFFASPHHLRRSEHRLKQLQRLVSKRKKGSHRRKKSDPSPCPNA

SEQ ID NO: 54701 - protein, 378 aa, unknown
  TnpB Polypeptide
MSVRTIALTLRPTFAQSAALERLQRQFNAACDYISRVAWEQHEFNKVRLQRLVYRDVRARFGLLAQHTIRAIAVVAGSYTAEKSRPHTFRPDAAVVLDTPRLYRVAHNRASIATLDGRQTVQLGIGGHQRQMLRVATRLAEADLVRDQKGRWRLLVSAHYADPPLTEATEVLGVDLGRRDIAATSDGNTFSGAEVTRVRDRFARNRSRRSRNASKGTRSSRRRARALQKRLSGRERRFQRHVNHVTSKAIVQKAQAPGRAMALENLTGIRERTNALPRSREERRRSNSWAFAQLRCFLTYKARAAGVPLVLVDPAYTSQICHCCLHLGERNGKVFHCVNPRCGFRGDADINGASMIALMGANVMRPRGPWLACQLLGS

SEQ ID NO: 54702 - protein, 503 aa, Caldilineales sp.
MTTRTADSQSTTPEPTARRNERYRVRFDSARQAAFCAQIAGASRFVYNLQLAICEWHYEEWLCARESDPEAKRPNTAEFTLNKRFTVIRNRPQEEWFQAFLRSGQGQPYADQDLSWLRDLPYAPVRHAAKYLSGAYTRFYKAAAAARESGKSLGRRKSDGKPKYFPRRKVKNRKPDGFTIPGDVRMDGHRLRVPGTGWVRLDKDNPLYLGCEARQVRVLKEGTEQHPKWYAIVSYQVPAELLAEHARTGALGVDRNVGQATDSEGEVYEVPDDPKLDAHIKRKQRGVEKARRRSRGSGKPMSNRGRRVCGQLKKLQRRKKRWRENANHQASRKLADSAHTVVLEDLDIANMTKSAKGTAEEPGRNVKQKSGLNREILSTGWGQLERNLGYKAGRVVKVDPAYTSQTCSSCGHISKENRRTQATFKCVACGYKANADHNAALNILERGLALLPKARGNGASARRDAFDPWPLPQARAKSTSATREQDMPDDAPGPPGPCAWSGM

SEQ ID NO: 54703 - protein, 379 aa, Caldilineales sp.
MDSVATARKSRRIRIYPTTEQRAVLRLWDEAGRWCYNKAVELLREGFQGNRYELRAAVLAELPERLEAAPYQVKGSAVFDARKAQNNVKAHNRKVFQTGEGQSAKLHFRSRKHPRSSIFVPRTAITPTGIYKKLLGDMKHGELLPEPWYDSRLVREGDRYWLVVATDAHRTEAETQGRVIALDPGVRSFQTGFSETEAVKFGEQDFGRIARLCHHLDDLMGRIAKAPARKKSRMKNAATRLRRRIKDLVRELHHKVARWLVDHYDIILLPTFETSEMVEKAKRKLNSKVARAMLTWSHYQFAQFLTWKTWESGKVVLRVNEAHTTKTCSWSGEVVANMAGRKTIRGSDGIVLDRDINSARGILLRALEDTPWLREQLVS

SEQ ID NO: 54704 - protein, 491 aa, unknown
  TnpB Polypeptide
MGEVATASKTRARQAKVVGLKIALDLDEKAKAILDGQSKIASWLWNALLETSNTTLSRVIAANGSGTPADLADIYLLYGEHNLREHMVGMKEDHPWLKCLYSSVTKNVALRLSRAIRDTRNGVRAKKLGWPNFNQWGWEWFSLEYDEPHKGYSFSPGLITLSLGRDKDKKRLLVQLPLHEPLPAFANNSSIRALRIVKEYSIYYAVLTVSRQIVTQKPLPKAPKIIAFDPGHENPLTGFDSDGGVIEIKRPQYLIRLDQRIVEVQGKRDHCRKKSVKLTTHESGKDYWLPSRRWRFYDKILQKLRLQRREQTKRWNYEVANKIYSEYDLASMGDYAPHGGGRSKGERRSMNNRSLVGGLKKTLTWVAERSGKQFVVWNERNSTRTCHACDYKLPYSIDPKFRAWICPQCGARNHRDANAAQNGLDRTKKLVQLPCSGHQEISSWRTWRLTEAGVTEVASTPESVFESLKTLRLTPSNPTASVIADHQDPGQ

SEQ ID NO: 54705 - protein, 491 aa, unknown; identical to SEQ ID NO: 54704
  TnpB Polypeptide

SEQ ID NO: 54706 - protein, 401 aa, unknown
  TnpB Polypeptide
MNRLFFNICCIIKHIPLGGDIMVKMKAYKFRIYPNKEQTTLINKTIGCARFVFNYFLDKQQEKDKMWYIVEEMYQCGQLPCNNWKGEFFNKNNSINDIKELKLQHSFLKEVDSIALQSSVENLDNAYSRYYKHLGGKPKFKSKKNEIQSYKTKMVNGNIKVLDKYIQLPKLGKVRFAKSREVEGKIKTATIRRTNTEKYFIFLTCELEINELPKINKKVGVDVGLKDFAICSDGVKFKNPKWLRNKTKRLKKLQRDLSRKQYGSSNWNKARIKVAKLHEKIKNQRTDYLQKISTKLINENQVIAIEDLRIGNMVKNHKNARTISEVSWYKFRVMLEYKANWYGREIVIAPSNYASSQLCSECGYKNSDVKNLGLREWTCPKCNTHHDRDINASKNLLKLTL

SEQ ID NO: 54707 - protein, 352 aa, unknown
  TnpB Polypeptide
MLVRELKLRPSRKLEETLSSWLWHLTGVYNFGIRKIDRNARDKIYFSSFDFSNLIANHSKLMEIPSHTMQATLMVAYTAWKRCFKKLAKKPKLKGVRNKLRSISFPDPISASKISNNKVRLPGLGGIRYFKQELPNGKIKQGRIVKKASGWYLQLLIETTHTFKVCNTTNKVGIDTGFKHLAVLSDGTKYDNPRNFVAGQERLAQAQRGNRNKLAARLHERVANRRRDNNHKVSKEIVQNYAEIYVTNDRLKGQAKRFGKSIGDAGISQLRNFISYKSDNHGRKFGLVASPFTTMTCSACGSLTGPKGLIGLAVRFWECSACGAYHDRDINSSMVVLNTGVGTTHEVSHATA

SEQ ID NO: 54708 - protein, 378 aa, Chengkuizengella sp.
MFKAYRYRLIPNDEQKVQLAKTFGCCRFVYNQILARKIDLYKNSRKSISKTDCNNYCNRELKNEFIWLKEVDKFALTNAIYDLDTAYQNFFREIKNGNKNQGLPKFKSKRNRYYSYKTNFTNNNIKVDFENNRVQLPKLKWISCKLHRQFDGVIQSATIKQYPSGKYFISILVDTDIRELPKNNNIIAFDLGVKEFLVDSNDKHIDNPKTIYKYEQKLAKLQRQFAKKQKGSNNWNKHRIKVARLHEKIANIRIDFLNRLSSQIINDNQVIISEDLNIKGMLKDSKLAKSISDVSWGEFTRQLEYKADWYGRTYHKIDRWFASSQTCSSCEHKNKSVKLLTIRKWECDKCKTIHQRDENASINILNKGLKELGLFAYR

SEQ ID NO: 54709 - protein, 370 aa, Bacillus sp.
MTKHNKAYKFRLYPTEEQAILMQKTFGCVRFVYNKMLAERIETYEKLKNDKEALKRVKHPTPAKYKKEFDWLKEVDALALANAQLNLDKAYKSFFKGDAKFPKFKRKRHKQSYTTNVVNGNVQLLDGHIKLPKLGKIKIKQHRDIPSEYVIKSCTLSITASGKYYISILTEYEKEVEYKKVEHVVGLDFAMNGLFVDSEGKKANYPKFYRQTLEKLAQEQRKLSRKKKGSSNWHKQRIRVAKIQEKVANQRKNFLHHKSKDLATAYDAVIVEDLDMKGMSQAFKFGKSVADNGWGMFTSFLVYKLKEQGKQLIKIDKWFPSTKMCSSCRSTKPMPMSVRTYTCSCGYIGDRDHNSALNIKNEGIRLLANN

SEQ ID NO: 54710 - protein, 366 aa, unknown
  TnpB Polypeptide
MNKSFKVRIYPTKEQQILLERTFGASRFVYNHFLKLKGYLYQEFKIKITFNHMSKMLTELKRQKPWLRVPDKWALGNALRDLDSAYQNFYNGRGKYPKFKRKDDKNSYRTNGTTPRVTNSFITIPKVGMLRFRDSYKLEDKNILKIYNVTISKTSSGKYYASISAEVYIPCFERTNQNVGIDLGIKDFAIFSNSMKIENPRILEHLEVRYRRLAKSLSRKVKGSANYQKARIKLARFHKYVVNIRKDFLHKLSTNIVKSYDVICIENLNIKGLMKSNLSKSFQDVSLYEFVRQLEYKAKWYGKIISIVDRFYPSSQLCSNCGYKNSVVKNLSIREWTCHECGTHHDRDINSAMNILNEGLRLLESI

SEQ ID NO: 54711 - protein, 354 aa, Hydrogenibacillus sp.
LQTITLRLRLHRPTQAKIRRYRELVERTTAFANNLVAAGRPKGLTSRTAREYLAGDLPSAVINQALRDVAAHRDVQKFRVLWPSFNNQNLRLKKVGDFWTAAFPTQAGRVRVPLSVTAKQEAMLSRLGRDVKQGAAKLYEKRGRWYLALSVTLPVEEKAAGPVPGKVAGIDMGLRYLAVVNCEGETLFFHGNQAAYIRRRYHAFRKRMGKAKALKAIRQMKDKEARWMKDQDHKISRAIVDWCLARGVSTIRMEKLEGIRRRNTRKRDFGRSLHSWSFYRLQQFIAYKARLAGIRVEWVNPKDTSRTCPRCGHCAKENRNGIRFRCRKCGYEAHVDVVGAWNVSLAISGLAEAA

SEQ ID NO: 54712 - protein, 344 aa, unknown
  TnpB Polypeptide
VLEKLLKTLKRTIILEGWTNSIGREALREIEDAYREMLSEMTDYALEYRASQSTLHRIFYNRFREEYPWLPTRIIKGCYRDAIRRARSFKKKKRKGETEKDKPVIRSVTLIYSDSQDWRLREGYVEVRTHRGWIRIGYRNNKHLHRYLYNNWKPSSELKLKLTDGKILVYLALAREFEVSYNPDNAVAVDINENNVTLAVFIDRRLHEIYRIETGIGRIVIAYSERRKRIAENRSTRDRVARKALRKLREGERKEDIIYKTAKIIKEIARKYSATVVVGNAHRGKDRMASNARKRLRHRIHQWCASKLVEMLNNKPLYDVKETEAYPHQETRLAVSPSRDTPPL

SEQ ID NO: 54713 - protein, 402 aa, Escherichia sp.
VKRLQAFKFQLRPGGQQEREMRRFAGACRFVFNRALARQNENHEAGNKYIPYGKMASWLVEWKNATETQWLKDAPSQPLQQSLKDLERAYKNFFQNRAAFPRFKKRGQNDVFRYPQGVKLDQENSRIFLPKLGWMRYRNSRQVTGVVKNVTVSQSCGKWYISIQTESEVSTPVHPSASMVGLDAGVAKLATLSDGTVFEPVNSFQKNQKKLARLQRQLSRKVKFSNNWQKQKRKIQRLHSCIANIRRDYLHKVRTTVSKNHAMIVIEDLKVSNMSKSAAGTVSQPGRNVRAKSGLNRSILDQGWYEMRRQLEYKQLWRGGQVLAVPPAYTSQRCACCGHTAKENRLSQSKFRCQVCGYTANADVNGARNILAAGHAVLACGEMVQSGRPLKQEPTEMIQATA

SEQ ID NO: 54714 - protein, 386 aa, unknown
  TnpB Polypeptide
MHKTYKFRINPTTKQVKVLEHTLEICRVLYNSCLFDRKRNYEQSGKSLTRIQQQKILTSDKQRMGFLYDINAQVLQNVLFRVERAFQGFFRRIKTGEKVGYPRFKNEGRYDSITYPQEPAFQITEQGLRLSKIGTVKIKIHRPIIGIIKTCTIKREIDKWYACFSVEYEPVAKPIPNKAIGVDVGIHSFVVLSDGKVIDNPKYLRKSEKKLVSKQRQLSKKKKGSRNRKKARIKIAKLHCKIRNQRSDFHHKISRKIVNIYGFIAVEDLNIKGMVKNRHLSKSISDAGWGQFLGFLKYKAEEAGIQFEKVAPHHTSINCSHCGNHVPKTLRDRIHFCLACGTTLDRDHNASLNILKKSTVGTTESYAWGGSLCQMLPENQEALSNL

SEQ ID NO: 54715 - protein, 447 aa, unknown
  TnpB Polypeptide
VALRTTPGQSRRCFGLLRSGGDVWACVLELSALRRQRGVPALVTYQELCRELSAAGPGTFGELSSTGARSILRRYSDAWMSTAKRRQAGDRSARYPRRKKGLVPSRYYAGTFWIEGRRLRIPTAKGAAPLAVRLTREVPYPAPSIRSVTLLADGPRLCVDVTAEIEVEHYLPGAAPDPDRIAGVDLGIIFPFAVVADEGSLLVSDRALRAESRLQLAEAKARRRAVARRAPGKGQRGSRRWRKYRVRTKVLQGRHRRRLAQARHEAAKTVVDFARQNGIGLLVVGDPRGVLDRDAGVRQNLATRNWRVGQLMGVLEDKARAAGIEVTTVDERATSSTCPRCGNQVRKPRGRNFSCPHCALAAHRDLVGAINIASRSPRGGINVDPAGLAITHRRAGRHLPGRTRRDPRRVALEQRGRLVGLWPAVARPGAVEHDGSGESLARGASVA

SEQ ID NO: 54716 - protein, 375 aa, unknown
  TnpB Polypeptide
LRQQCITYPSLALIRGLYCIENFTEHTARNDGILIFPQGFKFDGKKLYIPKIGWVSIKDKITKKEVWERIKESAKQVWIKEEVDGFFAYIVYEREKEEKENNGKVVGIDVGIKNTLTMSNGDVISLDTKRIMGLVRKAERLQSVIDRKRAINKKRGIKKTRRIEELERRRDKILKKIQNIKVDFYYKAVNHILNGGKLDGISFSSGHGEYRSEMVANSQGNLYSESLHSNVESMPVNSHEYVVVEDLNLKELREAEKGGKVIRRKVNKYLQYISLSEFFRILEWKAELYGREIIRVNPRDTSKTCSNCGYVNHELMLSDRVFKCPVCGLKIDRDLNASINILKRGMEHIAPSSGHGEYMREMVLSEEPIRRALAL

SEQ ID NO: 54717 - protein, 223 aa, Escherichia sp.
  misc_feature (3)..(3): Xaa can be any naturally occurring amino acid
  misc_feature (221)..(221): Xaa can be any naturally occurring amino acid
VEXLERAYKNFFRKRAAFPRFKKRGQNDAFRYPQGVKLDQENSRIFLPKLGWMRYRNSRQVTGVVKNVTASQSCGKWYISIQTENEVSTPVHPSALMVGLDAGVAKLATLSDGTVFGPVNSFQKNQKTLARLQRQLSRKVKFSNNWQKQKRKIQRLHSCIANIRRDYLHKVTTTVSKNHAMIVIEDLKVSNMSKSAAGTVSQPGRNVRAKSGLNRSILDQXSH

SEQ ID NO: 54718 - protein, 367 aa, Lachnospiraceae sp.
MLKAYKYRIYPNNEQKVQIAKTFGCCRFVYNQTLAYRKEAYEKENKPASKTDCNNYCNRELKKEYEWLKEADKFALTNAIYNMDTAYQKFFKEHAGYPKFKSKHNNHKSYTTNFTNGNIAADFEGGKIKLPKLKKVRAKLHREFGGQIKSATVSQVPSGKYYVSILVETEQEELPHTDRNTGLDLGVKDLCITSDGTKYGNPKTIKKYERKLAKLQRQLSHKEKGSGNYSRQKKKIAVCHEKIRNARKDYLHKISHEIISENQVIVSENLQIKNMVKNHHLAKSISDASWYELTRQLEYKAEWNGRKYIKTDTFYASSQLCSACGYQNADIKDLSVREWTCPICGAIHDRDINAAKNILAEGLRQTA

SEQ ID NO: 54719 - protein, 240 aa, Streptosporangium sp.
VVAATTSDGDFHDRPFITSGEAQRYRRLQQQLARTRRGSNRRRTVVAKIGTVMRRVRSRRADFNAQLAATLTSRYGTVVLEDLRTRNMTMSAKGTVEQPASGVAQKSGLNRAILDKGWYGLELAVTSASRYTGTKIIKVPAAYTSQTCSACKVVDTASRESQARFACTSCGHREHADVNAAKNIKAAGHAVSGRGDLGATRSVKRQPPRPRARQYAAPAARGIPVLQGREEVNVRGRSPC

SEQ ID NO: 54720 - protein, 458 aa, unknown
  TnpB Polypeptide
MAKKKTTQTLAEQWAAYLYLKKETKLCIPAMDAMRHAAAIRMWEYLHRRKLPGKRNASRKKDVPGEQFLVYRFLAKPTEEQEQFLRQSAGNCRFLWNQMLNDFKTTGGYQTPAGYKKNYNFLTIGDATSLSNVQLNFQAAVNDWRKGDKGFPKFKKKGLAKESFRSTVVYDKNGNGNMCLTRTGIRLPKRKEEIKLRMHRSLPENMILKNCTCTLEPNGKWMFSIQFSTIEEQDELSPFALTEVKHIGLDMSLPCLYIDSLGNRADYEKPYRKVEVKIAQEQRKLSHMKFGSSNYLKQKQSIARLHAKAKHQRSDRLHKLSCMLTDTYDLITIEDLNMAAMKKSLHFGKSASDNGWGMFVDMLLYKAARKGKLILFVSKWFPSSKTCHACGYVHKELQLSDRMYICPVCGHVMDRDEQAAKKYCEEGLVSTGNYRAFCLYRRFFSIKREISTAPLLIQ

SEQ ID NO: 54721 - protein, 129 aa, Okeania sp.
LYKKLRLSQKSLSRKTKGSNNYQKARLKVAKIHAKIKDSRLDYTHKLTTQLIRENQTIVVEDLAVKNMVKNHKLARAISDANWGELVRQLEYKAEWYGRELIKIDRYFPSSKGCSNCGYVVDKLPLDIS

SEQ ID NO: 54722 - protein, 438 aa, Halobacteriales sp.
MLTVHRTHRAKIHNHSQVADSLDRHGWAASKLWNVANYHSRTVWEETGKIPDHGDLKDELKTHSKYDGLHSQSSQRVLEELAEAFNSWYSSDDPRDDPPGYRKENYYDSEGRRVHEEHPRSTVTWKQNGIRHDTNNDRVRLSKGANHKEYPRAREYILVEYETRPGVTVENLQQVRAVYDSAMERWELHLVCTDEVETPNAPGTETAGIDLGICNFAAVAYSTDDADLYPGNRLKQDGYYFPKEIAKCDDSSGERATRLHHKWSERRTHFFHSLAKHIVQRCVKKGVGRINIGDLEGVREDEDGESKNWGRHGNLDLHGWAFDRFGSILAYKAKVEGIEVVEVSERDTSRICCVCGRKDDSQRVERGLYVCEMCDAAFNADVNGAENIRLNTNTKSNSESPPGLGGDRSTGWLAQPGVYLHDLSRGFQPRREVVDCKP

SEQ ID NO: 54723 - protein, 388 aa, Leptolyngbyaceae sp.
MLVLEAKLKGETQQFELLDEAIRTAQFVQNSCLRYWMDNRGVNKYDLYKLCKDLAANIEFPWCKKLNSQARQAHAERAWSAISRFFEHCKKQIPGKKGYPQFKRHQTRASVEYKTTGWKLSDCRQFITFTDGFKAGQFRMWGTRDLHFYPIDQINRVRVVRRSDGYYVQFCVDVERNEEREPTRHTVGLDVGLSHFLTDSDGNQVENPRHLRQAEQRLKRVQRQVSRKQKGSANRRKAVNRLGRAHLKVQRQRKDFACKLARCVVKSNDLVAYEDLKIRNLVTNRHLAKSISDAAWGEFRRWLEYFGKVFGVVTIAVAPHYTSQDCSNCGERVKKALSQRTHICPHCGYVADRDHNAAINILNKAISTVGHIVTAAPDAENACGESIA

SEQ ID NO: 54724 - protein, 411 aa, unknown
  TnpB Polypeptide
MIVKRVEKHILKQSSPYFSMIDDFCFKSKNLYNHANYIVRHEFVKNNKWVRCRDLDKILKQDVAYNDYRQMPTAQSAQQVLKLLDNNWKSFFKSIKDWSKNKSKYSGRPKLPRYKDKNGRFVLTLTNQEAKLKNNTLVFPKRFKGFKVHHAFTNNQNFISFQQVRIIPKNQQYIIELIYNIEIPDVKSSDNGKYLSIDIGVDNLAAMTNNIGLKPVIINGKGLKSINKYYNKQLSHYRAIAKRMNNRDYTKRMYKITTKRNNKINDYMHKASRYVVDYALKNDIHTIIIGNNKNWKQKSKMSKKVNQSFVGIPHQRFIEMIQYKAETVGINVILTEESYTSGTSFLDNEKPVKANYNKSRRVHRGLFISNKGIKINADVNGSSQIMKKVFPNAFADGIEGVVLYPVRVDVA

SEQ ID NO: 54725 - protein, 322 aa, unknown
  TnpB Polypeptide
VDYVKEVPYAIRLNAVKDAYTSWSTNCKKAKKSGTPFSLKFKSKKDKVQSCYIKKTSISTLGIYHTKSGRMRFSETDWFANSEISDCRLICDHGRWFVSIPKKISTQQTYETQGGAVAVDPGIRNFGTYFSTDGRFGWVGQRAFERILKLNIRIDKMRSIIATTEDKLYKFRLRRAIDRLYHKIQDLVDELHWKFINFLTKEFSVVIFPPFNVSDMVRTSGRKIRKVVVRSMMSLRFYEFKERLKNKCKERHVLFIEQNEAWTSKTNSFNGEVMANLVGKESFLYQGMKINRDVNGSRNILLRAMRDSSANGLNTIGRFVTC

SEQ ID NO: 54726 - protein, 412 aa, unknown
  TnpB Polypeptide
MLLCTKIKLEVSQSDAATLEFMQGKCRGLYNWWVMRLRDGETWRFNECKKTLAESRVHDSELDDVYGKLLAEVYYRLDTSMKAFFRRCKAGETPGFPRVRPRHNFFTLCYPAMYLEVKENMLILPTGGRGKHKRFPNIVARLTEEAPQDFGEVALSRDARGNYYASFTYKQKEQTPEHEEGQADYLAFDLGIKTLATGVNEQGRVYTVGGFKGHQWHNKQLDKIRSKRDKCKKKSRRYIYLSKVYKRVSEKKRNKRKDSLHKASHLIAHTLVERTVIVGDLSQRQMVTKQHVDRNKHLNRAVYNEWGLYTFIAMLKYKCDLYGKELVFLDEQYTSKDCSRCGNRQNMPLWKRTYCCTHCGLVMDRDENSAHNILARFLARLEPYTLERECDVLQDWCLDVAGTGLAQAAEVQ

SEQ ID NO: 54727 - protein, 416 aa, unknown
  TnpB Polypeptide
LRRLITGQAQSYILHLNKIDVAKTDMKKAYTFRIYPTRNQEVKLNRTLSTCRHLYNDALEERRRQAELNRLCSEFQVYPWGKPEWISYENQANELASSKTPLQKEVYSQVLQNALKRLDRSFKNFFIGSGYPRFQGRNRYNTFTYPQSGFEISDGKIKLSKIGNVRIFQHREIEGKIKTCTIKKDVDHWYAIFTTEIDMDIKKVSVETMIGIDVGLSSLVTLSSGEKIEPPEYLRMSEKRLSKEQIRLSRKKKGSENRNKQKIKVARVYRRIRNQRKDFAHKTSRKLVNTYDLIAFEKLNIRGMVQNHRLAKSISDAGWYQLQTFTAYKAEDAGKQCEFVAANGTSQECCICGNMESLTLAVRVFRCSRCGNIKDRDVNASVNILKKAVGTDCAELTPVESIQKELVEAGSLTALA

SEQ ID NO: 54728 - protein, 406 aa, unknown
  TnpB Polypeptide
MLVRSLVFRLKGPLPNDAKFLMEDFRLAVNNAIRLGVHSNMTSKFALSKLAYRDFRKEHLNMYSQHLVSAFEVAASILKNHRRRLRKRLPAQIPFVRRLFMKAENQAYKLDRENGIIYLPIRAGIHVKLGLVVSDYHRRYLDDESLSLGSLTLLHDRVVVTVRKHTPKPYAPASVLSLDTNERSLDGVLAKEEKITIVVRAEFPDVSVIQSVHHDRRKRLQKKKSHDRRTAKRLCAKEGAREHHRIDYRMHEVANTVLSFAEERRSMIVLEDLTGIKPCKNKKLNRRISIWPRRKLHQIIEYKAAWRGIPVVKVDPRYSSRKCPVCGRIQDSRKGTEFVCGCGWHIDRHINASINLLQTAASKKAAGGLWFSPGAFQHDVVMVLCGPGRTVRPEPNGTSGIRAVVV

SEQ ID NO: 54729 - protein, 380 aa, Staphylococcus sp.
MYKGIECKLYPNQTQAELIQMTFGHTRFIWNQMLGMLKERYQNNPNLKMLSYSKLSSLIPQLKQEYPWLKDVDSVAIQCSVKKLSETFDRFFKGLCRYPKFKSRKQTLQSYLSTIRGQNIRFNHNQRYVKLPKLGWVKCRISVPHIENERIKSITIKQKPSGHYMMSVLVESDNQALAKTHQTVGIDLGVSDFAITSDGHKYQSQKLHLKYQKQLHAWEKRMARRRIRAKAEGKPLLEAKNYQKARRQVARIHEKIAHTRKDYIHKITTDLVENYDVIAIEDLKTANLLKNHHLARSIASQSWHQFKTILKYKCERYGKQLHCVNPYKTSQYCSHCGYDSGKKSLDIRQWRCPSCHTTHDRDINAAKNIKSIGLGQALVK

SEQ ID NO: 54730 - protein, 417 aa, unknown
  TnpB Polypeptide
MYLTIKQQVKHLTKEEYNVLRELCRIAKNLTNQAIYNVRQHYLQEKQYLRYESNYHELKNSDNYKLLNSNMAQQTLKDVDAMFKSFFTLIKLAKQGKYSFKHIRMPKYLPKNSYSNLIIGQIRLRKDNVLTIPYSNTFKKKYETKIQIKIPKVLEDKKIKEIQIIPKFNARFFEIQYTYEIQEEDIQLNTNNALAIDLGVNNLCTCVTSTGKSFIIDGRKLKSINQFFNKQNAKLQSIKDKQNIRRHTKQQYLISRKRKNRVDDYINKACRYIINYCLINDIGTLVIGYNQSFQNKTNLGKKTNQIFTQLPFGKIREKLEYLCKRYNINYILQEESYTSKASFFDNDELPVYNMDNPQTYDFSGKRVKRGLYKTKDGYLFNADCNGALNILRKSSAVDLTILCSRGELDTPKRIRVS

SEQ ID NO: 54731 - protein, 477 aa, unknown
  TnpB Polypeptide
VPLRVPRGPSPRDAPSSRAPSSPPTPRRPPPSRLCPTVLSPRPPEEAPAFRPGRNLVPRVAGRCFVGHDRHPVTVRTAYRCRAYPDQAQQAVLNRTFGCVRVVWNRTLAARQERYATERTATSYAQTDRALTAMKKDPALAFLTEVSTVPLQQALRHQHQAFCAFFAKRARYPRFKSRHARQCAHYTRSAFSMRGGVLRLAKTGGPLQFRWSWPEVDVTGLDPTMVVVSRDPDGRWYVTFAVDGKACEPLAETRRAVGVDLGVQDFAVTSEGERIANPRHLERKARNLARYQRRLARCRKGSANRAKAKAKVARAHRKVRNARHDFLHRASTRLVRGNDLIVIEDLAVANMVRNRHLARVICDCGWGEFRRQLEYKCQRHGRQLVVIDRWYPSSKTCSACGHLLAELSLSTRTWQCPSCGARHDRDVNAARNILAAGQAVTACGADVSHSETSRVQSAVKQEPRLVTAGIPVLQGEE

SEQ ID NO: 54732 - protein, 477 aa, unknown; identical to SEQ ID NO: 54731
  TnpB Polypeptide

SEQ ID NO: 54733 - protein, 423 aa, Chroococcidiopsis sp.
MRVAYQYRLLPTTEQKAAMDRWLDMLRLQYNWLLGERFRWWEENRCDINACPLICHLPELRDNPDYYSQKRSLVQLKQDRPWYARVYSQVLQDCVTRVKLAFDRFIKGDSKGNRSGQPRFKGKNRYRSFTYTQIDISDIKDNRISLSKIGWVKLVLHRPIPDRFKAKTAIVTKKSDGWYVTITLVDESVPTSSIEIIPTPDNSIALDLGLEKFAALDTGEFVDIPQHFRKSEAKLAKLQQKVATRKKGSRARKLLNRRIGRLHQQIARQRKQFHFETAKQVMQKALVVFVEDLAVKNMSKRCKPKQDEEGNYVANRQSSKSGLNKSIADAGWAQFIDILSFKAESAGGKVVKVNPKNTSQFCSNCLNVVPKTLKERWHDYDRCNLSIDRDTNSAILINKVGLGVVLTIKRSRRNSREAHAVAS

SEQ ID NO: 54734 - protein, 422 aa, unknown
  TnpB Polypeptide
MGYGPGEREEKRQENMLISKKIRLEVSKQDAVTLEWMQEKCRGLYNWWVMKLRDGEKWPGWEEAKKTLQASKEHDPELRWVYGKLLQEVYFRLDGAMKAFFRRVKNGEKPGFPRVRPRHCFFTLIYPAMYIKVEGLSITLPTGGKGKNKHFPDVIAKLTEEAPTDYKDVAISRDGQGHYYASFVHDEQEATHEHDGVLAIDVGIKTLATGVNEQGRFYHINGFKGSRWYNRQLDKIRSKRDKCKKKSRRYKHLSQVYKRVSQQKRNKQQDSLHKASHLIAHKLVERTVVVGDLSQRQMVMKEHRERNKHLNRAVFNDWGLYTFVQMLAYKCVLYGKEFVIVDERDTSKTCSGCGHKQNMPLWKRTYHCPNTECRFMIDRDENSAVNILKRYLARLGPHMERISMRCADVFTAIEDVNTFEHI

SEQ ID NO: 54735 - protein, 423 aa, Helicobacter sp.
MSFQITHKVQLSPNNKAKTYFKKACGCARLAYNWGLARWKENYNLGIKTNHLALKKEFNAIKKEQFPFVYEVSKYATQQPFIHLGLAFTKFFRDLKQGKLSYPRFKKKREFQGKLYIGGDQIKIIQGCKRDYLKIPNLSKIKMTEKLRFVGKISGATISIKGSDFFVSIAMEVSQKEFISTHKPLKNSKTIGIDTGIKSFVSLSNGLQIKAPKPLTKLTRRLKRLSRQLSKKQHPKAKGDKTRKSRNYLLASLKLNKLHQRISNIRLDFLHKLTSVLVSHFDLFCLENLRVDNMLKNHKLAKSLADVSISAFNTLLEYKARYLGKEIKRADSFYPSSKACSDCGHLKTDLSLSDRVYSCSHCGLVLDRDYNASLNLVKHLVGKALTEFTPADMTALLVDLKTNQLVTSMVETGIQQKSHALSL

SEQ ID NO: 54736 - protein, 419 aa, unknown
  TnpB Polypeptide
VILIKLSFKFYPQLNNLQLSIIEELSFHTTKLYNIANYECKEHGFKSYYNLEKMFKSNWHNKFLHSHTYQQLLKVLEQDWKSFFQARKDYKTNPHKYKGIPQPPKYKNLERRKNQIIFTNLATRVKSNVLLLSLSKKMQFMFNVESLNFVLPESVQKHINMDALQQVKIIWDNSKKSWCLIIIYKVEEQSLTKNFHNIMAIDLGLDNLCAITFKDSKEQFLINGKPLKSKNSYYNKKIARLTSVAMKQTGSNKFKRTKQIIKLQRKRNNYVNNYLHKVSRIIINLALEHKCSTVVIGDLKGIKQGSYVKGFVQIPVQRLVEQIKYKAQLVGIEVKLLKEEYTSGVSAYDLEPITKKYYNKSRRVKRGLFKTNQGYLVNSDVNGSLNILRKYVKDNVVPMSIFKLRDKGILDMPVRIRVA

SEQ ID NO: 54737 - protein, 486 aa, Lyngbya sp.
MMPRKLGTTKKISTQVVPVVGMNNSVKQEWFSTIKKLGIVRAESYNKLGSISHWGMDWKKAIPEIKSFRTPETLGLPAKLMDWTINDVAKAITAQQAASSDAVIKKIYKRFPGKENEKCRKEYATQLKTLAFLENPLLHRLVRKEFKRGHSWVDNQMVYQQVGYKCKRLSPNTYQLEIAGLTSRKRNKIVVKSNRKVKGQIRLIYNNQSQQFEIHFLVDHGRVESVRRPREIGVDKGYTEAFYDSEGKAHGKGLGVLLSKKSDRICAKNRKRGKLWALHRKLEKLDPAKSARILRNNLSRKTENKRYKQDQSEIQSVLGAASKSLVGGRALKVFAEDLTQPIKNKRQSLAMSRKLNSWMIGQMRDSLQKWADWTGSVVTEVQPSYTSQIDSRNGTLLGKRTGDSFTGFDGVVLPADHNAAKNILARGTDFEISRFSSRTEVQAVLLRRTARFLKGLGLSLADAVELGWLNSKHSKTQAFKQLLIEM

SEQ ID NO: 54738 - protein, 420 aa, Streptomyces sp.
VKRRFGHRARLALSSAEVLKADGQAHAARTMWNCLHAWWQMMPKEKRTLANADAAIRQARQDIDFLAVLPAQAAQAVLKAYFQAWKNCWDGRADAPNFKGRLRSVMSVDVPQGRDLNIVRVHRRWGMANIPKVGRVRFRWTKDLPVGKRAGAENRITGARLVKDALGWHIAFRVQTLEIKPEPHTGPEVGIDVGINVPIALSDGETYEHGEWLTAKEKTRLLHLEQRAAQRKQHRKPGERTSRRLHRTYDQIAGLRAKAKRRALDWQHRTTTVIAKQYGTVVVEALIITNMVKSAKGTVEKPGMNVAQKSGLNRSISGEAWGRTVTILTYKAVRFGGTLHKVPSPNTSRRCSACGLITPGSRESQAVFVCRNPDCGWSGNADHNAARNILHLYRMGLALVPAAGRAVVRRAKRVKPAAAR

SEQ ID NO: 54739 - protein, 182 aa, Okeania sp.
IKDKQSIKKLTQKQISITVNRNNKVRDYLNKAARYLINWCRDNNISHIVVGVNPGMKQNINLGKKTNQKFVQIPHNIFRFKLQSMCNRYGLTYQEQEESYTSKASFLDHDEIPVFNANNPVKQSFSGRRIKRGLYRTRQGKLINADVNGAANIGVKSNLNGFNPDRLEASLAMPLRVKFDVR

SEQ ID NO: 54740 - protein, 398 aa, Kribbella sp.
MSRFRMYPAPAQRAALLEQCRHARYVWNLAVEQWSMWTRDQGPTPGYAKQCRQLTEARAAFSWLRAGVQIIQQQALRDFDQAVKNFYRGTHQRPTWRRAEIHEGFRIVGPEASKVVKLNRKWAAVNIPKIGWVRFRLSRAVPEAKSYRIKRDRSGRWHLVLAAIPEPIPAPGTGTVVGVDRGVTVSAALSTGELLKCPVPPAGEQARLKHLQRRLARSRPGSKRRQLVKAAIAKLCARAGDRRGDWTEKTSTDLARRFDVIRVEDLRIAQLTRRPRPKPNLEQPGTYLPNRRRAKAGLNRGILANGWGMLVRRLEQKAPGRVEKVNPAYTSQTCAVCGHCAPGNRESQAVFRCVACGHQANADVNAAVNIAAGRAVSARRETPVRVSLKREPQPATPA

SEQ ID NO: 54741 - protein, 214 aa, Crocosphaera sp.
VTSDGSKFDNPRHLAKHQQNLKRKQQKLSRKQKGSNTRDKARRLVAKVHSKISRCREDFLHKLSRKIVNENQVIAVENLNVKGMVKNHKLAKAISDCGWGMFCTMVKYKAENEGKTYIEVDRFFPSSKTCHVCLNQVESLPLDIRNWTCEHCQTTHDRDINASINIRNEALRIISLGTSETANGGNVRRLGGKISCLLDATPNEIGSPNYIACN

SEQ ID NO: 54742 - protein, 377 aa, Clostridiaceae sp.
LSIIEITTTSKIQIKPTDEQIECLIQTMVQIRKALNYISKYVYENNCLKQSELNKATYTYLREQFGLKSQMAQSVMKTVIAKYKTNKSNGHEFTLVQFKNLEYDLVFNRDYSLKLGNFSINSLNGRLKIPYETKGMEKYFDGSYSFGTAKLVYKYKKYFLHIPMTKGYQQTTPFEINKIVGIDLGINFVATVYDSFGKTTFFSGKQVKQKRGHYKILRKNLQMRGTKSAKRRIKSIGSRENRWISDLNHSITKALVDRYGANTLFVLEDLTGIRNSTEKVNINNRYVSVSWAFYQFRQYLEYKAQMNNSIVIAVSPKWTSQMCPKCGHIEKANRNKKQHIFCCKNCSYTSNDDRIGAMNIWNKGIQYIESQSKEVVE

SEQ ID NO: 54743 - protein, 396 aa, Bacillus sp.
  misc_feature (297)..(330): Xaa can be any naturally occurring amino acid
MGVKRMMINKAYKFRIYPNKAQATLINKTIGCSRFVFNHFLSLWDNAYKETGKGLTYGTCSAKIPVMKKEFVWLKEVDSIAIQSSVRNLADAYTRFFKKQNNAPRFKSKKNNVQSYTTKQTNENIAVVGNKIKLPKLGLVRFAKSREVKGRILNATVRRNPSGRYFVSLLVETEVQELPKTNSYIGMDVGLKDFAILSDGTIYKNLKFFRSLEEKLAKAQRVLSRRMKGSSRWNKQRVKVARIHEYMTNARKDYLDKTSTEIIKNHDVIGIEDLQVSNMLKNHKLAKAISEVSWSQXXXXXXXXXXXXXXXXXXXXXXXXXXXXXXXXXXIVVSKTFASSQLCSCCGYQNKDVKNLNLRKWDCPFCCTHHDRDINASINLKNEAIRLLTARTVEIA

SEQ ID NO: 54744 - protein, 410 aa, Streptomyces sp.
VIVMQLRYAFRLYPDVAQQTAPARAFGCARVVFNDAVRAREDARKAGQPFPTAGQLSTRLITEAKRTAGRSWLGEVSAVVLQQSLRDAETAYRNFFASLKGTRKGPKVGAPRLKSRKDGRQSVRFTANARWSINGDGRLTLPKIGAVKVKWSRTLPARPSSVTVVKDAAGRYFASFIIDTDPAVDAARMPDTDQAIGIDLGLASFAVLSDGTKIDSPRFLRRAEKKLKKAQRELSRKQKGSRNREKGRLKVAHAHAKVADARREFLHQLSTQLIRDNQAIGVEDLAVKGLARTRLAKSVHDAGWAQFIGMLEYKATRYGRTLVRIGRFEPTSQTCSTCGAMDGPKPLDVREWTCTACGTLHDRDHNAALNIKTAAGLAASACGAPVRPGAIPARREETGSHGIPTGNRAA

SEQ ID NO: 54745 - protein, 403 aa, Nostoc sp.
MIVLEFKAKGKTTQYVAIDEAIRTCQFVRNKAIRFWMDNRGVGQKDLYRLSKVLRHEFSFVKALNSSACQASIERAYSSIARFYDNCKKSVPGKKGYPQFKKNNRSVEYKTSGWSLSETRKQITFTDKKGIGKLNLKGTWNLNFYQLEQIKRVRLVRRADGYYVQFLISADNKVETQPTGKTIGLDVGLKEFYTDSNGHTEPNPKFYRTGEKRLKFRQRRVSRHKKGSTNRKKAINKLGRVHLKISRQREEHAKRVARCVIQSHDLVAYEDLRVKNLVKNHCLAKSINDAGWYQFRKWLEYFGVKFGRITVAVNPAYTTSQCSNCGAVVKKSLSTRTHVCECGFVMDRDWNAAINILKLALGITGHVGTWIYDPNASGDSTSTHAGEILCEQVGSMNEESPHL

SEQ ID NO: 54746 - protein, 336 aa, Nostoc sp.
MLLTYQFKLNPTSEQVVILETWGELLRRHWNYALGERLDWLRCTRSLLDRCSLVSEPIGGIPDKPDYYTQASDLQQTKDLFPDYKNIYADCQQQNLMRLDKAWKRWLIPDKKGNRGGKPRFKKRGDISSFTFPRVNSPKAGAHLTGNILKLSKIGEIEVILHRPIPNGSEIKQATILSKSDGWYVSFSLEDKTVPELLPIDEIKTATGIDVGLEKFLTTADGQSIEVPQYYRKTQSKLARQQRKLARKIHGSKNYQKQASRVARIHLHVARQRKEFHYQVAHWLVKSYDLIVFENLNIRGLARTRLAKSILDVAWGAFLQIMQAFFGKTRQAYARR

SEQ ID NO: 54747 - protein, 575 aa, Lechevalieria sp.
LPRCRRAPPTSRPATATCRRGPRRSAPSAGPAPPPAPAGRACRSTARGRSCGRSRRACRWRWPPTPRRSAWPSAPQSPAVSRPGRRSPGRAPRSTGWCRAWTSCPATPRRWTRGCRRPRPRRRCRWRCPERRGRRGSGGSACRRTRAAAGRSQRLPNRSPRPSGHTDPGGLLFVRTACKCRAYPTSEQAAVLSRTFGCMRLVWNKTLSERTRRYHSEGARTSCRETDATLTTWRRSDDLGFLSEVSCVPLQQTLRHQHTAFQNFFSRQSRYPRSKSRAGKQSAHYTRSAFRMRGGSLILARTSTPLEFTWSFNGVDASELNPTMVIVSREPDGRWCVTFAVDVRDPAALRPANHVIGVGLGLTSFLVTSDGTRVSNPRLLHRKARNLARHQRRLARCRRGSNNRLKAKAEVARAHRKVRNARNDFLHRTSTALVRSADVVVIEDLNVKGTVRNRRLARAFSDAGWGEFRRQPEYKCERAGRRLVVIDRWYPSSKTCSTCGHLLAELKLSARHWPCPACRTRHGRDINAAKNIRAAGQAVARGDSGDACGADVRRQGSLLPLSAVEQDARIGELGS

SEQ ID NO: 54748 - protein, 396 aa, Microcystis sp.
  misc_feature (305)..(357): Xaa can be any naturally occurring amino acid
MEKAYSYRFYPTPEQESLLRRTLGCVRLVYNKALHLRTQAWYEKQERVGYTETSSMLTDWKKQEELDFLNEVSCVPLQQGLRHLQTAFTNFFAGRTKYPNFKKKHQGGSAEFTKSAFTIKDRQIYLAKCTEPLPIRWSRHIPESCEPSTVTVRLHPSGRWHISIRFDDLTIKPLSVTDKAIGIDLGISSLVITSDGDKVSNPKHFKKHYRRLRKAQKNLSRKQKGSKNREKARIKVARIHAQITDSRKDHLHKLTTQLVRENQTIVVENLAVKNMVKNPKLSQAISDVSWGEITRQLAYKCRWYXXXXXXXXXXXXXXXXXXXXXXXXXXXXXXXXXXXXXXXXXXXXXXXXXXXXXPSVHGGEDVKSLQADILGKDFQGVLLDDSNGLAIGTIKA

SEQ ID NO: 54749 - protein, 470 aa, unknown
  TnpB Polypeptide
MEGGIRMDVRINTCYVVKIQNQLDAVPDKKTGKLEVYGKRMIDDRLMRQTADLCLEALKFCIHVIQEEWNLIMASDPKLRKRKVDTLIHATKTERPKYPEFDLRFPNLPAYTRRAILADAFGMVRSYRSNHKNWEALSPSERGMEPRLGIPSRYELTFYDQERKMSCLADGQIGLKLYNGHTWDWYYFQISKADAEYLWSLCRTRKMLSPVVNKVRGRYRIRFAFQENRELVQKENPLAYRILAVDLGINAAASWCVMEADGTVQAKGVTHLSCEEDHLNHMINRKRMYQQAGKKSRCVYRWVTEANRQLSIQTAKALIDLAVLYNVDCIVFEHLDSKGKIRGRKYRERIHLWRKNDVQKRVELQAHRLGMRISRVCAWGTSKYAFDGSGVVDRHSIYHFEHGDKVYNYSLCTFQTGKIYNCDLSAAQNIGARFFLREYIKRGATGLPATPQRTLSTLRELVCNGLPMAA

SEQ ID NO: 54750 - protein, 399 aa, unknown
  TnpB Polypeptide
MKLVERHIINRNHANWQEADKLAFKSKNLYNFSNYLCRQHFFETGNRYTLPTLYHLVKNSESYRAMPTKVSKQIIKKLVETWKSFVEAKKDWLKHPEKYKSEPRLPRYKDKVKGRNIVIYHHESIYKADLKQGRCHLSMSNISVPTKVENIAEARIVPSCNCYILEIVYESPEVSLIQSEWVAGIDLGIDNLVALTSNQPGFKPMLVNGRPLKSRNQYYNKLKSQLQSNLKSESRTSQRIQALTYHRNRFVENYLHNTSRLIVNRLKQQGIGTLVIGKNEGWKQQVNMGKRNNQKFVNIPHAILIDQLTYKCELAGIKVVKIEESYTSKTSAIDLEPPCKQSKYTGKRVKRGLFKSNHGRVINADINGSIQIIRKYLPEAFTAEGVVSCAVQPIRVNPV

SEQ ID NO: 54751 - protein, 303 aa, unknown
  TnpB Polypeptide
VSEYELTTKLAKEKQADYIALPAQTSQQVVKILFKNWKSFFKLCKKKDKLKVGNVCQVKIIPQCSCHIIEVVYEKECIKTSGLEPDSYLSIDLGLNNLVTSYDSLNHKSFIVNGKTLKSINQYFNKKKAYLMSFIGSRGISNRIGKLILKRNCKVNDYLHKTSRFIVDYCTDNHIETIVIGNNKDWKQNCNMGKRNNQNFVSIPFEKLISQIQYKAEEVGIKVVITEEGYTSKIDHYAGEEMCHHDTYMGKRIKRGLFRSSTGKVLNADLNGAIGILRKVVGESFQQIANRGEVVTPSRIYMV

SEQ ID NO: 54752 - protein, 379 aa, unknown
  TnpB Polypeptide
MLRAIKVRLYPNKQQEQAINELLGCYRFVYNYMLALKQETYKSNKTNLGLCELSKYFFDTLRKDEKYTWLKKQNTQVMNQAIRQMLTAYDRFFKLHNGFPKFKSKKDKQTALFSFNAISKRNIFETKHITLVKSLKNIKFRCSDLYFKRLQTYKDKIRSATLTKTKSGNYFLSILVDVPQYEFVKFKKTNKEIGIDLGVKDFVITSDGEVFENKHLFKKEELKLKRLQRQLSKKKKGSNNRNKQRLRIAKVFECITNKKEIYIHSVVNELLIYYDTIFMEDLNVRGMLKNHNLAKSIQEVGLYRFKSVLQNKALMNDKQVILIDRFYPSSKTCSCCGYKKKDLKLSDRFWVCPECNTNHDRDLNASRNILVEGQRVLCG

SEQ ID NO: 54753 - protein, 351 aa, unknown
  TnpB Polypeptide
MSKVAITYNQQANQLPEIKELRPELNDIHSQVLQDTLRRVDKAMKAFFRRVKAGETPGYPRFKSSNRFDSFTYPQSGFSLTHDHRVCLSKIGSIKVKLHRPIKGKMKTATIKREGDQWFIVFSEVEEIEPLPANNEVAGIDLGVTHFAALSDGTIIDNPRHLRHAENRLKKLEQQLARKKKGSHRRARTKKQLAKAHRKIKNQRKDFLHKTSRRLVNTYGTLVFEKLQPAAMTHRPKPKQDEETGKYLPNGAAAKAGLNKSILDAGWYQFQQYCTYKAAEAGRSVLFVSPHYTSQVCSGCGQIVKKDLSERWHRCECGAELDRDHNAAINILRLGRSQCKPLRVRSVVGTA

SEQ ID NO: 54754 - protein, 405 aa, Acidaminobacter sp.
MRIEKGYKYRIQPNKTQQEQFETMFSAKRFVWNHFLKLNMERYEKKEHLLTYNKMSKLLTELKANHPWLYQCEKSILQNTLKDLAGAYSRFNKGPKKYSKKTLEKAARTGKALTFYDQEGHPKFKSCRDLVQSCKMSWTGNNIEVKEKEIQYTSSGKYRKQNCKIKLPKVKDVKIAYSRPYQGRMVSAFVTKESDGKYYISLCCIEIEHEPTAATGANVGIDMGLKAFYYTSDKEVAENPKYYRKYEKRMIKEQRKLSRRQKGGKNRNRQRVKVSRWHKRVRNCRKDFIHRLSTSLIHRYDQLFIEDLNVKGMMRSRRLAKSIADAGFSDFVRQLEYKGKWNYKLVRKVDRFYASSQICSECGHQSEQTKDLSVRQYQCEECGLEIDRDFNAAINILREGLRIVS

SEQ ID NO: 54755 - protein, 418 aa, Lachnospiraceae sp.
VDFFICVIRTEWSAFQGCRTSKGAVNLTEHFCVRTAGNLYPKYDFTGEFYKLPSYLRRAAIAEAYGKVCSYWSNLKNWKAADPRTRGAEPSAPGAGFVYPAMYRGNCYVRVDDYTARIKVFIRNTCEWLTVRLRRSDVDYISRHCFGRKECVPTLRKRGRQWYLDFAFTAERELGSTDIFNQTIVAVDLGINSACACSAMRSDGTVIGRRFLRLSAEYDSLERRVSRIKYAQRHGSRSTPVLWKLADGVNDDIAVKTAQFIIDTAVLYHADVIVMEHLDLNGRKRGSKKQKLHLWKARRVQSIVTDRAHFLGMRVSHICARGTSRLAFDGSGRVLRGRESEKTNSNYSLCEFPTGKVYNCDLNASYNIGARYFVREIVKSLPVTEGQRITANVPGCAKRSTCTLSTLINLNGELYAAA

SEQ ID NO: 54756 - protein, 382 aa, Lachnospiraceae sp.
MNRAIKYRLYPDEKQAQWLAFNFGCCRKIYNEALNWRTSAYKADGTVIRYHDTATALPQVKKFYPWLKDSDSASLQQSLLHLDAAFTGFFEGRSGYPAFKSRRNRQSYSTPLTNGNIAVLDDCIRLPKAGKVKAVIHRTAPESWRLCSATVSKERDGAFYASILYEVPEASAAGVEFSRSECLGLDYKSDGLYMDSDGRSAGMPKYYRQAEKRLARAQRRLSRKKGARRGETASGKFKKQKLKTAKISRHTASQRMDFLHKLSHELAGRYRVICVEDLNLKDMSRHHAKGFHLGKSTADNGYAKFLSMLEYKLADKGGTLIRVDKWYASSQICHICGHRNPTTKDLSVRRVVCPECGAEYDRDINAAQNIRDEGWRIYLSST

SEQ ID NO: 54757 - protein, 418 aa, unknown
  TnpB Polypeptide
MLLSKKTSIKVSREYANLIGHMCYAASKLWNVCNYERQHYKETGIEQHPDWYYQKKAHKEDLWYKQLPSQTAQEVCKLLDKAWKSFYALKRSGGIETPRPPRFKQESIPITYMQMGIVHERDTGRVRLSLPKALKKYMEETYQIHENFLYLENKIFRGMDQIKQLRIYPPEKGSCKIIVVYEVPDQEELPQNGHELSIDLGLHNLMTCYDSGNGKTFILGRKYLALERYFHKEIARVQAQWYGQQSGKGVKHPVTSKHIRKLYKRKQDSVTDYLHKITRYLAEYCREQGITCVVTGDIRNIRREKDLGHRTNQKLHSLPYNRIYIMLEYKLKRYGIRFIKQEESYTSQCSPLSPEVGKRYAEPSKRKERGLYRDGNRTYNADAVGAYNILRKYHSVSGVKKELSVTGLKTPEIIKVAV

SEQ ID NO: 54758 - protein, 377 aa, unknown
  TnpB Polypeptide
MLNIKSFKFRIYPTSKQNTLLNQNLEACRFLYNHFLSQRKDSYEKEKKSLTYHTQAVSIVKLKKEKPFLQSVHAQVLQNVAVRIDLGFKAFFRRVKAKENPGYPRFKGYGRYNSITFPQASNGSCQINNNRLYVSKIGHIKIKQHRELPFKPKTATISKSSTGKWYVSFTCEINKEILKKTNKSIGIDVGIESFITFSDGSKIDNPKFFRKDEKDLAKAQRKLSKAIKGSPDRKRRRKAVSKIHERISNRRTNFTHQESTKIIKQFDTICIEDLSINKMLSNNHRCLNKSITDASWSQFFNQLSYKAEYAGRKLVKVNPAYTSQTCSICGHRREKKLSERVHNCPCCNISIHRDHNASLNILSLGLQTLALNELRSS

SEQ ID NO: 54759 - protein, 421 aa, unknown
  TnpB Polypeptide
MHMRTAYRCRAYPDEQQQAVLRRTFGCVRVVWNRTLAARRARYAAEGKGTSYAETDRALTAMRRDPDLAFLTEVSSVPLQQTLRHQHQAFTAFYEKRARYPRFKSRAGRQSAHYTRSAFSLRGGMLRLAKTVTPLRFTWTWPEVDITALDPAMVIICREPDGRWYVTFTVDTEGPEPLPETGYAVGIDLGVTDYAVSSNGDRIANPRHLARKARKLARYQRRLARCQKGSANREKAKLKVARAHRKVRDARRDYLHRASARLVRSADTIVIEDLNVSGLVRNRRLARAISDCGWAEFRRQLEYKCQRYGRQLVVIDRWFPSTKTCSTCGHVLAELELSTRHWMCPSCRTRHDRDVNAAKNILAAGLAVTACGAGVRHSGPPGAAGDETGTPRAQARESPSFSFRVGCSQEAEMLPARTDIR

SEQ ID NO: 54760 - protein, 413 aa, unknown
  TnpB Polypeptide
MVKTLKLMILPTEEDVSELVLMTEQYRRACEFVSGYVFDNGFDLNAYRLQKILYSDVRKKFGLKAQMAVSVFRTVTAKYKTVQEQLRQNPYKYRDENDCWQYIPKTLEWLWKPVHFSRPQADLVRSRDYCFLLKDHKLSLNTLGKRIKVDYMDNCWADYFDGTWTFGTGKIVDIKNNWYFHIPVSKETDPSFSKERVQHVVGIDRGLRFLATTYDENGKCVFKSGQKILSRRQKFMKCRQELQSKHTWSAFRKLKELSGRENRWMSDVNHQISKTLVDTYGENTLFVIEDLTGVSFEASNLNGTARQNMDKRSWAFYQLEQFLTYKAEMHNSKVLKVPAGYTSQRCPKCGRIRHANRHYDTHEYLCDKCGYRSNDDRVGAMNIQFLGTLWMSGNEHPRFDVRKESKEVISSIG

SEQ ID NO: 54761 - protein, 430 aa, Moorea sp.
MYGCQQHLITTTPANRAVIEFICGEANKLTNCAIYYCRQILFKTGKYVKKFELDKTLKTNIHFKAMRSACAQQTLHGVIESFKSYQALAKLYKKGQLTDKPRIPKYRKKGGMAVVSYPARWIKLVDGQLKFTLGKQVKAWFGIDHFLLPMPSNLDFKSIKEFRFFPRNGCFYLEFVYKQPDIKPGQKLGNALGIDPGLNNWLTCVSTTGKSFIIDGKKVKSQNQWYNKQVGKTKKGKSQDYWDDHLAAITEKRNRQMRDNINKAARFVINWCLRHQISTIVFGWNQRNKDRIRIGNKNNQEFVQIPTARLKNRIQQLCGQHGIKFVETEESYTSKASFLDNDFLPTLGAKPEGWKPSGKRVRRGLYRSANNELINADCNGACNILRKVVTQLDVNLAKVNRAALNLPQRYRLDSLSSQYCKRREARFQPA

SEQ ID NO: 54762 - protein, 366 aa, Erysipelotrichaceae sp.
MKITRQYNYPLKPDKHQKEIMMKIFGSVRFLYNHYLDSLKEKKSQYRLAKEIVLEYKIKYPFLEEIDNSILMHVIFQAQDNIKNLHRYKKRRDSFCSFTLSNLYKRPIYIVDEKWVTIAPLGKVKIVYHRRLPSNAKIKKATVFRQAEGKYFISICVESEKNPPFKHLNPQNSIGLDYSSAHFYVDSNGNTADLPHFYRNKEKRIAALDRKIRNSTPGSNNYFKYRQERAKIFARITNQRNDHLHKLSTKLSREYDIICVEDLDLKEIAEKENLGKSTLDNSYAKFVEMLKYKMEEQGKLLLHVNRYYPSSKTCSGCGFVIKELPLDERTWTCPNCHMTMNRDHNAAINIRNKCISNHFGRRVFGL

SEQ ID NO: 54763 - protein, 423 aa, Nostoc sp.
VLHKVVQVRLYPSVEQQIQLAQAFGCARWWWNYALNKSIETYNETGKGLSRAALNAFLPALKKAEDTVWLSDCYSQVLQATTLNLTTAYKNFFAKRAGFPKFKSKFGKQSIQYPQNIKIVDGDLKLPGNIGIVKAKIHRAIEGIIKTVTVSKTPSGKYFASILTEVEEQRGLGQSPSGAKRSENHVISEGKIYGIDLGLKHFAVVTDGEKISKYDNPKHLAKHEFNLKRKQKKLARKVKGSISRNRYKRVVAKVYERVSNSRRDFLHKLSYKLVSDSQAVIVENLNVKGMVRNHKLAKSISDVGWGTFTNFLAYKLERKGTRLVEIDRWFPSSKLCSNCFYQLSELSLDVREWTCPHCDTHHDRDANAAQNIRAEGIRIIKAEGSAVSAVGGEVSPILGRKSKFRHSPVITEAPTSTVLGKLG

SEQ ID NO: 54764 - protein, 378 aa, unknown
  TnpB Polypeptide
MFKAIKVRLYPNKEQEQLINQLLGCYRFVYNYMLALRQQEYKDNNNTLSLYDLTKYFHETLRKDEKYFWIKEQNTKVMHQAIRQMLTAYDNFFKHHKGFPKFKSKKYKQSALFPIGTISRCNTFETKHISLITTLKNIKFRCSSLYFKRLQAYKDKIRSATISKTKSGKYFLSILIDIPQEEYIKFKKTGKSVGIDLGVKDFVITSNEDKFENEHFFKKEEKKLKKLQRQLSKKVKGSNNRNKARIKLAKTFEHITNKKENYIHFVVNELLKMYDTIFMEDLDVEGMIKNRKLSKSIQEVCFYRFKEILQSKALVNNKKVVLIDRYYPSSKICSCCGYKNEDLKLGDRFWTCPECNTKHDRDINAAKNILNEGQRTIK

SEQ ID NO: 54765 - protein, 285 aa, unknown
  TnpB Polypeptide
VPSARRRSILGPLSSRNHRCVQPGGSPAVPEGSSAITDAVFRPVRTGVDVPDPVPLPAAGTSTGVDVGLKDFAVLSTGEKIGHPRDWERHEKRLKRYQRRLVRCRKGSANRAKAKRKAARAHARITDARRDFLHKASTDLVRRFDVIAVEDLNVAGMVRYRSLARAISCTGWGEFRSMLEYKAERYGRTVVTVDRWFPSSKTCSACGHLLAALSLGTRQWTCPGCGTRHDRDINAAQNILAAGLAAGAGNGADACGGGVRRAGATRAQSPAKQEPRRVTAGIPVL

SEQ ID NO: 54766 - protein, 468 aa, Chlamydiae sp.
MHKIEALSNVKLPLDPDWLSADTLDDQSRKCCWAYNYLNEVAHGLRQDFVQTGKAESAKTLYSRRGLRNLLPEIKARHPFLKTVHSSPLKNTALRLSDAVGAHQKSKKGKRKGKLVEWPRFHSWKKNWFSLLYDEPGKGFKVEKDLLTISLGTGEDGKRRYVTIPIKGVQALKGKEIRTLRITKELDVYYAVFTVRASVPERKQLKRVLALDPNHKNFAYGVDTEGRGIEIKAPSWLKKFDHRVDELRSMRDRCCRKSQKIEVLDQEGKPTGKTYWNPSKGWEKRNKTLNRALQKRRDQTKTFLFTLANSVCAEYDLIGIGDYAPHGGGITTKMRRAMNNRSLIGRFKPTLSWVALKSGKLALKYDETGTTRTCYPCGYIKEGGIHPSIRHWRCPSCSSENDRDENAAKHGLQCTFEALCTTGEANAFPVPGSGLFQVTERWAWRVLPSGVVKIRRGKNSDLIAAPGN

SEQ ID NO: 54767 - protein, 356 aa, Megamonas sp.
  misc_feature (31)..(64): Xaa can be any naturally occurring amino acid
MDNQQRSSEKENVQRLFLLREVLSKRLTEEXXXXXXXXXXXXXXXXXXXXXXXXXXXXXXXXXXALKNLDTAYKNFFNRQKVGFPKFKSKKNRYKSYKTNMTNNNIVFLGNKIKLPKIGKIKTRDKYRQIEGRILSATVSQTPSGKYYIALCCTDLPQPEFIKTNKYVGLDLGIKDFVITSDAVKYSNPKYLQKSLTRLAKLQRELSRKTKGSSNWEKARVKVAKLHERIANQRHNLLHQVSCQLIRNYDVICLEDLQVENMMKNHKLARNIADVSWSEFMRQLTYKAKWFGKIIVKIDKFYPSSQLCHVCGYKNTEVKNLNVRKWNCPKCKTHHDRDVNAAINIRNEGLKILNIA

SEQ ID NO: 54768 - protein, 190 aa, unknown
  TnpB Polypeptide
IRSFRRNDARVRGKLASKYGHRRHHRTQHILHNATKLIVADALKHRQAIVLENIEGIRRLYGRGNRQGPRQRYRMNSWSFGEAQRQIEYKARWAGLPVIRLSRRETRGTSVVCHRCGERLQEDRQLRRKLWCASCRGKMDRDVVAAVNVSRRGRLRFDRSRARERLQGGVAEAVKENPTTTDLTEPLIAN

SEQ ID NO: 54769 - protein, 376 aa, unknown
  TnpB Polypeptide
MMRTASIRADQSAALLALRAAYAEACNRLVPVVRAHRLWNRVGLHQKTYRSLRKHTPLGSQMCCNAIFSVCKAYKAQKELGRIQKDQPVPLVRFDRAAVHFDQRTYTIKDNGVSLYTLDGRIALSLVLGEHQKHILSAGKAKEAELIHRKGTWYFNLVVESAEIEPVASDTVMGVDVGENNLAAHSLGKVYGGEHLRDQRDRHLAHRRRLQSNGSQSARQKLRQVSGKEQRRVRHINHETSKAIVQDAVQAGIGRITMEDLTHIRSRIKAGKRVRARLHRWAWRQLQSFVAYKAKAVGIGVGYVNPAYTSQICAACGVLGKRHKHHFVCEHCGLRAHSDLNASRNLAQIGSGAPLSRAAVNTPDVAIGSVSNHALV

SEQ ID NO: 54770 - protein, 282 aa, unknown
  TnpB Polypeptide
VSRSQIALNECLRIPLPSQQAGGVKRAIGWSVFQQTFPQITIPTLLRLFHGTPQSHLQALSQFASITLRMSEADCARKRMEDYHRGIDFGLTEWATFDDGRKIANPRWVRTELPRLADLQRQQARKRKGSQRPLIMFQDKGDKLVTSTSDRQAIADMVDLAKAKQWRSLKLSGSPEFRRESDQRRAVLLPQEVKAISPDIRKTRPKVSCEGVPCVSATYWRSQDSLSSAHSATSTQVSAPHSTAHKAMRIISRRSCRCAGPVRGSGRTENASFSVIATLNKN

SEQ ID NO: 54771 - protein, 380 aa, Bacillus sp.
VETMLVNKAYKFRIYPTKEQETLITKTIGCCRFVFNRFLGQWNDTYKETGKGLTYNACSAELTQMKKEFVWLKEVDSIALQSSLKNLADSYTRFFKKQNKAPRFKSKKNKVQSYTTKETNNNIAIVSNKIKFPKLGLVRFAKSQEVKGRILNATVRRNPSGRYFVSILAETEVQPLKKTGSSIGIDLGITDFAIFSDGRKVDNNKFTSKMKKKLQREQRKLSRRALSAKNNGIDLLDAKNYQKQKRKVARLHERVMNQRDDFLNKLSTDIIKNHDMICIEDLNTKGMLRNHKLAKSISDVSWSAFVSKLEYKAKWYGKTIVKISRWFPSSQICSDCGHQDSKKSLEIRDWACPICHAHHDRDINASKNILAEGLRTLALA

SEQ ID NO: 54772 - protein, 450 aa, Ruminococcaceae sp.
MIFVTSYAVEIKHPGDKFWETVKEYRAAEAFFADVANKEWDKIKDATSHDKLLIVESLTHKTKNRAAVPYDFDISFFNMPSYLRRAAIMDGVGRVSSYRSNLENWDASSKKGNPPVLSKCADAMPCFYRGNTYNDTEDPTILEVKLYNGKAWDWQKIKVKKTDVQYIKAHCAQKEKSAPTLEYKHGKMFLRFAFTEKIKLYDTPVIEQTVCAVDLGINTGATCSILRADGTILARKFIDFPCDKDYLDKALGRVKRHSRENSPVNSGAQWKFAKRINEQMSYKISAAIVDFAVLYSCDAIIFEYLDAKGKKRGRNKEKLAWWRHGAIQRAAEIKAHQNAIHVYHVNAWNTSRLAFDGSGSVIRGKKAGFKANTMCKFQNGKTYNCDLNASYNIGARYFVREILKTLPAKVRSQVEAKVPGCGRRTQCVYATLMELHTALLLMDKTKRAAA

SEQ ID NO: 54773 - protein, 363 aa, unknown
  TnpB Polypeptide
MQKGVKFRAYPNKEQQNLINQTFGCCRLIYNKGLTMRNDGYENGQKIGYNQTSAMLTELKKSDDFAFLKDVDSIALQQSLKDLDRGFKNFFEKRARHPQFKSKHNNYQSYRTINQGDNIRIVGKYIKLPKLGYVKIKQSMEVGHINNVTIKRTPTGKYFVIVNIDFEPEFRPNAGCMIGIDVGIKDFYCDSNGNVVNNPKYLEKSMRKLIREQRRLSRKHKGSNNRNKQRIKVAKVHEKITNQRNDFLQKQSTMLLSENQTICIEDLNVKGMLRNHKLSKSIASVSWSKFFTMLEYKATWYGNDIIKVPTMYPSSQTCCCCGYKNPLIKNLSVRSWECPNCHTVHDRDINASINILRKGLSIA

SEQ ID NO: 54774 - protein, 399 aa, unknown
  TnpB Polypeptide
MLIRKAFLFRLRFKPSDDVTKLRQYSGCCRFVWNKALALQKKRLDRGKYCLSYPEMATELLKWKKKYPFLKEVPSQTLQQRLMDLDRAIRDAFDKSNPKKFPVFKKKFRSRESFRFPQGFKIENRRIFLPKFGWARFFKSREIEGTPKNVTVSLRGDHWYISVQTEMDIPVPVHSSKSAVGCDFGTVRLVTLSDGSYTMPVNAYKEHRRELANAQRKLARMVKGSSNRQKCLRSMRNIHIQIRDKRLDHLQKITHDLSKNHALVALEDLNVQNMTRSARGTKDAPGRNVRQKSGLNRAILDQGWGTFRRLIEYKELWRGGMAVFVNPAYTSQECSVCGHISSENRPSQELFYCQRCGHTSNADENAARVVLTRVGHTPYACELNGATMPSEAGTYRVPS

SEQ ID NO: 54775 - protein, 530 aa, Verrucomicrobiales sp.
LDELQLFSLQHFIPTFNIYERISLFKRTQACDLAATQMLTTYKNNVFMNFFKRLLTTLKVCFPGDVRLKTTVRFTLHKKYITFLCSDPEIPKILPEELILFQDFHSEFMTYLQLHHGKPLHYNIKAHAESYQPLLIWLAHKLEAAGGRPFQLLPLRTTCIPQHLLLDTKCMIDLLGQGGEVGYANSIEGNKSKFWNMYFDVYENRKLRVRGYIFSGTAQTNGFNITLLFTKSTPGMKLKPKIKQKVQQELNLVGCDPNKYDLLYMTDGAHTLRYSKGRRRHEAYGQRSEEIILKERNRQGIVAIENTLSNHNAKTTGLNAYVSYLTKKHIINDQVTDFYENMLFRKMAWRRHVQSEWSDMRLINEIKSTFGACKIGFGNWSGSNKHLKRLLCKNFSLETIDEYNTSAKCHNCLGDTETFLKVPKPRACRQCDTLGKTLCRTNCRWGQVKVHGLLRCKNGCGTLWNRDLNAALNIRRCLEWQENGEMAFRDCGKKRRTINTFSNLTVTELAELGLECLDISDFDIKTLHNV

SEQ ID NO: 54776 - protein, 281 aa, Escherichia sp.
MKRLQAFKFQLRPNGKQEREMRRFAGACRFVFNRALALQNENHEAGNKYISYAKMTSWLVEWKNATETQWLKDSPSQPLQQSLKDLERAYKNFFQKRAAFPRFKKRGQHDAFRYPQGVKLDQENSRIFLPKLGWMRYRNSRQVTGVVKNVTVSQSCGKWYISIQTESEVSTPVHPSALMVGLDAGVAKLATLSDGTVFEPVNSFHKNQKKLARLQRQLSRKVKFSNNWQKQKRKIQRLHSRIANIRRDYLHKVTTTISKNHAMIVIEDLKVSNMSKSASGT

SEQ ID NO: 54777 - protein, 233 aa, Lachnospiraceae sp.
MRRAGNLPAGRYRCSGSARWTWGSIRTRCAASWRRTELSARGSSSTSRMKKTVCGRAGSLWKYAVRCNEELSKKTAAAIVRFAQENNADVIVFEHLDMQGKIRGKRKMRLHIWKKRGVQKICTHMAHRKGIRVSRVCAWKTSALAYDGSGKVERDPGNHSLCTFRNGKRYNCDLSASYNIGARYFIRELTKPMPATAWSVLEAEVPAVRRRSSCVHADLVMLSAVMRENGWTA

SEQ ID NO: 54778 - protein, 259 aa, Brasilonema sp.
MSPIKIPVKPGLKYDDLSEVRIVPKTGYFVIEIVSQVAENQEFFCSLNPKLAASIDIGLDNLATIVFNDPTIQPLAINGKPLKSVNQFYNKQLAKFQGFLPNGRGTFKRIQNLVRKRNNFVDSYLHQSTKMIVDEMLEKGVTQVAIGKNLQWKTSLHIGKRNNQHFTQIPHAKFIEVLTYKLEKVGITVKVGEESYTSKASLSCWDTIPTFDPNNKVKHQFSGKRVQHAWYVSKDGLKIHADVNGAFNIARKGATYQVA

SEQ ID NO: 54779 - protein, 402 aa, unknown
  TnpB Polypeptide
MRPLLKAFKTEIAPTEEQKEKIIRSIGIVRFLYNQYIAYNKKLYRMYQHGLLDSHQKYFVSANDFDKYVNHKLKIELPWINECGSKARKKALVNAETAFKKFFNGLAGFPRFKKKSNQDVKLYFPKNNKGDWTIWRHKLMIPTLKQVRLKEFGYLPVGAVVTNGTVSYVAGRFYVSLVVDIDEKSKYNKDLEASYHKVTTGIGIDLGIKNLAIVSNGKAFNNINKSSRIKRLEKRLRREQRRLSHKYESKKKKGGKIATVSANIEKQKLKVQKLHHRINEIREDYENKVIHEIVKQKPSFITVEDLNVKGMMKNRHLAKAVATQRFNYLLTKLKRKAEIIGIEMRVVDRFYPSSKTCHFCGHIHKGLKLKDRVYICPECGYTQDRDFNASLNLRDAKEYRIA

SEQ ID NO: 54780 - protein, 525 aa, Shigella sp.
  misc_feature (451)..(524): Xaa can be any naturally occurring amino acid
VKRLQAFKFQLRPGGQQEREMRRFAGACRFVFNRALARQNENHEAGNKYIPYGKMASWLVEWKNATETQWLKDAPSQPLQQSLKDLERAYKNFFQNRAAFPRFKKRGQNDVFRYPQGVKLDQENSRIFLPKLGWMRYRNSRQVTGVVKNVTVSQSCGKWYISIQTESEVSTPVHPSASMVGLDAGVAKLATLSDGTVFEPVNSFQKNQKKLARLQRQLSRKVKFSNNWQKQKRKIQRLHSCIANIRRDYLHKVTTTVSKNHAMIVIEDLKVSNMSKSAAGTVSQPGRNVRAKSGLNRSILDQGWYEMHRQLEYKQLWRGGQVLAVPPAYTSQRCAYCGHTAKENRLSQSKFRCQVCGYTANADVNGARNILAAGHAVLACGEMVQSGRPLKQEPTEMIQATARTQNQSRPASIHLPLPEMPPPPRRAHAHAHYAAPDTNCRQWYSTAPDLXXXXXXXXXXXXXXXXXXXXXXXXXXXXXXXXXXXXXXXXXXXXXXXXXXXXXXXXXXXXXXXXXXXXXXXXXXK

SEQ ID NO: 54781 - protein, 245 aa, unknown
  TnpB Polypeptide
VVYKKPIPKKHRLRKPERIASIDLGVNNLATVTSNVFSPVIINGKPLKSINQFSNKEIAKAQSLLPKDVYTSKRIAFLYGKRYLKIQDYLHKAGKQLVNYLVSQTIDLLIIGKNHGWKQNTRLSKVNNQKFVQIPFSRFAQILEYLCEEQGINVVYQEESYTSKASFLNNDEIPVFGEPTDMAFSGKRVQRGLYKTVNGDMINADVNGSYNIMKKYLENNAAWDDQKWSDCVEVCSTPRVMSISY

SEQ ID NO: 54782 - protein, 410 aa, unknown
  TnpB Polypeptide
MRLLRAYKTELDPNNALRTLLLQHAGARRWAYNWGLRRKIEEYERTGKSPSAQALHRELNGLKKTDPAEGGVPWMYGVSKCAPQEALRDLDEAFVNFFRRVKKGEKPGFPRFKSKKRKIGGFRLTGTIKVFERHVQLPRLGRIRLKERGYLPFDDPAVHLLSATVTEQAGRWFVSLQAEADVEKVLPKETIGGVDVGIRALATLSDGEKFENPRTLAGAERKLKRLQRAVSRKKKGSKNRRKAVRKLARVHARVANIRKNALHEISSAIAKRFGIVGMEDLNAEGMGQNRCLAKALKDAAFAELRRQVEYKTAWEGGRVVLADRFYPSSKRCSRCKVVKEHLELSERIFTCDSCGLEIDRDLNAALNLEDVAASETETQNACGGDLSPRMGRQSPRKQEPNTESGHVRFG

SEQ ID NO: 54783 - protein, 341 aa, Halobacterium sp.
LRRSTVGSKSARTAILTQIHPVTEKRGDNHPRSTVTWKQNGIKHDSKHNQLRLSKGFNLKNHRSDFILCEYETRPDVAVENIQQVRAVWNGDRWELHLVCKVEIPVEDSPGDRTAGIDLGISNYLVIAYDDGDAELYPGNVLKQDKHYFTRNEYDTEGKNGSSRRALRARQKLSRRKDHFLHALAKQIVEQCIDRGIGRIAIGDLSEIREDKNGDSRNWGRSRNKKLHGWEFERFTRLLEYKAEEHGILVDRVSERDTSKTCSCCGQKRDANRVERGLYACESCGATMNADVNGAVNIRRKITQNPPTGDMSNGRLARPAVHLFNQTSGRFAPIEQVSCEP

SEQ ID NO: 54784 - protein, 277 aa, Oscillatoriales sp.
VSFDFRYHFLSCVKRLLGVYSKSNTLVERSVRTAYQYKLRPTKKQAAEIDRWLSMLCAQYNYLLADRFNWFEQNRSPINSCPLVCHLPQLRDNPDYYSQKKTLPQLKKTHPWYSEVYSQVLQDVVKRVKVTFDRFLNGDRNGKRSGKPRFKPRSRYRTLTYPQLKEGCLQGSLINLPMLGKIQTILHRSIPDGFKIKTASVTKKADGYYLTLSLEDKTVPEIKPDFDPESITGIDVGLKDFLTTSEGETVAIPQHYRKAQKTFEGHSKTSITQEERE

SEQ ID NO: 54785 - protein, 385 aa, unknown
  TnpB Polypeptide
MIKVFAFKLYDNPKKKKALLQQILIAAEIYNHCIALHKKYYQLTGQYLSQAQLKKHITKLKRRPQYAHWKKLGSQAIQDIVERIDRAYKLFFKATKKKSKGLSRRVSPPNFKKSRKYKSFTLKQAGYELLGENKIRIGDKVYTYWNSREIQGKIKTVTVKRDALGDIHLYIACEVPETSQNRIMTGKSAGCDFGLKTFLTLSDGTTEQSPLFYNKGLKKLRTASKDLSSKAKGSNNRERARRDVARKHKKVVNQRKDYLFKTAQKLTKEYDNLFFEDLSLQGMQKLWGRKVSDLSQGEFLKTVQYYGKQNGSKVNLIDRFYPSSKTCHNCQYVKEGLALADRTWQCPDCKMVHDRDLNAAINIKNVGASTFGLGDVRPTQLAISA

SEQ ID NO: 54786 - protein, 343 aa, Okeania sp.
MQPDTKANWKAIKGGILNDLPEWSKPVPYQIKSIAIRDACIAVREAKVKYSKTGQVQQVKFKSRKNPIQSCYIPKSAVSSKGIYHTKLGQIRFSEPIPEAFGDGRIVVQRGQYYLCLSVDLPKYNLENQGRVVALDPGVRNFLTLFSENSFGWIGSGDIGKIQRLCYHLDDLISRLTKAKSKTKQRMKKAANRMRLKIRNLPTELHHKVALFLVPLSEELRFQNFDVILLPTFEVSQMTIKSSRKLRSKSVRQMLNWAHYRFELFLKHKAAEYHKIVLDVSEAYTSKTVSWTGEMLNNLGGKKVVTGNDGFRLDRDLKVPRGILIKSVVEKFSTALGDTPSAG

SEQ ID NO: 54787 - protein, 198 aa, Okeania sp.
MPIPQLRDNPDYYSQKRDLVNTKDKFPEYNLIHSQVLQDWIKRVKLAFDRWFKADKNGQKLGKPRFKGKGRYRSLTYPQIKQNCIEENQINLPKIGKVKLIQHRPLPDDFQIKTVTISRKADGYYVTLSLEDKSVPALTSEVEPTLKNTLGIDMGLKEFLVTRVGESVPIPHKYRKSQKRLKTLQKRLSRKKKEVKGG

SEQ ID NO: 54788 - protein, 180 aa, Okeania sp.
MVEKAYKFRFYPTPDQENLLRRTLGCVRLVYNKALATRTQAWYEHKQRVGYKETSAMLTNWKKQEDLDFLSEVSCVPLQQGLRHLQSAFTNFFSGRAKYPNFKKKRNGGSAEFTKSAFKWKDGQVYLAKSAEPLPIRWSRQLPPGCVPSTITVKLDPSSRWSISLRVNDTRNLGVGEARV

SEQ ID NO: 54789 - protein, 164 aa, Okeania sp.
LTRGIASLVTTSDGKKIANPKNINKLHKKLRLAGKYLSRKTKGSNNYQKARLKVARIHAKIKDSRGDYTHKLTTQLIRENQTVVVEDLAVKNMVKNHNPPPSPPGRGARGVGSDANWSELVRQLEYKAQWYGRELIKIDRYFPSASFRGAFLSECFANANKALF

SEQ ID NO: 54790 - protein, 345 aa, Okeania sp.
MDFESIHLKSLRIRVYPEKHLNQIWKKWLAASRYCFNQAIAKMRKHGLISKYDLRKVVLNNESLPDWIKESPYHLKVNAIYDANTAFKASRKSGTKQPSCGKFRSIRDRIQSIKFRVEDFKKGTWLPSVTKGLKLFASELIPSINVEYQQKQKDGTYKVCVREQSWNAETQLIYDKKRWFALFPVEFKSEKSSSLSIIALDPGVRSFLTGFDGEKFIDIGNRDITRIFRLGQHIDKLISGKTALKGRQNKYERQRVSKKINRLFIRIRNLIDEVHKKVAKWLTTEYRVIFLPTFESSQMVAKSGKRNANLTRASVRQMLNWAQITFQTNSEVSWFKTRRNRNRCN

SEQ ID NO: 54791 - protein, 286 aa, Okeania sp.
MPNNLDFNQIKEYRFVPRNNCFYLEFVYEQSKPETGNPIAENVLGIDPGLSNWLTCVSNVGKAFIVDGKKVKSQNQWYNKQLAQIKSGKSADYWDDNLAAITEKRNRQMRDNVNKAARFIINWCIEHQVGTVVFGWNQRQKDSINIGKKNNQQFVQIPTAKLKTRIAELSEQYGIKFVETEESYTSKASFLDDDFLPTFGEKPVCVAFRRKRWKASGKRVNRGLYHSAKGQVINADCNGAANIIKKLATQLSMDLAKVGRGVLMLPQRYKLDCLTKKYRKQCVAWQ

SEQ ID NO: 54792 - protein, 463 aa, unknown
  TnpB Polypeptide
LRSQGRGGGDSQPGRGHHVRGRPGQGCSRDHHGLFRPSLRRPLTQEPEAAGGHPHRCRKVTDVLIAHRIALDPNHVQATYFARAAGTARFAWNWALGEWQRQHQARRADPSLPAPSEARLRRQLNSIKREQFPWMYDVTKCAAQEAIIDLGATFDSFFAKRGRYPRFKKKGGRESFCAANEAGAFRADGRRLRLPVVGWVRMREAVRFSGTLKRVSVSREAQRWYASILVDTDDVQPVEQPRDAVGVDLGVTTLATLSDGATIPGPKAHQRLLQRLRRCSRALSRKRKGSGNRRKAKARLARLHARVANIRRDATHKATTMLVRTYRRIGIEDLNVQGMAGNRHLARSIMDGGFFEFRRQLTYKAAWYGATLVVADRWFPSSKTCSCCGSVNAGLALSQRTFTCGSCNYEAGRDHNAARNLQHLAASSAVSACGEERSGAARKPRVKRASGKQEPNNVAAAQL

SEQ ID NO: 54793 - protein, 468 aa, unknown
  TnpB Polypeptide
MLHSECNPGKIQVLEALHAEYVVYVQICVQTMLEARRLNLPRSEKQNFFPRAQKLTSQIEKNARDHAIQIVSTWAKGIYIRKLKTHIRLAFKEGSFDEDFRKQLYTIGKYSVYEPRGTISQEAIDLYWIWLNNPKISGNTPSISNHIPMRMSENTCSLEDPKETTHADLWLKISTLIPRKLAWLPLVGNPYIKKASDVSKGIHARKDRKGRWRFEAVDTKDWLILETDPGLPRIGVDVGLNIVAATSSGHTFGADLKSKFNRLYNTVRAVRANRQRQGLKENSPRLDRLESKLSGLTKSITGRVSNELLRAYPESVFVLEDLDLRGCRGQKRFCYRALAHALESKAPTEKVNPAYSSQTCPSCGHVSRSNRAGIDFLCRQCGRRSHADIVGGINLLGRSESKQIGLDDHPSEVKEVLVRLYWDRRNPNQDCPQDFLNNYAPLPYGRRLNTRASPRKGQAGIAFNQVAA

SEQ ID NO: 54794 - protein, 391 aa, Pseudoalteromonas sp.
MFILEPLNEGRALLTFYEKASKKPARMFSIKLDYEPDQLAKQFRISRQGRRFYLSGSYNDGVESATNEELLKGFVAQSLSDDELLSQITGIDRGVKLPIATSDGLRKAYSPETTERLKRLVQKKARYQRILARKKRQNNNKNTRRVESNEQQKLADKIANFDAKTARIRHDFLHQTSKEVVLSAKSIIALEDLKLKNMTKRAKPKRGKHGRGYARNNANAKSSLNRSLLNVALGKLGDFIKYKANDYGKAVVEVSPAGTSQTCHMCGEKNTIRPQQDTLICLNGCGTFHADDNASIVVAQRAVPYIQESTFAQKAKTRKKTAVRKKAVTPPLGSELASTEKSGELETASTDVSLVCSRTQADVRPSSTASLVQRNSLTTMDASVTGVLETR

SEQ ID NO: 54795 - protein, 379 aa, unknown
  TnpB Polypeptide
MIKSYKIRLYPTKEQEALMWKHIGACRYIWNYMLAYQQEQYVNGEKHLSAFDMIKLLTPLKKDGEHEWLCEVSNASLGVVCRDLDKAYKGFFKKIARFPKFKSRKRSKKTYPVKDDRIYFINSKLMHIEKVGKIKYKTDFDLPQGRGHKFTNPRISNVNGKWMLSFGMECENQAPVLTDISMGIDLGVKDLAIAEFNGTKITYRNINKTSKMKRLEKQRRHLERSISRKYEQNRRGNTFVKTNNIMRSEERLKKMYARMTNIRTNYIHQTTHDLVSLLPKRVVMEDLNVTGMMKNRHLSKAIQEQCFGEFIRQMQYKCEWNGIEFVQVGRFYPSSKTCSCCGAIKRDLRLRDRVYVCAECGAEIDRDYNAAINLSRYVA

SEQ ID NO: 54796 - protein, 680 aa, Mycobacterium sp.
ITSVASTPADSPPSRSDDVVPRRRGKSKGPMYKYEGPVAVIRLELDLSDSVVRRRVQSQWSAVFQLRRALQRDAAARCRAYWAAHRERSADPKAARERLGLSRKALEAAARAHIEASGWMRDHLTKAVGQHVADEVWEAIDRHLFTDSAGHRHGAPKIGSWWRFNKIPGRARSYTKDIPIWETWRLVGTLEGHLRDFRHPDLTTTVTNATDAATEPAGSSILAQPRKMPIPSHPRGSWRTHTGPLTVVFTGLPAGDLVMPVRLPQGAGQWAHLRHFLADPAVWHKIDMVRVRDRKAPGGWRYYAHLLTRTTGYVSPGNRARRATIPSDRRAGLDVNVSNLTLASFSQVQPQQLIVSAISLTVRQQQAAKRAAKRARDRQRALDRSRRNTNADQYGPSARQRKRGQRRAAKGLQVKTVANPGGARTARSDGVPIHAYSRDTLSTRYWRIRTDHAAETRATRQAKQARARHIAARIVTLHGNYITVEQATITTWARLWGKRIALFSPGMLAAALAAECDATGGRLDRAATRTTAMSQHCLCGQRVNKTLAQRIHRCFHCGLHADRDVVSAALAACVEFGDAHNPRTARVNYRLAHALKAGLASQQEWEGSVNRYQPPTPIDGVGSARSGSHHTVASAERAALALPPNRPGPPGRRGSGRKHPASNWLGGAAGPTTTGQLLPK

SEQ ID NO: 54797 - protein, 542 aa, unknown
  TnpB Polypeptide
MRKKKDKDKKPNLRSILYTSKYFNAGKGNEIKKLLENMSNYKNMLSKYVYENRNLLLTSDGIKTLKANYNIVKDDVILAWNIQKEHQMLVDRYADALRKHMKNIKVRIQDKMVIAMYSKNGKRHKKGDTKYFEIKFRTTKLTKLIKYLVYLDFSKEIEPQITNGAVKDLLNYYKTKPYLDRILNLAKDIQNRLLSKIKFIDFSNDYSMRLTSTKGINNARIEIDNTNSLYKYWFIFKMKNGKEYRLPLEINDEYHNKEIIGKEFILYLSLKKNKINISTTYEGEELSFKPFNKAVGMDVNIKHNFAKLSDDKEIDYDRDFFKSIVKDLNKLDKIGYQNLSEKELKKLQKLYRRLDWYVELLIHNILDYCEQNGITDLVVEDLHLKDKSNIINEEFNMKYSRLVKLLHLSNVKNMLLRQGEKRGIRVHIVHSEWTSQGCPECGNINPNNRTTQEIFKCTNCGYEDNADHVGSVNVLDRFNLFHWLGVQANKLYSVDKYGRISPKKVSRYYLRNILNQYYEARGFLHHPVLPSKVNNVRIVVKV

SEQ ID NO: 54798 - protein, 393 aa, unknown
  TnpB Polypeptide
MRAYKTEINPNKAQIDLIHRTFGCTRYIYNRFVFENLVSLASGGGFVSAYEYSKRVNSDPNTPSWLKEVPSKAVKQALIYADRAFRDYFAKRKGKPRFKRKGFDNSFYLTGTLKVERHRIFVPVLKWVRLKEFGYIPRNISSVTISMKNGRYYISCLCRDEKDERIPLSNYSMGIDFGLKSQFITEDAVVPSINRTMRMKKLEKRLKREQRRLSRKYDANMIDKVYYQSGTKKGKLKSYKWLKPLPECKNIQKQKLKIARLHDQITRIRTDYNRKALHSLVMGRKPSSITIEDLAVRNLMKNRHLSSAIMKAQWYQSRQYLENLCKKLGIELRLANRFYPSTQLCSGCGFKNKGLKLSERHWVCPNCNSEHDRDKNAATNLAQCRNYTVLTSV

SEQ ID NO: 54799 - protein, 492 aa, unknown
  TnpB Polypeptide
MSQLVSEVQGISAYATYVVRNDTALGSELSQVTATQPTVAGRRAGVIMPDFLVTGRAGKSRKECLVRHSVVTRYRSWRERVEAASGFSSKYVSQGWARTVNASAPSYGEDYINLGAVDKQYAVIENNPVVDGEIVLKMVICGQWYRLIFSFDSTRFPEGKVTLPLIKIENNQPVFIFTVVTDNPVAQFSDKYVLGVDVGINNYATVVVRNTKTGQIVYQSTLSQRVHSLWNSVKASEQQVRFLKKKASRLLYQRQARMSALDEAQLHREAASRKKRELAIVAAQEIAYLSHFYDNAVVAVEDLGWVSNTMQNGWWNRGAFTQWLTHYVSQNGGWVISVNAVNTSQVCHLCDGKVTHPVHEISHCPTHGKMDRDVNAAANIAARAVGKVKKARRTRSKNRKLQTQVPCKTPPARASLKYPGRDRTKSVATPKRKNHHRISREVNLPPRPARVQTTHLMTTVLADWDTYGVAETLKAALKQGNTTRRCRLGNLI

SEQ ID NO: 54800 - protein, 393 aa, unknown
  TnpB Polypeptide
MRAYKTEINPTESQIELIHKTFGCTRYVYNRFVFDNLENLASGGRFVSAFDYSKRINNDPSTPSWLKEVPSKAVKQALIYADRAFRDYFSKRGGKPRFKKKGTSESFYLIGTIKVERHRIFVPVLKWLRLKEFGYIPEKISSVTISMKNGRYYISCLCKDEQDERIPLSDYTMGIDFGLKNQFITEDKVIPSINHSSRIRKLEQRLRREQRKLSRKYEANMCDKVYYRTGSKKGQLKSYKWLKPLSECKNIQKQKLKTARIHERLTRIRTEYNRKALRSLVLERKPSSITIEDLAVSNLMKNRHLSSAIAKAQWYQSRLYLENLCKKLGIELRLVDRFYPSSKLCSDCGFKHKDLKLNERSWTCPNCGSKHDRDINAAINLRQCKQYTALTPV

SEQ ID NO: 54801 - protein, 377 aa, unknown
  TnpB Polypeptide
MEKAYKLRLYPNDEQKVLIYKTLGCARFVYNYMLEARKDAYARDKTSLRKYDCIKMLPGLKEQNPWLKEVDSTALQASVENLDAAYQNFFRRLKAYKKNPKGPKPGYPVFKKKHGRKASYTAKMNISVSDDAVKLPKLGWIPAKISTPVRGRILRATVSLTGSDKFFVSLCCTDVEIPQLPSTGAVVGLDVGIKDLVIASDGQKFENPKWLGKAEKKLSKLQRQLSRKSKGSSNRNKARIRLARQHEKVANQRQDYLHKLTTQLVRNYDVICVESLNVSGMMKNHHLAKAIADCSWRELCRQLKYKAEWQHKALVEVGTFFPSSQLCGTCGFKNPEVKDLSVREWVCPCCGAHHDRDVNAAQNILKEGLRLLTQPAA

SEQ ID NO: 54802 - protein, 435 aa, unknown
  TnpB Polypeptide
MQQETKQEVNKMQLVEQHVIDRKDPRYSVIDEAAFKSKNLYNAALYEVRQAFIHESKYLNYSEMDKRMQSHEAYKALPAKVSQQILMVLDRNWKSFFEALEAYQEDPSKFLRRPKLPKYKHKTEGRNILVYTIQALSKTGLKRGLIQPSMLAIEVQTKHKDIDQVRIVPRKGFYVVEVVYGKEVKQAEVNPAYYAGIDIGMNNLVALTSNKPGFVPVVVNGRPVKSTNQFYNKRKAELQKQLGHTGTTRRMERMTNKRNRRIDHYMHTASKRIVNLLVKEGIGVLVIGKNDAWKQEINLGKRTNQNFVQIPHARFIAMLTYKAELVGIRVQITEESYTSQASFLDGDPLPVRKSDDETKYTFSGKRVARGLYRASNGREINADVNGAYNIIRKVAPDAFQPAEGVEDGKGMLAFLVVHPVRVVIPRTKPKQASGQ

SEQ ID NO: 54803 - protein, 375 aa, unknown
  TnpB Polypeptide
MEKYNMGFKFRIYPNNTQQQLINRTLGCCRFVYNHFLAIRRDEWKVNRNSLTYVKTSRLLTDLKNRESTSWLKEADSYALQQSLRDLDRAYQNFFKKRAGYPRFKSKHSHNQSYRTTNIRGTGIRIVDKKIKLPKIGFVKIKQSRTFEGRILNATVSHTASGKYFVSLCVETDKEKLVSSNNGGKIGIDVGLKYFYSDSNGNTVANPRVLKKLSKKLAREQKRFSRKMPRSRNREKARIHVAKVYERIANIRKDFLNKLSTRLVSENQTIAVEHLDVQGMLKNRRLAKSISDVSWSEFFRQLEYKTELHGGELLKVDTFYPSSQICSHCGYQNTKAKNLGVRKWTCPKCGAHHDRDINAAKNILRKALEYKQVDW

SEQ ID NO: 54804 - protein, 304 aa, Clostridioides sp.
  misc_feature (281)..(281): Xaa can be any naturally occurring amino acid
VVVVEKAYKFRMYPNKKQQELINKTFGCCRFVYNKYLAKRIDVYKNNKETFTYKQCSSDLTNLKKELNWLKEPDKFSLQNALKDLDNAYKKFFKEKAGFPKFKSKKINRFSYKTNFTNGNIMYCGQHIKLPKLGMVKIRDKQVPKGRILNATISKEPSGRYYVSLCCTDVDIEVFENTNNQIGLDLGIKEFCISSCGEFIENPKYLKKSLKKLAKLQRELSRKTIGSLNRNKARLKVARLQEHIANQRNDFLQKLSTKLIKENDIICIEDLQVKNMIKNRXEYLMLLYLKNQVVDIMYHYAVLM

SEQ ID NO: 54805 - protein, 478 aa, unknown
  TnpB Polypeptide
LPSTPTQKSSAKSEEDSISEEKSFKPYWNESCKEVSDALLWLTKIGLPDSDLTTFNGSVTTTGVKSWYSTRQTSVQKASLLKTYLPSFTASVLNSTASESTSLRCRKIRIYPSPELNKIWKHWNAACRYVYNQAVDYQQENGAIGKLKLRDIIMQSNLPEWVKDTPCHIKQNAIFDANRAYKASKDCKFRSCRAPRQTIKFNDSNFSQGTWYPRLTKGLTFIASESIPQECDQATQLIKCKDRWLAVFPESVPIAASKSDKVIALDPGVRTFLTGFDGSKFLEFGAGDMGRITRMCQYLDDLISRAAKSKNRHQRQKMRSAAGRMRTKIQDLVNEVHKQVSCYLTQNYRVIFLPTFETSQMVAKVKRKIRSKTARAMLTWAHYRFKLFLKQAAYRRGCIVIDVTEEYTSKTCTRCGHVHTKLGGSKKFKCPECRFEIPRDFNGAFGILLKALSDTTFTISDDGVAIVALPDDMSCCAA

SEQ ID NO: 54806 - protein, 519 aa, unknown
  TnpB Polypeptide
MFVSLQFKLELKKEDKEKLIKLMRKQSSAIRVAYNMLKELEKEKTKNLHTQIYQRLRHLFPDLPTRYIDSAIYKAKQYPTDKPVVFGGKRLFEKLCKNHLTGKTRERLKKQWRELRQGTLISIGSKAEKGNRLMRFADLNGQLCLRITTGNKEFIYAKVLREPSNSKDKWKTFMLMLLESWQTKDYFPYTVELKLRDGKVYGSVSFNLPTPDVKYTKESGVIAIDTNASPIHLAIAEVSKTGELLSYQAISLHHLLGLSKNAKDHQEWILANKIVDLAIEKNKAIAIENLKKLNRGTRGDGKAKLRKILHQWNAKKLLQKIKRVAKLKGVEVIEMNPAYTSVIGMLKYAPQLNIDKDIAGAYVIGRRALGFKEDMPENYEKLLKDKVYLEFALKKYEEREEKLKELIKKESNEYKRKALESELKIVENSKTLLTNLLQSLQGEPSSCEGANGRNPKQGETEKVSQVVWLVLKVALLFPILGRVLPRDLSPLKPVLVEGVWDRVRYSKGLVPLEAGGTSQ

SEQ ID NO: 54807 - protein, 240 aa, unknown
  TnpB Polypeptide
MDCHEKTQRASRRFCLKSVTVSMEPSGKYFASLLYEGYSCENQAAESDYSTAKILGIDYAMQGMAVFSEKIETEEAGFFRKNEKRLAREQRKLSRCVRGSHNYELQKKKVARCHEKIRNQRRDYLHKLSRKIADNYDAVAVEDIDMKAMGQCLHFGKSVQDNGYGMFREMLDYKLAWKGKKMVKVDRFFPSSKKCCKCGRIKKELKLSERVYRCACGNEMDRDRNAAINIREEARRLLTA

SEQ ID NO: 54808 - protein, 382 aa, Fibrobacteria sp.
MIRAHKIRLDINNRQSTMLYRTCGSNRYAYNWMLNRSKELYEQGEKFDKLKLKREFNFHKKELLWMKEVNAHAVSNDANERVANSFTNFFKKQNRFPRFHSKKLGVGSFSLPGSEIKYEDQKVYICKLGWLRLREAIRFNYTKIYRITVSNKAGKWYISFTLEIDDNRTCENQTSSVGIDLGIKKCITCSDGTVIDNPRILKHYLNRLRKLNKQLSRRSKGSNNWWKSVYALRKCYERVSDIRKDFIHKFTTAITRKHGIICLEDLNVNGMVKNHKLAKHILDVAFGEIERQFMYKASEIRYVDRFYPSSKTCSSCGSVKDDLKLSDRTYECSICGLTLDRDLNASINIRNNAVSSTVTACGEFGDVMPSMKQELNSKSVDA

SEQ ID NO: 54809 - protein, 397 aa, Acidobacteria sp.
VLSHRIALVPTARQEVLLRQAVGVSRFAYNWALAEWQRQYQGGEKPSEAALRRQLDSIKRQQFPWMLLIPKSVPQQAIKNCGAAFRRYFQKQSRCPKFKKKGVRDSARLDNGPGTFKFDGKRVRLPVIGWVKLREELRFSGKALSTTVRRVEDRWFVCVPVEVEMPEPVRESQAAVGIDLGVSTAATLSSGEKLAGPKALGVHLERRQRFSRWHSRKQKGSSNRRKSALRVACLHARIANVRQDWLHQTTTRLVRQFGVLGIEDLNVRGMMASEKLARRIADIGFHEFRCQLEYKANLYGAELVTASRWFPSSKMCCECGVIAEELPLSLREWTCACGTFHERDINAARNLRRYALDRASCARINACGEEGSGAGPTDSVKPASLKQESAMSYLGMD

SEQ ID NO: 54810 - protein, 146 aa, Hyella sp.
VYSNKWNKLQHRIALLHEAVANKRKDYHFKLAHQLCQEVGMVFVENINFKSWSRGLFCKQSLDMGLGQFWEILEYVCSQTNTFFTKVDKDFTSQICPDCGIHTGKKTLDIRVHKCFECGYENDRDVAAAEVVKNRGLEIAVGAPVN

SEQ ID NO: 54811 - protein, 453 aa, unknown
  TnpB Polypeptide
MSNKLVICGETQHRALKLRIYPSNEQKVLIEKTFGCVRQIYNNRLFERNQFYEQIIKPAKPEEHKALWKTAHFSTEKEMKQKFPYLAEVSAQALCSATMFAESAYKNFFASVKGTRSGSAVGKPKFKSKKSHDFSYRECMNVGLNWNERKIKVPKLGEVKFRHSGNKKGKLDFFLRDGADLKSITIRKNPTGEYYAVLLFEREYCHKAKSYEGGENQAIGLDFSPADFYIDSDGSSGKDFGYKAQKQKNLKKLTKLQRRMMRKQIGSNNREKARVKVAHMEHYISECRNDWIEKETKRLVSTYQVIGIEDLNLRGMMKFSRNAKNYGDASWGNFTNKLLWKSSLNENKCQVVKADRFFASSQICHCCGFKNPITKNLSVRSWICPECGTKHDRDVNAAINLKENAIKQVRQGMSEFRSVEGVEDLASLALAIVGASDEAENLTGDGQNVLTLI

SEQ ID NO: 54812 - protein, 423 aa, unknown
  TnpB Polypeptide
MAPYQRISPQALSRIVSEWMLAARIDISTRKHGPHSLRHSLAINLFENGESPSVISEILGHSNLLTTMSYVKVDLKHLRQCALEVPQIPEIFYLEIYEKEKKSVSKTDCNNYCNRELKKDYEWLKEIDKFALTNAIYNMDAAYQKFFKEHAGYPKFKSKHDNHKSYTTNFTNGNIAVDFETGKIKLPKLKAVKARLHREYSGQIKSATVSQVSSGKYYVSILVETEHKELAHTNHNIGIDLGIKDLCITSDGKVYENLKIIKKYEKQLVKLQRQLSHKGKKSKNYYKTKKKIALCHEKIRNIRKDYLHKVSHEIISENQVIVSENLQIKNMVKNHHLAKAISDVSWYELTRQLEYKAKWNGRKYIKIDTFYASSQLCSVCGYQNPDTKDLSVRTWICPKCGAEHDRDINAAKNILTEGLRQIA

SEQ ID NO: 54813 - protein, 281 aa, unknown
  TnpB Polypeptide
LWLSKIGFIEIRKHRELIGKIKQISISRSKSGKWYAIITCDINIATDTQKIDFQKSTGIDVGIKNFVYDSSGHATPNPLNLKKLLKPLARIQRKVSRRQKGSNNHGKAVKFYQRIHEKIANRRRDFHHKLSTQYAKYNDIVFVEKLAKLNMVKNHKLARNILDSGWGTFCNMLEYKCKMLVEVSARNTTIDCSRCRNAVQKNLAIRIHHCNKCGLVLDRDHNASLNILQNGLRIIEMNNKLPQELREVTPVKISKRSMKQENTIARALVNSLLFCEYLNLT

SEQ ID NO: 54814 - protein, 401 aa, unknown
  TnpB Polypeptide
MQRLQAYKFELIVNGKQQRQMHRFSGACRFVYNKALALQKERHEQDEKKLSAFELNNLLPHWKAEPVTEWLSKSPSQTLQQALKDLDRAYKNFFANRADFPRFKKKGTGDSFRYPQGVKLEQGNSRIFLPKIGWCRYRNSRTVEGDIKNVTVSQVCGKWFAAIQTEREAVIPTPTGDMIGVDMGIARFATLSDGSFYEPRNSFRTLEAALRKAQQAMSRKVKFSNNWKKAKANVQRIHSKIGNSRRDYLHKTSNDISKNHAIVCIEDLQVKNMSKSAAGTLEQQGRNVRAKAGLNKAILDQGWFEFRRQLDYKLAWNGGHLIAVPPKNTSRTCPCCGHISKDNRTTQARFACVECGFEENADVVGAINVLRAGHARLACEVSGASMPPAAGTLRGESGVRA

SEQ ID NO: 54815 - protein, 405 aa, unknown
  TnpB Polypeptide
MKLNRQVRLYPNKTMKSVLDSLCDYRRYCWNEAIACWNNQYDERLIGLSEQLLDKITRKTEPLTSEEKELIKQYPIPSQYSVRNELVARKEDWQTAFSSRVLQQAVKDVATAWELFFPNQDTARKPTFKTRKVTKQGFKTDRARIYNGRLLLDKPHGYQGQWKTIRFKGLDIPDGKLTLCSVTRVNGRYTATFTIEVESRPVSRTGQKTAVDANVDHFDTTEGRITLKPEVLNPLYARVRHYQRVLARKRCKNARAIPSKGYQATRTKLQRTYERIANIQKDLLHKFTTDLYQRFDTIVIEDLDVKKMQMSKRSKNLHRSLFGQFRQMMEYKAQKFGKTLIIADRFYPSTQRCSSCGFIKTGDDKITLRGNPKHGTRHNEYICYHCGYEDDRDHNAVLNLLALAE

SEQ ID NO: 54816 - protein, 384 aa, unknown
  TnpB Polypeptide
MKNKGIKYRMYPTEEQEELLLQEVGNQRFIWNYFLDLSNTKYKSIKEGMSYSEMCMMLPYLKEEIEFLKIGIATSLQQTLRDLEQAFKNFFRRVKKGKIPGFPKFKKKGMDDSFRVPDPINFTINKSSITIPKIGNIKINKYQPLKGKPKNVTISKDGKKWYCSICLEFNPKLLPKTGKQVGIDLGTVRFATGNQGQIRKSFLKVKGVDSLIRKIKTTQKELSRRQKFSNNWMKTKSKLGKFHRQLANKRHDFHHKFSTFLVKSHDLIIVEDLKTSNMTRSAKGTLKNPGKNVKQKSGLNRSILSQGWYSFIYMLNYKCDWYGKKLIKVNPKHTSQICSKCGYKRKTNRKSQSEFVCGKCKFEENADVNAARNILNRGLKLCLT

SEQ ID NO: 54817 - protein, 504 aa, unknown
  TnpB Polypeptide
MEVTHGRGYVYSIQYHIVWCVKYRHKILYSKIEKRLMEILNMVATYECFQVLVCNTDKDHVHLLINCSPQHYIPNIVQKMKGMSSRILMREFGETLKKTLWGGTYGILHILWQQYQKIQKNKLEGIFKIRKESEVKSVEKAYKYRIYPNKKQKELIAKTFGCSRFVYNTYLAKRIKLYEESKKSLSYVQCANDMKKLKSELEWLKEVDSTALQSSLRDLDIAYQKFFKEHSGYPKFKSKKTHKFSYKSKCTNGNIQYCDKHIKLPKLGMVKTKNKLVPQGRILNATVSQEPSGKYYVSLCCTDVDIKPLKQTGNSVALDLGIKEFCITSDGEMIENPKYLKKSLAKLVKLQRELSRKPKGSSNRNKARIKVARQHEKIANQRKDFLQKLSTELIKKNDIICIEDLQVKNMIKNHKLARSISDVSWSEFVRQLEYKAEWYGKQIVKVDKFYASSQTCNVCGYVNKGTKNLGVREWDCPCCNTHHDRDINAAKNILNEGLRLLKVA

SEQ ID NO: 54818 - protein, 274 aa, Escherichia sp.
MRRFAGACRFVFNRALARQNENHEAGNKYIPYGKMASWLVEWKNATETQWLKDSPSQPLQQSLKDLDRAYKNFFRKRAAFPRFKKRGQNDAFRYPQGVKLDQENSRIFLPKLGWMRYRNSRQVTGVVKNVTVSQSCGKWYISIQTESEVSTPVHPSASMVGLDAGVAKLATLSDGTVFEPVNSFQKNQKKLARLQRQLSRKVKFSNNWQKQKRKIQRLHSCIANIRRDYLHKVTTAVSKNHAMIVIEDLKVSNMSKSAAGTVSQPGAMSGQNQV

SEQ ID NO: 54819 - protein, 355 aa, Hormoscilla sp.
MLLGFKTELKLNNCQRTALARHAGVARHAWNWGLGLTKQILDHNRDNPSEKIKFPTAIDLHKWLVALVKPEYPWYYEVSKCAPQYALRQLREAWRRAFKKVSKPPRFKKKGRADSFTLDGSIKLDHFGIRVPVIGWLKTHERLPVGAVPKSVTISRTADRWFISFKIETEPVNLEKSYPVVGVDLGIKSLAVLSTGEVFEGAKSYRKYEKQLSRLQWLNRKKQRGSANWKKAQVKIARLHRKIANIRKDTLHKITTYLAKNHGRIGIEDLNVSGMMANHKLAKAIGDMGFYEFRRQLEYKCELYGSTLVVVDQWYPSTKTCSRCHTKKDSMALSQRVFRCDNCGLEIDSRPECIH

SEQ ID NO: 54820 - protein, 705 aa, unknown
  TnpB Polypeptide
MAEARIAAARLALRRRMLDSQDMAVIHCAAGRTGLRTRPDPTPLEAAGSSGARSSAAGRADPARPRAIGHVSFQRLDASSGPHVPGSRWPASGAARTPIAFGCPARSLASTTPPVLIRPISWEQLAHPTKSGVVAATASDHAVRGQITMGDRRMVVGAPSSFRFDLRPFGEPAVRIRRLDGHRRWLREPTFQFRKATFEYAHARLVGLIPGRQLGFVALLLLAQRLQQHGRELRVGEREVAVPFCLHQLREQLGHLLRQEPDLLLPAPVRAFLEPVRHRLELEHAVEHALERLDLLLEPRIGALRERAGDLQVAVLVEHQRVRARGAAGSVAGDEERVGRIPCIRAATADGIEPPDGHRSHGLRHRAVPHGRGVVAQRLGLVAHGSGIEGRRHGFIPERGRVLILSLGPVSDRHGPLLERFCLTTDGYGLISPGLSSPNSDGVVVRRLGCAADRHRHVLRGFRQVADGNRVGRGGCRLASDRECTGAGCLRRKPEGGGVLAAGDDIVAKRDGVQPQLVEIPLVTVHHAGAQDASLRIPEQPCPRPGRGKRLRNYCLAALDSGMLALSGQDLEEKYGVAATVVNAACSSQECSACGYVDAQNRDGERFCCLWCERRIHADVNAARIIGRRRSSSIGSEAPVTKAGVLQEVVRRFLERYPRPRQGRSGPEGRPADPRWTNPYFKDWCASVTSMLPTRAAPLHGAARQ

SEQ ID NO: 54821 - protein, 327 aa, unknown
  TnpB Polypeptide
VFHHHVTGKDKKPKRRKLLLVVRQDRYEVDKNKLVLKDFNMEIEFVGRLKWDGKQGRLEIYYDETKNAWYASIPVEVGVEGSRTGKKSKYIMRGERNSIQSETPKGNKVASIDLGINILASVVLSDGTWLLYKGISAKEDYFYFQKRISEVQSLADRTKNIGEYEAYEELNREKRRLFKKLTRRLLHLYRNLASHTIKTLHELGVSTIYLGYPFNIAQEKGNGFTANLWSYRKLTDSIELKAQEYGMRVFEVAEYNTSKLCAYHQVETKRNPRGVVSCALGHRLHSDLNGALNIMKKGVNLAVSVVKKPLSFIVGHNGVAPVKGCNP

SEQ ID NO: 54822 - protein, 423 aa, unknown
  TnpB Polypeptide
MSRTIRTFEATIPNQQQVRDDLDQLGWAASKLWNVGRYYTQEQWDETGEIPDDGELKAELKGHERYTDLHSQSSQRVLEELAEAFNGWFGKRRNGDNRARPPGYRKNGDSHPRSTVSFKAAGFKHDAQFNRVRLSKGRNLKEHRSDFILCEYQTRPDVDLTEWDIQQVRAVYKRDEWRLQFVCRTTIDPEPPGDEVAGVDLGICNFAAVSFGGESVLYPGGALKEDEYYFAKKKPHATILRPVRPLVSTASERVVGRTSCTHSRKQSWRSVERGVGTLVVGDLGGIREDDESSEPRNWGDHGNLDLHGWAFDRFTTLLDYKAEAEGIDVELVSERDTSKSCSACGHTDDNQRVERGLYVCEECDTVANADVNGAENIRQKVLPSLATAGDDRDNGWLAQPAVHLFDRSEGVFTPREQGVNREP

SEQ ID NO: 54823 - protein, 386 aa, Fervidicoccus sp.
MALGCEGALTLTIKMRVSPEPSLFKELVNLMKRYRDALNHAIKVVIENKALSLGKAHKLLYSVLKERYGLPSKTAQDCYREAVAIAKSWLNNSNRGRIPRAKAPRLWLTHRYSYRVRDGYVEILGGFRLRIIGWDSRYDNYLNGDARLLIKDGKLVLEVSKRVPKPVKYVSRGVLAVDVNEKQIAVGNSRFELRIETAVEKALHYKHLAEELQKKYSSPKYSAWIRRRGIRNRVRHFHRKARNIVEDWVKKTSHKIVTLAKQHLCAVAREDLTNLVESLRKLPKEHRVSLLILSYRKLEYWIDWQCEKNGIPIIIVEPRGTSTSCPRCNSKLVENSYRRMRCPRCGFEANRDTVAVLNIEKRALTKMWGALTPLNAPQMTDVIPNR

SEQ ID NO: 54824 - protein, 306 aa, unknown
  TnpB Polypeptide
VTQAVNHGQTAFKKFFNHESAFPKFKKKGRSDVKMYFVKNNPKDCRCERHRVNIPSLGWVRIKEKGYIPTTKEGYIIKSGHVSMKAGRYYVSALIEIPDNKTADLSNEGIGIDLGLKDFAIVSNGKTYKNINKSARLKKLEKRLVREQRCLSRKYENLKKGESTQRANIQKQKLKVQKLHHKIDNIRTDYINKTIAEIVKTKPSYITIEDLNVSGMMKNKHLSRAVASQKFYEFRIKLKAKSRENGIELRVADRWYPSSKICHCCGMIKKDLKLSDRIFRCHCGYVEDRDFNAALNLRGVKTYKIA

SEQ ID NO: 54825 - protein, 394 aa, Methanomicrobia sp.
VKIQKVIKCKVVCLTNVKRELLTQEYENLQRFLYGDNSVKLYSANKQQAERFYKRVKPDKEYPLSIRKDLIKVGKRDTKIAKYWARIPVAGRRGGVWVAIKPHQDIPDDVEICESKLFRRGSDFYLHLTIQKEIDFVKVETSDYVLYAPPSFTVSERTVVMAIDIGEANPIASVELWGFGMQRKNVRFLGREVRTIRAHYNWVKKSVGRNKIKHALKWIKERIEHKESRKVADVLHKATRSIVDRAIELKQLGFEPIIVFGNLKGVRKLKGKVRCRKNNRKVHTMPSFKIKHMLLYKALWAEIPVATVNEAWTSKQCWRCGSTNTVVRKRMFKCRDCGLEYNRDLNGSVNIGNRLLGYMLRSRADVNQPQTPPVYSVPISDSVCEGRSHPFNGW

SEQ ID NO: 54826 - protein, 226 aa, unknown
  TnpB Polypeptide
LAAVTFSDGTNPLLIKGLNVKYINQGYNRLISKYQSKLPNNQKTSKHIHRLFRNREMKLQSEFHKITGFLAEFFDEMALEKVFIGKNVGLKSGISIGKKGNQNFVQIPYNKFISQLKYKCQLRGIEVVEQEESYTSKASFIDSDVIPVWKNDGKKYTFSGKRVKRGLYKSKNGKLINADINGSYNILSKGLSKFGICLNRNNVSFHTRSLTGYNILSNKKLIEKYT

SEQ ID NO: 54827 - protein, 412 aa, Halorussus sp.
VSESVTKTLQATLVPPTAGKEQRLSRLLDTYREALHDAFDAGAETMSAVNDIVTPYDLPYQAKDALKSYVPKLRDTYNASELDDGHPLRLVNRAAKFDYSDEREYGYVWQVPQPGRGTNFWIPLRINPEQESLWNDLLTDDGAEPGEIQLQRHRTSWELHVTVEYEVEQTNSDYADPTYIGFDVGESALITGCALKRDVPREPIIVSGNRARHLRKEMHTTLKRLQKREAAEWRIDERFDYYQNALTDIVEKVSRRAVEYARGFENPVVVMEDLTDIRESLDYGKWMNRRLHAWAFARLQGRIEDKVRDAGIPVEYVNAAHTSQTCHACGHIGTRDGDDFRCQNNGCHITVFHADLNAAANIAGRVDPWGESLSWEPTGNDSPRDGSARDSATVHRETSEKSSQMRLTAFTD

SEQ ID NO: 54828 - protein, 259 aa, Haloterrigena sp.
VDVQNVQQVRAVWTGDEWELHIVCRVETGDPEPPGDRVAGIDLGICNFAAIAVGDEALLYPGGALKEDDYYFQKERAKCDDSDSHRAHRLDRKRRGRRDHFLHAVSADMVDECAARNVGTIAVGDLSDIREGTDWSDHGNLDLHGWAFDRFVEMLEYKASERGIRVERVDERDTSKSCASCGTTDDSQRVERGLYVCEACGLVANADVNGAENIRQKVLPNLACDGGDRDNGWMAQPAVRLFDKSTGQVAPQEQVSREP

SEQ ID NO: 54829 - protein, 532 aa, Promicromonospora sp.
MPCVARHTSFRFCLDPSAEQKRVLSRHVGAARFAFNQALRLHLDAWSAARGGQGQSSGAGIASEGDLPGPEAGEVPDVVPGGVRVAWTGFDLINAFNAWKRSESAGRRFLAGTDGTTRVEVTGLAWRGQVVAQVFEEAAVDLSRALKAWNESRMGARKGPRVGFPRFKKKSPTGGSFRIRNKVSKGWSSIRVGDGDRPRSVSLPRIGTLRVREDTRRLRRMIAKDRARILFVTVSRGANRWWISITVQATDLHPSMRHAPEAAAGGPAGVDTGKVDARNSGKGWVGVDRGLHALAVAGSADGVEVLRVTNPRALRHGLPRLRRLSRAVSRTKRGSKNRKKAVVRLGRQHARIRDRRRHYLHQVSNQLVKTHALLVLEDLNITGMRANRSLSRAISDAAWGDLARQVTYKQAWRGGQVLLADRWFPSSKTCSACGTLRTDLTLKDRTFQCRECGLVMDRDLNAATNLATWAENHAATVDDGARRGAARVGDRQAAGPVTNAYRQHTPTRPDLKVHDGKGLDDVGTNPQTAPAA

SEQ ID NO: 54830 - protein, 444 aa, Streptomyces sp.
LVVQLRYNYRAYPDAPQRRALAQAFGCARVVWNDCLRDRKEAHAAGLPYVKSADLSRLRITEAKRTESRAWLTDVSAVVLQQSLRDLDTAYKNFFDSLNGKRQGRRAGPPRYKSKKDTRQSIRLNTNAFSLTENGAVYVAKIGNLKVKWSRPLPAAPTSLTVTKDSSGRYFLSFVVDTQPDVLPDLVEVESGIDLGLSAFAVLSDGTKIDSPRFLRRAEKKLRRLQRELSRKAKGSKNRAKARIKVARQHAKVADRRRDWHHKVSTQIIRDNQAVYVEDLAVSGLGRTRLAKSVHDAGWSAFVGMLEYKAVKHGRTFAKVARAFPSSQICSVCGFRDGPKPLHVRVWTCGECGTVHDRDHNAACNVLFEGRRIVAAGQAETLNASWSAGRTGAKAPAQRDEAGSHRKGQPTQAGIPGLQARVHVKVLARSPVKGPHRRTWCRER

SEQ ID NO: 54831 - protein, 352 aa, unknown
  TnpB Polypeptide
MVKAIKVMLIPNNVQKTKLFQYAGASRFAYNWALAREIENYEKGGKFISDAELRKEFTKLRHSDEYAWLLNISNNVTKQAIKDACTAYKNFFRGLQKFPRFKSKKRSMPKFYQDNVKIRFSNTHVKFEGFSSSRKANKQKMNWVRLAEHGRIPTNAKYMNPRISFDGLNWWISVCVEFPDCREILNDDGVGIDLGIKELAVCSDGTKYKNINKSQKIKKLEKQKRRLQRSISRSYEKNKKGESYCKTNNVIKKEKLLLKRNHRLTNIRKNYLNQTISEIINRKPRFICIEDLNVSGMMKNRHLSKAVQAQGFFWFRKQLEYRCSDKGIQLIVLIGFIHHQSFAAVVGISKKI

SEQ ID NO: 54832 - protein, 406 aa, unknown
  TnpB Polypeptide
MAGKPGKLKTGTNTYYNITCIRKKAKKVYRNPRLRRWQQMLKAYKYRIYPTNEQKEQIAKTFGCCRFVYNRTLAYRKEAYEKEKKNVNKTNCNNYCNQVLKKEYGWLKEVDKFALTNAIYNMDAAYQKFFKEHTGYPKFKSKHDGHKSYTTNFTNGNITADFDRGKVKLPKLKEVKAKLHRNFIGQIKSATVSQMPSGKYYVSILVETEHVELPHTDQNTGIDLGIKDLCITSKGKKYENPKTIRKYEKKLAKLQRQLAHKKKRSQNYNKIKKKIALCHEKITNSRKDYLHKISHEIISENQVIVSENLQIQNMLKDHHLAKAISDVSWYELTRQLEYKAKWNGRKYIKIDTFYASSQLCSVCGYQNTEIKDLSIREWSCPVCGAKHDRDINAAKNILAEGLRQIA

SEQ ID NO: 54833 - protein, 495 aa, unknown
  TnpB Polypeptide
VYKTIPLKANFSDEENAFWLFQCEQANSLWNCATYYSKQKHYGWLEQQPEAFTTYWKGDDLRYGWKTYKCSVKYAELCKSLKDSSHYKAMAAQSAQQTLKSVAESITSYNQLVSLYYKGQVNRPRLLRYRQKGGLAAVTFPRQALTYKNGLFYPSISKESKPELLTEITLSPPGFIDPDWVKEVTVRPYLGQLWIDWVIDDEKQLIENNPNLDYSQAWSFDHGGDNWLTGVSTQGKSLIIDGRKLKSMNQGYARLVAKYKTGKPEFYWDANLARVQRKRNNQIRDAINKAARFIINRCLCDRIGNLIIGWNERQKDSLNMGRLGNQNFVVIPTKRLIERLKQLCSEYGIKLTITEESYTSKASFLDDDPLPKHGEKPSGWKASGRRMRRGLYKTSFGHLINADCNGAANIAKKVATQLGIDLTKVGRGALTLPHRHDLFKSLSRSYRTSCEVARFQPATSQPCRILRASAGGDVNSMDNPIGKNSKSPTLIRSRL

SEQ ID NO: 54834 - protein, 442 aa, unknown
  TnpB Polypeptide
MQIISSYGVELRKQNIPIRQTLEIYRSAVSYLIGIYVQVWEELAEIPDAKRRFNAAEHLVHTTKKNHACFDFDIRFPKMPSYLRRSAIQHALGTVSSYKTRLDLWEKTDRKSGKPKLVYENHAMPVFYRDVMYREGAEGKDEAYLKLYDGHDWKWFCVRLEHTDMEYLRKYWSGKKASAPTLEKRHHKYFLRFTYTEEVTLTKTPVKEQVICSVDLGINTDAVCTIMRADGTVLGRKFIDHPSEKDRMYRTLGRIRRFQREHGSAQTQGRWAYTKRLNTELGKKIAGAIVRYAEENHADVIVFEYLEMQGKISGKKKQKLHLWRKRDIQKCCEHQAHRKGMRVSRICAWNTSRLAYDGSGAVTRDWENHSLCTFQTGKRYNCDLSASYNIGARYFIRELLKPLPATERSLLEAKVPPVKRRTSCVYADLRKLHSEMELLKAA

SEQ ID NO: 54835 - protein, 326 aa, unknown
  TnpB Polypeptide
VFCQTLKHVDMVFKSFFALLKNKTVKNRLPKYLDKVNGRFITIFPNQAIGLREFKKTGKLRLSQTDIYISTKLTNFDKLKEVRVVPRTHHYVIEVVYQVKEKTHCDNGKYASIDLGLNNLATVAFNEGSKPLIVNGRPLKSINQYYNKKKAQYQSRLKGNKRTSKRIYKLTDKRNNKVTDYLHKASRLLVNQLVSQGITTLVIGKNPNMKQDINIGKVNNQNFVQLPIMRFGDLMKYKCELEGIKVLFNEESYTSKCSFLDSEPICKHDKYMGIRVKRGLFVSRNGIKINADVNGAYNIMIKAIPNAFADGIEGVGVHPMVLTIKK

SEQ ID NO: 54836 - protein, 398 aa, Burkholderia sp.
MNSNSRESTRTLRLRLKDKHSALLREQAREVNFVWNYCNELSLKILQREGRFCSSAELDRYTAGATKEGLSLHSQTVQAISKELVNRRRQFMKRRLAWRKSSGARRSLGWIPVKASGLRYKGGQVWYGGRPLSLWDSYGLHQYELGTGSFSEDSRGRWYLNVSVRTKRPPASRATRAVGLDLGLKDFLATSDGLKVDGHDFYRALEPKISAAQRANKKQRVAALHAKVKARRKDALHKLSTALVREYGAIFVGNVNAAGLAQTRMAKSVLDAGWSAFRTMLQYKCDDAGVWFEAVNEAFSTQTCSCCASRTGPKGVAGLGIRAWQCDVCGSEHDRDINAARNILLTGMSARAGGAGLQDGTASAMLAAGRGRLAEGIPALKDREDVKVTRTVRRLRRA

SEQ ID NO: 54837 - protein, 427 aa, Halococcus sp.
MHDHRTHRATITNHSQVSDDLDRCGWSVSKLWNVGLYHIQTEWDTTGEIPGEGDLKSELKGHEKYTDLQSQSSQRVLEELAEAFHSWYGSSDTRDNPPGFRKRNYYDEDGNLVHEEHPRSTVTWKQKGIRHDTENDRLRLSKGFNHKESRDDYILCEYDTRDDVAIENVQQVRAVYEHGEWRLHIVCKHEIETPDPPGDETAGIDLGICNFAAVAYSNDEATLYPGNYLKENEYYFTKEVAKCDRSWSNRATRLNHKRTERRSQFIHAWAKHVVEDAKENNVGRIAIGDLGGIRDDENGDAVNWGKHGNLDLHGWPFDKATKVLTYKAKAEGITVDADVSERDTSKTCSACGKIADRQRVERGLYRCEVCGMTANADVNGAENIRRRSNSESPSGDRSTGWLAQPVVHLHDRTHGFSPGAPVVDCKP

SEQ ID NO: 54838 - protein, 439 aa, Escherichia sp.
  misc_feature (166)..(169): Xaa can be any naturally occurring amino acid
VKRLQAFKFQLRPGGQQEYEMRRFAGACRFVFNRALARQNENHEAGNKYIPYGKMASWLVEWKNATETQWLKDSPSQPLQQSLKDLERAYKNFFRKRAAFPRFKKRGQNDAFRYPQGVKLDQENSRIFLPKLGWMRYRNSRQVTGVVKNVTVSQSCGKWYISIQTXXXXGWMRYRNSRQVTGVVKNVTVSQSSGKWYISIQTESEVSTPVHPSASMVGLDAGVAKLATLSDGTVFEPVNSFQKNQKKLARLQRQLSRKVKFSNNWQKQKRKIQRLHSCIANIRRDYLHKVTTAVSKNHAMIVIEDLKVSNMSKSAAGTVSQPGRNVRAKSGLNRPILDQGWYEMRRQLEYKQLWSGGQVLAVPPAYTSQRCAYCGHTAKENRLSQSKFRCQVCGYTANADVNGARNILAAGHAVLACGEMVQSGRPLKQEPTEMIQATA

SEQ ID NO: 54839 - protein, 435 aa, Streptomyces sp.
MSRFRTYPTSEQASVMLEHCAHARYVWNLAVEQHSHWYKGRKAAPGFAEQCKQLTEARRENEWLCAGNADVMQQALKDFAKAKNAKFTSGFGEPTWRKRFKHEGFRVIGTDRVPEFNDDGTAKINPKTKKHVMGRSVVVQKLNKRWAQVKVPGCGWVRFRLTRTGLPSAKTFRVTLKNGQWHIAFAVIPEPIGAPGTGEIIGIDRGVKITAALSDGRTLDCPQLTTKERAQIRKHQRRAARAKKGSPEKTAEYAKAAKLKAREADRRKDWCEKTSTMLARTYDLVRFEKLNIRNMTAKAKPKADPETPGMFLKNGRAVKAGLNRSILAQGWGLLRQRTEHKAPGRVEDVPAPYTSLRCSACGWIDKNSRKSQAEFVCSSCGFTCNADTNAANNVAAGQSGIPRPRRTVGAGGVTAATGRSSVREPQPTWVGIPLF

SEQ ID NO: 54840 - protein, 345 aa, Acidobacteria sp.
MKTELPWLREVSAPSLQQTGRALDTAYRNWFDSLLGKRPDKVKPPTFKKKSNRQSARFARNSFRFQNGVLSLSKIGAIPIVWHRRVSGEPSSVVLSRTPAGRYYVSFQVEQPLRVVGPASHRLSVDINTKTFNFFNGRTWSQVSLPRPWLAARSKLRTAQKRLSRCEKGSKNREKARSRVAPICQRVTDMRADFLQKLSTQLIHKNQVILVETLRTKNLLKNRRLARAISDAGFGEFVRLLEYKCKWHGVTLVKVERFFPSSKLCCTCHQKKVDLKLQDRWTCSSCHTEHQRDENAVVNIFVEGLRILAEGRSVLACGGTVRPKREFRRVPVKQETSSEVRGHVA

SEQ ID NO: 54841 - protein, 367 aa, unknown
  TnpB Polypeptide
MLKAYKYRIYPNNEQKIQIAKTFGCCRFVYNQTLVYRKEVYEKEKKSVSKTDCNNYCNRQLKKEYEWLKEVDKFALTNAIYNMDAAYQKYFKEHAGYPKFKSKHDNHKSYTTNFTNGNITVDFGCNRVKLPKLKSIKAKLHRNFSGQIKSATISQVPSGKYYVSILVETEHTELPHTNQNTGIDLGIKELCITSDGKKYENPKIIRKYEKKLVKLQRQLAHKEKRSQNYYKTKKKIALCHEKITNTRKDYLHKMSHEIISENQVIVSEDLQIKNMVKNHHLAKSISDVSWHELTRQLEYKAKWNGRKYVKIDTFYASSQLCSVCGYQNTETKNLSVREWICPVCGTNHDRDINAAKNILEEGLRQIA

SEQ ID NO: 54842 - protein, 494 aa, unknown
  TnpB Polypeptide
MAQLTAEVQGISSYATYITRNDTQLWDELARITTTAPAEAGRRAGVTMPEFLVTGKSGRSRKEKLVQYNVVTAFRSWQERIKAVNGESDKYVSQGWKRTVNDSAPTYGGDYINLGAVDKQYAVIENDDPFGDGEIVLKMVICGKWYRLIFRFDNARFTEGKVTLPLIKIEDGKPVFIFSVATDNPVVQFSSDYTIGVDVGINDYATVVVRNSTTGKIVQQTTLSQRVHSLWNSVRASEKQVRQLREKAAQLLDDRPYERQAIMAARDEADLHRAAASRKKRELAILAAQEIAYLSHFYGNAVVAVEDLSWITNTMQNGRWNRGAFTKWLTHYVGQNGGWVVTVNAANTSQVCHVCGEEVEHPTHKVSDCAKCGVFDRDVNAAANIAARAVPKVEKARKTRANNRKLQEQVYLKTPIARCSLKYPGRDRTKNCPTPKRKKKGVKTFSSPARAQAHRLEARVLADCNTCSINVTETSEAAIKQGIKTYTCRLCNLN

SEQ ID NO: 54843 - protein, 534 aa, unknown
  TnpB Polypeptide
LKGGEKMNRNNHIKKDKEIAIKSEDTNKDEEKVKRVSIYNIKSSHPLFTYCDEMTFKSKNLRNAANYHIRRCFIYHNRDEISSDIQEYFEQMNQYIQNFNKEKKKNKVDKLKKLREIRNQLKATPLKQKELMKVKNQIEEERKRKYFTQNQISEECGTLFYEFLNYYYVHCIHNDEENPYKDLPAKTSQQILRNLNKDWKGFFKSIKDFSKNPTKYTGKPNIPGYKKKDGRAKVSFTYQQCKIVNGYVTFPETELTLKIGIESAELELKEVRIVPMGVNYKIELVWNKKKSEENNNLDKNAYMGIDLGVSNFATLTNNIGLSPIIINGRQLKSMNQYYNKKRAELQSKLPFYKANDDLMKQISWSKKLSLLTEKRNNKITDFMHNASSFVIDYCLRNKIATIVIGLNNDWKQQLNIGKKNNQMFISIPFKKFIDQIQYKAEDVGITVIVREESYTSKASFFDLDEIPTYKKGNKTKHTFSGKRKYRGLYITKDGKYINADVNGSYNILRKEFPQLFTKETIKYLSFKPMVVNII

SEQ ID NO: 54844 - protein, 398 aa, unknown
  TnpB Polypeptide
MKIKRAYMTELDPNNVQRTALLKHAGVARFAYNWGLARRMEEYERTGKSSNAIELHRQLNALKKTDFPWMYEVSKAAPQEALRDLDRAYKNFFEGRAKYPKFRSRRRGIGSFRLTGSIRVFNDSIQLPRIGRVRLKEKGYLPTEGVHILSATVSERAGHWFVSLQVEEEIEVPENVGSVAGVDVGISRLAMVSDGTIIENPKALARFERKRKRLQRSLSRKMKDSRNRADARLRLARCEFRIASIRMDAQHKATTMLARTKSVIGVESLNVAGLLKNHCLARQLADAGIGEFFRQLRYKTKWYGSNVVEADPFFPSTKKCSNCGAVKDGMPLSERIYKCGSCGFEADRDLNAAMNLASVAASWAETLNACESGEVHAARQVLPYEAGTERRLGGVLDG

SEQ ID NO: 54845 - protein, 430 aa, unknown
  TnpB Polypeptide
MSHRWASNGEKRTIAIEYQPSDEILSYLRDMRDALRMALVYAYVMAKENDSRLPSPIALRRRLRDWFYSRYDYARHHINPLCRNAVALLRSYKKKHKKLAIPKVRRLAVRIDAELFKIEQVKGGGTVSARITLQPFKYEYIKFKPKHRKWEEYSNSKGKASELLITDRRLFITFVTNGGKKKPLGSRFVASDLNFNTIDSTAASKEGEKVKLRQVKTEPVGKIARIQNDFSRRRRRIQLHVKNPKKRAKKLKETRGRQRNRIKDALQKLSTEQVRENPGASFIFERLTGIRENGNAKSKKLRTYLNRWPYHMYQSMVEYKSPFMTVYVSPGGTSSRCPVCGGRIRHPAWAVSSCNTCGADYGRNRLSSLAILLRGLRLCGQPFAVSADASWQLLRDEYLYTPAVPESGRAGWTEEAANAPNENMYTKIHV

SEQ ID NO: 54846 - protein, 397 aa, Lactobacillus sp.
MRLYPDTDQAEQFLAMSKEYQRLANIVSQWIFDHEFQLSWLKINHHLYKIFRQGSELNSQMIQSVFRTVVARYKTVREQMKQHPYRCKNEENKWVQIPRDLTWLVKPIQFRRPQADLVRQSNYSFVDRMRQISMTTLGKRTKLGFTKKGFEKYFTDDWKLGTAKLVRNRDKWFLHIGITKEVRNFDANDNPQIVGIDRGLRFLATAFDSKGKTLFFNGQKILRRRKKFLEIRRQLQSKGTRSANKKLKQLAQRENRWMTDVNHRLAKTLVTAYGSHTLFILEDLTNVTFNTDDLPKSLRSSHRSWSFFQLESFLTYKAQAIQSAVVKVSPAFTSQRCPKCGLIEKTNRHHDAHEYWCQQCQYRCNDDRLGAMNIKMLGQDWLNGVKHPKIKKLTTAG

SEQ ID NO: 54847 - protein, 562 aa, unknown
  TnpB Polypeptide
MPERQKKDEFRFTVCGEFFPEVFPASRSPRWYRGGEDPLETEMRLFCACMRWAFNRLLEGASRDEIKKLGQELFGLNSRYADDARLKAQGVLDSQKELLQLEIEETEKKLGRARQKLSLAMRKLAVAEEKGATPEVVEKLHLTVKGRSNRVASLEKTLAELEAHRENGTVPRVVFGGKKLWKKVCKGRATRKEWRAARKNRLYSRGDETKGGNPNMKVTYREGEFSLAVTISHLSEKVGEDALGRPKMSRAPRVEGRLWLPEKHRDLVRVWLAMKLPYSVELVRTLEGRYIVHLTFELSRVREPNLAKGCLALDTNPDGVALCNINASGQPEPWPEGFSVSYPGNLGKYEGEFQVTTYPNGFLYIRVPDLAYASGFRRDYLIGVLAKVVGDIAFFLGKPVILEDLEFGKDRLDTNKKFNRMASNFPFAKMVEAVCRRAVKEGVSFKLVAARYTSTIGYWKYMERYAVPVHCSAALVVGRRAMGFKERVTKETKQLVARIKQNLTQKVNPDTPREGEGMTRRVRACLRRLEGRLPVHNGFAPWQQEAYCSVWRDLKLLALSLR

SEQ ID NO: 54848 - protein, 437 aa, unknown
  TnpB Polypeptide
MSSIGEGATMATVTQAYRFALDPTETQRRALASHCGAARHAYNWGLRLVEERLEQRRAGEEIEVPWSLAELRREWNRAKQQVAPWWAENSKEAYSSGLDGLARALKNWTDSRNGRRKGRPVGFPRFKKKWRSRDACRFTTGAIKVLGDRKHIQLPRIGVLKTHESTRKLARRVEQGTARILAATISRTADRWYVSFTVEAQRHLPVTNGKTTVVGVDVGIRHLAVLSTGTKISNPRALESSQQKLRRLNRQLARREPGSKHRKETRRRLARVHARAANLRRDALNKLTTTLAIGYGTVVVEHLTVAGMVRNRRLARAVADAGLGELRRQLSYKSIWYGSRLVVADRFHPSSKTCSACGWVKAKLALAERTFTCEDCGLCMDRDVNAARNLAKLAQHVAQSGWETRNARGADRKTQLAGQVAMKREPSSADIKTGTDG

SEQ ID NO: 54849 - protein, 383 aa, unknown
  TnpB Polypeptide
MSRIGLPLFIVLAVKSVWQNYISSSEVLGLLELFRRMVNESLRIGLANDVSSLRRLSLLSYNELAQHDSPSYYKLCAISRAAGILAARKKSIRRGYATKTPYSFRQQLVSCYGFKIRSGALRFPVSRGKRFCIPLTKHVLEVISQPGVEVRSFTLTQNRLSLCIARDAPTVNRASTVGVDRNLRNLTVGNDQETSRYDLSKCVRIANTTARIVASFTRDDDRIRTGIASMYGKRRTSRVGHLLHTATKTIVALAVQRREAIVLENIEGIRSLYRKGNGQGRKYRGRMNSWSFGEAQRQIEYKARWVGLSVIRLSRRETRATSITCPRCGERLQSDKRLTRKLWCGKCRVVMDRDMVAAVNLARRGRVRFARSRPPIIEAQGGA

SEQ ID NO: 54850 - protein, 402 aa, unknown
  TnpB Polypeptide
MYLTETTVVKPSQQALYRACDELCFLSKNLYNAALYEQRQNYLDGKPFISQFDMEKIMRKTKNPDFYALTSLTASYVIKQLEESYKSYFALCELKQAGKYHCKIRLPHYKEKNGRNVATFHHTCLIKRTYKKEGLIRLSRTDIKFKSSIPLEKIQIVKVVPKNGYYELQVVYHAEEAPKLENSNYAAIDLGLNNLATVATNVSKPFIIKGRPLKSINQRWNKRKAKLQSKLKKGVHTSKKIRTITNKRNRRVKNYLHQASRALVNELRKLSVSKVAIGSNKEWKQNITMGKRNNQNFVQIPHARFIEMVTYKAALAGIEVVTKEESYTSKCSFLDDEPIEKHDEYAGCRIKRGLFRASTGSIINADVNAAYNIMKKHLGIGPKDLDSVQVLSTPNVLVFGSR

SEQ ID NO: 54851 - protein, 381 aa, Methanomassiliicoccus sp.
MFRTVKILLEHTVELVETVSLFNQACQRVLDWGQANKQHNKYKLDRATYYDAREEFPSLPSPLVQTARDQASDMLKRDKFKHKIRKKPSSSIRYDKRTLRVFLQSGYLSISTVSGRKRYDFILPDYYRQYQSWMVQNAQLIIGRYACFLNVQVEGETPPFNCGNRRLGIDLGINNIAVCSDNTFYSSKHLKNVKGQYRHLKAELQSIGTRSARRKLREVSGRERRFVRDSNHCVAKEVVSKPYDVFVFEDLKSTREIKRSREFNPKLGSWSFGELIRFVRYKAEALGKRVEVIDPHYTSQTCSRCGHVSSSNRTGRQFECVQCRFTLDADLNASRNIAAFSTWEGGRLSVSQPNAASGEAKGHMALEAEFSCKPVSMLVGS

SEQ ID NO: 54852 - protein, 508 aa, Rhodococcus sp.
MATGVIVAADTDSAATEPGRSVIRAFVYVLDPTPDQATMLRSHCGAQRYAYNWALDQVQANLDQRTAERSYDIPDSELTPSLSWSAYSLRKHWNTVKNAVAVNRETGVPWWPENSKESYSSGIANCAAALSNWNAARTGKRQGTMGFPRFGNKQAVLSCRFTTGALGLVTGGGDRRHVQLPRIGVVKTAESTRKLARKTTAGTARIRSATVSFRGGRWQVSFSVETTIPARALHPETVVTGSATGLRRGNSVVGVDVGVKHLAVLSTGEMIENPKHARRQAKALRRLQRQASRRTGPDRRTNQEPSKRWLRTQGRVRQVHTRIGNTRRDYLHKLTTRLVEEFDTVVVENLNVAGMTRSGGVDKKGLNRALQDAAFGEIRRQVTYKTGWAGTGLVVADRWFPSSKTCSNCSVVKAKLPLKVRVFTCDACGFRSDRDHNAALNLAALAAVATGGASSASCGRDGKEARRKPNVRPAVVRADGIAAGTPPGGERGRGNPVAHDECIKQHLK

SEQ ID NO: 54853 - protein, 403 aa, Actinomadura sp.
MFDMKLMVQVKLLPSPEQEAALASTLHACNEAANRVSERAFQQRVYGRVPLQKLVYADLKATGLAAQASLHVIRKVADAYTVLHAQVSGGLMRERGRRRAQSKPVTFRPKAAQPFDDRCLSWWWENNTVSIWTVQGRIRGIPFTATARQLEMLTRYRKGETDLVHRAGKWFLIATCEVPEAPLNDEPSDWIGIDRGIVNLVTTSDGRDHQGSGLTRYRRRMARVRAEMQSKGTKSAKRKLQSRARREARHASCVNHRIAKEIVADAQRTGRGIAVENLRGIRDRIRLRRHQRAMLSRWPYHQIVAYLAYKALRAGVPFVQVDAAYTSQTCPRCGHVSRRNRPRRDDFRCQVCGLAGPSDHIAAVNVRQRARVAWVFVNAPDAAEESGREPRRAASTQPPVASS

SEQ ID NO: 54854 - protein, 315 aa, unknown
  TnpB Polypeptide
LQKLYGKVSDPIHALEKKEVLSDEETQKLNHLKKERAEITNSMNQMRESYQVTWDFCRTKMMELKETYHLQSIFALSRAEDIWAAIETILYSSGRKLHFKKRGDLPEIRAKQSTRGLVIDSSQSGLIVKYGKVTIPCKYKAKDLWLWDEEKAILAYLAEPELQDAHAVDQMSKGIITDTYRPCFASLVCKKIRGRLRVYVHITVEGKAISKRRKDSTPRHYYGKGNIGCDIGTQTIAYTSNTEVGLENLAERGNSIQHVERQEALILRAMERSRRAMNPNHYNENGTVKKGHKQWNFSKRYQKLKQRHQKLCRIA

SEQ ID NO: 54855 - protein, 357 aa, unknown
  TnpB Polypeptide
LALETWDSQYDASVVLNDKSIRPNMQSVRNELVRNKEDWQYGYPITVLQQAVINLAQAWKNFFSPNMPDSKKPKFKSAKRDKQSFATNTARIMDGKLILPKPIGVPKGIWYGIHMSEPIRFTGKIKLTVITKDVHGYSASLMIDTEDNEVPVTKGTVGIDANIKRFNYGNKEETIIYPKKLDKLYDRIGHYQKMLARKRIANPAKFRSKNYAAVRDKLQRDYSKVNQIQSDILHKFTYYLTHTYKEIHIEDLDVKHMQMSRKMGKNLHRSLFRKFREQLTYKCSWYHNKLVILPRTYPSTQLCSKCGFRKTKEGYGGKQTLYGDSIHHEHQTYYCYNCGAVLDRDENAVENIKNYVG

SEQ ID NO: 54856 - protein, 188 aa, Actinopolyspora sp.
  misc_feature (188)..(188): Xaa can be any naturally occurring amino acid
RAHRKARHTRADFVHRTSTNLVRRADTIAIEDLTVAGMISSARGTTDRPGRTVRATAGVNRRVLDAAWGEFRRQSEYKTTRAGKTLAVVNGWYPSSTTCSYCGYLLGALTLSVRHWTCPDCGTRHYRDVSAATNIRAAGLAVAGEYPGEACGAGVSPQGSSLAALGDEAGPLGREPDGNPRPPRRGVX

SEQ ID NO: 54857 - protein, 386 aa, Streptomyces sp.
MYMQLRFNYRLDPTPGQRIALARAFGCARTVFNDGLRIRQAAHARGLPNIKDTDLQKQVITAAKQTPERAWLAEVSSVVLVQALADLHTAYRNFFNSVTGRRKGPKVAPPRFRSRKDNRHTIRFTRNGFRLRPDGKLNLAKIGDVRVRWSRDLPSDPSSVTVVKDASGRYFASFVVQTDPSEVLPETTPEVGIDLGLTHFAVMSDGRKITAPKFLRRANRKLKKAQQALSRKAKGSNNRRKAVARVAKAHARVADSRRDHHHKLSTTIIRENQAVYVEDLCVKGLARTRLAKSVHDAGWSQFTAMLEYKAARYGRAFGRIGRFVPSSQTCSVCFVIDGPKPLSVRTWTCEGCQTTHDRDVNAARIVLAAGRAESQNACGGTVSPPV

SEQ ID NO: 54858 - protein, 369 aa, unknown
  TnpB Polypeptide
VNNIKAYKVRCFPTDEQKMLILKTFGCCRWYWNQALSDNIKYYEENKKSKINTPAFYKKEYEWLKEVDGQALCFTQIDLQSAFSGFFKQPNKGFPKYKSKKCSKNSYKTMIANGFPIDDETIKLPKLGKIKIVNHRHKIGIVKSCTISMTPTNEFYISILWKEAETDETLPKVNKEIGIDLGLTDLAICSDGIKFPVLQSLRKNLPKLKKEQRKLSKMTKGSNNYNRQKMKVARLNQRVVNQRKDYLHKISYKITNENQVISLEDLNVKGMMKNHHLALSVADVGWSMFINMLEYKAENKGRTVVKIDKWFPSSQICSCCGCITGKKPLYIRKWTCPECHTHHDRDINAAKNILTEGKRILGAGSSPDR

SEQ ID NO: 54859 - protein, 369 aa, unknown
  TnpB Polypeptide
MLKAYKYRIYPNKQQEEQIQKTFGCCRFVYNQMLAYRKELYETKKESMSKIDCNNYVNQVLKKEYEWLKEVDKFALTNAIYNMDSAYQRFFKEHTGYPKFKSKRNKKKLYSTNFTNGNIEVSFESNKIKLPKLKWVKAKIHREFTGKIKSATISQISSGKYFVSILVETEHIPMKENNNSVGIDLGIKDLLITSDGEKFDNIRATKKYEYKLAKEQRKLFHKAKGSKNWNKQRIKIARIHEKIHNTRIDNLHKISHKLISENQVVISEDLAVSNMVKNHNLAKAISDCGWYELTRQITYKAEWNGRTYIKIGRYVPSSQTCNVCGFVNKDTKDLSVREWICPQCGTVHDRDINAAINILNEGMRMLEVS

SEQ ID NO: 54860 - protein, 366 aa, unknown
  TnpB Polypeptide
VEKAFKYRIYPNKNQRILIAKTFGCCRFVYNTYLAKRIELYESSKEAYSYVQCANDMKKLKSEKKWLKEVDSTALQSSLRDLDSAYQKFFKEHSGFPKFKSKKTHRYSYKSKCTNNNIQFLGKHIKLPKVGLVKTKNKLIPQGRILSATVSQEPSGKYYVSLCCTDVFENHFANNDNTVGIDLGIKDFCIFSDGIKIENPAYLKKALKKLAKLQRELSRKSKGSSNRNKARIKVARLHEHISNQRKDFLQKVSTDLIRNYGIICMENLQVKNMVQNERLAQSISDVSWSEFTRMLEYKANWYGRKISKIDRFYPSSQTCHVCGYINKDTKNLDVREWTCPECETHHDRDINAAINIKNEGLRLIPV

SEQ ID NO: 54861 - protein, 586 aa, unknown
  TnpB Polypeptide
MSKKTAQSSKQSTSEVPISTYQTRLKNQPDAVLGALDDCAELLSRVERQLFAQSQKVDTFKGKVFNQIKSFFLSFFGILSRHFNSINLALQGKVDSYRSNLKRYINENQERIDKTRKTIEKLSKKEIELNQRQKHLNKSHQKKRRLARLEKHLEQLESDKATGRVRICFGSKKRFNAQFYLKANGYENFEQWKSDWQKSRRNQFILVGSKDEMAGNKLCTAKRKKDGTLTLRVRMPDALVPKHGKYVEIPLVKFEYGQDVIEAALNDNEARRVLKSLKSSATKHYGQAITYRFLRDKKGWRVFVSTARPQIPIKTLKDIGTIGIDLNANHVALVETDRFGNPIEIKTIPLNTYGKSKGQTEAIIGEAVKAIVKRAEKTLKPIVIEDLYFSQKRSILRENGSNRYARMLNSFVYSKFRDFLESRASRHGIRVYKVNPAFTSVIGRVKYATQYGLTVHHAAALVIARRLCRFDFTSFRYFVSERAPSGCRNEVLIPNNRGGHVTFPLPVRKRSNGASLRSSGEACMVILAARVQKNQISGVCNTGSGGSIDGPIQPNAGAFGWDGGATLSRTLSGAIPAHESLAVLLG

SEQ ID NO: 54862 - protein, 374 aa, Thermotalea sp.
MIIALKVRLEPNNKQKTKLFQSAGVARWAYNWTLAKQEENYKSGGKFIKDGDLRKELTLLKQTEEYKWLNHYSNNITKQAIKDACDAYDKFFKKLADKPKFKSKKKSQPKFYQDTEKIKFKEGRVRLEKIGWVRLSEKDRIPENAKYTNPRVKFDGVHWYVSVGIEAEQGYVELTDESIGIDLGIKDLAVCSNEMTFKNINKTKRVKKLQKKLRRLQRKVSNKYEKNKEGGSYVKTGNIIKLEKNIKKLHKRLDNIRTDNRHKATAQIVKTKPSRVVMENLNVSGMMKNKHLSKAIAEQGLFEFKTMLQYKCRKYGIEFIEADKWYPSSKTCSACGHVKTRLSLSEREFICECCGTVIDRDKNASINLSRYKVS

SEQ ID NO: 54863 - protein, 412 aa, unknown
  TnpB Polypeptide
MRAFSRSKSKIPYYLYRRKTDFQEGGRLMAKSKTLGVRKNENVDVLCYRFAALPTNEQIIQLNKTIGCCRYLWNRMLGDHNTLYQEIGVVPNNTPADYKSLEECLWLKEVDSLALANVQLNLNQAFQKFFNGEASHPRFKKKKVCKDSFTTNNVSGNVRMEGKGIRLPKLGILTLIRHRKVKAGGKLKSVTVCHEKDGKWYCSISFEYPKTEPVYPEPSEDMKHIGLDMSAPHLYVDSNGELADFEKPHKKLQEKLAWEQRKLSHRQKDSKNYEKQRKVVARLHAKIKHQRKDRLHKLSEQLTREYDLISIEDLDMSALKQTLNLGKSYSDNGWGMFVTMLLYKGKRNGCYIIKIDKWFPSSKTCSQCGYVHKELRLSDRTYVCPVCGNLIDRDEQAAINIDLEGLRILLSA

SEQ ID NO: 54864 - protein, 400 aa, unknown
  TnpB Polypeptide
VKINILIYKTITIPVKCNKSDYNYLMQCNKYSAIIWNNCVKADQESKEKYNKYLTRSELQLMMKKSVPYITANSICIIILKYITARDAMFRSIKTKHENSNKVKLPYKEKKFYNTGWNYPVIKINKENNYLTLSKPLLPDNRKQKPIKCHIKNIPNNIVEIELIYRDGLKLAIKTKQENDNVLIQSNNEASIDLGEIHSITSIDNNENAIIITGKKLREIKQLRNKHLGKLKSRRSKCVKDSRQYKKYSKAIWRLKYVTDKKILDIVHKTTKLYLDYCIKNNISKVYYGDLDSCTRNTRKEKRGGKFVHQKLSQWNYGFLVRELINKLTRYGIQLIKVKEYYTSKKCPVCGILNIPKGRNYICECGYVMHRDINGAINILNDNSKFNINKYNNLKYLQIA

SEQ ID NO: 54865 - protein, 351 aa, unknown
  TnpB Polypeptide
MKHTKTLRLRIKDKHARVLAAMAREVNLVWNFCNETSHRAIRERRQWLSGFDLQKYTNGFSKCDGVLIGSPTIQQVCEDYAKARKQFKKAKLRWRVSNPNSSKRSLGWVPFKARALQYKSGQIVFAGQRFGLWDSYGLADYPLRAGSFSEDARGRWYLNVTVVVPEFVGPRQQCDAVGIDLGLSDVATCSDGTRLENGRFYRDLEPALAIAQRANKKARVRAIHAKIANRRKEALHQFSRALVKRCGTIIVGDVSSQKLVKTTLAKSVLDAGWGQLKTMLAYKCAHAGIVFNVVNEAYTTQTCSCCGAISSSSPKGRAGLRIREWTCECGVTHDRDINAARNILALGLSVP

SEQ ID NO: 54866 - protein, 435 aa, Moorea sp.
VILTYCYKIKPSPEQIAIMERWLELLRRHWNYALGQRLDWLNRTRSPIDRCSLISEPIGEIPKPVNYYTQQAALKETKRLFPEYKQIYAETQQVNLQRLNKAWDRWRKPDANGNRGGRPRFKRPGELRSRSVTKGQSFVFPRVNNSKAGAHLIDGVLKLSRIGSIPVVMHRLLPDGFTLKQCTVIKKADGWYCCISMKDDTVPEILPVDAVKSAVGIDVGLEKFLTTSDGEAVPIPQFYRNAQDRLAKAQKVMSRRVKGSNNWKKAKNKVALLNLYLARCRKEFHYQVAHWLCSKYDLIAHENLNIKGLARTKLAKSIHDAAWGKFLEILQAVAVKRGLLVQEVNPRGTSIECFNCGSRVEKSLSERVHFCFSCDVKIDSAKPTLRERDWNSGINILNRGLMAVGLPLNGCGKSAQDVEDQQISFVNLRSLHHNL

SEQ ID NO: 54867 - protein, 380 aa, unknown
  TnpB Polypeptide
MRKKKGVKNKAIKYRLYPTTEQEIYFSKCFGCCRKIWNLMLCDREKSYKETRKTVKNTPALYKSEYPYLKEVDSLALANVYLNLELAYKSFFNKKSGYPKFKSLKKSRKSYTTNNQNGTIAIKDNAIKLPKAGFIKAKIHRQPKSNWKLKSATVFQTTDGLYFVSVIFEYEENIGKTTNFDNCIGLDYKSDGLYKDSNNDIGTNHKFYRESHKKLAKEQRRLSRKIGSKKNETKSNNYLKQLAKVNKIYRHIANQRLDNLHKKSNEIANHYDVVCVESLNMRNMSNKGFRNGKATMDNGYGMFLNFLAYKLNDRGKYLVKVNKWYPSSQICSVCGKLHPEMKDLSKRIMVCDCGNTMDRDLNAAINIKREGLRLLKEMVA

SEQ ID NO: 54868 - protein, 584 aa, unknown
  TnpB Polypeptide
LGGIGQAGRRTHGGRPSALRPRQAQAGDVSRRGGCRAPHGRLRPRFQPRPEGRSGAAEAGAGTVLRPPRLDVRGHRRSRQRHELSQEGSQAAAGCHHRRPGGAAGHHAQGPAAALRRGTGVCHLRGEERRGRDPQSGRGHDVRGRPGKGCAGNHHRVQCPAVRQPLAQEPEAARWRAEGGGGIAMLIAHKIALDPNNAQATYFARACGVARFAYNWALDEWKRQYDAWKADNSLPKPSQAALRRQLNAIKREQFPWMLEVTKCAPQMAIIQLGQAFQNFFAGRARYPQFRKKGVHDRFTLTNDQFDIDGCRIRIPNLGWVRMRESLRFAGKIMSATISRVADRWFVSIAVDTEDPPKCKAENQGIVGVDLGVSALATLSTGEPPIPGPKPHKALLDRLRRLSRSLSRKQKGSRNRRKAKAKLARLHARIANIRLDALHKLTTEITRRFHTVGIEDLNVRGMMANRHLARSIADMSFHEFRRQLEYKAERRGGRVVVADRWFPSSKTCSACGSVQEAMPLSVRQWICPDCGTRHDRDLNAARNLATYAASSAVSACGEEGSGCGRTTAAKPASVKQEASSRRSQK

SEQ ID NO: 54869 - protein, 402 aa, unknown
  TnpB Polypeptide
MQAAKGRLYGGGLAGVARTGGQCRAVWNLFLAESAERYRAEGKFVFYAEMSARLPKLLRDDPRLAGLPHRAAQMTVQRLDRALKDCAKSKGRARRGFPRFKRHADRSDAFSFVGREVRVEPGRIRLPKIGWLRVRGLSLPDAADAKVVAVTQEPNGWHVSIQFEAAPKVYAEPTLPMVGIDGGLTHLATLSDGTRVEHPRLAKRAAKRIRRLNRERDRRRRGSVNRKRTVARLGRAHRAIGNARKDAMHKATRSLVDAYAGFAVEDLSLRGLMRTRMAGSLADAGLGGFLRTLRYKAEWAGREWRVHARFERSTGVCPVSGAVGPKLPLSIRSWACDSCGAVHDRDVAAAQVILCGAVGQVMPEPAAEMPRKRGAAVRGGGRASAQPSHGGPPSNIAKARAA

SEQ ID NO: 54870 - protein, 437 aa, Ktedonobacteraceae sp.
METVSIPHAKERSMSIKAFKYRMYANKQTTEKLHWVLDRCRELYNAGLQERRDAYEIGVRRHPGYYDEETRKQLTREHAIGYYEQKRELGDIKELRPEYQEIASHVLQDVIMRLKRAYDNFFRRVHNGEQPGYPRFQGRNRYDSFCYPDGAGWKLETQERPKERKGIVRVNLKLTKIGTVKLHLHRDMAGTIKTLTIKREGEHFYAVFLCEIGKSEPLPTSDEDVGIDLGVTHFAALSNGEFIDHPRSFRKAEKKLAKAQQALSRKKRGSHRRKKAVQQVAKCHRKIRNQRKDFQHKASRRLVNQYQVIIFEDLQVKNLTKAPAPKQDEETGKFLPNGASAKAGLNKSILDAGWSTFTQMTKYKAAWAGRVVIFVDPKGTSQICPKCGIVRKKTLDERWHSCECGCELDRDTASAKVILDLGRKQLLAGTRPTSATA

SEQ ID NO: 54871 - protein, 353 aa, Nonomuraea sp.
VCPDLSGLRFTHVLPGFVGASRYRGGVVTERDGRWGVRRSFRFLLRPTARQAAALAACLEDHRQLYNAALEHRRTVYARAGVSVRYGDQSAELRHIRADDADGQGRWSFSSQQATLRRLDKAFVAFFKRVGEGRTPGFPRFKGRGRFDTVEWPKDGDGCRWDSQPEHPTVAYVRLQGVGHVRVHRHRTVQGRVKTIAVKREGSRWFVVLSCDDVPAEPLPATGAVAGIDMGVASLVTTSDGGRVANPRHLATSAGRLAAAQRALARKKRGSQRRRKAVARVATLHAKVRRQRLDGAHKAALALVRTYDVIVHEDLRITNMTRSASGTIQTPGRNVAAKSGLNRSILDAGWGCS

SEQ ID NO: 54872 - protein, 402 aa, Actinomadura sp.
MERQVRRAFKYRFYPTSEQAAELSRTFGCVRLVYNKALEERTRAWHDEQRRISYAQSSALLTQWKKTAELAFLAEVSCVPLQQALRHLQTAFANFFAKRAAYPRYKSRKRSRASAEYTRSAFTWRDGRLTLAKMAAPLDIRWSRPLPQGAEPSTVTVSRDSAGRWFVSLLCQDMVTAAPPRDAAVGVDAGISTLVALSSGEKVANPRHERRDRTRLAKAQRNLARKAPGSVNRDKARRRVARVHVRIADRRRALLHKLSTRLVRENQTLVIEDLTVANLLKNHKLARAISDAAWRELRFMLEYKCAWYGRDLVVVDRWFPSSKLCGACGTVRGKLPLDVREWTCGCGAVHDRDVNAARNILAAGLAVSACGDGVRPQRDSSRAGRSSAKQETQRATAGIPRR

SEQ ID NO: 54873 - protein, 273 aa, Geitlerinema sp.
VLVREAKLKDGTPEQYQALDEAIRTGQFVRNKCLRLWMDTKKCTRAKMQALCKSLASEFPFAKKLNSMARQAHADRAWQAVNRFYKNCREGVKPAGYPKFKKHNRSVEYKTSGWKLSNDGYTLTFTDGFKAGIFSLYCNGKAREDILRSKINRVRVVRRADGFYAQFCLDIERREQGTYTGDVVGIDLGIKYFIKDQNDNPTLCPQFLRQSEQRLKKLQRQLSRRYRQGKKQSANYHKARRQLGKQHLKVHRQRRDWAIPPTPLSKGGYGGMR

SEQ ID NO: 54874 - protein, 410 aa, Geitlerinema sp.
MLVREAKLKDGSAQQYQALDEAIRTGQFVRNKCLRLWMDTRGCTRAQMQALCKDLAKEFPFAKKLNSMARQAHAARAWQAVNRFYKNGREGVKPVGYPKFKKHSRSVEYKTSGWKLSDDAKTLTFTDGFAAGTFSLYCNSAAREDILRSQINRVRVVRRADGYYAQFCLDIERQELGNYTGNVLGIDLGLTYFVKDQNDNAVAYPQYLRKSERRLKRLQRRLSRKHRKGKKQSANSHKNRKQLGRAHLKVQRQRKDWAIKLARALVASHEVVAYEDLPVRNLVRNHHLAKSISDAAWSQFSDFLDYYGKVWGKAVVAVNPAFTSQDCYQCGRRVKKSLSTRTHECVCGAKLCRDTNAAINILNRGLEMLGISTEGHSETACVSQETPGETNPAAVDRQRLAVRVVTEPGI

SEQ ID NO: 54875 - protein, 427 aa, Geitlerinema sp.
VARWKDIGESTTAMLVREAKLKGLPKQYQALDEAIRTGQFIRNKCLRLWMDTRDCTRAKMQALCKSLAIEFPFAKQLNSMARQAHADRAWQAVKRFYQNCREGIKPVGYPKFKKHSRSVEYKTSGWKLSHDGYALTFTDGFKAGTFSLYCNGEAREDILRSKINRVRVVRRADGYYAQFCLALERKEPGTYTGNVVGIDLGLKFFIKDQNDNAVVYPQYLRREELRLKRLQRRLSRQHQKGKKQSSNYHKTRRQLGKQHLTVHRQRKDWAIKQARALVSSNDVVAYEDLKVRNLVKNHHLAKSISDAAWSQFTDFLDYYGRVWDKAVVAVNPAFTSQDCHNCGHRAKKSLSTRTHKCPSCGIELCRDTNAASNILKRGMEILGMEWTNSTQGHWETGGKPQTTEETPTSADEGKPEPVSGVDESVTA

SEQ ID NO: 54876 - protein, 555 aa, Geitlerinema sp.
  misc_feature (140)..(173): Xaa can be any naturally occurring amino acid
MLNMAWEFKLEPTAEQVSEIEHILDVCRHVWNFALRERKDWLKSRKSPVNACSIRQEFILPADAPFPNYHVQAKRLTAAKTEFPQLKTVNAQVLQQVLRKLEASWESWRLKRSGLPRFKKPNRMRSSVFPQMLKNCIPPXXXXXXXXXXXXXXXXXXXXXXXXXXXXXXXXXXEIEHILDVCRHVWNFALRERKDWLNSRKSPVNACSIRQEFILPADAPFPNYHVQAKRLTAAKTEFPQLKTVNAQVLQQVLRKLEASWESWRLKRSGLPRFKKPNRMRSLVFPQMLKNCVSDEGIKLPQLGWVRVRWSRKIPDLFQVKQARIVRKASGYFVMLSLQADVDIPAVAPHGHPVGIDVGLEYFLSTSDGEQVKRPRFFNNLHRKLKSLQRRLKKKQKGSANWLKLQKKIARVHQRIADTRKDWHFKLAHHLCDGAGMIFVEDLDFRIMAKGMLGKHTLDAGLGQFVNQILPWVCWKRDVYYGKVDARGTSQECPDCGAEVHKDLSTRIHHCHNCGSTKPRDVASGQVICSRGQRQIEMPVESRRRGIGSLILVGWL

SEQ ID NO: 54877 - protein, 212 aa, Geitlerinema sp.
  misc_feature (60)..(93): Xaa can be any naturally occurring amino acid
MSFTARWMLVALLRNAQTVEWRFAKISQLESITVTTAGQQSPVMWRVDKLSVPVGNGESXXXXXXXXXXXXXXXXXXXXXXXXXXXXXXXXXXARGTSQECPDCGVEVRKDLSTRIHHCHNCGSTKPRDVASGQVICTRGQRGIETACGGEAAGAELAQSSWHLLKQEIFGATQGISLHTRNGLLGEDVKWHRHAEHRPHEHADGESQRYSG

SEQ ID NO: 54878 - protein, 396 aa, Anabaena sp.
MLVFEFKAYGKSAQLVAIDDAIRTAKFIRNSCIRLWMDVKGTLKNDLQKYCAVLAANFPFANELNSMARQASAERAWSSISRFYDNCKKGISGSKGYPKFQKDCRSVEYKSSGWKLADNRKSITFTDKKGIGRLKLKGTRDLHFYQINQIKRVRLVKRADGIYVQFCVDVNRSENIEPTGNTIGLDVGLKEYYTDSDGTMVENPKFLRIGEKVLKRSGRRVSRRVKGSKNRGKARQILGKRHLKISRQRKDHAVKLARCVVQSNDLIAYEDLRIKNMVKNHCLAKSINDASWYQFRVWVEYFGKVFKRVTVAVNPQYTSQECFSCGEVVKKTLSNRTHVCSCGCVMDRDENAARNILSRGLGTVGHTGTFALDASNAWGDETSTLVGANLQEQVMS

SEQ ID NO: 54879 - protein, 423 aa, unknown
  TnpB Polypeptide
MKDGLVSTQTSLPTKWPEAVPFVFGQADLVVSTLTLSSKVRPSCKAWLEQAAREVNQVWNFCNATSDKAWHGRYGGTRKWFSAFDMNALLAGCGEGFQQIGIDTAQCVSAEHATRRSQFKKSKLRWRKSGGSKRSLGWVPFKAPNLRFKVDKKEPSRIKVCFLGKSIRLFNAERLLDVYRLAQQGVGKLRAGNFSQDAVGDWYLNVVIDRVELQLTPVLGPESSIGLDPGQITAMTGSDGRALRSRRYREMEPKVQQAQKRAHPGRAKRLSRRVKRQRLDDRNKFCRGVVTDYARVWVGDLSPKKFAQSKLKGQSKSIHDAALGAAYATLESMGHRAGRVVGKVNERNSTRCCSNCQALTGPTGLDGNVVRHWACAACGTAHDRDRNSGENLRHAGEMGWQNRLSDPGKSVAPRHWRPFAGTR

SEQ ID NO: 54880 - protein, 418 aa, unknown
  TnpB Polypeptide
MLLSHKTSIKVSQDYANIIGHMCYAAYKLWNICNYERYHYKELGIENYPDWYYQKKVHKEDLWFKQLPSQSAQEVCKQLDKAWRSFFTLKRTGGIENPRPPRFKQEGISIVYMQNAVVHEKGNGRVRLSLPKQLKIYMEERYGIHARFLYLENAIFRNMDHIKQIRIAPPQNGVCETIVVYEREDTELKPDNGHYLSIDLGLHNLMTCYDLGNGSSFILGRKYLSLCHYYHKEIARVQSQWYSQQARQGIRYPKTSGHIRRLHRKKRHAVKDYLHKITRYIVGYCREKEITCVILGDIHNIRQGKDLGHKVNQKLHELPYEKLTGMLEYKLRLYGIRLIKQEESYTSQCSPLSREVSRSCAEPSNRKKRGLYCDETENYNADAVGAFNIMRKYLCAIKSKREVSVTGLKDPKIIKVAV

SEQ ID NO: 54881 - protein, 228 aa, unknown
  TnpB Polypeptide
MCYAASKLWNVCNYERHHYKELGLEKYPDWYYQKKAHKGDLWYRQLPSQIAQEICKQLDKAWRSFYVLKKTGGVKDPNPPRFKQDNIPVTYMQMGIRHEKGSDRLRLSLPKDLKSYMEETYGIHERFLYLENKIFRDMDHIKQLRIYPPENGKCDLIVIYEIEGTEQLSQNGHYLSIDPGLHNLMTCYDSGNGRTFILGRRYLSLEDTFIKRSPECSLSGMRSNRKEG

SEQ ID NO: 54882 - protein, 413 aa, unknown
  TnpB Polypeptide
MNKSCKFRIYPNKNQEVKLNRTLATCRHLYNDCLGERKRQAELNRLKKDFDVFPWGKPEWVNYYEQKRELAVTKTSFQKDVYSQVLQDVIKRVDKSFKNFFNGFGYPRFQGRNRYNIFTYPQSGFGLEDGKLNLSKIGNIRIIQHREIEGKIKTCTIKKDIDQWYVSFSCEIEDHPPVKIKTKTGIDAGLISLITLSSGEEIEPPKFLRKSEGKLTLEQKRLSWKKKGSGKRNKQRIIVSKTHRKIRNQRTDFAHKTSRMLVNNYDHIKFEDLQIKNMVRNHHLAKSISDAGWNQLMNFTKFKAECAGKVVEFVNPAGTSQTCICGYPVPKDLSLRIHRCPQCGLVMKRDRVSAILIENRPSTVGTTGINARQGLLIEGRCSGTLRGFSPEWFTFDGKYYNPGVARFSCIYAQ

SEQ ID NO: 54883 - protein, 357 aa, unknown
  TnpB Polypeptide
MLRAYKFRLYPNKEQKEYFAKCFGCTRFIYNQMLADKIEYYKKTGEMLNNTPAQYKKEYPWLKEVDSLALANAQMNLNKAYRNFFRDKSVGFPKFKSKKRNRHSYTTNNQKGTIYIEDKYIKLPKLKSMIKVVQHRQFDGEIKSCTVSKTPTNKYYISILVDEDIKQLPKSNNKVGIDLGITDFAITSDGEVFENPKWLRKSEKRLTKLQRDLSRKKKSSNNRNKARLKVAKLHEKIANQRKDFLHKLSSKIINENQVIVLEDLKVCNMLKNHKLAKAISEVSWSKFRMQLEYKAEWYGRETIIAPSNYASSQLCSSCGYKNPEVKNLALREWTCPECGVIHDRDINASKNLLKLAI

SEQ ID NO: 54884 - protein, 543 aa, unknown
  TnpB Polypeptide
MDKEVLKMPTEKKIDNNFVTVECLLAFDKDEGKERVLSTMRKFSSMVRFAYKRLLEGAERKELKKLLSRKYGINTRYASDAILLAQQTLDSCIEREQNPKKLVFGSREIFEQLKKKHLTGKSREKLRQKWEERRYGILYSRGDKSLQGNLNLRLVNLNNQWGLRVNLGNGEYVWARVIRSAKRKTDKWTGFINSLEHAEKTGDWFPYTVRLKLRNGKIYAQFSSEEEFPEMTITKDNGVIGIDINAYPFHLALVHTAKDGNLEKYEKISLDKLLEVSSEKREYLSWQTAHQVVGIAKREGKAVVVENLEKLPKGKRGDGLPKLRQKLHKWVYKRLLQKIEIVARRNGIQVIKVSPAYTSVIGKLKYAPLYNIDKDTAGAYVIARRGLGFKERLPKNYKELLKDKDFLSYAIAKTEDKIAKLKQEVRNEKNEYKRNRLKSALWKTRKELDLLLIHFRESGQSESATQQTVNRKMERVRGLTHVRQKSWQVLSVALAFSCLESLRDFSPLKRVIFARDWVGAAKQNGLAPLPGQGTTVLNMYSFV

SEQ ID NO: 54885 - protein, 367 aa, Symploca sp.
VAKKIHRKAKKKQKTGEVVRTDKWKLHPTELQHHYCHLTVSEYRKYVRALIGIAYTHWHEMADMSIKERLTFVESLIHPTAKRPSVKYEYFKQAKHKSFLKFPSYLRRAAINNAIGQVSSFVTRYRTWQSKVRNRRDARAPRLTADTGVYPALYQGQCIKFGDGYTTAEIKLWDGSDWTWHKIPVSGHRSRHLVDTNKRKSPSLVVSERKCHLSVPFGINPKDLPSKEKVLSVDLGINTTATVAVVSSTGTVMHREFIHPSKDIDRRDSRLRRISAKASETLGGKGGKKRCDQSGGNLRQVKGTSMKGKLYRGFCRPLYRKATNINREIAQKVSRAIVNIAKSFDVQVIVFENLSGWRPKGGKSVLL

SEQ ID NO: 54886 - protein, 298 aa, unknown
  TnpB Polypeptide
  misc_feature (294)..(297): Xaa can be any naturally occurring amino acid
VLFRTARIGLRVTPAQRRRCFRLLGSGGDVWAALIDVNQVRFRGHARPIFGYQAWCRETAGVTVGELSMTAMRSVVRRYSDACLVTAARKRAGERARYPRRKRGLVPLRWSSGTFTAEQNRVRLNVARGAPECWVRLARPVPYPIESLRSVTLLVDAGRLVLDVTAGLEAQDHDLDPDRIAGVDLGIIHPIAASTAEQGLLVSGRALRAEQRLHLADTKARDRKMAPKTPRRGQRGSKRWRQLRAKQRRAEAASKRRIHQAHHEAAKHLVEWAVAQRVGTLVVGDPRGITKQDXXXXA

SEQ ID NO: 54887 - protein, 459 aa, Mycobacterium sp.
MARFEVPEGWTVQAFRFTLDPTEDQARALARHFGARRKAYNWTVATLKADIEAWHVTGIAAAKPSLRVLRKRWNSVKDDVCVNAESGVIWWPECSKEAYADGIDGAVDAYWNWQNSRSGKRGGKPMGFPRFKKKGRDADRVTFTTGAMRVEPGRRHLTLPVIGTVRTHENTRRIERLISKGRARVLAIGVRRNGTRLDASVRVLVQRPQQPRVALPDSRVGVDVGVRRLATVADAGGTVFEQVSNPRPLDAALRELRHVCRARSRCTKGSRRYRERTTEMSRLHRRVNDVRTHHLHVLTARLAKTHGRIVVEGLDATGLMRQKGLPGARARRRGLSDAALGTPRRHLSYKTDWYGSTLVVADRWFPSSKTCHACGHVQDIGWAEHWQCDECSARHQRDDCAAINLARYEETSSAVGPVGAAVKRGADRKTGPGPAGGREARKGRSRPAAEQPRDGVRVA

SEQ ID NO: 54888 - protein, 372 aa, unknown
  TnpB Polypeptide
VANRAYKFRIYPNDAQKILFARTFGCVRMVYNHWLDRKIKQYEENKANVTYTVCAKEMAEMKKTEAYAFLREVDSIALQQSLRHLDTAFQNFFKQPKTGFPRFKSKKRNKSSYSTICINGNITISNGYLKLPKIGQVRLKQHRAVPNGYRLKSVTVSQTPGGKYYASILFQYEDQVQEKEMQRFLGLDFSMHELYRDSNGNEPAYPRYYRKAEKKLAREQRRLSKMQKGSNNRSKQRIKVAKLHEKVSNQRKDFLHKQSRQITNAYDCICIEDLDMKAMSRSLNFGKSVSDNGWGMFTTFLKYKLEEQGKKLVKVDKFFASSQICSACGYKNTKTKNLALRKWDCPQCGIHHDRDVNAAINIRNEGMRLVIA

SEQ ID NO: 54889 - protein, 419 aa, Moorea sp.
MLLTYCYRIKPSDEQIAIMDRWLELLRRHWNYALGQRLDWLNRTRSPVDRCSLVSEPVGEIPEPVNYYTQQAALKETKQLFPEYKQIYADTQQVNLQRLNQAWDRWRKPDASGKRGGRPRFKKPGDLRSFVFPRVNKSRAGAHLIDGMLKMSRIGSMPVVMHRPLPSGFTLKQCTIIKKADGWYACFSMLDDTVPELLSVDSVKSAVGIDVGLEKFLTTSDGEAVAIPQFYRKATNRLATAQRVMSRRVKGSKNWHKAKQKVALLHLHLSRCRKEFHYQVAHWLCSKYDLIAHENLNIKGLARTRLAKSIYDAAWGAFLEILQAVAVKRGLLVQEVNPLRTSLDCFNCGSRVEKDLSDRVHNCSSCGVKIDRDWNSGINILNRALMAVGLPLNGCGKSIQDIEEQQVSFANLRSPHHNL

SEQ ID NO: 54890 - protein, 402 aa, Escherichia sp.
VKRLQAFKFQLRPGGQQECEMRRFAGACRFVFNRALARQNENHEAGNKYIPYGKMASWLVEWKNATETQWLKDSPSQPLQQSLKGLERAYKNFFRKRAAFPRFKKRGQNDAFRYPQGVKLDQENSRIFLPKLGWMRYRNSRQVTGVVKNVTVSQSCGKWYISIQTESEVSTPVHPSASMVGLDAGVAKLATLSDGTVFEPVNSFQKNQKKLARLQRQLSRKVKFSNNWQKQKRKIQRLHSCIANIRRDYLHKVTTAVSKNHAMIVIEDLKVSNMSKSAAGTVSQPGRNVRAKSGLNRSILDQGWYEMRRQLAYKQLWRGGQVLAVPPAYTSQRCAYCGHTAKENRLSQSKFRCQVCGYTANADVNGARNILAAGHAVLACGEMVQSGRPLKQEPTEMIQATA

SEQ ID NO: 54891 - protein, 382 aa, Glycomyces sp.
VKQVVVVKLEPVDADRDAMRRTLHAANTFANEVSRIAYRNRSRKSGRVESFQGLQRRCYQDLKAAGFGAQAALHVIKKTRAAYAAVYGQVECGMLRGKRARAAMSKPVEFRPGGAQPFDDRCLSWDLEARTDSIWTLEGRRKNIPFACSRADLKVLVDHRQGESDLLERDGALYLAATIEIPEETEYEPVDFIGVDRGIVNLATTSDEINYQGKGLERYRRSQARVRAELQAKATKSAKRKLKRRSGRESRHAANENHRISKEIVSAAKRTGRGIGLEDLEGLRDRVRLHASQRGRISNWPFHQLAQFIAYKAKRAGVPVVVVDARHTSQQCPLCHHTERANRRTRDEFECRGCGLAGPADVIAAVNVRARSRMAWAVSQRS

SEQ ID NO: 54892 - protein, 447 aa, Glycomyces sp.
MVNRVTHLRYNYRIYPDVDQRTMLARTFGSARVVYNDALRIFQNAWKAGLDRPGFAAVARAVITEAKQTLDRVWLAEVSVVPLQQSLRHLQVAYNAFFASLRGDRKGPKVGPPRFKRRSARQSAEFTRRGFVLRETGKLYLAKIGEVKVAWSRDLPSEPSSVTVIKDGTGKYFVSFVVAVDGAPLPDLGEDAVVGIDLGLSAFAVTSSGKRIESPKFLRRAERKLKKYQRAVSRKQKGSQNGRKARLKLAKVHARVASQRRDFIEQETTRLVRESQVLAVETLNVHGMAAKGMRLGKSVHDQALGMFLRVLTAKAARAGRTLIAVDRFYASTQICSACEAKTGPKGKEELHVREWQCTDCGAVHDRDVNAAINILREGLRQIAEHEQLAAGHRKDQSNLGAESLNACGGDTKTSDTLAAPETPNTGTEPGTSGNAKPERDKSLPPSL

SEQ ID NO: 54893 - protein, 319 aa, unknown
  TnpB Polypeptide
LVKAVKESNGGKPILRKLSARLDYQDARVELDKEFVRIIIRNRWYVLRLKHRREYVERFRGFKWKEVHIKYENGKLLVSIVFESVYKPCMPKGVIALDINLRTITAYDGSKTRRYKTRFIDALSKRKRAEELQKKYSKRWRYNEKILEKVKSLHRKAKNIVIDWSWKFAKHVVLKALRHGYAVALEGLDGLRENANSKSDEVAWKFTMFAYRRLQHSIISKALKYGVPITIVNPRNTSSTCPRCVEKLVYIHKLAVCKKCEFKADRDSVGAMNIWFRALQAYAGVPGSPQRAPAVKGEARQSGGTKHEGMKKTFRAVHN

SEQ ID NO: 54894 - protein, 320 aa, Alcaligenaceae sp.
MQRLQAFKYELRPDGQQQRQMRRFAGSCRFVFNKALALQKARYEQGEKKLGWLRYRNSREALGTVKNVTVSLSGGKWFVSIQTEREVEQPLPQSTTAVGIDMGIARFATLSDGSHLEPLNSFKRHETALRKAQQAMSRKTKFSNNWKKAKARVQRIHFRIGNTRRDYLHKATSTISQNHAMVCIEHLQVRSMSKSGAGSTEKPGTNVRAKSGLNKAILDQGWFEFRRQLDYKLAWNGGYLIAVPPQNTSRTCPACGHVSKDNRQTQAQFACVECGFEENADLVSAINILRAGHARFACEVSDAVRSPAAGTRRGEPVPAD

SEQ ID NO: 54895 - protein, 366 aa, unknown
  TnpB Polypeptide
MIRAYKLRLYPNKEQAILINKTFGCKRFIYNHFLDLKSKLYKEDKKSLSYSQCSKQLTSLKRENDWLKEPDKFALQNTLRDLDTAYQNFFKHGSKYPKFKAKHDRNQSYRTTRSQNNIEFLGNKIKLPKLGKVKCKGYKEIAGKIVNATISRTPSGKYYVSVCCDEVEIKPLPKTNSQVGIDLGIKEFAITSNGQKHENPKYLEKSLKKLARLQRALSRKEKGGANWEKNRVKVARLHEKITNQRQDYLHKLSKKLVEEHDVICLETLRSSDMMKTKSMARSIGSVSWFELTRQLSYKAEWYDKSVFKIDSYYASSQNCSMCGYQNSEVKNLSLREWVCPECKSIHDRDINAAKNILNEGLKQLVS

SEQ ID NO: 54896 - protein, 388 aa, unknown
  TnpB Polypeptide
MYRTIAIRLPFDSSLDDTVKAYNSCCNDILKKAYKSKTRNVCLIHNLTYKRMRRKYPTLQSSLIQCARDQSMEMLKQCKYRTLPIKDASSGIRFDKRNVSIDMGIGMASISTIDGRKKYRFHLPSYFKRYIDWTVEAATLRLSNGKLILSLNCFKKDSMMREPKRMLGIDRGLRNIAVLSNNVFINSNHLTAVKKGYEYLRSVLQQKGTRSAKRKLKRISGSEKRFVKDANHCISKQIANMPASVFVLEDLKSIRHGNRGKTMNRFLHGWSFFQLEWMLRYKAEALGKHVISVDPRNTSVTCSKCGHIDKRSRNMSRFRCIKCGFDIDADLNASRNIASRGKSLLRRLQMRSAGIARGDRSKDCQSANRGVDSIRIASRKPPHSCGGS

SEQ ID NO: 54897 - protein, 405 aa, unknown
  TnpB Polypeptide
MKLVERHIIKKGNEQYKIIDHACFLSKNLYNAGLYHIKQEFLKSGKWIRYNDMDKHFKLSNQTDYRTLTNNTSQQILMLLDQNLKSYFQAIKSWKRDKKKFTGCPVFPKYKDKIKGRNLLVYTYVQIGYKDGYITFPKKEGLQQLKTNIPFNQIKQIRIVPQSSCYVIEVVYNIPDIIKENYNENYLAIDLGINNLATCVTTNNQSFLINGKPIKAINQYYNKKLASLKSNLKKNHNKNSSNATKQLTFKRNNKIQDYMHKSSKTIINYCLKNNIDNIIIGKNDGWKQDINIGDKNNQNFVSIPFDKFINQLEYKGIKYGLKVKTINEAYTSKCSALDLESIQKHDSYKGKRIKRGLFRTANKRILNADVNGALNIMRKGIQNDEFIHLSGRGFVYNPVKINLNK

SEQ ID NO: 54898 - protein, 395 aa, unknown
  TnpB Polypeptide
MEVKKMIKTIRVMLIPNNKQKTKLFQYASTARFAYNWALGREKENYKNGGKFLSDGDLRKEFTQLKKTNEYSWLNEISNNVTKQAIKDACNSYKRFFKGYSKFPKFKNRKFSTPSFYQDNVKIRFTNTHIKVEGFTTSKKKNKQKLNWIRLAEHNKIPMDCQYINPRIKYDGLNWYLTVGIEYEDSTILPSDNGIGIDLGIKDLAICSDDNKYQNINKTQKIKKLEKQKRRLQRSISRSYEKNKKGESYCKTNNVIKKEKLLLKLNHRLTNIRQDYLHQTTTKIVKTKPSYIVLEDLNISGMMKNKHLSKAVQQQEFYEFRRQIEYKSAWNNISVIIADRFFPSSKLCSCCGNIKKDLKLSDRIYKCECGNVIDRDYQAALNLKRYGENVLKSVA

SEQ ID NO: 54899 - protein, 262 aa, Catenibacterium sp.
MSGLNHRSKKPQYDLVWNRDYSLTQNRFSINTLNGRVKLSYFSDGMSKYLDYTIYKFGTARLVNKHGKYYLHIPVTYEIEESNISDICNVVGIDRGINFVVATYDSKHKSGFVSGKAIGQRENRWMQDINHRVSKALVENNPKHTLFVLEDLSGIRNATERIKTKERYVSVSWSFYDLEQKLIYKAKQNQSSVIKVDPRYTSRCCPCCGHVEKSNRNKKIHLFACRKCGYKSNDDRIGAMNLYRMGINYLADSQVPNTVVAE

SEQ ID NO: 54900 - protein, 236 aa, Mycobacterium sp.
VDRGLSALLVAATTDGVEVARITDAPRALAAGLKQQRRLAKSLSRKKKGSHRRKNAAARLARHHHRVANVRRHFLHQVSNELVKTHDRLVIENLSVAGMLRNHRLARAISDAGWSELARMLTYKQAWRGGQVVEADRWYPSTRLCPHCGTIDRAMTLADRVFTCSCGHTADRDRNAATNLARWGQSNYGSHRPPDPQAGGRDTNVRRRDGADQHRTCVGETVPDDAETDVQTAPTA

SEQ ID NO: 54901 - protein, 624 aa, Micromonospora sp.
VFADRVGWLADLVRGMADGVIVAHWSDADLAVFGGGVGADGRRLPSSGWMALRRLGWGAVAPAGVVVSDRVRRIAEEEAARALRLACHRRQVVAALLATWPDDPFARTGEEWSALRAQLSEGTDNATIRNRTRQIAGYMDMHGRLPADLCELEGQPAVARQVSLAAADRQQVVVDRVDDRVVRLWSQLPVCAAPASYRDWVWHAVDVVLPAPVPAGVKVCTPTLRPGDGKVRVDLPWQTPHTPPPVDGHTRALGVDWGVNTLLTATVADLDQAGSVLVEGRPLRFDATGVSAKLVRLRRHREHLHTKADHLSRLRDGRPAHAPALNAKLVVLEAEHSAVCARIRHLNKALAWSAARWLVDHATAVGATVIYVEDLATLEAGGGSRSLNRRLSGAVRGAVFTAIAHLAAKAGIAVVTVPVRGTSSGCPRCGRAVKHVRTPERSAAGYRWATCSCGLSMDRDHAASQRIAARGLANQTKTLRDRNGNAAIRTATDTPVRHRARRPTRAATIRPVRDRRKTAPTRRQVRPAAVKASRLLPLRRQVPAPAGSPPGTAGKRPAGRTPQETQPSGPVRQVPHTVPTTAPRHPHRVRGAVLGRGFHRHVHATPITDRDARTGETSASLRIT

SEQ ID NO: 54902 - protein, 467 aa, unknown
  TnpB Polypeptide
MKKAEKKIYGAYIFEHCADENEIKRVKEVIEEYRNTAKLIFDFLWNQFLTTGKLPDKMEISVKDIESKLSERYKQVCLWQVYGVLQSYMSNLKNKFKRTVLGLNLSEEDKLILLALNRKNAWLRYDKEEIKIQNKEGARIIRVEESHKDLAKTIFHNLLEKNKTPTFERISLNLSSGVVKLLLKKNEKNFDYVLKISSLEKGKPIYIPLKRNSYAESVEGKFLNACQIIETENRVEFRLIKELKKKEYEPRTEAIAIDLGLNPVIATDRGDLIGRKFLSYLKKIDKQITERMRYLQKKGINPNSDKKYKEYIRRTRAFLENEINRMLNKLVEIYRPKKIIVEKLDFSGINFHNPEMNRIIRNFGKKFFLKKLRRLKELNGIEIVEVNPSYTSITCSTCGFVSKKNRKGTHEFECQRCGKKINAQINAARNILRRGFYTNIKLHTPKEQVYQILLKQYLERFKKVLIK

SEQ ID NO: 54903 - protein, 368 aa, unknown
  TnpB Polypeptide
VNDLANKAYKFRIYPNEKQEVLFAKTFGCVRFIYNKMLSDKIEYYKKTKEKLNNTPAQYKEEFPWLKEVDSLALANAQINLQTAYKNFFTNPKSGYPTFKSKKTHRYSYTTNHVKGNITLTDGKLKLPKVGFVKTKQHRKIPDNYTLKSVTVSQTPSGKYYASILFEYENQIQEQELHNFLGLDFSMHELYKDSNGNEPAYPKYYRQAEKKLKREQRKLSLMQKGSKNRDKQRIKVAKLHEKVANQRKDFLHKQSRQITNVYDCVCIEDLNMKAMSQALNFGKSVSDNGWGMFITFLEYKLEEQGKRLIKVDKFFASSQTCSCCGYVNKETKNLAIRAWDCPQCGTHHDRDVNAAINIRNEGMRIMFA

SEQ ID NO: 54904 - protein, 445 aa, unknown
  TnpB Polypeptide
MGQTETMPLPEVVEFSNRSQKELQNHTQIIESVTRTVWLNLPEVTSDVVFRLRRLYTRAIRRFIISLKEGNCTEKEIYHELRKHSTFAQLPARMLDRAGREAYQWFSYWRKERFLTNELLKNWAKWASKNGIDLPEPLMGENRIVSYSGNLKGWPGSQRGQWPQTNLRIFIDSDSQDFHVSIDKVIIKTRAVIGGTPEKLLRQALNGKKGYTVGAPRLINREGKVYLAVPVTTNVSIPKIENLTHPTVIGVDLGINTLAAAVAISTDERILPAKVVSGKRLKHQLRRLWGKRRKASRLKKSEEIQALDKKTKRTIQHWTNTTANEVVRYATKFNQPVISLENLSTYQATRRRTPWANPQLRDQLGKWARGEIGKTIQRNAALQGIPVIWVNAAYSSRICPRGCLCMLTRSSRSVFQCPACGVKLPRDINAAIELARRGIRLIKKC

SEQ ID NO: 54905 - protein, 427 aa, Coleofasciculus sp.
MLVFEFKAKGKTTQYSAIDEAIRTAQFVRNKCIRYWMDNKNVGQKDLYRYNTSLRAEFPFVKDINSHACQTAVERAYSSIARFYSNCKKAIPGKKGYPKFKKNCRSVEYKTSGWKLSETRKQITFTDKKGIGQLKLKGTWDLNFYQLDRIKRVRLVRRADGYYVQFLVNPERSRRVNAENKIESQPTGNTIGLDVGLKEFYTDSNGYQEPNPRFYQEGEKRLRFLQRRISRKEKGSVNRKKAINRLGRKHLKISRQREEHAKRVARCVIQSNDLVAYEDLRIKNLVRNHCLAKSINDAGWYQFRKWLEYFGVKFGKTTIAVNPAYTSEQCSNCGTVVKKSLSTRTHICRCGCVLDRDWNAAINILKIALSTAGHVGTWILTPRLCSVLILSEVEGLNLNASGDPTSTLIGEILSRQAGSVNEESSSL

SEQ ID NO: 54906 - protein, 395 aa, Coleofasciculus sp.
VKQVLTIVVRLQPTEEQQGLLMETAGSFAAACNAINATVNPKLTNRNSIQAVCYHDIKAQWGLTSNHVVRACARVAANRLTAKHKGKKVNAFKPTSFDCDARTFQFFEKDWTVSLSTIGKRVRCLLRASNYHRNKLTGKKPTSAQVCLHRDGYWYVHIQLKSEPPKPIKSNIVIGVDLGRREIAKTSTDKGWEGKQLNKTRYKYTRVRASLQKKATQGTRTTRRRCRTVLKRLSGRERRFQKWINHNISKSIIEEAKALKSAVAIEDLTGIRERTNEKPRTKSERRRSNSWAFYQLRIFLEYKGIKEGIEMIAIPPAYTSQTCHCCLHIGQRTNKQFKCTNLVCGWLGDADFNGAKMIELWGCAVNQPGGSELLSCAIEPGLLKAHTIPGRVGVG

SEQ ID NO: 54907 - protein, 225 aa, unknown
  TnpB Polypeptide
VSIKAGRYYVSALVEIPNNKIANSSNEGIGVDLGIKDFAVVSNGKVYKNINRSARLKKLEKQLIREQRSLSRKYENLKKGESTQRANIQKQKLKVQKLHHKMDNIRTDHINKTIAEIVKTKPSYITIEDLNVKGMMKNRCLSKAVASQKFYEFRTRLKAKCDENGIELRVADRFYPSSKTCHHCGSVRKNLKLSDRIYRCECGYVADRDLNAALNLKDAKTYRIA

SEQ ID NO: 54908 - protein, 438 aa, Geitlerinema sp.
MAKTYTAQINRLPDDAELSAALEYLCRESNKLYNCTTYLARQLYFKAGKFSNGRWLSTQMKRNPHMKALYTSAAQQTCISVGEAFKGFKELLDLWDRGELEKKPKVPNYRKSDGLFQISYPKKWLRLTAKGVRVPMGTACQVWFQLPEIFIPFPTNLDWSDVKELQIVPRAGYFDAVWIGKGQPVSDYALDPNRVLSIDHGLDNWLTCVDSQADSFIIDGKHVKALNQWYNKRVATIKEGKDKDFWCSLLDRITGKRNRQMRDAVNKAARTVINYCLENGVGTLVFGWNKGQKNGSNMGRKNNQKFVQVPTARLKKRIEQMCELYGIEFIEQEESCTSRASALDLDEIPVYGEKPEGWESSGKRVKRGLYQSADGTVVNADCNGAYNIGRKAQVIGMQCKPTRGQLTSPRRLFLWSRPVSRVAEVLKLVKFTEESPSL

SEQ ID NO: 54909 - protein, 321 aa, Aerococcus sp.
MYQGIECKIYPNEKQRQLIHMTFGHTRFIWNEMLAMLNARYENNPDLQMLSYNVLSSLIPQMKKEYPWLREVDSVAVQCSVKRLSETFVRFFKGYSKYPKFKSKKNTRQSYLSTIRGNNIRFNDNQRYIKLPKLGWIKCKSSVLHIENERIKSVTVKYTPSGDYYISLLVTSDNQAMPKTGNVVGVDLGVSDLAITSDGQKYQSQRLHLSYQKQLHYWEKRMARRRLKAKKNGVDLADAKNYQQAKRQVARIHQRIKNIRKDYIHKITTDMVKSYDVIVLEDLKTTNMMKNHQLARSIAGQSWRMFRTIQRQSAKCTIRHL

SEQ ID NO: 54910 - protein, 415 aa, Okeania sp.
LITLTYQYKLKPTRHQEAEINHILDVCKSVYNYALRERKDWLSSRKSPINSCSIISEYIIPADTSYPNYNYQAKNLTIAKKTNPRLKSVNAQVLQQTLKTLDRAFSEMKSLGKGFPRFKKKMRSFVFPAMLKNCLGNNRIKLPQLGWIKIKQSRPYPDGFQAKQARIVRKASGYYLMITFFSSESVPENPIGKRSLGIDAGIESFVATSTGKLIKSPKFLLSSLRELKLLQRRLKKKTRGSNNWLKLQNKIARLHEKIANTRRDWHFKLAHQLCDFTDNIFVEDINFKSWSRGIVRKQSNDSGIGQFINEILPYVCWKRGKYYAKVDKNYTSQECPLCGHIQKKKLSDRKHNCSSCGYQLNRDVAAAKVIRKRGLIAVGHTVKEKRTACPEVPERVKTEQESLWRWSDGGTTQLV

SEQ ID NO: 54911 - protein, 399 aa, unknown
  TnpB Polypeptide
MLIAHRIALDPTNKQRTYFVKGAGTARFAYNWALGEWRRMLDLRKTDPTLLTPNDALLRRRLNEIKRDRFPWMFDVTKCAAQEAIIDLGSAFRSFFEKRGRFPRFKKKGFGDSFCAANEAGAFRIDGNRIKLPVIGWVRMRENPRFEGIAKRVTVSKTADRWFASILFDAAEPQRQCQPITAIGVDLGVADLAVLSDGTRVPGPKPHKALLSRVRRASRALSRKRKGSRNALKAKRRLAQLHARIGNIRKDALHKLTTRLVAGYRRIGIENLNVRGMVKNRRLARSILDASFFEFRRQLEYKARLRNATIVVADTFYPSSKTCSCCGSVKAKLDLSQRVYRCESCGYEADRDVNAARNLEKMAASFAVAACGEGRSGARRKPRVKRTSAKQEPDGRLAA

SEQ ID NO: 54912 - protein, 269 aa, unknown
  TnpB Polypeptide
MINAKMSVPTLEKKNKKWFLRFAFDEKVEINKTKLEEQLILAVDLGINTDATCSVMNVNGAILAREFINLTSDKDQLYHTLNKIKKVQQKYGSNNITKLWRYAKFHNEELAHKIASAITNTAIKYDCDVIAFEYLDMKGKKHGSKRQELHMWKKNTIQRIVKHKAHKNGIRVSHICAWNTSKLAYDGSGEVLRGKDAYLDTYELCKFSNGKIYNCDLSASYNIGARYFIREIQKILPAKVWSDIVAKVPECQKRTQCTYNTLLEINRVA

SEQ ID NO: 54913 - protein, 437 aa, unknown
  TnpB Polypeptide
MISTAQKIMLIVDSKTASALNCACGCARYAYNWARDTWFAKKAAGQKSVTCAELRKEFNEQKTDWMYESPKGSMDQAIKNFALAKKRHYENPDQFGFPKKKKYKSKRSFYIENDHAKLLNANHIKLPKIPMPVRLAEPVKQECLCGKINNFVVSKGSNDCWYISISYTYNDINVEYGTSENGLVGIDMGIKTLMQLSTGKQVANEKLLRQHAKRLKRYQRMMSRRQYNSVHYKDIKKTFDKKNAYIKNFRKDLIHKATTEIVKHNMVVAIEDLNVKGMMSNHKLASAISDCGFGMIRRFLEYKSAKYGTFLIKVGRFFPSSKKCSECGHVKEKLSLSEREYICEECGLVIDRDTNAAINILAEALFLELFNRFNTDIARRKFTPADLVALASSLLGTGETTEDDAHRLLTRDGRMAMVDDLFNRLWNQVANATINCI

SEQ ID NO: 54914 - protein, 423 aa, unknown
  TnpB Polypeptide
MIVKKGIEIKLYPNKSQKVFFAKTFGCCRFVYNQCLRIKSYIYEETRMSFQPKLKSFKEEWEWLKEADSQALANAYMDMNQAYQNFFEGRTKYPRYKSKKDRQSYRNAMCHKELDKLIVGNTIVLPKVGPVKCRFGKTFEHENIVKIYNVTIKKSKKGDYYCSICCDVDVPEMEHTGECVGIDLGIKSSIVMSNGEIIKKPHFEKKSERKIKHLQRKLSKAKKGGSRYEKVRIRLAAAHEKLGNRRNNFLHQVSHRIVRDYDVICMENLNIKGMQKNHCLAGALANQSLGTLTRMIAYKAQWHNRTVVKVGRFYPSSQICNNCGYRYRELRLSERSWICPCCGNTVDRDVNAAKNILDEGLSILENKGTPRTGEAVVIRPLCLAENPTVDDRLCDLKSSGAVMRETHLDSPVVHETHRSLAGG

SEQ ID NO: 54915 - protein, 392 aa, unknown
  TnpB Polypeptide
MLVLEAKLKGKQSQYDSLEEAIRTALFIRNKALRHWMDNKEVGKNELQKLCAVLAKDFEFADKLNSMARQASADRAWLAIKRFYDNCKAQKSGEKGFPKFKKRGHSVEYKTSGWKLSTDRKYITFTDGFKSGKFKLVGTRDLSFYSIKQIKRVRVVRRADGYYCQFCINVERKEEHQFNGKQLGVDVGLEFFYTDSDGNTVENPRLLRKAEKSLKRKQRKVSQCKKRSSNRRKSVKKLAKKHLKVSRQRKDFAVKTARALVQSSDLVVYEDLQVRNMVNNRRLAKSISDASWSLFTNWVDYYAKIFGVWAVAVAPHYTSQDCSVCGTRVKKSLSTRTHKCSKCGTLMHRDHNAAVMILQKGLKNTVGHTEIQASGQNDLYLGGETPLDKLAG

SEQ ID NO: 54916 - protein, 445 aa, unknown
  TnpB Polypeptide
LRTTAGQRQRCFGLLRSGGDVWACVLELSAVRRHRGAAPLAGYQELCRVLAADGPGIFGELSTTGARSILRRYSDAWMTTAQRRRAGDKSARYPRRKKALMPSRYYAGTFDLDGRRLRLPTARGVPLLVVRLTRDAPYPASSIRSVTLLADGSRLCVDVTAEIEVETYQPGEGPDPDRVAGVDLGIIHLFAVATEDGALLVSGRAARAESRLHLAEAKARHRAVARRAPTKGQRGSRRWRKYRARTQVLEGRHRRRLAQARHEAATTVVDVARQKRIGTLVVGDPRGVLDRDAGARQNLATRNWRVGQLMAVLTDKAQAAGIEVLLVDERGTSSTCPRCGAKVPKPKGRNFSCPHCGLHAHRDIVGAINIASRSPGGGTTVDPEGLAITHRRAGRHLPGRTRRDPRRVALEKKGALRGLWPAVARLEDVDNDDPGESLARDASAA

SEQ ID NO: 54917 - protein, 391 aa, unknown
  TnpB Polypeptide
VFKVRNEKRNKKAKIFDFLDGCMLNGKWIWNSLVAQTDSKIMGEDKVRKASSFSQKDFKTVVHKDFEGNDIEDSIDFLSAAQRDSVIDSFKHSLSALKALKKKGMKVGRIKFKSEFTSLTLKQYGITHKICGPNSYQIQGCKSELRVAGMRQLRQLEKAGIEYELATAKIVCAGGDYYIHQTVYVDKATWFAYKNRKNSKSKYEINALDLGCQKTATDAYGKTYNTQVEEPERLKKLQRKKARQMKAAGWNPKKKKKVKCSNNQWKVKKAIKREYQKLTNKKETEAIKLTREVLFETEVLIIQDENLTGWHKTGHGKKVQHGILGRVKERLMRSEKTHVINRWVPTTKLCTHCGQIMSELTQRDRHIVCPHCGHDDGERDRHSAQTMIWLY

SEQ ID NO: 54918 - protein, 514 aa, unknown
  TnpB Polypeptide
MGAQTPSYVVSTKVQLPESIAKRLEKSFRISNSAYNEALSFGLKRFEALKQNSHYQELLEARRLARKGIAKLKKAEKTAKGLTQQVKCYDKILFELRKAYGLTKFELQKYLGNQRRQPGSPYQQFNAGEIQVIAGQVMKTLEKVLFYQIKPHKVRFRSKFDLDVSYRNRVNTEATRLVPSDKKGIAYRLYINKASTFVDIPVKAFNKYQQMSLLRCEKIKYVQIIRKTIRGKKVYYLQIVCQGFPPSKVTKGEGVVGIDPGISTVAFASSSEVALVDLVPKNITRKEKLLKELDRQIERSRRVNNPECYKENGTIKKGARFKRPSNRQVRLRNRRRKAYRSLSEERKQLQGQLVNRIVSQVSIIRVEELNVKGLQKRSRDIRINPKTNRPYSKKRYGKAIFRAAPSSFRTALETRAFQLGIEVEVISPKDVKPSQYNHITQTFDKKSLSTRVYDLSDEYTGVQRDLYSAFLIGHIEKGRYQQEQLNQDFPDFYQQMKDFLHQPIETERLAWYLN

SEQ ID NO: 54919 - protein, 465 aa, unknown
  TnpB Polypeptide
VDGNPARKPGGNTGSVPYYALGEDTGRSGGKSLRVFSARLYGSRSRKNKKLLDGVKQKAGRGCRIMLIAHKIALDPNNVQATYFARAAGTARFAYNWALAEWQRQYETCKTDPALPKPSQMALRRTLNSIKGEQFPWMLEVTKNAPQMAIIQLGAAFKNFFAGRAKYPKFRKKGLHDRFGLTNDQFSVDGSRIRIPNLGWVRMRETLRFTGKIMSATVSRVADRWFVSITVDAPDDLHPAKAENQGVVGVDLGVSALATLSTGEIITGPKAHKALLCRLQRLSRGLSRKGKGSENRKKAKVRLAKLHARIGNIRKDALHQLTTDLTRRFHTIGIEDLNVRGMVKNRRLSRAVSDMGFFEFRRQLEYKAAQRGGMVVVADRWYPSSKTCSGCGNKLETLPLSARGWECSACGVVHDRDVNAAVNLKNLAVSSTVSACGEEGSGSGLVTRAKPASVKQESSSKATYG

SEQ ID NO: 54920 - protein, 131 aa, unknown
  TnpB Polypeptide
VKYLKTILRAYKYRIYPNKTQAELINKTIGCYRFVYNYYLAKKINLYKTEQKSMNYTACANDLKNLKKEYEWLKEVDSISLQQSLRDLDTAYQNFFRRIKNGEKEVGFPKFKSKKNPKQSYRTQYVSGDKG

SEQ ID NO: 54921 - protein, 432 aa, Fusobacterium sp.
MKVKRIVKFNIKKSHIDYKYIKTQLIESKEIHNFTNYILRQLYFKNSNKHKYSLEFINEYPSLKDLFLKYIEENKQFSSLFYKIICEFSKLKQYSINLKIVQNIVDKLKNDWTSYWKLLKMKKNKTYDEKINIPRYKKKYNLVEYNNQVISKKKLKQGYIGTDKMKQGIKIANRHKVLDCKCFRIYNKNDKILCELIYEKKIEQVKKNDRVASIDIGLENLFTIAFNYNKKGISIKGTKLKAINQYFNKEKARLQSMLPNKQYVSKFINQLLYKRTEQLRNYIGYYTNKLIETLRTERISKLVVGYNKGWKQEINIGSKNNQSFVNIPFRKILDILRYKLEDNGIEYKEQEESYTSKASYLDNDEIPIYKEETNEIKFNGRRIKRGIYKSKQGKIINADLNGALNILKKSGEKLIEELEYLRFDNIFTSKLV

SEQ ID NO: 54922 - protein, 405 aa, unknown
  TnpB Polypeptide
VTLHLSHKIRVYPNNVQETYFNKACGCRRLAYNWTLENIEKLYEEGEKSSKYGMCKLFNSIKEEQFPFVSEVTKWSPQKAIYDAWDAYVRWWKKTSKHPRFKKRGKSRESFYLGVNTFKVEKRRLKIPKLTSTIKMAQEIRFPGRVLSVTIGKDNNKWYASFLVEVLDTYKYPHTCENQEVCGVDLGIKTLLIVSEGTVYDNPKHLKRKESNLRRLNKSLSRKQKSSKNWEKAKKLLSRQHEKVRHARRDFQHKCTTSLVRENKYICIEDLNVSDMLKNHCLAKSIQDAGWSEIRRQLEYKAKLSGSVIVLADRFFPSSKLCSICGENNPDLVLNDRTWACSACNTTHDRDLNAAFNLENLARRYRDSINACGEDVSLDTLCSQQPLGSKKMASTSSVLTIREVV

SEQ ID NO: 54923 - protein, 390 aa, unknown
  TnpB Polypeptide
MKKSFKYNIRANNHTFDNTEKVLDLCRTLYNLCLEQRIYHWKHHRKSISKFAQMKQLVELKTVYPEFKQVPSQTLQDVIDRLDKAYDNFFRRVRNGEKPGFPRFRGRDRYDSFTLKQAGWEIVDKKYLIIPKIGRFKMKLSRPIEGDIKTVTIHKSLLGKWFACFSCDNVQSKPLPKTGKIIGIDVGCESFLTDSDGNKIDNPRFFKKSGDLLAQRQQSLATKKRGSNNRYKAKILVAKAHDKIRNQRIDFHYKTANQLVKNNDLICIEKLHNWKTFRNLNRSMRDVAWFSFFNILRFKAEDAGKEVIEAPASGTSQMCSGCGEIVPKTLDVRIHNCPHCKLSIDRDYNSALNIKRAGQTLVAETTESPEFIRESVKAKCYTPETSKKLP

SEQ ID NO: 54924 - protein, 383 aa, unknown
  TnpB Polypeptide
VEQKAILRKWFGTSRYVYNASVSLLDRKDTPRSFKKLVPLVFDELPGWHAETPRQIKVGAVMDACQAVKSAKVKCKETGEFQKVSFRSRKRKQTLYLRADSLKENGFYTRFLGEMKLSEPLPAKPQGKGKVSERDTDAEVKDSQLVFENGRYFLCVPYVEKKKTREPSVRIVALDPGVRDFMTFFCEDCFGWLGMQCINRIQRLCQHCDNLLSRATQEKRPLRRVLRKAANRIKVKIRNLIDELHKKVAHFLVTNFDIILLPTFQTKRMTKRGARKLRKKSVRQMLTLSHYRFKVFLKQKAKEYGVEVIDVCEAYTSKTVSWTGELITNLGGSKVIKSSEGHRMDRDLNGARGIFIKNVARALTVRPCTVDPGASKSFTSSAT

SEQ ID NO: 54925 - protein, 430 aa, unknown
  TnpB Polypeptide
MLLTYQYRIQPSIEQQAKMDLWCELLRRHHNYALGQRLDWLRRTRCLVDRCSLLSTPIGEIPGAFPNYYLQAGELKQTKVLFPDYKNVYHDVQQQNLKRLEKAWERWVKPDNSGRRGGRPRFKKKGELRSFTFPRVNSEKAGANIKGEVLTLSKIGAMPIILHRPLPDGFTPKTCTIVKQADGWYASISLEDQTVPASIPLDKIKSAVGIDVGLKEFLTTSDGETEPVAQNFRRSQKRLARTQRRQARMQKGSNNAQKQKNRVARIHQRIKRQRKEFHYKVAHKLVKAYDLIGVEDLNIKGLARTRLAKSILDAAWGEFITILEAVAVKRGVRVVKVKPHGTTVDCSTCGWKVPKTLEIRIHDCPKCLTVLDRDLNAAKNILVRAIQAVGLTVSACGGLLSWVTRHAGQLVRSFEAGMSSCEIGSLRHTA

SEQ ID NO: 54926 - protein, 372 aa, unknown
  TnpB Polypeptide
MEYTKGVKFRIYPNAEQQKIINQTLGCARFVYNHFLAVRRDNWQEKHESVTYVKSSRLLTEMKCHPDFLWLKSVDSMALQEALKNLDKAFQNFFKKQSGYPKFKSKHSHNQSYRTRNQSGGIRIIDGNIKLPRIGIVKTKLSREFEGPILNAAVSRTASGRYFVSLCVEMDIELLLGQNSGQQIGIDVGIKDFCSDDQGNTVANPRILKGMEKKLKHLQRRLSRKVKGSNNRNKARIKVARLQERIANIRKDFLHKESTKLVRENQLIAVENLKIKNMLRNHKLAKAISDVSWAEFFHMLEYKARLYGCDVVKVDAFYPSSQTCSCCGYQNRATKNLGIRKWTCPQCNTQHDRDVNAARNILSKALEMQKSA

SEQ ID NO: 54927 - protein, 398 aa, unknown
  TnpB Polypeptide
MYKCKYNKYRRKKEMIKSYKVRLEPNKQQEQQMFFQAGCARHVYNWCLAFQKSRYEDENIPKKERFIPSKGLSKYFTAYKKQEGNEWLKDCDCMVLVIAYTDACTAFKNFFREVKKGNAKSYPRFKSKNKTTPAFAPNYQAVKINENTVKLPKIGIVKLSRKNYIPIVKKYSNPRVTYDGLHWYISVGVEQEDYKPELNPTVLGVDLGIKDLAIVSDGTVYKNINKTAEMKKLEKKLKRLQRQVSKKYDMNKDGKVYHKTNNIIKLEKQILKLQHRIRDIRNNYRHTMTHQLVEKKPQKIVIEDLNVKGMMKNKHLSDAIGKQGFFEIQRQLQYKTQEYGIELVMADRWYPSSQTCSKCGHTRTGKDRLKLKDRTFTCPECGHTMDRDLNAAINLSQY

SEQ ID NO: 54928 - protein, 404 aa, unknown
  TnpB Polypeptide
LGFLLYKNSEPAERSNARRVLDHRSAATERRPADLILSYKYRINPNRTHAASLDAMLADFCSLYNACLQQRIEAYRRQGKSLHYVDQASELKAVRCAVPEIARWSFSAEQQVIRRVDKTFRAFFRRGKGFPRFRAQARFHAAEFRVGDGLTLRKSGKLGFVGVPGEIKVRWHRDLPSEPKSAILTRQNGKWYVIFHVEVAATERANDLTVGVDVGLTNLIALSTGETAERPNWTKRAAKGLRRRQRALARCKRRSNVRAKRKRALAKFQARIANRRRDALHKISRDIVSRFGRIAVEDLNIKGLAAGMLAKHVNDAAWAQLIQMLAYKAERAGCEFIRVDPRGTSQTCPECGHVAAKTLAERVHRCDCGCTVDRDVAAAMVVHFRAFGFWPGAGREESSEPVAA

SEQ ID NO: 54929 - protein, 373 aa, unknown
  TnpB Polypeptide
MKITRSSKCSIKFATNKKKQELQTVLQEYGKVVNFFIDYFWDKQIKKDELLKDVVNLPSTWLTARLCKVAAREAIDMIVAMRQRWRDEPNKLVKPIHKGKRMYVSCTIAELKDSKSAKTFDAWLHLASIGNKITMDIPIKFHKHYNKLCIKGKRLNSYIITLKDVQFVFESNVDPKKEGKNCIGIDTGINALASLSTGQQLGKDIKSCIERVKRCKAKSKGKEKARRALKQRIDEVAKEVVQLNPDLIVVENLKNLGKNSKVKRLLTKNIRRSIGTWNWKYWLERLEMQCERNRVSFRTVSPYYTSQTCPCCGYVDRKNRDLEIFHCQSCGHTDNADLNASRNILSRFLTGPYGASYKQENQTNLQSVSLCKF

SEQ ID NO: 54930 - protein, 274 aa, Haloferax sp.
VSDTFRALQPVTVSDSRLDSPLASHEAALDVGANNLVACSTTTGNQYLYDGRKLFGRFRETTDEIPRLQSKFPERRNLSESRKTESSGRLREGRYSSKRIRRLYRQRTNRRDHAQNALVRDLVERLYDEGVATVYVGDLTNVLETYWSVRVNEKTHNFWAFKKFIHRLAYVCEEYGISLEAESEAWTSQTCPECGDHEKTVRHEDTLTCPCGFEGHADLTASETFLRENNDCELRPMARPVRFEWDDHDLSGKPYPHERPKEVRTNPQVATVGR

SEQ ID NO: 54931 - protein, 451 aa, Streptomyces sp.
VIVVQLRYAFRVYPDAGQRIALAKAFGCARVVFNDVVRAREDARKAGKPFPKAGELSTRLITEAKRTVERSWLGEVSAVVLQQSLRDAEAAYKNFFASLKGTRKGPKLGAPRFKSRKDTRQSIRFTANARWNITDSGRLNLPKIGAVKVKWSRTLPATPSSVTVIKDSAGRFFASFVIDTDPAADANRMPDTDQSIGIDLGLSHFAVLSTGEKIDSPRFLRRAERKLKKAQRDLSRKRKGSKNREKARLKAARAHAQVTDARKEFHHQLSTRLISENQGIGVESLSVAGLARTRLAKSVHDAGWTAFVNMLEYKAQRYGRTLIKIGRFEPTSQTCSTCGVKDGPQPLSVREWTCTACGTVHDRDHNAALNVQQAAGLAVSACGAPVRPEPVLAQREETGSHGFPTGNRAVAAQQPVEKARILALQGEEHVNPTAPTPRARGRRCCGSELCR

SEQ ID NO: 54932 - protein, 386 aa, unknown
  TnpB Polypeptide
MKTIKTVKCKLEVNKDIEIILHESIKRFADCCNDVLAVSKEHKTTNKIKLQHLCYHQLKAKYELPANLVIRAIARVAESSKGKKPPKQYTPTSIAYDQRTFVFIEKKEEISISTHIERLHIKLRLGNFQKSLLAGQKPTSATLSYKRNKKAYYINIVLKKEVIVPSGNNPVGVDRGLYNIATTTKGQTFSGKKIMQTRKHYSELRQRLQTKDTKSAKRRLKQLSGREKRWMTDTDHCISKAIVHSCGNGDVIVMEDLKYIRDRVKIQKKQKLFIHSWSFYQLQNFIEYKSLEKGIPVIYIDPHYTSQNCSKCGQKGIRNKHSFVCPSCGHKNNADFNAAYNIQKAGLAFLDGLQSISPNVSIVDVKAPLGTETEISYKPTNKIVGS

SEQ ID NO: 54933 - protein, 468 aa, Sulfobacillus sp.
MMPFRTVCVRFLSTYSRITTSHFKNGTMIVIMSMFCSRHIPIPNSLGLSTHTKAHRQGSLKKNFRSYDNRFGKSISGHAVSACSRQEVPPLRPSKGTSKTKENETLSVLRFRLEPTKEQEQTLFRTFYLCRKLYNQALEERIRSYREKGISIRYTDQQNHLPAWKREHPEYKEVHSQVLQNVLQRLDQAFVNFFEKRARFPKFKNKFMFRSITYPQARDTYFHENTVYLPKIGGVRMMAHQPFDAASVKMINVKFHDGQWYVNLTYVTEAAASLTEIQNAVGMDLGLLALIATSDGEFFENPKWLQKSEKRLKRKQRQLSRKKKGSKNREKAKHELQGVHDHVANQRKDHLHKVSRSLVDRYALICMEDLPVKEMMKNHRLAKSIANAGWGRLTAYIEYKAKFAGKRVIKVPPHHTSQLCSSGCGTMVKKDLSVRIHHCPTCGLAIDRDVNAAINILHRGLEILQPVS

SEQ ID NO: 54934 - protein, 481 aa, Desulfotomaculum sp.
VKTTVKGTILQLTELQKNYLDNLMGRYCAAVHWSFKRLLDGWKVQDIRISVQAKFSLNSRQANDGVYDAQSTVKSQHELVKLHYENAKAKARFTEKRIAKTKSPAKIANLQKRLDKEQRQLAEWQYYLETNTFPPIVFGGKKLFWERCKGNITREEWREARSNRYLSRGDKTKGGNLNTRLYEIAGQSYLDLAAEQVQASKSVRYNRITVPIYLAHKPSKKTGKINGINYRQMVLNYLKTGNAYQVEILRRDGKYYVHVTIEEESPVLDNVRGAIGIDTNPDGLGVALVDYLGQYRGSQWLGEGEWTYARSDRRDNLIGEMTKKVVAMAKEMGNALVVEDLKFKNDKSVTAKFNRMSHGFIWSKFLEYVNRCAAREGVPVIKVKPAFTSVIGILKYQHMYGLSTHQSAGYVIARRGLGFTHENIPKELLDKLIKKKPEFKLMTNWKQWSAIKKAIQKHLKQKGVNSLVSWHVHRKELLDIG

SEQ ID NO: 54935 - protein, 275 aa, Acinetobacter sp.
MKTLKLRIKDKHCKVLDQLASEVNFVWNYVNDLGFKHLKRKGEFLSAYDVAKYTKGASKECNLHSQTIQAVTEELITRRKQFKKAKLKWRVSNKKSARRSLGWIPFKKVAIKYADGYVQYGKHQFKLWDSYGLSKYSVRTGSFVEDSRGRWYVCLVVDSSKQNKPTATKAIGIDLGLKDVATCSDGTVISNPKFYQKYEQKLGIAQRAKNKKRVRALHAKIANCRKDHLHKASTMLVRENALIVVGDLSAGKLVKTKMAKSVLDTVFSIQNNAQV

SEQ ID NO: 54936 - protein, 307 aa, Escherichia sp.
VKRLQAFKFQLRPGGQQECEMRRFAGACRFVFNRALARQNENHEAGNKYIPYGKMASWLVEWKNATETQWLKDSPSQPLQQSLKDLERAYKNFFRKRAAFPRFKKRGQNDAFRYPQGVKLDQENSRIFLPKLGWMRYRNSRQVTGVVKNVTVSQSCGKWYISIQTESEVSTPAHPSASMVGLDAGVAKLATLSDGTVFEPVNSFQKNQKTLARLQRQLSRKVKFSNNWQKQKRKIQRLHSCIANIRRDYLHKVTTAVSKNHAMIVIEDLKVSNMSKSAAGTVSQPGRNVRAKSGLNRSILDQGWPPA

SEQ ID NO: 54937 - protein, 520 aa, Meiothermus sp.
MPKGKDKNASAFRGVQAKLHLPSQEDRKALLDLMRRFSSAMRFAYQRLLEGHSREELKREDGPLCQLFRLNTRYADEAILKAQGVLDSARERGVDPRAVVFGRRGLFEGLKRKHLSGKRLLQLKREWREKRQGLLYSRGDRSKGGNLNLRLEVEDGALWLRINLGHRAHIRGLVLTSHPQRNALVERARLGEPYNVELNLRNGEIHAHFTWQEALPPIVATKERGVLALDANAHPYHLALVLVSPDGELRHHSTIPLNEVDRASNRGAKEIALWMAAHQVVDLALSRGVAIATERLKHLRKSRRGDGSGRWFRRKQHRFAYASLLQKVHTLARKKGVQVLEVNPQDTSTLGMLKYAPLLSLSKDTAAAHVIGRRALGLKEELPQSYGRLLEDPTFQSDAQSFYEGLLNDLYGRKEGENNPYLKRKPAREIGKTKQALGLLSSLRSSPGSQRGSTEGRNPPGANPWRVLRVGLFLPLLGREVPRDLSPLKPILLGGSWEGGKARLRSSPWGRAQSANGRFG

SEQ ID NO: 54938 - protein, 371 aa, Methylococcus sp.
MLRVHKIKLNPNQDQEIYFRKACGVARHAYNWALATWKRQYEVGEKPNEANLRKQYNAIKPVEFPWALEVTKCAPQQAIKNAGTAYKNFFDRLKKGLRDSFRADNGPATKGANALPADGKKIKLPIIGWIRMREAVRFSGTIQSTTVSHMADGWYISVLVETEDTLKAKSNGGVIGIDLGLKTFATLSKGAPVKGPKPHRALGKRLRRLNKSLSRKTKGGTNFSIAKAKLSKLHKRIADIRQDAVHKLSHRIATEFSVIGIEDLNVRGMSRNGNLARSVGDAGMRMFRTQMEYKAAMTGSFVYVHPRFAPSTKVCSGCGQLHDMPLGKDTLSCDCGLVMDRDLNASLILEYAASSAVSACGESGSGVALAA

SEQ ID NO: 54939 - protein, 493 aa, unknown
  TnpB Polypeptide
VHSVTVRISSDLGVTQVVKLRLNPSGAQVELLRGYCGTARAAYNILLFQVKANLGQRAAEKTYDIPDADLTPGLSWHKFGLEKLLRANRDTWLPWHAQVPYLVLDRQAHQLAAGLAKWKTGAAHFPRFRKKRGVGAGLVPVTFKETGAGWLTDGGRALALPLSKATRRELGSAAVTALASVPVVKDNRGRRAAKLITGGRGQVQEVTFSFSGGYWWASLRMRVLPAAKTQPTRHPDQSRAAAMGVDAGMGRHFATLAKPLSGVTDEVGHLDAPLFLRRALSDLAVAQRAYKRTTPGSARHAKALARVQQLHGRVAARRETWQQHLAITLTEHASVIGVETLSLRGMARRTRGFRFGRSVADNGFGLFVELLTRQAAKRGAAVVKADRFYPSSKTCSDCGAVKTKLPLSEREYACTACGLRLDRDVNAARNLAALASAGLTRPAGSGIPPRRLGHPARADGRGSCSCGVSDAGEASSRQTPAPLGAAALETPVS

SEQ ID NO: 54940 - protein, 669 aa, Streptomyces sp.
MAFRGLDTTTGEVLGAGGLGDRVGWLTDLVEEMAAAVIGAHWTRAEVDQLASGRAPSGEKLPGNAWMALRTLGWTAAVPDGVYVPDRVRRIAEEQAGRVLRSAQWRAQILDAVLATWPTAHPDPMRRTPAEWDALREACPDGQAVPASVLRGRTRQVLRFMTAHHRMPNDVCELEEAPGGGRQVVLAAADRQLTSLSRWADDPARYGVLTVRLPVRPDPRTRADWHPVKIRFRLPPTIEAAAALHAPTLRLRDGRIRLDVAHSHPAPRTRRDGHRTAVAFDYGLNTLLTGGTLTLTGGTQPTALTDGKPVFLRVDGVLAKADRLRIIGEQLWTKATHLQTLIDGHYHGSRPDPADVAKLAVLREEHRRVSRRRERLNTALAKTAARFMVEHARAAEAHVIYLEDLRDMEARGKGRTLNTRLSSSVRGQIVTETIHAAARYGIAVVIVPARGTSKYCPRCLTPFRHHAAPDRTTPGWKWATCPNPACGYSADRDVAAWQRIGARGLQHQHLSVLNRSDGSYVLRRTAQELDQPVQQSHPAPLSSSTPQAMPVDRTKSGPTRNHPVPRKRRRVPAPPATRAAAQASTARPGGKRPAGRTPQPPRRRSQRRPGRQAPHTMSTPTRHLPRGARLGAGFHLHAHATPATRQGPGHGPPRPLSSRGENPALPRKT

SEQ ID NO: 54941 - protein, 406 aa, unknown
  TnpB Polypeptide
LQLNLQPLTNVKQRKLHETYAAFKETASSTLQAIQASKPSTYTALHHIVYAENRRRQIASQLIEEAQRYAWQRRKITDTIQRPTVRFDKRLFSWRCTGRGHPALSVRANHERLGLPVQRDGAYQRLLEHIGDGWAATSVLMTCRYRFLVLLKKTPPTPQITENVVGVDQNSNGIGVTVMNKQSGRILKQLYLGRTISLRQVRYENRRAVLQEYRDKDGHRGKAGLKLKRLSGRQRSYVRTNTWLLAKQLTDLARAHNASIAIERLYKLSRRRGQMSRKSRRKTNRIPYGFFRHALTHKSRQLGIPVIQVPAKYTSQTCPRCGHISRQNRRNWRNFKCVRCSFEANADRVASVNICRKAIQAPYPVTRDQVLPTGASVSRLDMQDEEASWQPETPQSCKPTISIVGS

SEQ ID NO: 54942 - protein, 387 aa, Thaumarchaeota sp.
MKLLVTHRFRLYPNKRQERQMEDTLETCRRLYNSLLADRKERGTGFYEQEKSLVTLKSEEKFLRAANAQVLQDVVLRLDKAFQAFFAGLSRHPRFKRQGRYSSFTYPQLGGFKITGSRLKLSKIGSVKVKLHRAITGNPKRCTIIRDVDQWFACIIVEREQESADATLVNAKPPVGVDLGTANLAVLSDGTVFHNPKHFSHAVKRINTLQKSLSKKRSGSRKREKTKLLLAKAYRKVRRQRDDTAHKVSRYLADTYSCIAFENLKILNMVKNHHLASAITDSTWGKLRTLTAYKAERRGGRVILVNPAGTSQKCSECGEVVLKDLSVRVHRCPRCGLILDRDVNAARNVLKRGLERALVEEQPLLVQRRVISRFAPVKQKASGFIRG

SEQ ID NO: 54943 - protein, 367 aa, unknown
  TnpB Polypeptide
MIKSVKIRLKPTKNQQKKLWRSAGVARFAYNWALEKQKQNYQNSGKFIKNGDLRKEFTVFKKQDKNLWLYETSNNVAKQAIKDVDVAFKNFFNKKSRFPKFKSKKKSKPSFYNDNVKLRFKKDSFLLEKIGWIKCSEPWRIYSDEFYNPRVSYDGKYWYISVGQNYEPVQEELTKESLGISFLPSKLAYVSNGMNFDSIDNFAKVKKLNKKITRLKKSIVRKEKNINIKSFKNINKQTKKLNIVTRKLINFKKDLIYKVISMVVKTKPSRIVIQSLNIKHIKRNSMLHKSIKSQNVYNFKRILEYKCKLANIEFVESVDDPKIHTNTCYVCGNYQNSENIKIFKCEECGNRIDKISQSAINLSISNW

SEQ ID NO: 54944 - protein, 165 aa, unknown
  TnpB Polypeptide
MYKRDERLRHLYITAIRFLADELYRRGVRKLYIGYPIMLSQNNGNEYNTNIWWYRKIVLWIVDIFMEYGIEVEIVPEDYTSRECSICGDKHKNGRKYRGLYICSKTGKKINADVNAALNIARRLGYRVRVSRKIESYLLTHNGVKPLNPLQGTNTPDPEIRNPAP

SEQ ID NO: 54945 - protein, 350 aa, Noviherbaspirillum sp.
MILVYRYRVKSLNGLLNRQSRAVNFVWNYCNDRQKDALRFGRRWHTGFDLNKLTQGASRELGLHSGTVNAVCEQYAKSRSQKKRPYLRYRGKKNLGWVPLKGRELKREGDAFRFAGNTFRVFNSRALPEGKIKDGTNFSQDSRGNWFLNIVIDVAVDAVAARQPVRGVGIDLGLKEFATLSTGEKIETQRIYRNAEYALAVAQRAHKKRRVKAIHAQIVNRRNDFHHKLSHRIVCEFDYIAVGNVNAAGLAKTSMAKSILDAGWSSFRHQLAYKAVKHGAWFEEVNESFTSQVCSNCGALPDSRPKGIADLGIREWKCSDCGCVHDRDKNAALNILRRGRATLTVGIPVL

SEQ ID NO: 54946 - protein, 459 aa, Oscillatoriales sp.
MGRWGPIGLRRRSTCITVFWYQTRRISLSGHRGLKPRPKRTALIVNLCCNTSQFCARRSSIRKEVNAMLVFEFKAYGNKSQFAAVDEAIRTAQFVRNSCLRYWMDNRKIDKYDLNKYCAVLAHEFPFADELNSQARQASAERAWSAISRFYENCKKGIPGKKGYPKFQKDCRSVEYKSTGWKLAEDRKSIKFTDKKGIGKLKLKGTRDLHFYSFNQIKRVRLVKRDSGVYVQFCIDVNRKENIEPSGNTIGLDVGLKEYYTDSNGVMIENPRFLRKGEKVLKRCQRRVSRKVKSSKNRGKARQILGKRHLKISRQRKDHAIKLARCVVQSNDLIAYEDLRIKNMVKNHCLAKSINDASWYQFRIWLEYFAKVFGKVTVAVNPQYTSQECSSCGAIVKKTLSTRTHVCQCGCTLDRDFNAARNILRRGLGTVGHTGTFALDASNALGDESSTLTGEILFK

SEQ ID NO: 54947 - protein, 529 aa, unknown
  TnpB Polypeptide
MSKNTPPTGVLKIRILPTKSQQQVFKRWLGSYNYTWNKALHHVNSENARPSYVPLKNKFTVMNPIYLLGQSNPDVPDFMVFTPSKIRQYAVRDLCTSFESAKTNKRRGNIGSFTVKNKKKKNQRRSFSIPISKDGICLYDDELKRKCEGKQKAYISIYPEAMMECFTHIKTKPLRNVDYMLNSHLKYKKHVQSDEIWLEYLDFIKTCGVCVTMKQFYLREQNQSLYGMDLWQDYFDYMMEHGFYSSIDSDYKDVYKQEPVEKKKSDEKKKPVEKEKHVPFIRFFHRKHDKLLYSLTIDYDCIIKYEYGMWYIHIPYVKAPRPEPVSTDSIVGLDPGFKTFQTFFSETMHGKIQQTNRFKKLRYLIDYMNTLYYGKKKNRVWISEPDRTRYKNFMFKTNQLYRKQSNLAMQMHYDTIRFLTGKFNWILLPSFNTQEMVKGYKLSRETKREASQLQHYRFKQRLQSACSSMSHCKVLIVSEAYTSKTCGRCGNLKQNLKLVDRIYNCSKCKLKVDRDVNGSRNILLRTIQS

SEQ ID NO: 54948 - protein, 405 aa, unknown
  TnpB Polypeptide
METIINRGYKFKIAPTKDQKEFFLQSFGCARKIYNMYVDELYRKLEESSYQNGIIKKSELHLSKYTDFSRQFDYMKNVDAQCLSSAKMDFNNAIKKFNTEYDKKTYTKSSRKREKTLGIKLTFRDLKGMPRFKSIKNNDFSYRTYNQSQGEKWNLITLENSMLKIPKLKTLIKVKQHRPLPNNSIIKNCTVSMDNKGVFYVSLCVKYVIDIESKKSEKVLGLDYSQHDFYVDSNGKKANYPHYYRKSEEKLKKIQRGLSRKKLKSKNWYKQKQKITTLQRHIANQRLNWLHQESRRIAGEYDAVIVEDIDLRNMAQCLKLGKNVHDNGFGMFRTFLKYKLEEQGKQFIKIDKWFPSSKMCHCCGTIKEDLQLSDRWYTCDCGYENDRDYNAAMNIRDCGTRLLAW

SEQ ID NO: 54949 - protein, 387 aa, unknown
  TnpB Polypeptide
MRATVTAKIKINPTKQIVATIRTHTKCLQFCINQAWKHKIKNNIQLHPFVYKSLRKRGLPSQLAIACIKQACGIVKKAKSKPIIKKSSIRYNFPRSANIKGGKLVLRLLKVRQEFNLNIPACYKKYFSWKVAESLLRIDKKGRCFFLFTFSKEVTAIEQSGCSQHSVLGIDLGVNNLAVSSDSRFYNSAKVKQIKRKFKFLRSKLQAKGTRSSKRLLKKLSGRETRWMAWINHNISKDIVSNFDGNKIIMENLKGIRKKNRGKIMNYWISNWSFFQLQFFIQYKAERKGIVVDKVKPNYTSQICHRCGKLGVRSKGCFSCSHCGLSNFNSDLNAGRNLAHPKLVERQGAVKHLNIRCDEHKGSSRAIACEHMDNNNKSVTPHTLVCG

SEQ ID NO: 54950 - protein, 420 aa, Desulfurococcales sp.
MIKLMRTVVVPSVVLTKRKWEIVKELESVYEEVVRELVTYGFKNDVKSFIGLKKCMYHELRRKYPQLPSHYIHTACQDASTRIKSFLKLKRKKLAKSDKPLVNKITIWLDDHLWKPLGYTAIKVATHKGWITIELQPHKLYWKYINDGWKLRTQPKLKIKRRRVYVYFTFEKEIEIETDGNVISVDINESNITVKVLNKVYLLQTDIKRLTLGYANYREIMQSIKSNKHIKRVIHGRERNRKKDRRYKVANVTANIAKQLNAAVVLEGLPKQCPRNMISNVKDKKLRHRIYQASFRSLIKVIEEKCLERGVHVVKVNPRGTSSMCPFCNSKLMRGDAPRHLKCPKCNVEIGRDVVAVLNLEKRYLTLKGHMPFAPMPDEPTLEVAVLPMKEWMRRKSLPLMQHATVLNKMKRQGQTEISA

SEQ ID NO: 54951 - protein, 315 aa, Methanosarcinales sp.
MRYMDYQGVYAHILQNVLRRVDTAFQNFFRRVKSGAEKVGYPRFQGRNRYDSFTYPDPYGTGYKIEGGKLHLSKIGAIRIFQHREIEGKVKTCTIKKEGDQWYASFSVELPDPKPKKVNTSVGVDVGINTLATLSDGTEIENPKTLDKCDSKLRKAHRYLSRKKKGSNNRNKQKIILKGIYRKVRNARKDYLHKASRTLADNYDRIIFEDLQIKNMVKNHHLARSIHDASWSMLISLTTYKVEYTGGVVELVNPRNTSKHCSVCGCIKSMPLSQRTYRCPDCGAVMGRDHNAAINILNKHVPADCGELTPVEMVA

SEQ ID NO: 54952 - protein, 370 aa, unknown
  TnpB Polypeptide
MQAERAYKYRFYPTPEQETLLARTFGCVRFVWNAVLRYRTDAFYERQEKIGYTDASAFLTQLKKQPDTAFLAEVSSVPLQQCLRHQQTAFKNFFAKRARYPRFKSKKHRQSATFASSAFAYRDGQLTLAKCREPLNIRWSQSLPSAPTTVTVSKDCAGRYFISCLCKVETDTLTVTPKMIGIDLGLKDLFVTSDGTKVNNPRHTARYERKLARAQRKLSRKKKGSTNRAKARQKVARCHAKIADTRLDHLHKLTRQIVNENQVICLESLAVKNMVKNRRLSKAVSDAGWGELARQLAYKAEWAGRQFVQIDRWYPSSKRCHGCGYVLEALPLDVRVWDCPGCGTQGIDRDINAARNILQAGAALLAGADS

SEQ ID NO: 54953 - protein, 388 aa, unknown
  TnpB Polypeptide
MPRKAFKYRLSPTPKQEQHLLFVLRRCRELYNSGLEQRKAFYQMRRKSLGYTQQAAGLADIKMAYPAYQDIYSQVLQDVLRRLDKAFAAFFRRIRNGEKPGYPRFQGQGRYDSFTYPQVGFALAGNVLTLSKIGDIKVRVHRPLMGQVKTCTIKRDVDHWYVIFSCDVEEDTLPPCEEAVGIDLGLLHFATLSTGEAIENPRLYRKGLKRLKLLQQAKDRKTRGSHRRKKAVIALARAYRKVRNQRKDFQYKAAQALVHRFGLIVFEDLKITNMSAAPEPKPDPEKDGAYLPNGAGAKAGLNTSLLDAGWGQFQQYCVAKAASAGRRVLFVDPKNTSQLCSGCGQVVHKELEERWHSCECCCSLDRDHNAALNILFRGQEVAHRLTGL

SEQ ID NO: 54954 - protein, 344 aa, unknown
  TnpB Polypeptide
VLASHIYWCRRLGLEPSREVLEKIWAEVPSYWRWHVVDPRDPLYLFKGVEDTPRPFKVVLGVPLVDALHERKGAYIRGNRLVLRLNRRLEFEIPERALRWLEKRLAERPDRKYVRVFEKYGKLVVQIVLHKVNRVAFPENPLLVVVDVNSSYGMVVHFWDERLVKTLKLRPPNKGRGWRTVRKLMSLRDNLCNQACIRREQLNRYGALIRKTLGGSSKTWVQQGASRLIKRIRRMARRRGKQPLVIIDVPDHSSLRGMALQRTLLSFAKRLENLLSWYGVYWVEKRLYSSVCPVCGARLRLLKRTKNRRIMACTKCGFREDRDNVPLYWALKILPALKGEASER

SEQ ID NO: 54955 - protein, 367 aa, Chloroflexi sp.
MRKTYKYRIYPTKPQERQLARVLEECRWLYNETLAYRKRAWEERQESVGLYDTQRLLPAWKKARPSLKQVHSQVLQNVQVRVDLAFKAFFRRVKAGETLGYPRFRGQGRYDSFTFPQFGFSLESDKRRHNLSKIGDVKIVLHRPVEGTIKTLTIRRTPTGKWFASFSVEVECEPSPDNPKVVGVDVGLECFATLSTGEQIANPRFFRRDEKALAKAQRKLSTAAKGTPERAKRRQVVARIHERIANRRNDFAHKLARRLVDEHGLVVFEDLNTNGMLQNHHLAKSISDAAWNQLVQYATFKAECAGRRVVLVNPRNTSKMCSRCEMLVEKSLSVRVHACPHCGLEMDRDHNAALNILRLGLQSLAKA

SEQ ID NO: 54956 - protein, 514 aa, unknown
  TnpB Polypeptide
MRAQTPSFVVSVKLKLSGSIENHLEKSFNIANSAYNEALSFGLKRFEALKQNSDYQNLLGARRRALSGIVTLKKVKRKTTGLTQQVKLYDTALFELRKAYGLTEFGLQSHLAEQRRKSGSAYRQLNAGELQVISAQAYKALEKVLFYQIKPHKVRYRSKYDPNVSFRNRVNTTGTRLISSDKKGVAYRLYLHKVSTFVDIPVNAFNTYQQIALLRSEKIKYVQIIRKTIRGKKVYLLQIVCQGFPPSKVTKGEGVVGIDPGISTVAFASPTEVALVDLVPKNITQKEKLLKQLDRKVERSQRVNNPECYDDCGKIKKGARFKRPSNRQVRLRNRRLKAYRSLSEERKKLQGQLVNRIVSQASFIRIEELGVKGLQKRSRDIRMNPKTNRPYSKKRFGKAIFRAAPSTFRTALETRASQLGIEFEVISPKDVKPSQYNHITQIFEKKPLSTRVYDLSDEYPGVQRDLYSAFLIGHIEKGHYQQEELEQDFPAFYRQMKDFLQQTPETKRSTWYLN

SEQ ID NO: 54957 - protein, 479 aa, unknown
  TnpB Polypeptide
LKKKNLNIKETLEKEGKEKGGRKIHAMAVDLGINPVCTFYTPTENDRKDMFGTVFGDDVRDKVLCKENEIEKLQARIARRDWEREKERLNKIDEDNNNNKKKNGEQKKKKKSKSKKKKSKKKKKKTRNNYRTTTRRLAHRLAKLRVKLHEHVKNQHYRAIRILFTKADVIIVNPLRVADIHRTSKKNNTLGRTARRNMSVLSPGLFVQRMIQYSRGQDYKKVCFGLGEIGTSKTCPICFTVNEVDLSTKSLKCTSSSKCLTTVYIINRDVGGAVNNFREGHQYAVKISLGDFDGDDDDDDGNGDFNVGDDDDGDDDEDELEAGREFINRTLSAHFDECFRRDELEAGREFINRTLSAHFDECFRKDELEAEKELINRTLSAHFGECFRRDELEAEKELINRTLSAHFGECFRRDELEAGRELLDETPCDAFDDSDLAMKEEREKKRKAEDDNINVVDRVKIAREERKKEKQHRRSSSSS

SEQ ID NO: 54958 - protein, 194 aa, Fischerella sp.
AVSDKGIYHTILGEVIFKEALPQSFGDCRLVKAYGDYYLTVPEEVSRQQSENQGRVVALDPGIRTFITFFSESSFGEIGISANIQIQKLCFRLDKVISKIAKAKCKSKRRLKLAATRLRGKIKNLVDELHKKTARFLVDNFDVILLPTFETSRISKKAKRRIRSKSVRQMLTLSHYRFKQFLKHKAFETSKVVM

SEQ ID NO: 54959 - protein, 343 aa, Leptolyngbyaceae sp.
VIQLFGCQQVLIKSDRETQAIIEYLCSESNDLYNCAVYYARQVWFKTGKIVSGFDLTAEMKTNRHFKAGYASSMQQTCLNVGEAFKSFKQLLAKSRKGELDQKPLAPKYRKSGGLFTVTYPKRWLKLVNNQIRFPLGNQVKAWFGISEFFLPMPSNLDWKAIREIRILPRNGAFYAEFVYPMQTESCPLDPSKALGLDPGLNNWLTCASNIGTSFIVDGKELKALNQWYNKQVSTMKDGKPQGFWSRTLAQITEKRNRQMRDAVNKAARIVVNHCLENGIGLIVFGWNKGQKDSANMGKKTNQKFVSVPTAKLKDRIQGLCEQYGIQFEETEESYTSKASFQG

SEQ ID NO: 54960 - protein, 384 aa, unknown
  TnpB Polypeptide
MNMKLTRTIKIKLNIPIETVKPTIEAYTKAFNFVCQVGWNDSDSNGVSLHHKTYSDIREYLPSQLSISARMKATEALKAVKTKIRKKQKATCPTSRQIAIRYDDRSYNVWFDRNEISILTIDGRKHFPLSVPEYFKQYLTWKRCSADLFLRKDKVFLSIVFTKDIADPELTGKVVGIDRGIKKIAVTSENQFFGGGNIKKVSKRYEKLRSALQSCGSKSAKRHLRKISKKENRFRADCNHVITKHIVESLEPGTVIALEKLTGIRQTARLRKKQRKDLHKWNFFQFGQFLTYKAEARGAKIEYVDARYTSQKCSVCGYVSRSNRQSQAVFKCKHCGFSLNADLNASRNIRQNYLDAIRSPGRASVNKPIVRNEVAKAIGNCVTV

SEQ ID NO: 54961 - protein, 570 aa, Firmicutes sp.
MRKWKKKSSSPDSGISYTICGEYFPEIYPAFRSEEWSRGMEDPLDTEMRLFCSCTRWTFNRLQEGNSGKELKEQGQQIFGLNSRYCDNAILKAKAVIESQKELLVLEIEETETRLARAKKKLSYSEKDLDKAVEKNDPSKIEKFKRTVYGRRARVKKLADKLDELKVHQDNGTIPKVVFGGRSLWKRVCKGRATREEWRQARQDRLYSCGDETKGGNPNIKISWSGAPGYEEFFLSVTISHLSEQKGIDSKGRPIMTRAPKVKGKLWLPEKHRLKVLELLLSGAPYTVELIKGNDGRYRAHITFTVTAPVLTTNPNRGYLGTDTNPDGVALANVSYFGQPELWPEDFNIPYPKALHKFAGEFQVTIHPNGFLYIKMPELAYSRGSRRTYLIGVLAKVVVHIAKTLGKPIALEKLDFGKDRLDTNKKFNRMAANFPYKKIVEAVIRKAFKEGVGVKQVWPAYTSTIGCCKYMERYGITVHHAAAYIIARRAIGFRERITRELKQKIQVFKEKLDQKVNSLPGEGKGMTRKAKRLFKRLDEKVPVHNGLTRFKQESFYSVWRDLKQLVLLSR

SEQ ID NO: 54962 - protein, 432 aa, Thermoprotei sp.
MTRVTRTVIVRSIKLPRKVFKIFVELEGMYRNMVEQLVMYAVRNGIKSFTRLKALKYREMRGLYLQLPSHYVYTACQDASTRAKSFLRLKRLGLVEKEYPEVRRISIWLDDHLWKPNGYTSIRITTHRGWITIEFEPHKQYWRYVNRGWRLVNEAKVKLDKRNRQLIIYLTFVKDIEEYKPRGHLSIDVNEDNVTMLIDSTVYLFETNMEKLVLGYYYRRKKIQKKYDKLYGKKSRIKKKVLSKLKERMKKQDIKWKIANIIVKTAYEKGYAVVLEKLGKRVANNMVKRIRDKQLRHRIFQASFRGIQKAIEEKAKEYGVPIIYVNPKNTSKLCPIHNVPITYSNGSRIGRCSKGSEIWHRDVVACWNLFFKALWGNGSIASSPVGYNLDVRLVPLALNTTHDPIGIPKSLWVRWKSLEATLNNPNLQGMTL

SEQ ID NO: 54963 - protein, 279 aa, unknown
  TnpB Polypeptide
MLVFEFKAYGKSAQLTAIDDAIRTAKFIRNSCIRLWMDAKKESKIDKYALNKYCAVLAANFPFADELNSMARQASAERAWSSISRFYDNCKKGIPGLKGYPQFQKDCRSVEYKTSGWKLADDRKSINFSDKKGIGRLKFKGTRDLHFYQINQIKRVRLVKRADGVYVQFCIDVDRSEDINPTGNTVGLDVGLKEYYTDSDGTMVENPKFLRIGEKVLKRSQRRVSRRVKGSSNRGKGQQVLGKRHLKISRQRKDHAVKLARCVVQSNDLIAYVSEAGRS

SEQ ID NO: 54964 - protein, 250 aa, Scytonema sp.
VRKASGYFLMMTLECDVNVPDVVASGHPRGIDLGLDKFAATSDGELVERPRFLNTLHRKLKLLQRRLKNKQKGSNNRHKLNRKIARLHQRISDTRKDWHFKLAHKLVLDAGMMFVEDIDFRTWAKGMLGKHTLDAGFGQFVEILKWVCWKRGVYFAKVDKDYTSQVCPQCDTHTGKKELKDRIHSCLSCGYTTHRDVAAAQVIRNRGVSTLGRSVEENACGDGLAGTGNRLVKSQRSRKKGGEARLKPAS

SEQ ID NO: 54965 - protein, 403 aa, unknown
  TnpB Polypeptide
MKHTFKYRAYPTKAEERWLFAELRHQKQLQNYMLQMRNQMWDYGRKSVSMYDQIHHLKHLRATTSHYSDHPQDMQVSTIKRVSAAHEHFQRRCREGAEQKGYPRYKSSVRSLSWSLRKHTLKTGERVRQNPIRETGTRYNRLKVPKLGEVKIRQHRPLIGDPKEVTLKKTARGWYCFIVCEMPDTLKCVPKSACGVDVGTHDFLTTSDGGKTPNPRFYRRTERKLAKLQRDLSRKTYRSKRWYKAKDTLAKQYDIVTCQRLDFIAKTVYKLFRHKGFDVVVSEKLKPSNMVKNRPLAKSISDASWGMFFDWCIWVAKRDGKHFHQVPPQYTSQTCSECCQKLPIKLKLSERVFHCKCCGLQLDRDHNAALNILQRAACALRGEVWDAILCETRNPLLQQACWS

SEQ ID NO: 54966 - protein, 445 aa, Lactobacillus sp.
MGQRTYRNKLRRYQRLRQNQTEQQYEYLTERHVICPSHPKYAVLDHFSHLANNVYNQGLYRARQALFKGEWLSYQKLDASLKKSKRQKDSMIYGSMSNVHLVQQQLKLVARSMDSWNKARKAYAKNPGKFTGRPKLPRYRTKGGLSTIIVDNQTAKLRKNGYVEIPCMDKFKVKLAHPETTAIQEVRIVPQNRRFIVEVVYKTNRVTQYKPDNGRYLGIDPGVNNAFTLATNVPGITPVIINGKPVKSVNQFYNKQRARLTSLYARLGQSRVSHRLARLDFYRNQKMSRFAHEASKRIVDFALSHGLNTIIIGKNKGQKQRSRMNKQNNQNFIGIPHQVMINLIKYKANLAGIVVIQHSEAYTSQTSFLDREEPIRANGDQARKRKGLSPAKRRLKRGLYRADTGQQINADVNGALQIIKKVVPNAFADGIAGIGLCPVKWSLQF

SEQ ID NO: 54967 - protein, 433 aa, Rhodococcus sp.
VVADGNLSVVAVTLVGSHARRGEMKKRFSYRAYPDADQRAMLAKTFGCARVVYNDFVAYCRDSYEKRGVIPDLNEVKSIVTAQAKRTPERQWLAEVSSVPLQEAARDAQSGYRAFFMSIAGTRRGPRVNPPRMKRKSGRQVATFTTRAFTVRADGCSRWGFVRLAKIGEVKFRLSRPLPSCPSTVKVICEPSGEYRVSFVVEVEAACPAAVESVAGVDLGLAHLAIVAGSSGERYRVPNQRNLRSVEHKLAKAQRRLSRKEKGGRNRDKARIGVARLHARVARSRKDQLHNVARRLVDENQVIAVENLDVVALGKTRFAKSIADAGWGILLGLLRSKARESGREVVVIDRWFPSTQMCSQCGRVDGPKPLRIRIWKCECGAVLDRDYNAAVNIMLAAGLAESLNAHGGVVRRVLALADPSELGTHLADARASA

SEQ ID NO: 54968 - protein, 418 aa, unknown
  TnpB Polypeptide
VSRAERYRIRFDSPMQAALCARIAGACRYVWKAYRIGPRPSVSFFTLGQRFTKLRNDPAHAWLKALPCAAVRYTLKYLADAYTRSFTSADAGLPRFQSRHRTTPGFTLPDNVRLDGTRLYIPKVGWVRLAGHQGRYLGCPAKQVRLPREGDERHPRWYAHVFHEVPADRVRPPAATGALGLDRNVGQATDSDGRVYAVPDTANLEANIKRKPRKADKARERSRRNGQPLSHRGRRICGQLSKLRRRQKRQRPSAAHRHSRRMADTAHTVVIEDLDTKAMTKSAKGTVEAPGKNVKQKAGLNRVILKSNWGLLERQLAYKAGALVQVNPAYTSQTCAVCQQVDRANRKTQALFECTACGHTAHADHNAARNILVRGCPWTRPARGVGASARFTYPCQARWGPTAATTSRIVCGICGRGG

SEQ ID NO: 54969 - protein, 262 aa, unknown
  TnpB Polypeptide
VTSYTTKCVNQNIEVMGNAIKLPKLKKVKAKIHRSFCGKIKKATLSKTRTNKYYVSLTVETNDVMPLEKTNQKVGVDLGLVDFVILSTGERIPNQRFLEKQHKKLEKAQQELSRKTIGSSNFIKVKRKIAKIHEKIAHQRKDYIHKITDYLVKAYDTICMEDLAVSEMKETDSAKRNLRVSDVGWYELKRELEYKCKWYGKRLSVIDRYYPSSQICARCGHREGKKEERIRSWICPRCQTKLDRDINASRNILKEGLRILEI

SEQ ID NO: 54970 - protein, 424 aa, unknown
  TnpB Polypeptide
MPTATRSISFRLYPDKRQQALLDRKHTVLKDLWNAALEERIGAWRRGVRIRLSDQEKALKTVRAEVDGWRGLVHTHEAQTVLKRLELAFQAFFRRLREGQTPGFPRFRSADRFRGWSYKEHGNGFRVEPRPGWRHGFVTLFGVGRMRMRGVVRTPGRILKADVTRSVHGWTLNLVVETECAERERALNAQPGAFDLGVETLATVAYADGTFERVENPRHLAEEAEGLRAESRTLSALARARKISKRALKRARRDLARRHAKVAARRKDFLHKTTARLARLLSLIGTETLTVRNLTRSARGTVEAPGRNVAQKAGLNRSILDTAPTTFLNMLRYKAEEAGTEFLEAETRRLKPSQRCPDCDAVRKKPLSLRIHDCACGCRLGRDQAAALVLLRWAMAEVASRDPDAPPRDGHPAGTVGVSAAQAA

SEQ ID NO: 54971 - protein, 363 aa, unknown
  TnpB Polypeptide
MALKSHKIALRPTDAHRLWFAQQCGYARFAYNNALSDFKVGLSEDVFRSEIDLNNRWNQRKHEHDWVKAQDQRAGLYAIKNLGSAIENWKEKRAGFPKFKRRGCRQSYTTDEQSVKIESNRIKIPKLGWVRMFQELRFEGKIKRVTISRTAHRWFVSILVETGKPNAPRDTRGLPVIGVDVGINTLATLDDGTKYHNPRPLKCYERKLAREQRKLSKKVFGSNNWYKQKRKVERIHYRIACIREHEHDNTTTQILKKASVIGIETLKITNLLKNRNLAKALSDSALGGFLEKLKSKAEVAGIAIVQAPQFFASSKTCSNCGHKKEDLLLSQRQYTCESCGFTKDRDVNAAMNLKKLAVGHSES

SEQ ID NO: 54972 - protein, 397 aa, Microcoleus sp.
MIILEFKLKGKAQQYRVIDDMIRTAQFVRNKTLRYWIDNQGVKLVDLYKQCAIMAKEFEWAGKLNSMARQASAERAIFAIQRFFANCQAKKPGKKGYPQFKKHTRSVEYKTSGWALSADKRCLTFKDGFAAGKFKLIGSRDLHFYAPDEIKRVRVVRRADGYYAQFCINIERTEESISTGKLIGIDVGLNHFYTDSNGETVPNPRYLRKSEKALKRLQKRVSRKKKGSSNRKKAINKLGRKHLHVSRQRKDYAVKTALCVVKSSDFVAYEELQVKNMVKNHKLAKSISDAAWSQFAQWLQYFGKMYGKTVIAVGPQYTSQDCSACGNTVKKTLSTRTHICGCGAILDRDRNAAKNILAKGLKQAGINSNTVGHTEINAWGQNDLYSLVVTSTSKSTG

SEQ ID NO: 54973 - protein, 387 aa, unknown
  TnpB Polypeptide
MVKAIKVMLIPNNVQETKMFEYAGAARFAYNWALAREKENYEKCGRFISDSELRKEFTKLRHSDEYTWLLNISNNVTKQAIKDACTAYKNFFKGLQKFPRFKSRKRSMPKFYQDNVKIQFSNTHVKLEGFSSSRKANKQKLNWVRLAEHGRIPTDAKYMNPRISFDGLNWWISVCVEFPDCKEILNDDGVGIDLGIKDLAVCSDAVKYKNINKSQKVKKLEKQKRRLQRSISRSYEKNKKGESYCKTNNVIKKEKLLIKRNHRLTNIRKNYLNQTISEIVNRKPRFICIEDLNVSGMMKNRHLSKAVQEQGFFWFRKQLEYKCSDKGIQLIVADRFYPSSKLCSCCGNIKKDLKLSDREYRCECGNIIDRDFQASVNLKGYGERFAS

SEQ ID NO: 54974 - protein, 381 aa, Halophilic sp.
MLDVHRTYRAKIRNHSQVAESLDRHGWSASKLWNVANYHSREVWEETGEIPDHEELKNELKTHPKYKGLHSQSSQRVLEELAESFNSWYSSDDERDNPPGYRKENYYDQQGLRVHEEHPRSTVTWKQNGIRHDTKNNRVRLSKGANHKDRPRAWEYILVEYETRPGVAVDNLQQVRAVYDQQKEQWELHLVCKDEIETPNAPGNETAGIDLGISNFAAVAYSTEETGLYPGNRLKQDGYYFSKEIAKCDDSSGDRATRLHNKWSERRTHFFHSLARHIVERCVEKGVGRINLGKLNGIREDENGGSKNWGKHGNLDLHGWAFDRFTSILEYKAKVEGIKVVEVSERDTSKTCCVCGRENDSQRVERGLYVCEACDAAFNAA

SEQ ID NO: 54975 - protein, 430 aa, Halophilic sp.
MEYTHRYRAYPNREVAAELTRHINIHRQAYNYTRYEYTNLPDDTDTIGSAYKHHKRLKPWKDEFPVFGEVHSKALQKTVTRFYDNLSNLKDKKDAGYNVGWLKWKPPREFRSMTYSQSGFELKNTSGQTATLWLSKIGDMPLTYHRDIPEEAVIKEVTVKHESTGEWYVSFALDVDDEHLPEKPPVETLNAEDCVGVDLGIRNYIHTSNGISVGKLDVEAEYERLRKAQRTLSRREHGSENWETQRQRVASIKRRLRRKTLDFQHKLTTWLVTEYDAVFVEDLDVKRMLEGSQSAKNKQDAAWRQFIQLLEYKADLHGCHVRQVKPENTTKMCSECGVKTDKPLWVREHSCPSCGFELDRDWNAALNVLERGLKQLGLGQSEVQRLLETGATVDDDQAWSVSASTVVETGSPTREQGSPDLKEAATVAAE

SEQ ID NO: 54976 - protein, 428 aa, unknown
  TnpB Polypeptide
MLKTFKFRLYPTPAQEKCLFNTLAVCRHFYNMCLEDRKWSYELEGRSISKYDQVKQARLYRKTFPQAKPVYSQTLQSVAIDVSKAFDAFFRRVKAGEAPGYPRFKGRIHFNSFNFPQFGSGAKLDGRRLKLFGIGRVRVRWHRPMEGDIKTVRIVHKAGQWYACFACDIEAKPELPKTGRIIGIDVGISALVTTSEGEKVENPKHYRLAQAKLRRVQRSLSRKKRGSKSRRKALKRVQRQQMHTANQRGDTLHKLSTALIQTCDGVALEDLAIRNMVRNPHLSKSILDSGWGMFKQFLTYKAGNAGREIRFVNPAYTSKCCSDCGTAFQEFSLSTRWVTCDCGLSLDRDHNAAINILRKAGWDTPVVANGDTGLRRTRSPRLMAWGVSLSNEFKIEIGLTIVSILMRKIFLPERCLLKQKHTCKGHYD

SEQ ID NO: 54977 - protein, 485 aa, Mycobacterium sp.
  misc_feature (384)..(468): Xaa can be any naturally occurring amino acid
VRPAVRQARCAEPGQARIGGRRRRVGGCLMAKFEIPEGWMVQAFRFTLDPTAEQARALARHFGARRKAYNWTVATLKADIDAWQATGIQTAKPSLRVLRKRWNTVKNDVCVNIETGVVWWPECSKEAYADGIDGAVDAYWNWQNSRSGKRDGKRMGFPRFKKKGRDPDRVTFTTGAMRVEPDRRHLTLPVIGTVRTHENTRRVERLIAKGRSRVLAITVRRNGTRIDASVRVLVQRPQQPKVTDPGSRVGVDVGVRRLATVATADGAVLERVPNPRPLDAALNELRHVCRARSRCTKGSRRYRERTTEISRLHRRVNDVRTHHLHCLTTHLAKTHGRIVVEGLDAAGMLRQQGLSGARARRRGLSDAALGTPRRHLSYKTGWYXXXXXXXXXXXXXXXXXXXXXXXXXXXXXXXXXXXXXXXXXXXXXXXXXXXXXXXXXXXXXXXXXXXXXXXXXXXXXXXXXXXXXRGREPATRLANNPETGC

SEQ ID NO: 54978 - protein, 470 aa, Mycobacterium sp.
  misc_feature (355)..(365): Xaa can be any naturally occurring amino acid
  misc_feature (375)..(439): Xaa can be any naturally occurring amino acid
MARLKVPEGWCVQAFRFTLNPTQTQAASLARHFGARRKAFNWTVTALKADIKAWRADGTESAKPSLRVLRKRWNTVKDQVCVNAQTGQVWWPECSKEAYADGIAGAVDAYWNWQSCRAGKRAGKTVGVPRFKKKGRDADRVCFTTGAMRVEPDRRHLTLPVIGTIRTYENTRRVERLIAKGRARVLAITVRRNGTRLDASVRVLVQRPQQRRVALPDSRVGVDVGVRRLATVADAEGTVLEQVPNPRPLDAALRGLRRVSRARSRCTKGSRRYCERTTELSRLHRRVNDVRTHHLHVLTTRLAKTHGRIVVEGLDAAGMLRQKGLPGARARRRALSDAALATPRRHLSYKTGWYXXXXXXXXXXXPIVENLPCLXXXXXXXXXXXXXXXXXXXXXXXXXXXXXXXXXXXXXXXXXXXXXXXXXXXXXXXXXXXXXXXXXSAEGNRPPGRRTTPRRGASQVTTKDHSLATV

SEQ ID NO: 54979 - protein, 250 aa, Geobacillus sp.
LQQVRIVPKGSIYVIEVVYKKEIPNMIRESNRVVGIDLGLDNFVTMVNNIGETPIVINGKGIKSINQYYNKQKAYFQSILKKQNGLDWSKRLEKLTLKRNNKIKDFMHKASRHVVDWCVKHNIDTIVIGKNDNWKQEVDLGKRLNQAFVQIPYDMFIHQLQYKAEEQGVRVIVTEESYTSKCSFLDMEEIKKQKQYKGKRIKRGLFQSEKGILINADVNGAYNIIRKVFPKAFADGIEGVGLHPVKLNVA

SEQ ID NO: 54980 - protein, 377 aa, Proteobacteria sp.
MLKTMKYRLRPTKKQAHLLERQLEECRTLYNHFLEARKRAWEERRTSLTYHKQAVTLPALKHYCPELSNVHAQVLQNVAVRIDLACKGFFRRGKAGDTPGYPRVRGAGRYDSMTFPQYGNGCQMTGGVLKLSKVGAVRVVAHRPLEGLPKPWTIRRASRRKWYVTIACEFAAQPLPPTGDAGGIDVGLLRFATLATAESTPCPTFLRTDEKDVQRTQRQVSAATRGTPARRKRRAIVRRVYERIANRRTNFGPQESRRLVHRFGIIAVEDLSVNQMVHNHCLAKSIQDAAWSQCATLLSYKAAWAGRAFVAVNPAYTSQDCAGCGHRHKKTLAERVHQCVCCGLTRDRDHNAALNILRLGLQSLGRVPRSSGLQAGE

SEQ ID NO: 54981 - protein, 587 aa, unknown
  TnpB Polypeptide
MTHLTEQFHIPEGSHGACDRLTTLVQRHARRVLTEEYWRDDHLAALHDHTGQSYTYIRDDDSDTFQDTEEYLYSRFKRCVYHRVTHVLDAHTDEYDAFQFVTDTLPEQKIRRIGWQRIRTRLFDDTDSPYIEWRVLESVVSQLNDYYDQHGRFPDAYTELVECPEPNGTLPYAPDTGDYHIHELSVEDGDLVVILTAPDSLSPESHHDWTDHELRFPIHTRFQQMLDSGDLKAPTLYASEHGYTLDVPVTVPEAECQTVDGRVLAVDLGVKKQVTAVPIEHNSDEQRQVAPPQFLDHPAKANLFRLKADAEGINDCLAELRRLGKAHTDRFDHLLSEFRQTRQKERRLREQIQHDIANELVWLAVESGCETIVFESLGQFDSGETSGTVAWSISSWARGELLDFVAYKANLLGIDVETVTPWGTSRYCPRCGERGETVLAPDDHTACRHGGHFHCPDCGYECDRDVVGALNVGRKHLAGTQMEEANSVAYMEAENHASFPSRDGSCDESVDDEQRARSAGVQSATDKQDAASGRQTHLSQFRATPLTVMCGERDTGGLHQNQRRNTGLRKPSSSVTRYILASTTEYS

SEQ ID NO: 54982 - protein, 280 aa, Robinsoniella sp.
MTERPRFKSRKKTKPSFYNDTSKLKVNAKAVLLEKIGWVTIRPNQLPLSPCKYINPRISFDGKYWYLSIGLDQEQPYVELTGESIGIDVGIKDLAICSNGMTFKNINRTRVIRQMEKRLRRLQRKVSNKYQQNKNGKEYVKTSNIIKLERKIKLLHRRLANIRVNHLHQATNRIVKTKPSQIVMETLNIKDMMKNRHLSKAIAQQCLYEFKRQIQYKCEWNGIACLEADKWFASSKICSGCGNKKQKLSLSERVYKCDSCGLIIDRDYNASLNLSRYELA

SEQ ID NO: 54983 - protein, 371 aa, Halobacillus sp.
MAKQNKAYKFRLYPTEEQEIVIHKTFGCVRFIYNKMLSERKETYDRLKDDKETLKKVKHPTPAKYKKEYSWLKEVDSLALANAQLNLDKAYKAFFKGNAKFPKFKSKRHKQSYTTNVVNGNIELLDRHIKLPKLKIVKMKQHRQIPVEHNMKSCTISMTASGKYYISILTEYEKEIKGKEIQSVVGLDFAMDGLFVDSETGKKANYPRFYRQMLDKLATEQRKLSRKKKGSSNWNKQRIRVAKIQEKVANQRKNFLHHTSKEFVVNYDAIIIEDLDMKGMSKALQFGKSVADNGWGMFTSFLLYKLHEQGKQLVKIDKWFPSTKTCSSCGSVKEVALSERIYHCACGLNLDRDYNAALNIKKEGIRLLAIA

SEQ ID NO: 54984 - protein, 337 aa, unknown
  TnpB Polypeptide
MILTYKIKHNHNFKEELKKAKEVAIFAINNRDKLSSKYVKYIGLNSAISSQILRKYGRNRKAKYVKSVKLTIPGQKIKINKEEKTLYIPSLKLKDIKYYFPNNFQKVNQIEADNKYLYVSVQYHEPPVIQTNDFLGVDLNTTGHSAVVSIPKTGKVYKFGKKALYIHNKYKEIRRDLQKKKKYKLLKKIKNRENRIIKDLNHKISKKIIDIAVKNKCHVSMENLKGIRKAGSNKSFRYSLNSWSFHQILQMIDYKAKKNGILVTLIDPRYTSQRCSRCGSLGERNDKFFKCPECGHVDHADVNAAFNIALASHSIDRSTIDRDIVEGNNDIPKEATL

SEQ ID NO: 54985 - protein, 413 aa, unknown
  TnpB Polypeptide
MADLLFHKAYKVRLYPTEKQKAQIDTTIHCCRFLYNRMLAERIKVYEELKDNKEALYAHKYRSPADYKKEFPFLREASSWALNNETRFLQAAYRGFFRRNKLVGIPSGFPKYKSRKKDRWSYTDYSSMNIPRIKCSKLTLNKLPGVKFRGLSSSFRGKIKSVTVVKERDGRYYASILTEFDAPDKKVRACDGVVGVDLGLKEFATLSTGEQIGGIKYPMQALDKKIRKQQRHLSRKMKCSHRREKCGTKLNRLWRQRQNFLSNFQWALANRLCAENQTIVVEDLNVQGMKRNRRLSHAIHNINWASFVQKLTQKAVEYGTEVVRADRFFPSSKMCSRCGAIKPGLKLSDRTFRCDCGHIQDRDVNAAINLRNYSLNRVSSKNGEYSRGEAVRPIPVVYDGMGGFCEAITAIGG

SEQ ID NO: 54986 - protein, 413 aa, Halomonas sp.
  misc_feature (133)..(198): Xaa can be any naturally occurring amino acid
MTKRAYKERFYPTSEQAELLAQSFGCARFVWNNTLAYRTEAYQQRGESVSHSSAEKRLVGLKAEFPWLRDVSSVILQQTLRDQKAAFDNFFNPKLKARYPRFKRKDCRQSIRLTKAAFRYRDGEITIAKAKTXXXXXXXXXXXXXXXXXXXXXXXXXXXXXXXXXXXXXXXXXXXXXXXXXXXXXXXXXXXXXXXXXXLCDFVPKALPVTRKTVGIDLGLSDLFITSDGAKSGNPRHLKRYEAKLACLQRRLAKKQTGSNNRNKHRWKVARLHAKIADCRRDATHKATRALINENQVLCVESLNIIGMIKNRRLSKSISDAGWGEFVRQLEYKAAWAGRQLVKVSQWFPSSKRCHGCGYKVEKLPLSQRHWHCESCGYPIDRDINAARNIQTAGLAGLACGATGAEGSGLAAI

SEQ ID NO: 54987 - protein, 315 aa, Methanococcoides sp.
MIPELKVEYEWLKDINSQSLQGATLNLDNAFTRFFREKKGFPKFKSKKNPVQSFSVPQFYKVDFDNGKIKLPKIGWINTKLHRRFEGKEKTATLSRTSTGKYYISILVDNEKEILVKESFDIDTTVGVDVGIKDFAILSNGEKIDNPKYLKKSMKRLKVLQKRLSRKQKGSANRQKAKLAVAKLHEKISNQRNDFQHKTSSKLISENQAIALETLNINGMMKNHHLAQCISDASWSSFVEKLEYKAEWYGKTVLHIGQFDPSTKICNVCGYYNKNITLADRKWDCPKCNSNHDRDVNAAINIKKFALDKQNLIGI

SEQ ID NO: 54988 - protein, 371 aa, unknown
  TnpB Polypeptide
MKVRLEPNNKQRTKLFQSSGTSRWAYNWALNKQEENHKNGNKFLTDRALRKELTQLKRTEELKWLNNCSNNITKQAIKDCCDAYIKFFKGLSNKPKFKSKKKSKPSFYQDTEKTKFTETHVRLEKIGWVKLSEYNRIPIDSKHSNPRVSFDGVHWYISVGIELEIPAVELTNKSIGIDVGVKDLAVCSHKEEPYKNINNTNKVKKLEKKLRRLQRKVSKKYEKNKEGRSYVKTSNIIKLESNIRKLHKKLDNIRSDYRHKVTTEIVKTKPSRIVMESLNISDMLKNKHLSKSIAKQGLYEFRTMLKYKAEKYNIEFVEADKWYPSSKTCSECGYIKPKLSLSERIFKCENCGAAIDRDKNASINLSRYKVS

SEQ ID NO: 54989 - protein, 158 aa, unknown
  TnpB Polypeptide
MQKAFKVTLIPNRTQEVLINKTIGCARFVYNRFLALRKELYTVEKQSLNYNGCSQKLTLLKKEIEWLREVDKFALQNSLKALETAYKNFFADLKKPKAKRRFGFPKFKKKNGSKQAYKTNLTNGNIQVLENCLKLPKLGWVRFHKFHSYYWEDCKRYR

SEQ ID NO: 54990 - protein, 416 aa, Fischerella sp.
MIVTRRTTFRLYPTKSQESKLHYWRRLHKDLFNACLYHRKTEYQRFGNSISYYDQQNILPEFKECWHEYKELGSQALQATVKRVDYAFQRFFSGLGGYPKFKSARHYHGWTYPGISGWKAHTTGDNGYLELSNLGQIQMRGKARTWGIPTTCTIIWKQGKWYASITVNCEPKRETSTGAIGLDFGTHHAIACSDGTIIDNPKFLANTQQKIKQLSKKLRRKRAPNFKKKIKASKRWRKVRKQINKLQSRITCSRQDWQHKVAAQIVKSNSLVATEKLNIKAMTRKAKKGSKRKHQKTGLNRSLLDVGIGNLISLIKYKLSECSGVFVDVPLKIASSQTCPNCGNKKKKELSQRVHNCEVCNFVADRDVAAAMVMLNYARGMERASTNADAEPLSRTPQHCGGFRKVQQVKRQKPRT

SEQ ID NO: 54991 - protein, 448 aa, unknown
  TnpB Polypeptide
VTLLAYRFALDPAPAQERALRSHAGAARVAFNWGLARIKANLGQREAEKSYGITGLTPALSWSLYSLRKDWNQVKDTVAPWWGECSKEAFNTGLDQLARALKNWAGARKGQRKGKPAGFPRFKSRRKARPSIRFTTGAFRCEARHAVLPRIGRVKLHEPGTRLAALVAAGTARVLSVSVRFERGRWFAAFTVEQDITRPAPAAPDAVAGIDLGIKTLAVLSTGEEIPHPRHLGKPLRKVRRLSRTMARRQGPDRRTRQQPSNRWHRTAPALAKAQGRVAGQRRDALHKATTGLTGRFGTLVVEDLHVRGMLANRRLARHVADASFAEFRRQLEYKAAWHGGRVIVADRWFASSKTCSGCGAVKAKLLLSERTYVCTACGLVLDRDVNAARNLAEYGKRQIAGSGPEIANGRGADRKTGLARQVAVKRQPGTAPAGQTGTVPPQGRTAA

SEQ ID NO: 54992 - protein, 337 aa, unknown
  TnpB Polypeptide
MESGVTIKIKLKLPNVETAASFEKTMEQFRLACNFISEYIFNHSLGELNKNKIQKAIYRDVRNNFGLKSQMAISAIRCTVDRYKTVRTQLKKHPMRYKSDDTDSQTGKRVWKCISRDLYWLWYPINFKRPQVDLQRGKDWSYLKSGQLSINTLDKRVKVDFDCHGFDQYLDGTWKLGVGKLLKSQGKWYLHISCTKEIDEFNDQNIEHVVGIDRGLHQIIAAYDEQGRSLFANGKQIAKKRNHYYQLRRHLQMKNTRNSKRRIRKIGNRENRWMDDVNHCLSKTLINHYGKNTLFVLEDLSGVSFDEDNQNSKDFNRDLHSWTFYDLETKLSSITVK

SEQ ID NO: 54993 - protein, 365 aa, Hungatella sp.
MQKGVKFRIYPNREQKNLINQTFGCCRLVYNRGLAMREEAYKNGNKIGYSQTSAMLTDLKRSGDFTFLKAVDSIALQQSLRDLDRGYVNFFQKRASHPTFKSKHNNHQSYRTINQGDNIRIAGKYVRLPKLGFVKVRQSMEVGKINNVTIERTPTGKYFAVLNVDFEPQLQQNNGAAIGIDVGIKEFYSDSNGNVVSNPKHLEKSMHKLIREHRKLSRKEKGSNNRNKQRVRVALVHEKITNQRKDFLQKRSTMLIRENQTICIEDLKVKNMMRNHKLAKYISSVSWSKFYDMLTYKATWYGNDIVKIPTMYPSSQTCSCCGYKNPLVKNLAIRKWECPECHATHDRDTNASVNILNKGLQMQSA

SEQ ID NO: 54994 - protein, 446 aa, Blastocatellia sp.
MQLTHKIALCPTPEQADYLKRACGTARRVWNWALGEWNKQYAAGWKPNAMALKKQFNTIKYSDPQWLDENGQPWLRGIHRDAHAQLFAYLARAWERFFADIKAGKRAHAPQFKKKGRCRDSFYVANDKFDLDGQTIRLPKIGQVAMTEALCFNGKILGATVSRTADRWFVAIQIEVPDAQFYRRRTAHGVTGVDLGIKAAVTLSNGETIEPPRPLKVALRRLRIRGRRLSRKVEAAKRQAGFAPNAGLPRGTMLPCSNNRRKSAATLARQHARIANVRADFIHKLTTRLCRENQAVAIEDLHVKGMLANERLARAISDVGFGMFRSQIEYKAKRYGTRLVIADRWYPSIRLCSVCGWKNEALTLKDRDWVCPHCDTHHDHDLNAALNLERLATVTALPVASPFSNGGAAVERVSAVVGKVTPVRYEWCQQDTSGQEENRAHHGAHS

SEQ ID NO: 54995 - protein, 412 aa, unknown
  TnpB Polypeptide
MRSQKLRLKLTKEQERLAWWYSKVSRNFWNLLVDIDKRNNKGEFDEILNENGNKTYYSKLYDREVYKLNQSDYLKLAKIVVAKNYEEDKDKWSWYYQPNQSFIYTFLSRELVKIRRQNKGKLNFRSINKIQPNFNIRCDVSANKKRPSRIYLKENGKLQIPTLGDVKVGSVRPDFDLSCKKQVANISFDGKYWYLSYTEDVKTEVTDLPDYTDGVGIDLGIKTLATVSDGTIAPNIKTFRRVRILNKRLKRLQRKVSRKYCINKCNKHNKTKNILKLERQIKLIHRSLRNIRINHIRQFVSDLVKKQPQYIAIEDLNVKGMMKNKYLANDIANCSFYAIREQLIRKAKERLITIRLVERFYPSSKTCSACGHYKKDLKLNQRVYCCDNCQEKIDRDFNASLNIAKTDRYVLA

SEQ ID NO: 54996 - protein, 233 aa, Staphylococcus sp.
MNFSLVKSFLPHMTKEDMRVIQVPNWYLSYYRRFPEKLENCKYKHIKAINDYIKQEKAHIIGIDLGKYHYLTASNIDRSFVFVDKHNTLFHLFRKYERRIANKQYDNSEAYSKLKTGLKSHINQVVKEMLEQTSNRFQTVFALGDHGSSHLSFPSLVFDLTYFAIKQRKNENDEILIVDESFTSIECPICHNRNQYNRTNKNKFKCTKCGFRHQNNDIVAASNIAKKGKLLVF

SEQ ID NO: 54997 - protein, 485 aa, unknown
  TnpB Polypeptide
VKTTVRGVILQLTEECKATLDDLMVRYCAAVRWAFKRLLDSWKTQAIRIAVQSKFNLNSRQANDAVYDAQATISSQRELVKLNHANSKKKVAFTQKRLNNAKSHRKIINFQKRLDKEQRKLTFWQKHLYKGTIPPVVFGGKKLFLVRCKGNITREQWREARSNRYLSRGDKTKGGNLNTRLHTKDGSIYLNIAVEPVATGKTIRYQRTTMPVYLAHKPSKKSKKINGRDYRQLVLGYLKTGGAYQVEIIRVNGRYYVHITIEEKIPTPYTAYNGAIGVDTNPDGLGITHTDALGQFKKSQRLTQGEWTYARSNRRNNLIGEAATLVVEMVKRLNCTLAVEDLDFKNDRSASVKFNRMSHSFVWSKFLQSVERMSVRAGVPLVKVKPPFTSVIGILKYQQQYGISQHEAASYVIARRGLGYTTEKIPKQLTSSFINKKKEFAKLSEWKQWSAIKKAAVAAIKKQTKKEVKSLVFWQHHRKQLLGMG

SEQ ID NO: 54998 - protein, 300 aa, Escherichia sp.
VKRLQAFKFQLRPGDQQECEMRRFAGACRFVFNRALALQNENHEAGNKYIPYGKMASWLVEWKNATETQWLKDSPSQPLQQSLKDLERAYKNFFRKRAAFPRFKKRGQNDAFRYPQGVKLDQENSRIFLPKLGWMRYRNSRQVTGVVKNVTVSQSCGKWYISIQTESEVSTPVHPSASMVGLDAGVAKLATLSDGTVFEPVNSFQKNQKTLARLQRQLSRKVKFSNNWQKQKRKIQRLHSRIANIRRDYLHKVTTTVSKNHAMIVIEDLKVSNMSKSATCQSQQRVRSASRGAMSGQNQV

SEQ ID NO: 54999 - protein, 424 aa, unknown
  TnpB Polypeptide
VKLENAVQTSHSEEKSSLTYEQLSLSISLSVSPSPNSSPFRELPLIRTLRFKLMRSKKNRKLHREIEQFARVYNHFIAVIEWYYRLFKKHPSANRLKMLLPKLKRTRRLSWLKELPSQALQDVVERIDRAYKRFFEERKKGKRFGKPSYKRSANYKSFTLKQAGWELVGEHSLRIGDNTFKFHKSREIPAEKVKTVTIKRDKLGDIYAFFVVKSTGFVMKRCAAGQSVGIDFGFDQFLTFSDGTSVDAPMFFKQDLRQIKQLSRSMSRKVHGSRSWNETRITLNRAYRKIQHKRDDWHWRLAHFLCQKYDLICFETLNFKFFQRKHGKKVQDFGFVNFVKKLTYLGKHYGTQVVFVDRFFPSSQLCNACGYQNPELKDLKIREWVCPECGASHERDFNAAKNIHDEGGRALARLTEFKNFEIIS

SEQ ID NO: 55000 - protein, 461 aa, unknown
  TnpB Polypeptide
LSVTLTTPVKLELNSVEKQALLNEMRKYIAGVNAVVALAQTGVSIQKFSSKDVDAELPSAIRGQIARDARSVIATHKKRVKKVKSKEAFLEKIGKLRRPLKEPRVPVLRIPVLLVNNQNFKLDLERKEISFPMWVNGESKRVSFRAHFVERHREILAQTFHLGTLRIVRKGDELFAQIGYEVETPEVEKVDFSSISEDSAQLVMGVDLGVKCPAVAYVNDGTVRFYGNGRQNQFKWRKFYARRQKLQKAKKLRAIKRISNKEERFMRDIDHKISRAIVNEAVKHGVKVIALEDLDGIRENCAQSTRKSRKNVGKPKKSISSAKEESTKGKVDENAQLSLSQLSLFEESAPSSDPNSSNVSTSKKKRKLTKKQVESRRKRNRMISSWSFWRLSKYISYKAALAGIAVVFVDPHYTSQTCPVCGEKHKTKTRKYECSCGFRGHRDIVGAMNIARATYRVGEVA

SEQ ID NO: 55001 - protein, 377 aa, unknown
  TnpB Polypeptide
MKTYVFKLYNSRRNKHLDRKINLAGCIYNHCIAVHRRYYLLFGKSLSAYRIKLHVTKLKKTKRFSFWNNLGSQAIQDITERIDRAYKLFFRNLKHGIRTAPPAFKKVRRYRSFTLKQAGYKLLSGNRLTIMGKEYKYFKSREIEGDIKTLTVKRDALGDFYLYFVTGEDIEPTEVRSGESVGLDFGLKTFLTTSDGEKIESPLFMRQASGKIKRLSQKLSKKKRGSRNRTKARLNLARTHKKITNQRKDFHFKLALDLSRRYAKIYVEDLNLKGMQRLYGRKISDLGHAQFVNILGWQMHKHGCQGAKIDRFYPSSKTCSSCLYIMPELPLQVRNWICPECNAAHDRDINAAINIERVGASTLRGEDVRLAPASNLC

SEQ ID NO: 55002 - protein, 314 aa, Oscillatoriales sp.
VIVSPAKRQVRLKRKQSTIPGLEKFRLKQPIAFVSYSKTFTISRAADKGFVSWTLPVDKILQRVHQVQTVGVDLGVKCFATLSDGSFTIAPQILKISKIKPIKNRWYNRNQKSGNRTQTIRASNNGWKYYQKLPIKPADIANLRRILGQKKITTDIISRKYYQIRIEDLNISGTIANQKLAIDRESLGIDEWSRILTYKVAFWGTEVELVDRWSPSSKTCSCCGNIQQMPLMEPVYSCDRCGVSLNSDLNAAIIWENARQSILSEASAQLTPADNTSGRHPCCKQEANVNLSEKLDLGKFCVARLESRLLQWLL

SEQ ID NO: 55003 - protein, 416 aa, Okeania sp.
MRTAYQYKLRPNKDQVATIELWLELLRRQYNYRLGERFSWWEENRCPVNACPLIIPIPQLRDNPDYYSQKKDLVNTKDKFREYKLIHSQVLQDCIKRVKLAFDRWFKANKNGQRLGKPRFKKKSRYRSFTYPQIKQDCIVNQRINLPKIGNVKLIQHRPLPEGFQIKTVTISRKADGYYVTLSLEDKSVPSLNSEVKPTSENTLGIDMGLKAFLTTSSGESVPIPQYYRKYQQRLKTLQKRLSKKKKGSKRWLKALLAIAKQHKKVADKRKDFHFKTANKLLSKADIIAYENLNIKGLAKTRLSKSINDAAWGQFLTILTVKAENAGQKTIAVNPQNTSQDCSNCGEKVLKELSQRTHSCPHCGIVIDRDVNAAMNIKNRAVGHSVLKARGARCNSRAAKREAHTIASASVWEYVT

SEQ ID NO: 55004 - protein, 289 aa, Escherichia sp.
AFPRFKKRGQNDAFRYPQGVKLDQENSRIFLPKLGWMRYRNSRQVTGVVKNVTVSQSCGKWYISIQTESEVSTPVHPSASMVGLDAGVAKLATLSDGTVFEPVNSFQKNQKKLARLQRQLSRKVKFSNNWQKQKRKIQRLHSCIANIRRDYLHKVTTAVSKNHAMIVIEDLKVSNMSKSAAGTVSQPGRNVRAKSGLNRSILDQGWYEMRRQLEYKQLWRGGQVLAVPPAYTSQRCACCGHTAKENRLSQSKFRCQVCGYTANADVNGARNILAAGHAVLACGGCQQTG

SEQ ID NO: 55005 - protein, 334 aa, unknown
  TnpB Polypeptide
MVNELKKENQWLTEVNSQALLNSIRNLDTAYKNFFRDTHAVGFPRFKSRKNRQSFQCPQHCSVDFGKGTVSIPKAKDIPAVLHRRFKGTVKTVTVSMTPSGKYFASVLVDTAIQELPVSPIQGDTALGIDLGIKSLAVCSDGRTFDNPKNLQHSLDRLALLQKRLSRKQKGSANRNKARIRVARLQEHIANCRKDNLHKITHVLTHDSQVRTLCMENLNVKGMQSNHHLAQAVGDASFGMFLTMLEYKCRWYGVNLVKIDRFAPSSKTCGQCGYVYKGLKLSERSWTCPECGTHHDRDFNAACNIKEFGLKALPRSVGKSSLWTAQRWMTDLVS

SEQ ID NO: 55006 - protein, 414 aa, Natrinema sp.
MYYAYKYRLEPSDAHREELDRHRDICRQVYNHFRKRLGEYRENHGELPSMTTLRSELPDLKEWWDDLSDVYSRTLQVVVERLFDNLKGLSKLKENGYGVGQLKWKPPREYRSFTYSQCGFELDKKGGHAVLSLSKIGDIPIRLHRNIPDDAQLKQVTVKKEPTGKWFATFGVEVDREPPEKPDELTDVVGIDVGILKYAHDTDGHAVESLNLSDERKRLEREQRKLSRKQHGSANYERQRRRVAECYADLRRKRRDFLHKLSNYYAREYDLVAVEDLNVKGMMESPSNSRNTASAAWRTFLSLLEYKCEREGTHFVAVNPRGTTKECASCGVSTEKPLWVREHSCPACGFEVDRDANAAWNILSRGLQDVGMGYSESTPVETALPTGTTSVPAKRVVEAGSPTLKNRAASAASE

SEQ ID NO: 55007 - protein, 325 aa, Natrinema sp.
LRHKFDEANPPGYRKHGDTRSKSTVTFKADGFKHNPEHDLVRLSKGKNLKEHWSDFLLCEYQTRPDVDLSEVKKVQNVRAVWNGDEWELHFVCKVELETTDSAGNEVAGIDLGIKNIATVAFPDKYILYPGNSLKQDKHYFTRAEYDTEGENGPSEKSMRARRKLTDRETHFYHTLTDTIITECVERGVGTLAVSWPEDVRESDWGKTGNKKLHSWAFDRIYQNLAYKGEIRGVEVLKENEWDTSKTCSRCGDDTRSNRVERGLYVCSSCGLVGNADCNGAENMRQKITLSPHGEDRSNGCVAQPSVHLFDRESGTFRTREQVVS

SEQ ID NO: 55008 - protein, 292 aa, Natrinema sp.
LRGSTRRAETNVLGFPGRRFPRSDGPRFIGCGVRVVREHGKPTHWAAKCDRTVDAARHDRLGERRSEKPSVDDTLADGSTRGGATGRSRARDETRSTDLGRDGPETCSATGRVSSCWGSPVVYDGEDVTGVDIGERHILAVTAYGEDESMLVSGGEAKYVRHKYRSLRDSLSEAGALRARNRVGNKEQRRIKDLNHKLSRRLITFAEQFENPVIRMEDLEGIRENSSWSGVHSWHFHQLQQFITYKAERAGIRVEKVDAYHTSQRCSACGSIGTRDGDHFSCSECDRGRTPT

SEQ ID NO: 55009 - protein, 570 aa, Natrinema sp.
MQLTEQFHVPDDCHEACDRLTTLVQKHTQRLLTDEYWTDQHLDALKNHTGQSYTYIRDNDHDAFENVDEYVYSRFKRCVYHRVTHVLDAHADEYQAFNFVLDTVADRKIKQSGWKRLRNQLFKDHTPYIEWRVLESVVEQLNQYYDRHGHFPEKYTELVGTPEPNGTLPYAPDKGDYHIHELTVEDGDLVFVVNAPDSLSPDSYHNWTEHEIRFPTHSRFCELVGVGDVKAPTLHTSEHGYTVDVPVDVPENDIDTVENRVLAVDLGVKKQATTVVLDDGEDETHKQVAPPEFIDHPSKDKLFRVKSDAEGINDRLSELRRQGKDHTDRFDHLLSEYQQTRQKERRLRNQIQHDVANQLVWLAAEYDCETIVFESLGQLDSGNTSGSVAWSISSWARGELLEYTDYKAELLGVDVSTVNPWGTSRHCPHCGEKGQTVKAPNDHTEQRHGGHFHCPVCSYECDRDVVGAVNVGRKHLSESRMEQANPVEYISTGKHASFPSHTDSTAENDVCARSSSGPDGSVSGVQSTTNTEQEQDLASGRQTRLPQFRASSLTTIACCTFKINSSDMAA

SEQ ID NO: 55010 - protein, 419 aa, unknown
  TnpB Polypeptide
VEVRRTAVVKLAVSDEQRDALHATAEQYLHCANRTAAFCWNDTDHRECRTHKRNVRDALYDDLRDETELQSQLVQAAIKRGVEAVKGCVERWKNGQRVSRPAFTSETMDYDRRCATFRRREVSLSTLEGRVVCPFVLPSASPTPYERYILDEEYEFCESTLRYDAPTDEFYIHVSTRRYDTDADADKRGSTDTEHPLQTVLGIDLGVNSLAVASTGTFWQGDEYDHWVREFEKRRVAMQQRETQAGHLAMKRLGRRERAWRKQHLHTVANELVSEAVETGCDVMVFEDLTNIRDRLSQAKWHHIWAFRRLFEFVSYKAPERGVAVEQVEPNHTSQRCSRLDCGFTVRENRDGERFCCRKCGYEVNADYNAAKNIGLRYARNRQHRLRSSPKSPNGDAPVDVRIHGGTLNGTSPRRIATE

SEQ ID NO: 55011 - protein, 320 aa, Nonomuraea sp.
MSRYRLQPSPAQEAALLEHCGHARFVWNLAVEQHAHGKPGRKSAPGFVDQCRQLTDARAEFEWLRTGSVIVQQQALKDFAQAMANYCGGNHRRPTWRRRGCGEGFRIVAVKGGDVRRLSRHVGEVKVPKVGWIRLLRKLARAERGSNRRAKVKAAIARVKARETDRRKDRVEKTSTDLACRFDVIAVEDLKIRNMTRSVRGTVEAPGRNVRAKAGLNRSIITAAWGHLVQRLEHKALGRVVKVNPAYTSQRCSACGIVDRVARESQARYRRRSCGYACNADVHAARNIKHAAGHAVSTREGPRVAGPVHREPQRDLLLVG

SEQ ID NO: 55012 - protein, 449 aa, unknown
  TnpB Polypeptide
MLIFEFKAHGKKQQFNAVDEAIRTVQFIRNKALRFWMDNEKVNKFDLNKYSAVLAKEFPFCDELNSMARQSSAERAWSAISRFYDNCRKKILGKKGFPQFQKNNRSVEYKTSGWKLTSDRKYITFTDKQGIGKLKLKGTRDLHFYQPTQIKRVRLVKRADGYYVQFCIQVDRSEVVEVTGNAIGLDVGLKEFYTDSNGVVVENPRFLRKGERGLRKAQRRVSKRVKGSENRGKARVILGKRHLKISRQRKDFAVKLARCVIQSNDCVAYEDLRIKNMVKNHCLAKSINDASWYMFRIWMEYFGKVFGRITIAVTASGTSQECSSCGTIVKKSLSTRTHVCQCGCVLDRDHNAARNILSRGLSTVGHTGTWGKTINACGELTATLVGVILPEQVDSMNQESSVALALRVSINEPRRRKEREGKRQEERKKLIISSPVISEILHPFQSAFY

SEQ ID NO: 55013 - protein, 310 aa, Selenomonas sp.
VNAEHAFQRFFRGEGGFPRFKRKSREDVKLYFPKNNKGDWQIWRHKVMIPTLKQVRLKEYGYLPQDANVISGTVSCVAGRYYVSVTAEIDEKSRYNKDCETSYAPPSDGIGIDLGIKSLAVMSNGNVFRNINKSPKVRALERKLRREQRRLSRKYEMRKKKGGSAAAASANIGKKKLTVQRLHQRLTCIREDHENKVIHAIVKQKPRFITVEDLNVRGMMKNRHLAKAIAGERFNSFLQKLRRKAEITGIELRIVDRFYPSSKRCHACGHVLRDLELRERTYHCPACGYKEDRDFNAALNLRDAKEYRTA

SEQ ID NO: 55014 - protein, 355 aa, Acinetobacter sp.
MKTLKLRIKDKHCKVLDQLASEVNFVWNYVNDLCFKHLQRKGQFFSAYDVAKYTKGTSKECNLHSQTIQAVTEELVIRRKQFKKAKLKWRVSNKKSARCSLGWIPFKKVAVKYANGYIQYGKHQFKLWDSYGLSKYTVKTGSFVEDSRGRWYVCLVVDSPKQEKPTETKAIGIDLGLKDIAACSDGTVIFNPKFYRQYEQKLGIAQRAKNKKRVRALHAKIKNCRKDHLHKASSMLVKNNALIVIGDLSAQKLVKTKMAKSVLDTGFSALKTMLTYKCENAGVLFEEVSENFTTQVCSSCGEITASSPKGRADLRIREWRCCNEKCLSLNDRDINAALNILALGHKRLAVGISLF

SEQ ID NO: 55015 - protein, 321 aa, unknown
  TnpB Polypeptide
MLKNTPAMYKREYPFLKEVDSLALANVQLHLEKAYKNFFRDPKTGFPRFKSKHHSRNSYTTNVVNGNILVESKRIRLPKLKWITMKKHREPAEGLRLKSVTVSMEPSGKYFASLLYEGYNCENQAAESDYSTAKILGIDYAMQGMAVFSEKIEVEEAGFFRKNEKRLAREQRKLSRCVRGSHNYELQKKKVARCHEKIRNQRRDHLHKLSRKIADSYDAVAVEDIDMKAMSQCLHFGKSVQDNGYGLFRKMLDYKLAWQGKRMIKVDCFFPSSKKCCKCGRIKKELKLSERVYHCECGNEMDRDRNAAINIREEARRMLTA

SEQ ID NO: 55016 - protein, 385 aa, Halobacteriales sp.
VESTHLPPSPERSSGGPSRRSASGDADSSISSDDGDIWEADFDDLYDDYAPILGKATCQQVARKNSDAWRSFFQLLEKYHDDGDSTVTEKPSPPGYWGTRDGGYELHGLVRNDLYTFDWDETRSTLEFGVGDVLEDRYDFDHRERLTLEVRGDPQWNGDDGRVELVYDETADRIRVTHPVRIQPAHLQEQRRDAFTHTLDSENATQAAAIDVGANNTLAIVTDHGETAVYHARPEFDRFRRLSERIADLQSQLPDGRYSSRRIERLYDERGRKRDHARDAAIKHAAEWLLARNIDTVYVGDLTGVLDAHWSTSVNEKTHSFWSHRQLLDRLGLTFGDVGIDIVEVSKADSSSSCPACGSEAVRRRGDEFRCQDCELEAHSDVVGA

SEQ ID NO: 55017 - protein, 371 aa, Clostridium sp.
MILAKKIRIIPNMEQEQQLWKSVGTARFIYNWTLARQEGNYKNGGKFIKDGDLRKEITIMKQTEEYKWLKEVSNNVAKQAVKDGCNAYKRFFKGFADKPRFKSRKKSRPSFYNDNLKLKVKPKMALIEKVGWIKTAEQVPMNIKYTNPRVSFDGKYWYLSVGVEKENSKVELTGESIGIDVGIKDLAICSNGMTFKNINKTRLVKKLKKRLRRLQRKISKKYELNKEGRKFVKTSNIIKLEKQIRLLHRRLSNIRNNYLHQATTKIVKNKPSRVVMETLNIKGMMKNRHLSKAIAQQGLYEFKRQLQYKCEFYRIEFVEADKWYPSSKICSECGHKKTKLSLSERTYICEECGVVIDRDFNASINLSRYSA

SEQ ID NO: 55018 - protein, 352 aa, unknown
  TnpB Polypeptide
MATVIRTLQATLVPPTSHKQASLQHSVETYRHALQEAFQADCDTKTAVNEVVTPYDLSSYAKDALKNYVPDLVDEADELDESHPVRYTGRGLTLDHDPDSARKNSFCWRVPKAQSADGSPFWIPLRINPAQQSLWKGLLDGEIEPNQFQLQRDGETWSLHVGVDIDVSEPAYESDDEDATAVGFDIGEAHLLAGCACTNGSPTDPLLITGGRARQLRKEMFTTLTRLQERDAAQWRIDERFDHCQNALTDIVEKASWQAIDYAQQFAKPVIVLEQLDSIREGLDYGKWMNRRLHNWAFRRLQDAIDRKAIEAGIPIRSNTSTHTIQAKPVTPATTSGTGIATSSGVRTMRAG

SEQ ID NO: 55019 - protein, 353 aa, Methanohalophilus sp.
MFQKHFGACRFIYNWALENKIKSYETEGKSVSRFTLNKMIPSLKTEYQWLKEINSQSLQGATLNLENAFTKFFREGKGFPKFKSRKNPVQSFSVPQYYNVDFENNAIKIPKIGWVNTKLHRHFDGKCKTATVSKTPSGKYFISILIDDGIKYPEKQDFDENTTVGIDVGIKDFAILSDGTKIVNPSSLKKSIKRLKVLNKRLSRKQKGSKNREKAKIEIAKIHERISNQRHDFQHKLSSRLISENQAIALESLNVNGMLKNHRLAQSISDASWSSFVSKLEYKAQWHGKIILRIGQFEPSTKICNVCGYCNKYLTLADRRWQCPKCGTYHDRDVNAANNIKKFALDKQAIIGT

SEQ ID NO: 55020 - protein, 371 aa, unknown
  TnpB Polypeptide
MRKVSYGFKLQSQKNVIKLGNMIDDMWSVHLHIMLLARRYRRMFGKDVSAYKLKKHVAKLKKRTKPHWADLPSQVVQDVVLRYGKSQDAFFQNIKDRKAGLTTRKVGRPKIKPRHKYNSMTFTQAGYTLEGNRIKINCINTWFSFHKHRDIEGTIKTITIKRDRCGDSWIYFSCENVDDSQPKPKTGKSAGFDYGNKTFLTSDEGNKIDSPQFFKQSLKMLQTLSKALSRKVKGSGNWYRAARALARHHRKVARQREDWQWKFATQLCTEFDTLCFETLNLSGMKRLWGRKVSDHAFYQFLQILEQKCAKHGKKLKKISQWTPTTKPCSDCGYHNKNLSLSDRQWTCPECGSHHDRDINAAINIKRAGLAA

SEQ ID NO: 55021 - protein, 402 aa, unknown
  TnpB Polypeptide
MLVLEYKVKGKVNQYQAIEEAIRTVQFVRNKCIRYWMDAPRESKINCFALNKYSTELRNEFSFVQDLNSMAVQASAERGWLAISRFYDNCKSKKLGKKGFPRFQKDNRSVEYKTSGWKLHPTKRRITFTDKKGIGTLKLLGKWDIHTYPIKSIKRVRLVRRADGYYCQFALNAEVKEQLEPTGNAIGLDVGLEYFYTDSNGHQEENPRFLRKAEAKIKHAQRRIYKREKGKSGRRKARKIFAKKHLKVSRQRNEHAKRLARNLCKSNDLVAYEDLVVRNMVKNHCLAKSINDASWTQFREWLEYFAGKFERVAVAVNPQYTSQKCSNCGAIVKKSLSVRTHICQCGCKLNRDENAAINILNLALQARGGHPQRNAVGVGTSTLLGATLVEQVLTLSTESPAL

SEQ ID NO: 55022 - protein, 381 aa, unknown
  TnpB Polypeptide
VRRTFKYRAYPSRAQDDALHGQVNEACRLYNACLDERRSAWRMNNISLGYYDQANQLKEIRAAGDVGVANFSACQDVLRRVNKTFAAFFRRVKAGEWKVGYPRFRSRFRYDSLTYPTWGDGCSLRPSGRLYLQGVGDLKLKWHRPLPPEAQIKTVTAKREAGDWYVCFSVEMPDPEPLAGSDLAVGIDVGLTTFAVLSNEAEIANPRHFRAAERRLRIAQRKLARRKRRSRRRMKARQEVARVHAHVANQRRDFHHKTARALVQEHGLIAVEALNFKGLAGSTLAKSVHDAGWSQFISILSCKAVEAGRTLIAVNPAGTTQRCSGCGEHVQKTLSQRRHVCPACGLVLGRDLNAALNILSLAQGLGWSLQAPTVGVARAVA

SEQ ID NO: 55023 - protein, 455 aa, Clostridiales sp.
MPVTVIMHKAEKYAFDMRRLQEDDRSFFMQNFGCVRKVYNQYVDFLYQKLEETGYTGGAPLPALKLPEVSAFKKEYPYLKDADSLGIANAKIAFETALRKFNEECDHRTYTKRALRRDKSGKEPLSFRGLKGMPRFHSKAHGSFSYKTNCQHASPDNSLKQDTVRLVGNRLYLPKRKSGVRLIIHRQLPQNAVIGNVTISMDTDRVFYASIEYTYAADMDTTLRDAAIKRDDSILEKLIILGLDYSQQDLYVDSEGRKANYPHYYRRSEEKLSRLQKKLSRMQQGSRNYNKMRFRIQRLHKKIADQRRDFIEQESCYLARSYDAIAVEDIDLRTMGETLTLGKSLHDNGFGLFRKALQRKLHAKGSVLVKVDRFFPSTKTCCCCGFVNHDVRLGVSSWDCPKCGMHHLRDENAAVNIRNEGRRVFLEYFAASIQEEAKAQKRAAALSTARRRKSA

SEQ ID NO: 55024 - protein, 399 aa, Hapalosiphon sp.
MRVVERHIINRNHEYWREADELAFKSKNLYNAANYFCRQYFFETGNRYTLPTLYHLVKNTESYRALPTKVSKQIIKKLVESWKSYFEAHKDWKKNPHKYLSEPRIPRYKDKSKGRNIVIYHHESIYKADLKQGRCHLSMSNISVRTSAVNIAEARIVPGSNCYVLEIVYEVPESKPIEPKWVAGIDLGVDNLVALTSNQPGFRPLLVNGRPLKSRNQYYNKLKAKLQSHLTGVTRTSRRIQSLTYHRNRYVENYLHNTSRLIVDLLLEKGIGTLVIGKNNGWKQEVNMGKQNNQKFVNIPHAKLINQITYKCELVGIKVVIQEESYTSKTSALDLEPSCKQSEYAGKRVKRGLFKSRTGRVINADVNGSIQIIRKYLPEAFTAEEVVSCAVQPLLVNLA

SEQ ID NO: 55025 - protein, 346 aa, Eubacterium sp.
MLADRKKAYEERKQDPSKKMIFPTPAQYKKDFTFLKEVDSLALANAQLHLEKAYKNFFRDQSVGFPRFKSKKNPVQSYTTNNQNGTVALFENKFIKLPKLKSFIRIKLHRQPRGMIRSATISRRSSGKYYISLLCREEISELPKTNSAIGIDLGITDFAILSDGKKIDNHKFTAKMAKKLKREQRKLSRRALRAKKKGINLFDAKNYQKQKRKVARLNEKVKNQRTDFLNKLSTEIIKNHDMICMEDLNTKGMLRNHKLAKSISDVSWSSFVTKLQYKADWYGREIIKIDRWFPSSQICSECGHRDGKKTLEIREWICPVCHTHHDRDINASINILTEGLRIKQSA

SEQ ID NO: 55026 - protein, 455 aa, unknown
  TnpB Polypeptide
  misc_feature (343)..(442): Xaa can be any naturally occurring amino acid
MMKTLKLRIRNKHCKVLDQLASEVNFVWNYVNDLGFKHLKRKGEFLSAYDIAEYTKGTSKECNLHSQTVQAITEELITRRKQFKKAKLKWRVSNKKSAKRSLGWIPFKKSGFKYADGWVEYRKTKFNLWDSYGIGKYKVKTGSFVEDSRGRWYVCLVVESPKQEKPIATKAIGIDLGLKDIATCSDGTVITNPKFYRKYEQKLGIAQRSRNKKRVRALHAKIANCRKDHLHKASTMLVKNNALIVVGDLSARKLVKTKMAKSVLDTGFSALKTLLKYKCENAGVLFEEVNEAYTTQICSCCGEITSSSPKGRTGLGIREWECVSCGTAHDRDKNSALNILALXXXXXXXXXXXXXXXXXXXXXXXXXXXXXXXXXXXXXXXXXXXXXXXXXXXXXXXXXXXXXXXXXXXXXXXXXXXXXXXXXXXXXXXXXXXXXXXXXXXXLNDPLVLIFIFNL

SEQ ID NO: 55027 - protein, 290 aa, Dictyobacter sp.
MTTASNTPGKKGYPKFVHTNRSVEYKTSGWKIDADGRHILFTDGCGIGRVRLVGTRAIETFPLKQIKRVRLIKRADGFYVQFCVRAERVVEHIPTGDIVGIDVGLNAYTTDSDGKTVDNPRYLRKAEKRLKHLHRRLSRTKKQSRNRMKARKRFAKAHLKVQRQREDFARKQANALVTSHDLIAFEHLKITNMVKNRHLAKSINDAAWGGFLAWIGYYGAMHAIPIIKVAPHFTSQKCSRCGTMVKKSLSVRTHICSCGLIMDRDENAARNILQKALENGTAGQAGTTTP

SEQ ID NO: 55028 - protein, 298 aa, Dictyobacter sp.
MAKATKTITQAMQYPSRYAAWFTTTQALFNTVASFYFEVITAHEQVLLLSSHKALHALETLTHATEENPDPVMPLDAIAPQVPALFRRAAIHAALGSAHAFETSLQKWRARKEKAALKKKRFTEHPPVPPRTWNRSPTFYKGQWKGRTASSILLKLWTGARWIWVNVRLLSRDLPNGYEPGSPSLVRHGSHWRLHTPVEKTFTSPGKVAVQLAHAQTRICAIDLNLDHHLAVCTIQTADGSTVATTFLSGGKRVNGRRKWLLGRIARNRRKTGILAENEPDNVALWRKSVMWMSRWHT

SEQ ID NO: 55029 - protein, 468 aa, Actinobacteria sp.
VKVTRIAYSRQLNKGKLAELAEQAGRLGRVRAEVWQRYGSVAGAGLTDRQVRDAWLADGHTEFGVLANAWKETVRDAMADIRACREAAAVKVRRAIFRRTSDEAERKRLCAALKAGTWAADPYLSRMMRKHWRRGHSHVMNQIIIRADNVRTFTLAEGGDVWLAVPGLLPRQTVKVPLNTTVAPSGTLRVILRDSRVEVHYQVRGAALKSSRRPHGDRSIGVDKGFTEVLTDSDGDRHGLGLGVLLAAESDRLKVKNRRRAKIRAVAARAAKRGDNAKADRIRRNNLGTVKKTRVRRRFEALVRTVTYEAVHAVTDKAATVVAEDLARPFAGRNFGKNMNRRLTLWTKGLTAQALQSVSERRGSALVLVNAAYTSQTDPSTGTLGVRKGDRLHCPGGVVWDADHAAAITILHRASDPDITLHTPHWRVKQILQERTDRHRARLPAQDSSPAARGGERNILKCSAMSNE

SEQ ID NO: 55030 - protein, 300 aa, unknown
  TnpB Polypeptide
LDAAFERFFKKTGGYLRFKAKKRAKRSYTTNAVYGSYKGRPTCNIHLNTSNGLLKLPKHQDPVRLKLHRPVKPGGKLKSVIIAQEPDGKRYYSILMEYPKPQAATQPVIQNGIGLDYSMPNLYVDSNGSSPVFPKPYRTMEPKLSREQKKLSRKKPGSKRYEKQRMKVTKLYAKSKHQRKDVLHKLSCTLTDTYDLIAIEDLDMSAMKQALRFGKAVSDNGWGMFVSMLTYKAERKGKLLVKVDRWFPSSKTCIACGHIHKELKLSDRTYLCPVCGHAMDRDKQAARNILNEAKRMTGAA

SEQ ID NO: 55031 - protein, 417 aa, unknown
  TnpB Polypeptide
MNKAEKIKNALQETKERRKGQRPVVFQLKLQNLSREKEEDLKRAFLEAKWLYNWLVSDTRRLHLPANKVREVEVKTGTGFESRELLLLGSQVKQEIADRLRDNLKALARLKEKGQEVGRLKPKPFVNSIPLKQHGVTFTLDRGRNRVRIQKLGQFRVLGLRQIPPEAEVANAVLVQKPSGYYLHVTCYLPKESFPRQIIGEAVAIDFGVHNKLTLSNGVKIDFDLRETKRLKTLQRKLAKTKKGSKNRQKLRFLLRREYERIANRRRDVHNRVLAFLKGYKEVVFQEDFVKGWTSLFGGQVHSSGVGGLKARLRNSLATPIPVERYEPTTKECFSCGRLHELSLGDRVLECGCGWVCDRDQNAALVILRKGLGLSPDQAVGLDRPELTPLEREAIARTLGSSPYIRVSLPQGGSPPL

SEQ ID NO: 55032 - protein, 514 aa, unknown
  TnpB Polypeptide
MRAQTPSFVVSVKLKLPESIENHLEKSFNIANSAYNEALSFGLKRFEALKQNSNYQELLEARRTASAGMTMLKKTGQKTTGLTQQVKLYDTALFGLRKAYGLTEFGLQSHLAEQRRKIGSSYQQLNAGELQVLAAQAYKALKKVLFYQIKPHKVRFRSKFDLNASFRNRVNTTGTRLISSDKKDVAYRLYLHKVSTFVDIPVKAFSTYQQISLLRSEKIKYVQIIRKTIRGKKVYILQIVGQGFPPSKVTKGEGVVGIDPGISTVAFASSNEVALVDLVPKNITQKEKLLKQLDQRIERSQRINNPECYTENGTIKKGARFKHPSNRQMRLRNRRRKAYRSLSEERKKLQGQLVNRLVSQASSIKMEELGVKGLQKRSRDIRINPKTNQPYSKKRYGKAIFRAAPSTFRTALETRAFQLGIELEVISPKDVKPSQYNHITQTFEKKPLSTRVYDLSYSYPGVQRDLYSAFLIGHIEDGHYQQKQLTQDFPDFYQQMKDFLQQTPETERLAWYLK

SEQ ID NO: 55033 - protein, 419 aa, unknown
  TnpB Polypeptide
VGDEWQRLNIFYDNEIVVTETLRTFRYHLYPTEEQEAVMDGQLRALCSLYNILRNEKIEKHSSLNSLRKLALEHRGNVHSQVAQNVASRVNSAFKNYFKGRAKFPKHKKEKRYRSMTYPQSGFRLEGKIVKRGKRTELVGKLYISKVGRVRIFMHRPLEGKVKTLTVKREADGWYACFSCEADEPPKKLIEQIPIERVAGGDLGLEKFLTLADGSSMENPQFLRRMENKIKRLQKAFSRAKKGSRNRKRLGVRLAKVHLHVARQRSNEQNRIVSLLYANADVLGLEKLQVENMLKNHCLAKSIADAAWSQFVRKAEFKSRVRGKYFVPVDPWGTSQFCWRCLSWAPKQLGDRTHMCPVCGEALPRDQNSAKLVEMLVLSYAHGRWVNTPVEQKPLPSLRQAFAVKREAPTLRPGRTSRF

SEQ ID NO: 55034 - protein, 397 aa, unknown
  TnpB Polypeptide
MQKQVQLTVVGKVFKPNTHKVQLLNQCLNKYYELVKWHLQFDTTSKNTLHKHYKEAKAFGLNTALVQTARDKAVETLKSFKENRAEDSILTLKKASVRFDHRCYRLDKTENRMTPYWLTLSLGEERVVLPIVFGEREKLVEEALDGKWKFATVEMVKDEEWYAHFTLEKTVELEDKPETVVAIDRGERNFAVAAAVFEEKPKKLLKGAFWKGADVKRTRGLYGHIRRSLQLKGRFGKVKAIGEKENHIVNQQLHQIANEIVAYAKQFQKPVIAMEDLTGIRKRFKKGKRLNRRFHSLPFRRLQVLVEYKALLQGVEVRYVSAKNTTKKCHRCGHVASVSGREYRCRTCGMRYNRDLNTAVNIAQLLMRELGWGSCDAPEPASVTEGAKPWPNAGSSL

SEQ ID NO: 55035 - protein, 336 aa, unknown
  TnpB Polypeptide
MKVNRVEQQIIRKNNSIYNIVDQYCFYSKNVYNQANYIIRQEFINNNNKLSAYDVQKLMQPMDCYKECGSQSAQKTIQLVDKMWKSYFKAIKDWKKNQSKYLGMPRFPKYLPKDGRQVFMIKNIQCSLNNGQFRIAFKPFGGYTVNTHAVGKLMQCRFVPKADYYVMEIVYEIEVPDVVEKRIRICSIDLGTENLVAMVNNVGLQPVVIKGGTIKSVNQFYNKRKAEMQSQLKKETGRDWSKNLQKLTEKRYEKIKYLMHCASKKVVDYCVDNEIDTLIIGLNKKWKQENKNKQNFTYIPFDMLVKQIQSKCEEYGIEVVMTEEAYTSGTSFLDKE

SEQ ID NO: 55036 - protein, 323 aa, unknown
  TnpB Polypeptide
MIKTQVVKLKVIKAMQRQLNALCDYRRYCWNKGLETWKLMYEAYTLNAKDNSSPNERRVRDELVVNKADWQYDLSARCLQLAIKDLANAWKNFFDKSQPDWDKPKFKSKKAPRQGFKTDRAKIINGKLRLDKPINISKDNWFDLASYEALKMNQVKVISVFKENETYYVALSYEEKVTVKTKTHQKTAVDVNVGHFKYTEGQINVLPAKLQKLYKRIKHYQRMLARKREINGKLAVKSNNYLAVRIKLQRDYRKIANIQNDLLQKFTTKLVNNYDQIVIEDLAIKKMMMTHVALKGMQRSLFSRFRQMLTYKCEWYSKKINLS

SEQ ID NO: 55037 - protein, 371 aa, unknown
  TnpB Polypeptide
MKLIAQIKLNPTPEQAQTLRQTLEMANAACNYISFQAWDNKTFRQFPLHKISYYSVKEKFPLTAQVIVRCISKVADAYKIDHKHKRIFKPFGAIAFDDRILSYKLDKKEVSIWTVSGRQRIPFSAGIRQMELLKSQRGESDLCLVNGEFYLLTVCDVDTPEPIDIEGYLGVDLGIVNIASDSDGEVFSGDSVERNRRKYEHRRRNLQKKQTKSAKRKLKKLSGKQVRFQKQTNHVISKMLVEKAKDTQRGIALENLKGIREGTVVRHKQRGKHSNWSFNQLQKYISYKAKLAGISVIFVDPRNTSRTCPNCGCVDKANRTTQSRFSCVSCGFSGLADTVAAVNIAARAKVNLPNGLNPHGLGTIPRLLAAG

SEQ ID NO: 55038 - protein, 455 aa, Halanaeroarchaeum sp.
MSVVVRRTNTFAVRPLSTQDERLLRDLLDASASLWNELNYERRQQFFESDSVWDTDDYRKRYVGVLGSATAQQVIRKNGEAWRSFFAAREDGEDTAPPGYWGNEDDGRELRTYIRNDQYTLETGERSRVEIPVGQDLKDEYGLGYHDRLRLEVAGDPKWEGEQGRLELYYDEVDGTFRAFQPVTIPDSRQDLPIAEESAALDVGANNLVACTTTTGQQYLYEGCDLFARFRETTEEIARLQSKLPERRSLSESRKTESSGRLREGRYSSRRIRRLYRKRTRRRDHAQDALVRHLMERLYGDGVATVYVGNLTDVLSEHWSARVNEKTHQFWAYRSFIDRLATTAEEYGITVEVESEAYTTVECPVCGERDDTERDGDVFRCSCGYEGHADLDASRTFLERQAGESEVGSMARPVRLKWDDHNWSEIPHSPERASPNEERTNQSTGDGKLASVGTA

SEQ ID NO: 55039 - protein, 468 aa, Halanaeroarchaeum sp.
LSVSDRPQRTNTYTATPVNDRYRECLFDWLAAHAPLWNQITYRRRQQYFGEDGDVWDAEYTDLYEQYAPLLGKATCQQIARKNSEAWRSHFELLSLYQTESDRAVTEKPSPPGYWGNRDDGYELHGIVRNDLYTFDWNKDKSTVEFGVGDVLEDRYDFAYNERVTLEVRGDPQWRGDDSRLELIYDEHTDTLRVQHPVRIQSDDVQEQRQDAFTHTLDPENTTQSAAIDVGANNTLAVVTENGDTAVYHARPEFDRFQQHSERIATLQSELPDDQYTSNQIHRVYDHRTRQRNHSRDAAVKHAAEWLLGRRLDTVYVGDLTDVLSTHWSAEVNEKTHAFWSHRQLVDRITLTLGDVGITVTETGECESSSQCPACGNVGVTRSGDSFRCDACGLEAHADVAGAWNILQSEVGPMARPAGLSAERGRDAPADGAYWQWNDHEWTPAVFGELSWSLDQPSVSEPASSQPG

SEQ ID NO: 55040 - protein, 422 aa, unknown
  TnpB Polypeptide
VRKCIVLNNLDLTKKKSDIFGKFTNEYLRILGITSLQLPLAFSSTDLHNLTYLNIRKTSFLPSDIIQEARKDVWKCRKYIESNGFNNSLKINNGSIRLNKRWFRFVKTKRGNPCFKITYAPKKNFIIPIRTDKQLQRFYSFLKDGWIFDNISVLKDGRISVVLEKEFQKQEINQRYVVGIDIGSSTLASATVFDIKTSKVVKQLYFGRDVAIRQRRYLEKRARFLSLADKGSHRAKQHLERLKHKQLNFVKTRSGQIAKEIVSLAKFYNAYVSVEKLKNLRSKRGNFNKKANRKINRIPYGKFKEFLKSNCEMFQIPLYEVDAYHTSKWCHKCGALNNGHHSGNYALYKCKCGLIVNSDRKASLAVAVKSVLERNKTHELTILSSIQISKTRAPVNGLLRSDDVDSKVAVQHNNQHMESYHF

SEQ ID NO: 55041 - protein, 405 aa, unknown
  TnpB Polypeptide
MKRAILLQTLSTKSKNNRLKDFMDNAIAEYNRLLSKRWDLDNCNWCDTFMEFHHKTLSISKENTSFNVQVRCSLIRDAWKKKTDKVNGLTVKFNVPRNCKTFNTKSNFFIRLGLYPKIRIAVPIKQNRNYQRFNDLINNNWICKTFGLTTNLQIAAYLSKEKEIPQRENILGIDVNAKHFAISIISPEGKVLYQTYIGKHIWTKRKKIMERRALLQSLNAVKKLERIKNYERNFVNTNLGQVIQEIIKIANRFDADISIENLKKFKPIGRRFNRTVMRIPFYKFKQILEQRCFDNDIHLNIVDSWHTSKWCSHCGALANGHSSNYSLFKCNCGQIVNSDRKASLAIAIKSLLERNSHIPKPNISIQISKRRVPVNALLRSDDVVDKVAVQHNYQSLGMPTRFSGG

SEQ ID NO: 55042 - protein, 461 aa, unknown
  TnpB Polypeptide
MGRIDGQVNHTRGVAFTLDPTPAQVRLLRSYAGAARVAYNWAVERADRNRSIRSAERTAGLPEANLTPAISWSAYSLSKEWNQAKTHVAPWWPEVSMHAFRSGIASAAAALVNYRESHTGGRRGRKVGFPVRKTRRRATPSISFVEINHQLSWLHPGRHGVRLMLPQSSPDPDIHRRRAQLEWLHTTESTRRLYRLVESGRVSIQKVTISYRGGRWQAAFSVRYVAAPVVTRSSRSAAGRSVGIDAGLCHLATLSVPVDGLSDIEGHVANPAVLTLYLPRVRKLDRAIARCVRGSKNRARLCRRRARLHGRIAKSRGQGLHRVTNELVRRFQVIGIEDLNVAGMGRRKGRLGRRVADAGLGEFRRQLTYKCADRGVTLVCVDRFYPSSKTCSSCGTVKAKLDRAARVFDCKHCGLVMDRDVNAARNIARETVKLLGQSQPDKPVAGLRPETQNVDPRPRKT

SEQ ID NO: 55043 - protein, 458 aa, unknown
  TnpB Polypeptide
MGTGDGQGFYTRGVVFTLDPTPAQERLLYSYCGATRFAYNWAIGRLSGNMTVRKDERATGVPEEQLTPALSCSAYSLGKAWNEAKGTVAPWWREVSTHAFRSGTVAAAAALTNFSASRKGVRKGRAIGFPRPKSRRRSRPSVSFVEINHQLSWLAPDRHGVRLMLPQSSPDKDIRRRRDQLEWIHTTSSTRRLYRLVDSGRATIQKVTISFRGGRWQAAFSVRYLVAPATRPRLRSATGRTVGMDAGLRHLATLSVPVPGLTDTEGHVANPAMLANHLRHLKKLDRAIARCERGSNNRVRLCRRRARLHGRIAKTRALELHRVTNELVRRFEVIGIEDLNVAGMGRRTGSLGRAVADASLGELRRQLAYKCADRGATLVCVGRFYPSSKTCSSCGRVKAKLDRGARVFECEQCGLTIDRDVGAARNIEREARRLLEQNGPLAGLRPETLNADPRPLKT

SEQ ID NO: 55044 - protein, 276 aa, Streptomyces sp.
VIPPPATTTIADRQKRLKPLPLSIRPVTVIKDSAGRYFASFVVETGPSEALPATTPEVGIDLGLGHFAVLSDGTKIDSPRFLRRAEKRLKRTHQSLSRKAKGPEYREKAQLHVARAHARVADARREFHHQLSTRLIRENQAIAVEDLAVKGLARTRLAKSIHDAGWAQFTAMLEYKAARYGRTFVRIGRFEPTSQVCSACGVKDGLKPLNVRVWTCQECGAVLDRDINAAVNVANAAGLAVSACGAQMRQVPVPAQRGEAGTHRDGQPTVVGIPGL

SEQ ID NO: 55045 - protein, 419 aa, Scytonema sp.
VLKAVKVRLYPTTEQEIALAKSFGCARWYWNYALNACIQHYQETGKSLKLSVYKAYLPQLKLEHPWLKEDCYSAVLQCVAINLNKAYTNFFEGRAKFPRFKAKHHKQSIQYPQNVKVVGDCLEIPKIGIVKAVFHRPLRVRQSPRSGNPPSGLDSPIFGKLKTVTISKTPTDKYFASILLEIDGDTGQHSGDKTLGIDLGIKDFAIVHDGKEVTKHSNPKHLKRHEKNLARKQKKFARKVKGSNSRNKYRKLVALVHERVSNSRQDFLHKLSRKLVDESQIIIVENLNVKGLVRNRKLSKSISDVGWGMFINFLDYKLKRKEGRLVEIGRFFPSSKTCSCCGHVVDELTLDIREWNCPSCFTSHDRDGNAALNIRKEGIRILSMDGGNPVLADGGCVRPPTRKGKGQRSMKSEAHTDRR

SEQ ID NO: 55046 - protein, 379 aa, Sutterellaceae sp.
MSRAELDRALREQYLTDYRAMPSAASAQRQGQIIAKQFKSFAKASGEYKKHPEKFLGKPNLPGYKKKYRAFCVGRNGYKIDDHRLSITGGESVDFQPLIVKCLSSQRFNAKATGELSGDLRIIPQGNSFIIELTYQKKEEKEPVLLDRDEGAFIDLGVNNFAAIVTTKPGEKPILVKGGFLKSMNQSYNKRSAELRSKGYKKHLWSVSFKRQRRIDDAIHKISRGIVDYCAEQDIGRIFIDRNKNWKQSTQMGRRNNQNFVNIPHAKLIEQLRYKGKAFGIEVVEVTEDYTSKASAVDYDPIPGYEAGKGRKPFSGKRTLRGLYRTKDGKIINADINGAINIGRKGLGDEWLKKLLGLDEGVFVNTPTVIRSPYGERKP

SEQ ID NO: 55047 - protein, 369 aa, Centipeda sp.
MKTYCFKLYKAKRNRKLHRQINAAGLIYNHCIALHKRYYRLYHKSLNVYALQKHLTKLKKIPRFSYLKEIGSQAVQDITQRIDRAYKLFFRNLKQKVRTAPPSFKKVRKYKSYTLKQAGWKLLEGNAVQIGTQKYRYFKSRAIEGVVKTVTIKRDALGDLYLYFVCETVENEVLARTGKSVGYDFGLRQFLTASDGNDREAPLFFKENVAAIRRAGKALARKKQGSNHRKRARLALARLHKKTANQRKDFHFKLTHAICEEYALVCIEDLNLRGMQKRWGRKISDYGFAEFVKILEHQASKTGTSIQKIDRYYASSQTCHICGAQNPETKDLRVREWTCPHCGAVHDRDRNTAKNILKVGASTFFGEAL

SEQ ID NO: 55048 - protein, 391 aa, unknown
  TnpB Polypeptide
MIRTIRVMLIPNNKQKTKLFQYADTARFAYNWALGREKDNYKNGGKFIPDRDLRKEFTRIKKTDEYSWLNNISNNVTKHAIKDACDAYKRFFKGYSKFPKFKSRKFSMPSFYQDNGKIRFSDTCVKVEGFAASKKKNKQKINWIRLAERNRVPTGCKYFNPRIKYDGINWWLTVGIEYEDSTASPANEGIGIDLGIKDLAICSDKNTYKNINKTQKVKKLEKTKRRLQRSISRSYEKNKKGKEYCKTNNVIKKEKLLLKLNHKLTNIRMNYLHQTTSEIIKREPSFICIENLNVSGMMKNKHLSKAVQQQSFYEFRRQIEYKSAWNNITVIIADRFFPSSKMCSRCGAIKKDLKLSDRIYKCECGNVIDRDFQAALNLKQYGENVLKQSVA

SEQ ID NO: 55049 - protein, 477 aa, unknown
  TnpB Polypeptide
MISLIPDKNDIYYPVSTKEIVRTEQIWIESIDILNELCHISKNLWNESNYVIRQLFTQKDKDGNRIGSYMKYSDLDYLIKNKSENYQKLPASTSQQILKILDRSWKSFFEAIKDWKVNPHRDEKYLGRPKLPGYNKKDGEFLLVFTNQQVKIINGILKFPKKLRELNNKKIRTRLDDETNIREVRIVPKGNIGGEIQKNKIGYTIEIVYNIEEHQLDLNKDRIIGIDFGLRNIVTISNNIGEQPICIKGGVLKSINQFYNKKRSKIQSTYNRQPVACKIKDKSIICRKTGPSIQILTENRNRKIKDVMHKYSRYIIDYCINHNIGTIVIGHNPGQKQEINLGTMTNQNFVQIPEYLLRNMIRYKGEEIGINIKDQEESHTSKCSFLDDEPIGHRGVYLGKRIYNATCHGGLFRSSFSPLCRGKIINADVQGAYNIIKKAIPKAFTNLVVIRSDGIEGVGLHPLRVNPLTINRSVNVM

SEQ ID NO: 55050 - protein, 584 aa, unknown
  TnpB Polypeptide
LRTTASPACSAAPSRRSQQWAASAQQCVRASPTSLAAPSTQASRPCNADRTRRRRKRRPKPLQPARARRRSRQHRPKPRCKKSSDAPTSPTRSDATPSPIHPSRPRSRLKALPPASTPRSKRALRSSWVARAQRERVSVVLEAVKVALDPSPVQERLLLSHAGAARFAFNAGLAHVKDALDAGAKPEWSFYSLVRWWNSSKDTLAVGDDGVPWWAENSKEAANTGLRSLASALSNWSKSRRGDRKGRRVGFPQFKSKDRTTPRFAYTTGSFGLIQGDPKALKLPRIGRVHCLEDVAERVGDARVLRVTVSRRAGRWFAALTIERDIPTMMRAPKGGAVGIDLGIKTLATLSDGTVIENPRYLRKSERRLKRAQKALSRKAMGSKRRAKARAKVARLHAHVANQRQDAIHKATTWLANTYSEICIEDLNAAGMVKNHHLAKAVSDAAFGEFRRQLEYKTAKTGARLHVVDRWYPSSKTCSNCGRVKAKLSLNERVYRCDGCGLVMDRDLNAAVNILVAGSAPETVNVHRETVKRGDLSDRATLDSVKCEPSVGGNVVSDLERVPARTPCKLQQSSLQRAKKGDQK

SEQ ID NO: 55051 - protein, 354 aa, Bifidobacterium sp.
MAGIPSAILASTNRIENTEWFAGLKRKKTAGGRVPGFKSRHRGLGFVCWRNASKTGNAIFHKTGRKSGVVVITGMNPPRWVKPGEKAHWRIVVHVRVGQEIRPYTSVHVDWTHRTLVFVNMPLPLPRTGDGVIGLDRGCVHTLALSDGTFMDMPKPSKAELKRLKYLQRRMARQDRVNEARGDRTAKFASKRRQRTLAEFNTLQGHIVRRRNDWIERTTTRLARENILVAMEDLDVQAMTKRPKPKPDPAKPGRYLHNGAKAKAGLNRSILSNNWSRLMKRLKDKMDANGGRLVVVPAAYTSQTCHKCGHVTKGNRESQAVFRCVKCGYRANADVNAAMNILGRALRKTGGGTA

SEQ ID NO: 55052 - protein, 385 aa, Glycomyces sp.
VLLRYRYRLYPTAPQRAALARAFGCARVVYNDAVAARKHAHRNGLAYPRATELSKALITEAKRHPDRAWLAEVSSTVLQQALRDAVRAYSNFFASLAGKRRGARLGPPRFKRRSGTQSIRFTRGAAFRILDNGRLRLPKVGALKVAWSRDLPAEPSSVTVLRTPTGKYYASFVVAVDDGAQKLEPLEDPAAETGIDLGLAHFAVLRGGRVVESPKFFRKLERKLRKAQQAHSRKTKGSANRAKARLKVAKIHEDVKHARLDWIDKQVIGILRENQAVYVEDLHVNGLARGRSAKSVHDASFGMFLTRLESKAQRVGRTFTRVGRYFPSTRLCSECGALTGPRGIGGLKVRQWECGCGARHDRDRNAEINIRREGQRLVAAGQADT

SEQ ID NO: 55053 - protein, 389 aa, unknown
  TnpB Polypeptide
MLKAFKYRIYPNQEQVEMFKEHFGATRFVYNWGLEKKTEAYQQESKTLSFFDLVTELKQLKINEPWIKTVNSQSLQMSLRHLDNAYTRFFREKKGFPKFKSRHNPKQSFQCPQHCSVDWECNTISIPKIKNIKTELHRKFEGTIKTVTISRSTTGKYYASILVENCANPPKKAELKIEDAVGIDVGLSRFLTTSERMIVENPRYFKKSEKKLAYQQYRLSKMKKGSAGRAKQKKRIARLHEHVSNQRRDFLHKVTSKLVGESQATTFCIEDLSVKNMQKNHCLAKSIADVSWGMFFDFLKYKCDWNGKNLLDIGRFLPSSKMCSACGTVNKELKLSDREWTCSCGIKHDRDINASQNIKRMAFQRQNIIRCIGLEQPELTQVDTVAIAT

SEQ ID NO: 55054 - protein, 523 aa, unknown
  TnpB Polypeptide
MTHIFEGLRVTMFTNFKTMFSETFEGRLCRWLRLQILESDRETLKDSKVIKSAVTLLKIACTNDAGSIEASLPPFTRLEHLGAGDVEWMQYLVETVRSSIDGPLPLDVSNSKTIHMYFPFMRKILVDIEHHIQTTEKAFRGIKTFSIIPQKKFRAPFIHISTTVLKCMLQSLRGRRKETAADYDDPFQNFLDYLFEVTDDDVDIWKECFDVKSITKGRKQFANSIKTDGISVSATFEILRDGKPMPSKGRKRKKAMEEQEKEVIAKCRDNVLRRCQEGLPTRVVAIDPGCSAPFTGVVYDPTAVHTVKDTDKVPFETIQWSSGKYQHERGNAYRNWQMKRWTEACPDLRTFNETVSTAKTASLDTYVVRISQVLCNLPLLLDFYVHKRRVRRCRWYTFMKHQQSVEKMIVDITATKNHDGQRDTLVAYGNASLNNVRGTKPVLQQGLRRKLRSRCLFVDIDEFRTSKLCCCCLQPMDGKMMKTGKRSYKVRHCETSACHRTFWNRDVNAGINMMFKLLRFLGR

SEQ ID NO: 55055 - protein, 349 aa, Scytonema sp.
VPLVVDSKQESELLSRFQAGRQLYNACLNEAMKRLDLVRNSELYQVAKKLPRTKKKERGEAFKKAREQYRYSEYDLHSFASITSKRAKWIAEKVDSTAQQKLATRAFKASERVMLGMASSVRYKVPSRFRSMEGKSNKTGIRWKDDYLVWGKLVLQPILDLDNPVIRHGLESPVKYVRLLWRILNGKRRWYAQLVNEGLPCQKPQNYVSDGLIGLDLNVSNIAFVGDNHADLLPFAENVPSFTKEIAALQRKMQRSQRANNLDNFESNSSAKKGRRTVVKKGKVKKGKQSWKKSSNYLKIAAKKRELERRKTAYAKTQNRKVVNEILRHGKHIKTENVSVKGWVRFVAS

SEQ ID NO: 55056 - protein, 229 aa, Scytonema sp.
SRQADRWFISFRFEVTHCRASTADGFPAAGIWRPRKNLRSLIERVPDYADESTKRRTADFFTCKTPVEARESSHTDVVGVDLGVKALATLSTGEVVEGAKSYKKYEEKLSRMQWLNRHKIIGSANWKKAQLQIARLHRKITNIRKDTLHKLTTLLAKNHGVIVIEDLNVSGMLANHKLAKSIADMSFFEFRRQLTYKCELYGSKLVVVDRWFPSSKTCSNCGTKKKRSH

SEQ ID NO: 55057 - protein, 238 aa, Microcoleus sp.
MIVREAKLKNGTKEQYLALDEAIRTAQFIRNKAVGFWIDNQGVSKATLYSLCKDLAKEFPFARKLNSAARQASAERAWAAISNFYRRCKTTDKKKGYPTFKKHCRSVEYKVSGWKLSEDCRSITFTDGFEIGTLSIFCNNETQEDLYRLKINRVRVVRRADGYYAQFCFDASRKEQGQYSGNVVGLDLGLKFFTKDQNDNAVIYPQFLRKAEKQLKKAQRRLSKKFVKEACATIQQLP

SEQ ID NO: 55058 - protein, 419 aa, Glycomyces sp.
VLLRYRFRLYPTGPQRAALSRSFGCARVVFNDAVAARKAAFAAGDPYPTTAALSKALITEAKRTPERAWLAEVSAVVLQQALSDCDRAWRNFFDSLKGRRAGARMGPPRFKKRMGAQAIRLTRNARFRVLENGRLRLPKIGDVEVAWSRQLPVEPTSVTILKTATGKYYASFVVSLNHDEALPPVETEVGIDLGLKDFAVLSNGRVIENPKFFRKLERKLKKAQRVLSRKVKGSANRAKARLAVARVHEKIRHQRDDWINKQVAEVVAENQGVYVEDLSVRGLARGPGAKSIHDAALGLFTTRLGSKAARAGRTFAKVDRFFQSTQLCSVCGVLAGPKGMEGLKVREWECGCGAVHDRDRNAAANILREGQRLVAAGQAETVNASGGQVRPGTPGTARNPRDAGQNEEPTRTRLVPTSR

SEQ ID NO: 55059 - protein, 414 aa, unknown
  TnpB Polypeptide
MIRSSKHTLKFCNKQKLLDINCLISNYRKLLQEIIDHIWLNSYNDFSISKNKLNCPSFVDSNYLKQFNTDFTERLKQCAAKQALAMISAATEKRRKQLWQLKELQKNNQNTKYLQRKISLFPLIKPNASHANLELDSRFIDFDFSDQKEFLCFVRLLCINKGKNIKIPIVYTPVLDKWNNIGKLKNSIRLSEKNIILIFEVEEQKKKISGDIVGCDQGIKDIITLSDHQTAPLYQEKYSLADVQKKLSRKKKGSKAFLRTQEFRKNMINWSINQLNFNNIKELRVEKLVKVRHKHKSSRFLSHWTYTLINDKLYRVSEEKGFVFKEMSNEFRSQRCSCCGWVRKANRKGKTFCCNKCNNTLDADLNAASNLELDLYEMPYWVRLKKINRKGFYWRHDGIFSESQEPIVPDTKEG

SEQ ID NO: 55060 - protein, 394 aa, Mycobacteroides sp.
MARYRLLPTEEQSVALVEHCRHARYVWNLAVEQQQFWRPGRKAPGYNEQSAQLTEARTEFAWLAAGSQTVQQQALRDFAQAMRNFFGGAQRRPTWRKVGVHEGFRQVGVKPHHVQRLTRRYGQVQVPKVGWVRFRLSRPVPDGVKSYRVTLDRAGRWHIAFARVPDPIPGPRDGGVVGIDRGVAVSAALSTGELLHAPGLTAGEAKRLKVLQQRLSRALRGSNRRAKTKLAIAALRARETDRRKDWVEKTSTDIARRFDTIRIEALDVRAMTRSAKGTLDRPGSNVAQKRGLNRSISRAGWGLLAARLQHKALGRVEQVPAAYTSQRCSACGHVASENRKSQAVFACVACSAGPCHADVNAARNIAAGRAVTARGDLGISRSTNREPQLDSPAA

SEQ ID NO: 55061 - protein, 118 aa, Burkholderia sp.
VRCFDYIAVGNVSPAKLARTRMAKSVYDASWSSFRNKLRYKAIAHGATFEEVDESGSTQSCSACGSKDSTTRPKGIAGLRIREWACSDCGVEHDRDINAALNILRCGRASPGVGILRL

SEQ ID NO: 55062 - protein, 409 aa, Blautia sp.
MKTGYCIKTIKYQLRCAHPEWFASTERYYREVLNFYYHLLLQREELWNLNSFQTQRELECLTIEGRDGRQPVYPLPFTKVPLYFRRSAINKAIGCLKSHLGLSKSVDKKEEFNLVLPETIEASLTYFKGMYREFTDTGITLKVWDGSSWHWMECRLKGISFPENAVILSPSVVLDGKFNWLHVPIKQETTDARNAKERMNSGDNICSIQFTNTDIFAMCCVLDGEGKQLAVRTCRGGDAYRHQCRRLLDKINFSRQYTDKDNVELPNKKYYIHLKNLSEYYSHKASREIVDFCVEKEVKVIVLPLYDADFSRMVQYRSGNFTPLHLSNRIREYLKYKAWEAGIIVLEHSADHTSSQCAICGGNVKKQGSQYLCENGHQGSRFLNSARNLGRKCQEDFRKKRGCLNKIKN

SEQ ID NO: 55063 - protein, 201 aa, unknown
  TnpB Polypeptide
VETEHVELPHINQNTGIDLGIKELCITSAGKKYENPKTIRKYEKKLVKLQRQLAHKEKRSQNYCKTKKKIALCHEKITNTRKDYLHKMSHEIISENQVIVSEDLQIKNMVKNHRLAKSISDVSWYELTRQLEYKAKWNGRKYVKIDTFYASSQLCSVCGYQNTETKNLSVREWVCPVCGTTHDRDINAAKNILEEGLRRIA

SEQ ID NO: 55064 - protein, 345 aa, Microcoleus sp.
LQEVEQVFTLVYEFKLKPTNAQIATFEEWLEQCRKVYNYALCERKHWVNSRKCPVNACSIKSEYIIPANQPAPTYNSQCENLTQAKKNIPALKQVHSQVLQNLQWKVDVPFDKLPSTSLRASPEISPTGTSLGIDVGLMHFAAVSNGQTFPNPRPFKRLESKLKSLQKKVSNKRFGSNNRAKAQAKVSRLHERIANTRKNYHWELAHNLCDWADMIFAEQLNLKGLARGMLSKSCLDAGWGQFLDILSQCCFKRGVYFQKVPAAGTSQTCPKCLKETGRKKLSQRVHKCQYCGYECDRDVAAAQVVELRGLEAVGHTVVKLSEGKGSILEDVKLCLPVTEESPRL

SEQ ID NO: 55065 - protein, 520 aa, unknown
  TnpB Polypeptide
MARQSPSEHVFVITLPLRCEAWQRDRLDVIFQVGNDIKNALIAYERKQYDNLVARKEWRDTQTALRSAYEEKDAARVRALCEQRNKMLAAAGFGQYQFEKQINKYRKHYRGKGGKGYLIPAHVAQKISSSVWDGYKKLLFGNGKQVWFSKWSEFTTIAAKTNASGIRYADGTVSFNGMRLQVSFDKKDPYGYQREAMERGIRYCGICRRWYANGWKYFVQLTLDGLPPVKVKRDTGELLHPMGTGRVGHDIGPQTIASVGSEDVLLAELANRVHGIDAALWKLNRAMDRSRRATNPEMFGSDGSVVPKNKLPSHCLTHRGSRKWVKSRQYIRCESKRRELFRRQREMRIQQHNELANRLISFGDEHYIEEMRFRALAKRAKETKRTKSGRFARKKRFGKSISNKAPALFVSILRRKVLAAGGSFQEVDTYSVKASQYNHIEDTYTKKKLNQRWNIMPDGTTVQRDLYSAFLIQNVDGTLNSVDRSLCEQSYQQFLRLHTQEIERLSEIATPSSTGIRCIA

SEQ ID NO: 55066 - protein, 217 aa, Microcoleus sp.
MTQRAYRYRFYPTPEQEQLLRRTLGCVRLVYNLALHTRTEGWYERQERIDYKQTSAMLTDWKKQEDKQFLNEVSCVPLQQGLRNLQKAFTNFWAGRAKYPNFKKKRNGGSAEFTRSAFKWKDGQLWLAKCCEPLPIRWSRTLPENCEPSTVTVRLDASGRWFVSLLVDASAPLSVNTERSRGVEEHTVKLLSQLDKAIGIDAGITSLIATAKISFTS

SEQ ID NO: 55067 - protein, 142 aa, Microcoleus sp.
LVRENQTIAVEDLAVKSMMKNHKLAQAIADASWSELVRQLEYKCQWYGRTLVKIDRWFPSSKRCGHCGHIVDKLPLDVREWDCPECGTHHDRDINAANNILAAGLAVIVCGANIRPDGHKSKGQLRKTSLASRRGKKQKPKS

SEQ ID NO: 55068 - protein, 389 aa, unknown
  TnpB Polypeptide
MTNDCIRIGIEIDEERGGNQTPSMKELSLRSYRQLRKRYHCYSKYTLCAISKAAGILASRRKSIRRGISAKTPYISKPFLVSCYDLKIEDGKLMIRLDAGKFETVALTTHTKSVLSDSAIRVRSFTLSQESVSFSVSKEVSRLREEEVAGMVGVDRNLRNLAVGNARTVTYYDMTMAVTIGENTRSIIRSFTRSDVRVRRKIASKYGKRRSDRTRQLLNLVSKRVVQEAKAKRHAIVFEEITGIGKLYKRGNGQGASFRGRMNSWPYHEIKRQIEYKADWEGVPVITLTRSETRGTTMDCPRCGERLQVPVRGDAEHYRQLWCEVCKRWRDRDLCAVLNISRRGRLRFDRSQRKEGGAEEAVKGNAEHEGEPLILRVDASKLRREQWAQ

SEQ ID NO: 55069 - protein, 245 aa, Bacillus sp.
LPKLGLVRFAKSREVEGRIVNATVRRNPSGKYFVSLLVETEVQELPKTHSYIGIDVGLKDFAILSDGKPYKNPKFFQLSEVKLAKAQRVLSRRMKGSSRWNKQRVKVAKIHEYISNARKDYLDKISTEIIKNHDVIGIEDLQVSNMLKNHKLAKAISEVSWSQFRTMLEYKAKWYGKQVIVVSKTFPSSQLCSCCGYQNKDVKNLNLREWDCPSCLTHHDRDINASMNLKNEAIRLLTTRAAGLA

SEQ ID NO: 55070 - protein, 228 aa, unknown
  TnpB Polypeptide
MQRGVLMLQNIWYILRRKTMPVLILISGSKDAFLSAQICHQHALGTVSSYKTRLDLWEKTDGKSGKPKLVYENHAMPVFYRDVMYREGAERKDEAYLKIYDGHDWKWFCVRLEHTDMEYLRKYWSGKKASAPTLEKRHHKYFLRFTYTEEVTLTKTPVKEQVICSVDLGINTDAVCTIMRADGTVLGRKFIDHPVKKTGCTAHWDGSADSRGNMVLRRHREDGRIRNV

SEQ ID NO: 55071 - protein, 260 aa, unknown
  TnpB Polypeptide
LHQEIGGEIMFATISKSTTGKYWVSITCEVQHTPYDKTGSVVGIDTGIKDLAILSDGVVYENIRSLKNNFKNLKYEQRQLSKKVKGSSSRNKQKIKLSITHEKITNIRKDYLHKISTEIIKSQDVICIEDLAVKNMMKNHKLAQAFADVSLGSFYSMLEYKAKWNDKTIIKIDRYFPSSKMCSNCGWINQDLTLKDREWICSSCGENHDRDFNAAKNILKQGLKILSGSGIESDVKQKQVEALSLDESMKPETHQSLADV

SEQ ID NO: 55072 - protein, 376 aa, unknown
  TnpB Polypeptide
MRKTYKFRLYPTKQNIQKLLLTLDKCRFVYNYLLEQKSKTKMNRYELSTLLTKLKNEIPELKKVHSKPLQYENSRLNSNIIALNRMKKNGRKIGKLRFKGKNWFKTFTYSQHGFKIIRRNTIHDLLMLSKIGSIPMVMHRDIQGKIKQVTIKHEPTGKWFASIVAETNDEILPTKNKNVVGIDLGLDDYVYDSDGTHTKAPKIFNNSIEKIRKEQRRLSRKKLGSNNRIKQRIKVARIHEKINNQRDDFLHKLSTNYVNKYGFIAVEDLQISNMVKNPYLSRSIMDASWSKFIQMLEYKAESAGVQVMKVEPRYTTQKCSNCGNIVKKSLSQRTHKCECGLILPRDYNSAINILNIGLDKPEYTPVEIEPLCINHA

SEQ ID NO: 55073 - protein, 287 aa, unknown
  TnpB Polypeptide
VHGQLKEHGAHQKRPCLQHADRIIAQLPARTEAVIHCHAHRARNARDQCHRRHGKRSQVAVRGQQCHAEQRQHDAGNLIRTRLSVRARAGDQQHHHRRQVLHDRADRRVGKLNGQKVKKLEKQKRRLQRSISRSYEKNKKGESYCKTNNVIKKEKLLLKRNHRLTNIRKNYLNQTISEIVNRKPRFICIEDLNVSGMMKNRHLSKAVQEQGFFGFRKQLENKCSDKGIQLIVADRFYPSSKLCSCCGNIKKDLKLSDRVYRCECGNMIDRDFQASINLKAYGEQFAS

SEQ ID NO: 55074 - protein, 371 aa, unknown
  TnpB Polypeptide
MTVRQKSYKFRLYPNEEQKQLFAKTFGCSRAIWNMMLADKIKHYEDTKETLYNTPAQYKKEFPWLKEVDSLALCNVQLNLQKAYKNFFQSGFGFPKFKKKSHRQSYKTNNNTNKSRIVLENGYVKLPKIGWVKVKAHRQIDGVIKSATILMTPTGKYHISILCETEVTPLTKTNSSVGLDLGISDFAILSTGEKIENPRFLVSLSKKLAKEQKLLSRRALVAKKEGRKLSDSRNYQKQRMKVAKIYEKIANQRKDFLNKLSINLIKNHDVICIEDLSSKNLMKNHKLAKAIGDVSWFEFVRMLEYKSNWYEKQVSKISRWYPSSQICSDCGFSSGKKPLSVREWTCTNCGSHHDRDINASINILNEGLRLL

SEQ ID NO: 55075 - protein, 361 aa, Oscillatoriales sp.
MLLGFKTELKLNSRQRILLAKHCGVARHAWNWGLWLTKNILGHNQANPNEKLKFPTAIDLHKLLVAMVKSENAWYYECSKSTPQQALMALRDAWKRCFKKTAGVPKFKKKGRRDSFTLEGTVKICGVNKIQVPVIAVLKTYERLPQVSTKSCAISRIADRWFISFRFDVEQQESCQTSIVGVDLGIKALATLSTGEVVIGAKSYKKYRDILSRMQWLSRHKVIGSSNGQKAQVKIARLHRKIANIRQDTLHKLTTLLAKNHGVIVIEDLNVSGMMALHKLAASVADMGFFEFRRQLTYKCELYGSKLVVVDRWFPSSKTCSNCGTKKETLSLSERVFECSHCGIVVDRDLNAAINLSKTVS

SEQ ID NO: 55076 - protein, 427 aa, unknown
  TnpB Polypeptide
MIGADSRENGHRLLTSTVLKLKGSVVADGSVQIVHVVRKMKLGASPQLDAFCRDAGRIYTLCVVWFWRHVRRHGIWLSQYGMQKRLRNGQPTSLHSQSAQKAIECFFHALKTWRSERKTNPTIRPPHKLKKFFKVVWKRVAIRVIDGDLVLSNAKGTDPFVVKDWRFELPVQIEIGWDGSEYELRATYEKEAKASEAGSVASCDLGEVHPACVGTEDFHLILNGGVLRAKRRYREKLKAKLSAKIDRKKKGGKRRAKLIASKQKKLKRLDNQITDIEHKLTSAAINTLHERGVRTLVIGDLRDIRIGKDWGKVQNQRMHQAPTGKIRWMLSYKAERLGWGVELQNEAWTSKTCPACGARNAPTGRVYKCPCGFVGHRDVVGQVNILHKYHGNAEGCRVIGAMASPIGLRYAPHIRCSSRRSARIPAL

SEQ ID NO: 55077 - protein, 202 aa, unknown
  TnpB Polypeptide
MQLDGVGIDVGVRHFLTDSDGRQIENPRFYGRMPERIRILQRSVSRKKIDSANRMRAILRLNKGHEKLRNQRNDFLHKLSRFYVDNYDIIVTECLNIHRMVRGRGYARSILGTSWGRFFQMLSYKAERAGRTLLRVNPAYTSQENTNIIEDRDFRASVNILNRGLSGLGRPLVPVETKPLRVIPASFVVEAGNSALGRGSSH

SEQ ID NO: 55078 - protein, 221 aa, Crenobacter sp.
LRRLPASRYCGHCIVGIGLEIARFATLSNGGFIAPANSFKRHQAMRRKAQQALSRKTKFSNNWKKAKARVQLHHAHIGNVRKDFLLQATTTINQNRVIVCIKDLKLWAMSKSVAGDAEQLGRHERAKSGLNKVILDQGWFEFRRQLDYKLAWRGGHLITVPPHHISQTCPACGHVSKLNRQMQARFCCVECSFEENADLVGAMNVLHHGEAVLEQGQDIAS

SEQ ID NO: 55079 - protein, 416 aa, unknown
  TnpB Polypeptide
MPIFKAYRFKLRCTPAQERELRRLSGGLRWVWNQALAEQKSRYAKGEKYAGYADMCKWLTAWRNVPATAWLAEGPIHPQQQVLRRLDEAYRRFLKRTGGFPRFCARGQEPGIRFPDPKQFELDGYNGRIKVPKLGWLRLRQSQPVAGLLKNVSIRREGANWYCSLQLEVAETAPALDAAPSIGIDLGLVNFLATSAGELQAPIAALAAQQRRLRRYQRSVSRKVKGSCNRRKAIERLGRLHRRIARQRSDWLHKLSTSLASRHPVVVIEDLKVKNMSASARGSAAAPGRNVRQKAGLNRSILDASWGEFARQLEYKLAWAGGELVRVNPAYTSQRCSCCGQIDARSRKSQAKYECVACGHAEHADVNAAKNILAAGHAVWSERTKACGEDVRRAAVARPEHAASMKQEPAKEGAFV

SEQ ID NO: 55080 - protein, 237 aa, unknown
  TnpB Polypeptide
VKLTEVIQVDYSLDLSKLCHLAKNLYNLANWYVRQDFFNLNNMLTYYDLDFILKSTQPYQSLPSQTSQQILKYVIRNWKSYFKGLKEYRRDFRKFKKSPKIPQYKKKNGESVVIFTNQQCQIKEGYLHFPKRINITPIKTRITERLKEVRIIPLGVKYKVELVYEKEEQELELNQKHILAIDLGLTNLITAVNNNGYTPFIIKGGMIKSINQYYNKQLAYYRSIENKKGNFADTKRI

SEQ ID NO: 55081 - protein, 373 aa, unknown
  TnpB Polypeptide
MTKQNKAFKFRLYPNKEQKELLAKTFGCVRFVYNKMLTERKETYEKFKDDKETLKKQKLPTPAKYKKEFPFLREVDSLALANAQIHLQNAYKNFFEGRAEFPKFKSKKHKQSYTTNMVNGNIKIEDSHIKLPKFKKPIKMKQHREIPAEYKIKSCTISKTKTGKYYISILTEYEKDIRPVKIQKVVGLDFAMDGLYVESEQGEKANYPRYYRQALDKLAKAQRILSRRKKGSARWEKQRLKVAKLHEKTANQRRNFLHHKSKELATNYDAVIIEDLDMKGMSQALNFGKSVHDNGWGMFTTFLQYKLEEQGKKLIKIDKWFPSSKTCSCCGQVRESLSLSERTFRCECGFESDRDVNAAINIKHEGMKRLAIA

SEQ ID NO: 55082 - protein, 278 aa, Clostridioides sp.
VIAVKKAYKFRMYPNKKQQELINKTFGCCRFVYNKYLAKRIEVYKNNKETFTYKQCSSDLTNLKKELNWLKEPDKFSLQNALKDLENAYEKFFKEKTGFPKFKSKKTNRFSYKTNFTNGNIMYCGQHIKLPKLGMVKISDKQVPKGRILNATISKEPSGRYYVSLCCTDVDIEAFENTNNQIGLDLGIKEFCISSYGDFIENPKYLKKSLNKLAKLQRELSRKTIGSLNRNKARLKVARLQEHIANQRKDFLQKLSTKLIKENELIKETILFAYKIYK

SEQ ID NO: 55083 - protein, 423 aa, unknown
  TnpB Polypeptide
MKANIAYKYELMPTQEQKRILAQATGCRRFVVNKAIELQKTCLEQNLPFLKYTDLASLLLLWKMDDDKVWLRDAPSQALQQGLMDVSQAFKEFKAGRKGFPKFQVRNNGDSFRIPQIRPTDWDAANNRVRIPKAGFVRFRQSRPIQGKIKQITVSVDCGHWFISVVTEMDFANDGPRRFGEVGIDLGIAQTVTLSDGTVFQLDIESIKKHEVRIVVLQKQLSHNKEARQKLASLGKAQPFDKRNPSRRTKKLKEQIQKHYRCIRNIRQDFMRQTAHTIAQKYGWVAMENLKLKNMTKSAKGTVENPGKNVKQKSGLNRSLARVAPYAMRQAIQWALFKAGGTLVLVDPRRTSQRCPHCGFTSAENRPTQAHFGCKQCGFTQNADVVGATNVLIKSWTNSVRPSSEFGDKSAAGTVLFFASSAI

SEQ ID NO: 55084 - protein, 423 aa, unknown
  TnpB Polypeptide
MQLTERHLIKPNHQLYRTLDDLTFKAKNLYNHGLYLYRQSYFEHKKNPDVPILTWAKIDNILRKQGHDDMRALPSKVANAVLKNLGENISSFWKLVRLKNKGGLAQKPKLPHYLHKAEGRYPLSFNYQTFGKKRGANGELFLCPKGINLPIPTKVDNPKQVRIVPSHNNFIIEVIYDAQERAPKSTSNYAGIDLGVDNFATITFSTQNQPLIIKGLELKSINQGYNRLISKAQELLPAPLKTSNPIHRLWSRRSWILKTKIHQMTAFLATLFDEMQIEKVFIGKNTGWKQNLPFGKAVKQRFAYLPYETFIEQLQYKCKLRGITVIVQEESYTSKASFLDGDDIPVYGEVENPQFSGRRVKRGLYKAGNGRLINADVNGSYNIMRKGLANNLQPLQMSNPLIHPLVVKGIGKEPNDKLVQSYM

SEQ ID NO: 55085 - protein, 341 aa, Lactobacillus sp.
MLYDEIMWKVIQKDGADHLDIMTAVSGKRKQLKLTGPFCYANKKKRGDVQLILDRDKKRLEVHRAIKAAVHDLHKSKKKKVGMDKGLATLLSCSSGHEYGFNFSQLVNAEAERINRRNTNRNEYIQAAKELRHELSALQAKLAIKHSAKTEWRLRNRIGSLERRISRLEERHLGSKLYHRQHARKQCNMERIMNMSIRKMLLTEKPDVLVKEDLSFTKEKLPKAANRYEAKVRRKLSSWSKGTLDDRIEYLCDCLGIRTVDVNPAYTSQFCPNCGARFSERKGTHHELTVCPNCGEMNANTAAAVNILRRADDKNITLYTPYKKVEKILEDRYANKQSVMA

SEQ ID NO: 55086 - protein, 322 aa, Lactobacillus sp.
MKCDLNWAFEGNTFSFSSDVPRKQFSVEMTSSWNYPRTGDITVVLDRIKQRLEVHKLISSKRYSNDSKKAIGIDKGLDTLLSCSSGNEYGKNFSKLANAIVDKYGKRNANRQPYMSLRWQLNQQLEQLEKADKPLSKTASKKKRKLLDKLKNLEQNNIGRKSYDKSYRSAQETVRSFINCAINRMIETEHPAVIAKEDLTFVKEKGVKSDNSRFARKMRKRLNSWTKGQLDERIEYLSSKNSIETHDVNPAYTSQYCPICGQHFEERYGSHHELTKCKKCGKMNANIAAAKNILSRLTDEEITLYTPYKRVKEILVSRIKEA

SEQ ID NO: 55087 - protein, 433 aa, unknown
  TnpB Polypeptide
MLRGIKVRLYPNKEQQARLNQVLGCYRFVYNKTLELKRNAYDEDKTTLGLTDISKWFHGTLLKDENYTWLQEQNTKVMKQSIRQMLDAYSKFFKQHNGFPKFKSKKDKQSALFPSEAISKRNTFNERKITLTQDLKDIRFRCSDLYYKRLQDHKDKIRSATVSRTKSGNYFLSILVDIPQNELIKFKHTKQCVGIDLGVKDFVITSDGEVFENKHFFKKQERKVKRLQRQQSRKQKGSHNQEKQRVRIAKAFERLTNQKDAYIHSVVNALLSLYDLVCMEDLNVQGMLKNHKLAKAIQEVGFYKFKQILLDKANVNDKQVVLVDRFYPSSKTCHTCGYIKKDLTLSDREWVCPICGEHHDRDVNAAINILCEGLRIIGVRSTEFTLADCPTMDDRLATDLKSSGRLKQERRTNNSSFIRFFYTVRLNLTDNIV

SEQ ID NO: 55088 - protein, 411 aa, unknown
  TnpB Polypeptide
MERVYTYKFRLYPNREQQDYLANVFGCCRLVYNYFLNEKKNQYNESKTSDSYNVQSGKLTELRKTEGFEFLNAVPLQSLQCSLRNMHTAYDNFYKRRNSYPKFKNRRDKQSFKIAQPNTFHIKDGKLYIPKLKSGIEIVMEREIIGKICFATISKNKAGKYYIAITVKQDYTPSNKTYERVGLDLGIKELIITSKGFKYANKRSIIRYYKRKLKRYQRCLARKVYGSKRYENQVLKCNRIYQKITDIKTDYIHKITTELVKTYDLIKVEDLNIKGMMKNHKLAEAISECNWYQFVQTLEYKCRWNGKTMMKVDRYYPSSQMCSECGYINKKVKNLAVRYWTCPNCGAHHDRDINAAKNNEQYEPDEWQRHISARNAEYSRGAVYQPFAKPKKTGEQTDSNEATIELEVLQD

SEQ ID NO: 55089 - protein, 545 aa, unknown
  TnpB Polypeptide
MVIESKYTKTFKSNDLTRQKYDELYAFALMLRDHKNLVSENVNSNLEKYLEYSKLDFLKEMRARYKDVIPSSFYYELYSQVFACYQNKFEAIRKHLDFEVVRFVGFDFYKRDTKKNKKGDLKKVVTEKNKTPLSICLTYLARYGNENTLEYIAKQLETCDDKKRDFYNNIIRCCDKFGFERLLGLALRKRNRIIKRYSEHPIGFKSLSFGGRCRKTRIIDYNKKFGSVINSFVSLSGIGRKSFDIPVKFNKDWHGSMKDYRKSNPDYEYVLTFNEKRHQVNINLCKDGQRYIPEAGDNVVGIDVNCKHNLFSLSNDTSYDYNRKLVNDFCKLSLEVDELKKDKNYVVGKRKKRKLDTLKMKMLKSEQQLISRMCKELMADGVNHIVMEDLDNGFGRCYVKDKGNEDINYNRKVKFLGLSSLKDEVEHIARKYGIALSTVQASYTSKMCPICGCIADENRPNQETFECVECGHKDNADHNASVNIKNRVTVTVLREQLLKRLGNGAYEPRKLKREKVKYVLLSFRRDLQKASGERGESDMTTFDYV

SEQ ID NO: 55090 - protein, 546 aa, unknown
  TnpB Polypeptide
MVIDSKYTKTFKSNDLTRQKYDDLHSFAVMLRDHKNLVSEYVNSNLEKYLEYSKFDFLKGMRARYKDAIPSSFDMQLYTQVFNCYQNKFEAIRKHLDFEVIRFVGFEFYKRDTKKNKKGDLKNVVTENSKTPLSICLTYLARYGNDNTLEYIIKQLETCDDKKRDFYNNIIRCCNKFGFDRLMELALRKRNRIIDCYSEHPIEFKSLSFGGRCRKTRIIDYNKKFGSVINSFVSLSGIERKSFDIPVRFNKDWHGSMNDYRKSNPDYEYVLTFNEKYHQVNINLCKDGQRYIPEAGDNVVGIDVNCKHNLFSLSNETAYDYNRKLVNDFCKLSLKVDELKKDKNYTIGKRKQQKLDTLKMKMQKSEQELISKMCKSLMLDGVDHIVMEDLDNGFGRCYIKDKDNEDINYNRKVKFLGLSSLKDEVEHIARKYGIALSTVQASYTSKMCPICGCIADENRPSQETFECVECGHKDNADHNASVNIKNRVTVTVLRDSLLKRLGNGAYEPRKLKREKVKDVLLSFRRSLMNKSDGERSESGVTTFDYV

SEQ ID NO: 55091 - protein, 413 aa, Goodfellowiella sp.
VSTHVKRAFKYRFYPTDAQAAELSRTFGCVRKVYNMALQARTEAWTLRQERVNYNATSAMLTGWKKTEDLAYLNEVSSVPLQQTLRYLQGAFTNFFQKRAEYPRFKSRKKSRRSAEYTSSAFRFRNGRLTLAKMAEPLDIVWSRPLPEGSEPTTVTVSQDSAARWFVSLLCVDQPKPMPVTDAAVGIDAGITSLLTVSRPIEGLTDGQGKIRNPRHERTDRARLAKAQRELSRKAKGSNNRAKARLKVGRAYARIADRRRDFLHKVTTALVRENQTLVIEDLAVRNMLKSRTLARAIADASWSELRGMLEYKAQWYGRDLVVIDRWFPSSKLCSACGAAWGTMPLTIREWTCGCGTTHDRDVNAARNILAAGLAVAACGDGVRPQRSTPGGQSSVKQETSQPRRSRAAAQPRG

SEQ ID NO: 55092 - protein, 254 aa, unknown
  TnpB Polypeptide
  misc_feature (177)..(180): Xaa can be any naturally occurring amino acid
MIIRQGFSFKLKPDGAQDRKMSRFAGCTRWVYNQGLAWNEERRTADPAFHISYSKLCSELLVWKEQNPWLRETHSQVLQQSLKDLMGGFQKFFKGLTAFPKKHKKFVTTDSFRFPQGFKIDEGRRQIYLPSIGWVKYKRSRFIQGKAKNVTVSRQADGWYVSIQTEYEMEPPKHAGXXXXALTWDASVSARFPTARSSNRAAHSRSRLRSSPGCSAGSQECRSSGRIGANRRQRLQGYISISPMSVVISSKRSR

SEQ ID NO: 55093 - protein, 388 aa, unknown
  TnpB Polypeptide
MFEVEGAPEKVKVPKNPKAKDKLTPEEKKIEKEKRQAAQLKNSQNEITALNDKHTVHLKVYHKNDWVWATVTLRKTDIAYLRKYWMHACASAPVLEKRFGKYSLRFSFEENISLSKTPIKKQRICAVDLGLNTDATCCIMTADGTILARKFINFASDKDHLYHVLNRIKKFQRLHGSREAHNFWAYAKRINDELSKKIASAIVEFAVLYSADVIVFEHLDFKGKKASSKKQKIQMWRKNGIQHIAEHKAHRCGIRVSHICAWGTSKLAFDGSGKVTRAQNNHSLASFESGKQYNADLNACYNIGARYFIREVTKPMSKKAWSQCKAKVPDIERRTQCTLYSLKQLHSLLSPPMATQQPGPICWDYTVLRELCGRLTPMWRPMPSGIVS

SEQ ID NO: 55094 - protein, 299 aa, unknown
  TnpB Polypeptide
VIKIIKTIRVMLIPNNKQKTKLFQYANTARFAYNWALAKEQENYKNSGKFISDVDLRKEFTKLKQTSEYNWLTKIDCDVTKQAIKDACEAYKRFFKGLSKYPKFKSRKYSVPSFYQDNVKINFTATHARLILVTGKGKAKNKRSQKFCKVRLAEHNRIPTNCKYYNPRIKFDGLNWWITVGVECPDSIDIPNNEGIGIDLGIKDLAICSDNYKYQNINKIQKIKQLEKKKRRLQRSISRKYLKNKKGNSYCKTSNIIKSKKKLLKVYQKLTNIRKNYLHRVTSEIIKREPSFICLEDLK

SEQ ID NO: 55095 - protein, 371 aa, Cyanobacteria sp.
MFGKMTEESTRLANWLLTIPLPERRKLTTAKIETSLMSAIANHTIRHTTSGVGKKVKTYKSLPPEINKQNWSIHKVGETYSLSFPTIKGTKRVPVEVALKHWQPILDRLLVGDTSIDKGSAKLIKHRNKWYAYISVTLEVPEVKTTNRIGCDRGQNNLAVVAPAFGFGKFFNGKEVKHRRRHFQKRRHSLQTASKFRALNKWDKKERRWMEAVNHTISRRIVRFAEYLNADVVIEDLEGCRNNMKQRKKNRADSGESRHSWAYYSLEQKLDYKLALKGLKLIKRPAPYTSKSCSTCGSIGDRKKHDFNCPNGHYHNADLNASRNLAQWDGFSCSLDLKRDATIMVSSGLENGLLDTAPNLMKGFLPSGEYL

SEQ ID NO: 55096 - protein, 414 aa, unknown
  TnpB Polypeptide
MESYRKMNNRSYTILKIKHNNINYEWCKYVCLQARYIYNVMLYEYRQNFFKTENERIDISFKDLYQIGKASKHWKELPAKCSSQCWMQLTNDINSYWKAIKEYNKNPEKFKKRPNIPNYNKDSGIVIFNIQTLLFSHKLPSQHCRLVRTDIVLDLSKYEGEVREVKIIPKKDYFIIKATFKQDIKEEELNENKVASIDIGVNNLAAITTNQAEIQHILINGRPLKSINQYYNKTKAKLQNKLPKGKYKSKRINNLTDKRNNKIDDYLHKASRYIVNLLVENNIGTLVIGKNRNWKQEINIGKANNQNFIMIPHARFIDLIKYKYESVGGKLILVNEAYTSKCSALDIEPIKKHDVYKGNRVKRGLFKSVNGVLINADINGSLNILRKVVKKEEYSALIDSQQWAKYSPIKISIK

SEQ ID NO: 55097 - protein, 445 aa, unknown
  TnpB Polypeptide
MLKSPNITSRSKSASKKQDGQLKKEKKKAREPKDPNQRSKAYKFRLSPTKKQVGKLEWMLRRCKELYNAALQERRDAYQMCGISVSYRMQADQLPAIKKLREEYSDIHSQVLQDVLKRLDKAFQAFFRRVMNGEKPGYPRFKSGDRYHSVTYPQGGFEIIHGKTLHLSKIGHIKIKVHREMKGKIKTCTIKKEGEQWYAVLTCEYKHNPATTFHPSEEETGVDLGIKYFAMLSNGDSIPNPHHYRMEEEKIAAAHQKIHRRKKGSHRRHRAKKELSCLYRKVRNRRRDFHHKESRKLVKQYRVIVFEDLQIVNMTATPKPEQDETTGKYLPNGAAVKAGLNKSILDAGWGSFVRLCTSKAAEAGGTVVKVPPHNTSQICHRCGTIVPKNLSERWHSCSTCGEELDRDHNSALEVLHRYQRTKKPCVGAGSAPQRPVSLCGEARPL

SEQ ID NO: 55098 - protein, 394 aa, Gammaproteobacteria sp.
MLRAHKIELRANNKQATYFAKACGTARKAYNWALEEWQKQYQAGGKPTEAALRRQLNSIKRKEFPWMLEVTKNAPQMAIMQLGDAFKNFFLRRANHPTFRKKWIDDRFTLTNDQFAVNDSRIRIPRLGWMRMRESLRYSGKIVSATISHRANKWFVSITVEMQKPIPPAANDNQVAVGVDLGLTDFAVLSTGEKITGPKPHQALMSRLKRLSKSLSRKEKKSNNRKKAKIKLARLHYRIANIRSNAQHQLTTRLVNDFDVIGVEDLHVKGMLKNRKLSRSIADMGFHEFRRQLEYKTLGAGKKLVVADRWFASSKICSCCGEKVDGLLLSEREWTCVFCSTHHDRDINAAMNLKKLAVSSTVSACGASSDGAIASVIASHGAMKQESNVKVTYG

SEQ ID NO: 55099 - protein, 562 aa, Acidimicrobiaceae sp.
MENLVSMAKKLRPISSPFVVAAPAGARVRTRLFVNGTDADVLFAVGRHLGSLAGVDLARRCREGTLDAEGHKTSRRGRKRSLTNQSSSRWAGAITRATDDQFQLRRRNLVAEQGSLRQRIRLIDRRLVLPVGSKRGRVRAYPSQSERFEKQRRRQVLAGRLSEVERRLDEGDFSICRGGHLLAKARHSLHAAGLSQSEWRERWDAERMFITADGEADQLLGNLTIRWDPADGSLEIRLPAPLERLANRPHGRYRLGCPATFSHRGDEVAAQALSGALRYDIAYNPIKHRWYCDASWKIKDVAQSPTLESLRKSPVVALDLNHGHLALCVVDPSGNVVGNPRTISLELAGLAATTRDGRIRAAISEVLGVVKVHGCRAVVIEDLDFKDSREQGREALGRRPSRGKKGKNFRRLVSGLPTAKLRDRFVQMASNQGLCVVAVDPAYTSWWGAEHWLDALQQISSDASGHHAAALVIARRGLGHRARRHKSGRCDSSRPEDRTERATATVASSAEPQKRGPASREALGQSHQRQKTRRANRTRAGTQVDQDRSGPPTGRDSVPLSV

SEQ ID NO: 55100 - protein, 388 aa, Nostoc sp.
MSNLPIEMQTISVKCKLQVPVESRSEIDRTLQRFANACNQILEVAKRENCWNTTKLHHKVYKPVREATGLKANHVCQAIRRVINNAKAVKQVHKFRPTSLSLDIRTFQYIEELQTVGVTLMCGRVKFKLSIGNYQLALLKGQSPTAATLSKTKRGDYYINICVDLPTDPTGKTPKVIGVDLGRRDIATTSTGKSWSGKQIQSTRDRYSKVRANVQSKRTRSARRLMRRLSGREQRFQKWLNHNISKQLVQDAKQLDAALTFEDLTSIRKSLNQKPRSKTERRRTNNWAFYQLRLFVGYKASVAGVPVVFVPPAYTSQTCSRCGHIHPTAGKSYRSGKVFKCGHCGFEHDADVNAAFNIAALGASFVSSPESPGMSCQLEGQMSLFSMI

SEQ ID NO: 55101 - protein, 396 aa, unknown
  TnpB Polypeptide
MKQVEIHQIKRGERHFDEIDDLCFKSKNLFNSALYIVRQHFFETGKYLNFYSVDKIFKESNQPDYRGLPIKVSQQTLKGLDIAFSSFFALHKKFKEGKYPNKPSIPHYKDKVDGRFTVTYTNQCFSKPLLRKGIIQPSGTNLQIVTKCIPETINQVKLVKVNRNIAKIIVIYTIPDPKPKEDNKRYASIDLGVNNLATVSSNVIKPYIINGRPIKSVNQFFNKILANLQSKGMGVCQHKKDTLSRWRNNHINDYLHKASRYIVNHLVSNSINTLIIGYNKGWKQDANIGRVNNQKFVQIPHLKFVEMLEYKCRLVGITVIRQQEAYTSKCSFMDNEPIKKHTEYVGKRIKRGLFKTRNRKFINADLNGSLNILKKAVGEFQYPIEVCSTPCVITLK

SEQ ID NO: 55102 - protein, 393 aa, unknown
  TnpB Polypeptide
MAKLTAEQQLAKNEKVKAKIKDTKERRKEQQCFVRELKINTSNMSEEDLIHLKMLFIEARWLRNAILSSADVKEFNVSKIDHVLGFNKEKEVVEKPIKYLSSHMRQEVLGQVKQDISSLAAKKKKGLKVGRLKFVSEVNSINLKQYGNTYQILPNGIKIQGLSTLLKVRGLKQFNQFAGCEFANAHLIQKPSGYFLHVAFFVSKKSLIQTDIKKDAGLDFGIKTSITTSDGDKFNISIKESDSLKKAQRSLSKKQKGSSNRYKARFKLKGEYEKITNQRKAKANQIVGYLIKHYNTIYMQDENLRGWHKGLFGKQVQNSALGTIKSKLISKGAILIDRFAPTTKECLSCENHVTLTLDDRIFSCPLCGYTEDRDIKAALTVLMFGLQGKYLKQ

SEQ ID NO: 55103 - protein, 415 aa, Hydrogenovibrio sp.
MTLKAYQYSISPNSEQQAQIWQHFNHNRGVWNRMLALKSRYYKVYGKSLSKRQLQDHLIKLKKRPAFAWLKQVNSQSLLATLNNLDTAYGNFFKGIAKFPRFKSKRSNWHSYANPQHTEVDFENGKVKLPKIGWVKAKLHREFVGNIKTSTVKISPSGKFTVSILVDDGKVLPDATTIEPEYAIGIDLGIKDFVITSRGKTYENKRLLDKQLHQLNKQQRILSRKKKGSASRNKQRIRVAKLHEHVANSRKDYAHKVSAELVSESQTTIFCEDLAVKNLLRNKKLSRHIANVGWSQFLEFLSYKMKESSKNLIRINRFKPSSRECRMCHSKHENLKLSDRTFECPYCGHTEDRDIHAAKNILRFGLEQELGSGSESSHAVKSTPESILDLTSGSAKGLEPALVGSAEAPSRTSVS

SEQ ID NO: 55104 - protein, 347 aa, Enterococcus sp.
IKILKAYKFRIYPDEAQQEFFIKTFGCVRFTYNTLLKLRQQNPSDESTLPEKMTGVWEKKTTATPAKLKRDYPFLKETDSLALANAQRNLTKAFQNYYRGRASYPKLKSKKNAWQSYTTNNQGHTIYLTNEGLKLPKLKSKVPIHQHRQVCGKIRSATISAKNRQEFYVSLLCEEEITALPKTGFDITITYDPIKLIGTSKVLSDRPNFCQQRLLVQLKKAQRKLYCRGKSAQRRNVKLEQAKNYQKQKLRLQKLYIHQIKQKEDFMEQLSIALLRQFDLVTVTMPKAFESLSANHSAAIHQDCSVNYKNTAVNFTIRDWNRFVLKLKYKANWYGKKLIFTDQEKVI

SEQ ID NO: 55105 - protein, 381 aa, Caldivirga sp.
MKAHRAILIRLPRDRCNVDYIKRLTALTSLAYRGFEVWVPDLPKTIQHHLYGFRNFKGSLVFGTVPKRWFASTWVPLKTLRFYPDGSRKGGRYAPVVLDFKSSAIKLYQVCRNERGYVVEVPMPRWVVDRLSEGGDVKYAMIGLKDDEPYLALIAEREVEPYIPSDYMLAIDVNAWNNGIAWGLIKSSKLVKWKPERPRLREIDGLYYRSVVLSQKYGKLKRLGLHKTKEGKGLWREVRRLRRRIYAKLRDYAQRLAHRLVRKALRHRALVIIDDIIEESRRELLEGKLPSGLRKIYLAETRRFVKLLIAQLEWYGVPYRFKRLPSTICPICHHELTQLPGRIMVCGNCGFKAPRDKVPMYWVLKLRCKMIEPEDEDCPHR

SEQ ID NO: 55106 - protein, 942 aa, unknown
  TnpB Polypeptide
MFLLYFRHTVFNHILGYNMKLNHLSIAQRMEGAENIHELKENKKTISCGCAAMVDTIESADYIIRLHKAAIAAQNWTVQELGKIMFLPATFISGEGIAEKVTIFDLLSMNKASHKAFASKFSNNGEGFTGTRPDGTPFRTTKSFLGYLSREITSNENSPFCTDMQKRIITSLPEEFQGTASVFIRESIIKIAGSKIEAAEQKKMGPYDNGHAATWCMTDGELSEYIAETEKSAETKRDDEKKTPKKQDNSRQDNTWKRSVRFALADLDTITASITGFAGISSTELAILKEQLLITGPDPHAVDNGRVPGPVVWPAGRKVKVGNEVVTRNVKRPEWDGVFKAVYLNALDRFKTAVIENLPNITRGGLPIPVNIDYSERDERIAAGKKYDSKLIPIHLPMNKSCKVAIPEIFIKTRSGHSTDGYFPHNFTEMVPVTKAICCTLRLPDGCTPETLSSVNSGLIAQISYETVTTAVRMRPKADIPREKILGIDVNSATFKYNTSAGRLQAGQDMVDWHEAIAYFQGICPNDFLFNMGKYCTFEHIHTRICAEEYMASCKARLFSKASKQVDDILAQFRSGEYGIAMMPTLALLPTVFKPDTREVLPKDPMFNLFRALIERKGADGKTPYYSENARDTISHTRRWRHEIALALSAKLEYRDKAITWQADHDPVAEPFTNTEEAASILDRMTAAVNSAKQIEEHILSRSLFSYETVSRFTIYAVEDIDFDCLKDKSVSFMSLSSTLRQIPALASGCSVAAQEASGNVRVKLDGGTGAEEAVTEIRKWFAGSAHRGQWSLETVEAVSAGEIRMKCGITRKGRIDRAVATVPNLLTKVMRLPEVKNTVERLCVKNATPFVSVDPRSTSLTCSACGARTTKEACKKGEPFCKETGRPFRLGERFVCHKCGREINANWNAAINVAGRASFIMANAKNKKKLAEPSDNSLPGM

SEQ ID NO: 55107 - protein, 258 aa, unknown
  TnpB Polypeptide
LTKKFENYEIADGKFIRKASGFYIKISVCIEKKNTTKKKNYKELGLDFGIKDNIVTSDGEKFNCNAQESEQLKFLQKQLHRKQKGSKRYYKLLKQIKCEYEHLSNKKADETNKLISYFLKNYDIIYFQDENLSEWKKNKRNRKTGKKTNCFSFGKQIQSSYLGRVKAKLVSLEKCGKSFKIGKWLPTTKFCPNCSCLNNIKLNERTYHCDCGYSFDRDIHAAKNVKLFGSTKRAECLEQASVEILTSAALEFNYNIVS

SEQ ID NO: 55108 - protein, 361 aa, unknown
  TnpB Polypeptide
VRRTIRLKIQPARPDDLLNLMTQYSSLYSAHVEWALLNKTYSKQKAHEGLYGELRKAYPEVPSAMIQAARDNAMESVKATKFKRTPTPGKRLTLRYDKRTCTLRGTQLTFSSIGKRQKTILQIPNYFKEFFDNWKFTGCQLSYYGRIFWICLNYEKTSPEKKEGGYLGIDRGIINIVATSKGDKFSGKKVRGHRRRSLYNRKICQAKGTRSAKRRLKKMSGGEKRFSKDVNHVVSKWICSMPETVLVLEDLKRNKSRKGRHLNKRISDWSFYQLEQFLKYKAEACGKNIVYVDARYTSQKCSCCGTIDKSSRNGGRYVCTRCGYSGHSDVNAALNIRANHFLSTQAGGTGCSQSPVCSPTP

SEQ ID NO: 55109 - protein, 523 aa, unknown
  TnpB Polypeptide
MPSKTSSDKKNGKHSGQKESDNKRSLTVRLNLSMGQQIYLTSLIKAYTSIAKKLHEKAREKFMELTTNGEIKNIEELKDIKKKFNSWFNEYFKTQRKWITDSLGSNISDQLFQFLMAQYKNFFANYKNFFKHKVDGRPSFPSLPELFQIRDRGVEVDFDKKILIIKLKDKQLRLKFQSDRILYHGDPGAVTIKKIDGKFYAYIPFDFNPKFDEGKKGAIDIGLSNFFAAVTEDGDVILVKAKQYTYIYNMYKQRIKELDRMIGNIRKHTLKMYVTPPKSFRYHPLLGFTNNREVSKILISLYTSRYDEKRGKKKKLTKEDMTNVVKKIRKVNYSLRIKRLNFMKVDGHIKLFPKKSRFAKDVFKDLPILHKLEYERRKLFEKRDKTLMHIRRTAINTLLHILKERGVTHIAVGYPRYINKNRNELTVNLFQYRKTINDLKIIGERYGIKVEELEEYGTSIRCSICGEEHKNGRIERGLYRCEKTGKTINADVNGALNIFYKAFSTMPKQLKKIETIKLTSSLP

SEQ ID NO: 55110 - protein, 510 aa, unknown
  TnpB Polypeptide
LRGGEPVRLYDTVTRHRFTTEDGVDAEQVSADLAQMINWMAEAEREVLASTEFHNLALKTLKGNRPTGSLNSWGRKRLSRYDFSFQKHNMNEMLVSNVVSTLELYAMSVGLFQVMSTHPKETRPEKILSHYRSTYPGAPQPTSGMVRAHLIRYHKKGERKASIPGVSAKLNLAVCDTKFSPKSFRDENDPLSVVVQFRTPHYGLTSVHLRLPDDTERFGTGKVCRPTIRLSNKGQVVFDIAVEHEVDTRQTKNVVGVDLGKIEPFVATVINPETNHRSAPYHANYKRRLGSLVRKEQQRRELTSRLYEKADLCERYNRVQHAQVLRTEAKRVSAKATHIKHEISQCIASQVVSIADQNDSHVSLENLSWLDSRGGRWPHAEIQSRIENTAKRYGLKIVKVSASNTSKTCSRCGGKTSNNSKTRVGTCSVCGFELNRDVSASREIALRATSPSSRSRERMRSLLRQRQEKQSSAATRQSKPVTALSGNQGHTGTSESLSEATLMMVRESRL

SEQ ID NO: 55111 - protein, 446 aa, Bacillus sp.
MKQAKTLKHKITNHSRIFDETVEIYNQALSFIIKVIDEEFGDLSQFSIKDMVTLVEQLIHATKSNPHPKYIEFNQRFHKFPSYFRRTAIAAAFGKVQSFRSNYQNWWEEKQQAESEGKKFKKNPPRLQLEHKEFPVLYKGNMFIRTSDITATVKVFHQNDWVWIDVKFKPQSLEKRGVLDWKECNPKLVAIGKKYFLCFSYEKDIKLNKTKVKDQKICAVDLGITNSAVCSVLDAKGTVVARKFINQATEKDRLYRMTSKLRKAQSTSGWISAPNYWRRINGLQTHIVNDTCHQIVAFAKEHQCDVIVFEYLDKMKTPKGFWGAKKLRFKLRYWRKKGIQRKVEEMAHYLGIRISRINARNTSALAFDGSGMVERNDKKDLATFTTGKVYHADLSASYNIGARYFIRAYQKSTSEKKWLSLQAKVPVLAKRTQQTLSSLITLHLAL

SEQ ID NO: 55112 - protein, 424 aa, Thermococcus sp.
MKRTVTVKLQPSKEQQKILHQLVDIGVKVWNRVNYMRRQQFFEGKIVDFNKTEKTVYEEFKREIGSATVQQIARKNAEAWRSFFSILRKKRNGELSSWLKPKPPNYLKEDGRRKPSIVPRNDQYKIEGNKLILKGLGKFKRLKIQFKGRIHPRGKQGRLEITFDPVKRKWYAHVSFNVEEKLENGEWVKVPRDPLGNLSAGIDLGVNNLRAVYIENGKSFLVNGRPLKSIDFYWRKKIAEYQSKLNRSGAKTSRKLKRIHKKAKLQAKHYINTAVRQTVRRLYDLGVSKIVVGYPRGIARNSDKGRRQNFLLSHVWRFNYVIKRLREVAEEYGISVVVVGEAFTSKTCPVCGRPHDGARFVRGLFSCPATGLVFNADLVGAFNILRKAVKTITPNLSGLYAQRRGNGGKTVPEGLKTQLYLGPE

SEQ ID NO: 55113 - protein, 440 aa, Thermococcus sp.
MRRAVTVKLQPSREQEKTLFELAYASAIIWNKLNYQRLKQFKEFGKIDFNGTEKEAYHEFKNWIGGSTVQQLARKNAEAWRSFFSLNKKKKNGELPEWFKPKPPKFIREENGRKIFVIPLRNDQYRINGNVLELRRLGKFGKLEIQFKGRIHLKGKQGRLEIIYDDVKRKWYAHISFSKVGEKLEKDKWVKLPRTPKGNFSAGIDLGVNNLMAVYVENGESFLVNGRPLKSIAFYWQKRIAEYQSKLNKSGAKTGRKLKRMHEKAKLRAKHYINTAVRGAVRRLYELGVSKIVVGYPRGIARNSEKGRKQNFLLSHVWRFNYLIKRLKEVAEEYGISVVVVDEAFTSQTCPLCGQRHSDARFVRGLFKCRGEGVVMNADLVGAFNILRKVVKTITPTLPALAGRGNWPKTGPEGVRRTRFSGFPDENPSNLPVIGEGLTR

SEQ ID NO: 55114 - protein, 436 aa, Thermococcus sp.
MKRSVTVKLQPSKAQEKILFELAYASAVIWNKLNYQRLKQFKEFGKIDFNGTEKEAYYEFKNWIGGSTVQQLARKNAESWRSFFSPNKKKKKGGLPSWLKPRPPRFIKGEDGRKLFIIPLRNDQYRIDGNVIELRRLGKFGRLRIQFKGRIHLKGKQGRLEITYDPVKRKWYAHISIIVEEKLGGEEWVKLPRTPKGSLFAGIDLGVNNLMAVYVENGKSFLVNGRPLKSIDFYWRRKIAEYQSKLNKSGAKTSRKLKRMHEKAKLQAKHYINTAVRQTVRRLYNLGVSKIVVGYPKGIARNSDKGKKQNFLLSHVWRFNTVIQRLKEVAEEYGISVVVVNEAFTSQSCPLCGQRHSGGRISRGLFKCRREGVVMNADLVGAFNILKKVAKTITPSLPGLTVGRGNGGKAVPEGSKTRFILGLNETPQTSPSMARG

SEQ ID NO: 55115 - protein, 435 aa, Thermococcus sp.
MKRTVTVKLQPSKTQEKALFELSDISAKAWNRANHLRRQEYFQGTPIDFLKTQKTVYEEFKREIGSVTVQQICRKNAEAWRSFFSLLRKKRNGELPNWFKPKPPNYLKEDGRRKALIVLRNDQYRIEGNKLVLKGLGKFKRLEIQFKGRIHLKGKRGRLEITYDEVKRKWYAHISVTVKEKLEGGEWIEFPRIPKGNLSAGIDLGVNNLMAVYVESGESFLVNGRPLKSIDFYWRRRIADYQSKLNKNGAKTSRKLKRMHERAKLQAKHYINTAVRQTVRRLYELGVSKIVIGYPKGIARNSDKGKKQNFILSHVWRFNYMIKRLTEVAEEYGIRVLVVNEAFTSKTCPVCGKPHKGARFVRGLFKCPATGLIFNADLVGAFNILRKVVETITPNLGGLYAQGRGNRPKTGPEGLEEPVLMGSLMRTPRTSPHGV

SEQ ID NO: 55116 - protein, 367 aa, Lachnospiraceae sp.
MLKAYKYRIYPNSKQRIQIAKTFGCCRFVYNQTLAYRKEAYEKKKKSVSKTDCNNYCNRELKQTYEWLREVDKFALTNAIYNMDCAYQKFFKEHAGYPKLKSKHDNRKSYTTNFTNGNITVDFGNGKINLPKLKDIKAKLHRSFSGQVKSATVSQLPSGKYYVSILAETEHEELPHTKQNIGLDLGIKDLCITSDGKKYENLKIIKKHERKLAKLQRQLSHKEKGSSNYHKKRKKIALCHEKITNTRKDYLHKVSHEIISENQVIVSENLQIKNMAKNHHLAKSISDVSWYELTRQLEYKAGWNGRKYIKTDTFYASSQLCSACGYQNTGTKDLSVREWICPVCGTKHDRDVNAAKNILVEGLRQIV

SEQ ID NO: 55117 - protein, 339 aa, unknown
  TnpB Polypeptide
MLIAHRIALDPTNKQRSYFAKGAGTARFAYNWALGEWRRLYEARKTDPALPQPTDAVLRRRLNEIKRATFPWMFDVTKCAAQEAIIDLGSAFRSFFEKRGRYPRFKKKGASDSFCASNEVGTFRIEDRRIKLPVIGWVRLHESPRFDGVAKRVTVSRTADRWFASILFEVADTVADMPPISAVGVDLGVTDLAVLSDGTKIAGSKPHKKLLGRLRRANKALSRKKRGSRNALKAKRRLARIHARISNIRKDALNKLTTRLVGRYRRRGLEALNVRGMDKNRRLHAALTGKGQGSYSPLPHATEDFHVAPEGVHPATSAQQTRHAAGRQLRNVENPVTGP

SEQ ID NO: 55118 - protein, 427 aa, unknown
  TnpB Polypeptide
LAARRKSNLSKKDKNRINQELATIRRGYGFSEYQLHAYVSVQQHRYQKHIDSLTAQKIASSVWRSVEKYLFDNGKCIHFRKYNKFESMEGKKNTSGMRFKDGRLHWRGQVIQPQIRTDYDRKALKSRVKYCRIHRKPVSAKYHYYLQLVLEGRPPVKHPAGHGTAGLDIGTSSAAIVTDDTCQLTVLGSDTKDRSSQIRRIQRAMDRSRRATNPDNYLPDGAVRRGARKWIRTKHYEKLQFRKRSLERRHADAINASHHRLVNEIASKADTVYVEKMSFRGLTRKSKSATKKADGRFGKSISNHAPAAFLNILGNRLASGGGELVKVDTVSFRTSQYNHVTDDYVRKKLSCLGSFIGDHYIQRDLYSAFLLMNSNATGTATDRQKYIDTFPMFLITHDACMDTLLAENKKYPSSFGLWSYEFHKCNC

SEQ ID NO: 55119 - protein, 481 aa, unknown
  TnpB Polypeptide
MFGIIISKENQCFQELRKEYSYMSYRVMQCQIAPDNLIYDYCDSNARKAKLLYNAALFRIRQIFTGWDKNSRTDNEKEVFAEVDLLQQTYPSIKVKKVISYCHLEKLMRVTHNPDFFAGLPSQSAQAVVKHAVTDFSNWLKSLKAYKQDPSKFLGKPQMPRYQKSDVITYAITNQDAVLYLTDSGADLKLPRTKGRLHLSNIEKDSVLKEVKIKPYYGRYILCLTFECGAPVANSADMPNICAIDFGVSNFATIVCNDGSSMLYKGGAVLADCQWFHKQRAKAVGIITKGHEHMHASSKYLTSLSRRHADFIKDQCHKISRAVINYCIEHRAGTLILGENKNWKQNSDMDSQNNQNFVSMPIGLLKQMIIYKAAYAGIKIIIQEESYTSKADITAMDYIPTYGIDDDKAVFSGNRLKRGRYKCSNGMIINSDCNGAANIMRKAIPDAWNGITDFSFLVSPEVSGFHELNPLSISVKGIAAA

SEQ ID NO: 55120 - protein, 405 aa, unknown
  TnpB Polypeptide
VDVFKAYKYRLYPSEAQKELLNKHMGACRFLYNLALETKQAAFTGAKVNLSRFDLQKQLPDLKKECPWLKEVNSQSLQYALVCLDAAYKNFFKGSRFPKYKSKHGKASFGVPQNVEMNTEDELLVIPKFKEGIRAKIHREVKGEIKSATLSRSKTGKYFVSILVDTQIPQPQKSPITEATSIGIDLGLKHFITTSSCEAVDNPRHLKAALKRLKFLQKKYSLYKGKRTKKKLTKQHELVANARKDFLHQLSSRLIRENQTICLEDLNVKGIMARCESKVDEQGKYLPNGQAAKNGLNRSIGDAGWSMFVEFLTYKADWYGRNIVHIGRFEPSSKTCSSCGHIKRDMTLKDRTWTCDECGEKHHRDVNAAKNIKAMALQKAVCGMQTKTHGELPTLVGALTHEAQK

SEQ ID NO: 55121 - protein, 395 aa, Microcystis sp.
MFVLEYKLRGKPSQYQAIDEAIRTVQFVRNKCLRYWEDNKGVGQKDVYKYVTQLRSEYPFVQDLNSTACQQACERTWTAILRFSNNCQNQIAGKKGYPKYSKRTHSVEFKKSGWKLNRNSKRITFTDGKNIGELKLIGSRDLFYFQEWQIQRIRIVKRADGYYCQLMLKLDARDITPQLESTGHCLGLDLGLKYLYADSNGNTVEPPKYYRKAEKRLNKLNRRKSKKFKRGQKQSNNYKKASQKYAKGHLKVSRQREEFAKKLALRLIQSNDLIAYEDLKVKNLVRNRKLAKSINDAGWSQLRKWIEYFGIKYGRLTIAVNPAYTSQECLNCGRLVKKSLSVRTHVCLCGYIEDRDKMAALNILKKATIGHIGSWSLDLNAWGDLSSILVGRNTC

SEQ ID NO: 55122 - protein, 407 aa, Desulfurococcaceae sp.
MTLPVRARATARVEAVAPEGGEGLLLEFLRAYRDSVQLIVNEIWRLDKTPSIKKLHAVFYDNLKRLGFRAHHVSEIYKRAKEVVEVTKKNKGSKPVLKKLTARIHQLDYKLDFASKTLRLAVLNDRWVELKLKWYSYLDKYLDGSWRLGEIQVSYRNGKIVVYLTFSKEVQLRELKTIMGVDINFNNITYTIVDLSGNLVSMGVVPFRGLSKALHLKKLAEKLQKKYPRSWRFLKLVRRVRARWLCRARNILTDSSHYIAKRLVEIAKEYSAVIVLEDLEKLREKANGDRFSWELQLWCYRRLQSFVECKALVEGIRVVYVDPRGTSKIPPNGKPLVFINYRFVKLEDTVTTRDVIASWNLALRGLRQMRGSRVRWSPDSPRCEAMTPRAKRGNPGAYSQVFTNNYK

SEQ ID NO: 55123 - protein, 485 aa, unknown
  TnpB Polypeptide
MKKFEPRPGFTVLAHNLALDPNATANRHLHSHGGGARAAYNWALAYITAVWWQRKAEQSYGIPEEQLTEWRSWSLPSLRKAFNEDKRTNPRFADWWEENSKEAYNTGLAGASAAFDNYTKSKSGKRKGRKMGIPRFKSKRKARLACRFTTGTIRIEPDGRHVTLPRIGTVRLHEDASHLRALVDAGHMRILSATARLDRGRWFVSLQVEEKHRLVKVARPDATVGIDLGIKTLAVLADSDGVLSEEPNPRHLDRGQKQLRRASRIVSRRQGPDRRTGHQASKRWEKADQARNKIHHRAANLREDTLHKMTTRLASEYGTIVVEDLNVAGMGRNRRLSRRVADAAFGEIRRQLTYKTRRRGTRLVVADRWFPSAKTCSRCGVVKTKLPLSMRVFECDNCGLVLDRDANAGHNLVALAARTTGTGVAGDLDPAKSESKPRGADHKTRTTRPRRKAGTGREGGTITSPRAGKETGDRQQATRTHLALR

SEQ ID NO: 55124 - protein, 489 aa, Persephonella sp.
MPIRAYKHKHNINNGKIQIIKEILKEYRKTAKGIAKKQWHIFFKEGSFDKNYKVKEIKSKLSERYKQTCQYQVVSILNSYISNRQNDFVEIVYNSNLNEDIKFILLTINKTKSWFNEKLKEAKLKDKKGKEIKKLPIEKHHYKLARKIIKQTFKRNRFPSFKHISMQLDQKVVKIEKRKEEKAKEFDWWVKLSTLEKGKPIYLPVYKNSYFEEKEGKQLNFVQINEKEDNIEIVFFKEIPKETNYIPKTNKISIDIGLKSLFAVNTGHLYGKQFYKFLKHYDRIITDLQANLQKQGIKPKQSKRYKELNRKLREYIKNEINRILNRIFKIYQPKEIVVENLNFQNGELSPQLNRLLSRFGMKIIKQKLKEFEERFGIKITYVNPAYTSQVCSNCKYVDKRNRKTQEQFECLMCGKKINADVNSSRNIGTRSSSSMLRYKRRTVLRMLIRAYLSDAKHYAYNSRAREVILSNKYFIGYYEPLKITSKEKS

SEQ ID NO: 55125 - protein, 355 aa, Archaeon sp.
MILTYNLKHDSDLGAELKKARQVANFAIRTKSNTSKDVRHIGLKSAMANQILRKYRRKGIKKATHVKLTIPGQSISYHHATKTAKIPCLGLTISCTHLPDFEKIKQIEIGKEFAHVSVEIAEPATTPATRFIGVDCNTTGHCAVVAIPHTGKIHKLGKMAIHTHKKYRDIRAKLQKQGRYQLLRQIKHLEKNIMRNLNHKISKKLVEIAVSEKCGIRFEKLTNIRQNKKHHKNFRYSLNSWSYYQLQKFTEYKARSRGIEVAYIAPAYTSQSCSRCGSLGDRQNKKFQCVRCGHADHADVNAAFNIGNPVSHCAFVPLAHIMDRLHEQSDSCKGSTDTPQNSNAGMPVTVEPRTL

SEQ ID NO: 55126 - protein, 399 aa, Streptomyces sp.
VIRAYKFLLRPTVGQQGALSAMLRDHCTLYNAALQERRDAYRHASKTTVRYGMQSDQLKEIRALDVDGQGRWSFSSQQATLRRLEKAFSDFFRRIKEGRKPGYPRFRSAKRFDTVDFPKDGDGCRWDSTPHEPVTRVRLRGIGHVRVHQHRAVVGRVKTISVKREGKRWYVILSVDVGRPDPLPATGSAVGIDMGINNFLADSSGAMVPNPRFGTKVREELDGAQRALSRCERDSQRRRKAAETLARLHRKVRRQRLDHAHKTALNLVRAHDFIAHEDLRILNMTKRPAPKPVPGAAGEFLPNGAAAKSGLNRAISEVGWGVFLAILAAKAEGAGRQVMAVDLRNTSRRCPACGHTAEENRPTQSRFSCVSCGHTAHADTVGAQNVLRAGLARREAATA

SEQ ID NO: 55127 - protein, 254 aa, unknown
  TnpB Polypeptide
LAYTICNRYFIALTVYVDNDKKKPSYKNKYIGLDFGIQTTITTSNGDKYDVQVEETDRLKRLQTILNRKVKWSNNWKKTRSLIRKEYTHISNIKDDTARKIVHKLINENEMVIFQDDPINTWNKEEHKGQIQHSILGRVKDLLLHKDNVVVDNVVVLDKYYPTSKYCFDCGTKNDNLTLKDRIFVCPNCGHIEDRDVHAAKNMVQIYLNYINIKTDTVGTTDTDKKPLEIKYDNSLLWSKFESTKENTGSLALC

SEQ ID NO: 55128 - protein, 227 aa, unknown
  TnpB Polypeptide
LSNYKLKSVTISQTPSGKYYASVLFEYENQIQEQELHDFLGLDFSMHGLYKDSNGNEPAYPRYYRQAEERLKREQRKLSLMQKGSKNRSKQRIKVANLHEKVANQRKDFLHKQSRQIANAYDCVCIENLDMKAMSQSLNFGKSVADDGWGMFVTFLKYKLEETGKRLVKVNKFFASSQICNVCGYKNTATKNLSIRAWDCPECGAHHDRDINAAINIRNEGMRLVLA

SEQ ID NO: 55129 - protein, 703 aa, unknown
  TnpB Polypeptide
LGGAGLHRRQQPAIRGELRPDAVTGDGTVLRGGRPEGDGVPEAEAFPAGRRHQPSVGGKPRGDVREGQRQDRGAARVGVPQPHEPVAGGRLRHVDGEPVPVQPGELGRLARLPVQGLRVAGPAPRAAAPQVNGAVGGAGRLQADGDQLEVPGERHAGDRVIAARFPALRQVQHLRQAAGVHVPDVDLVVEANQGHDAAVRGEDDTALRAPAREPGQDALVPPPLQVPQQQLAAAGDDHVARRYAVSSCVPRKCPMQAISCSPRSRWLGRWLVATVKTAYRFALAPSPAQEHALRSHAGAARLAWNWGLARCKERYAAERKWYSAADLHKLWNTAKKNDPDLAWWAENSKCAYQEAFRNLERALADFVKSKNGQRKGKKLGFPRRKKKGKARDSFRFGAGVMRCAGDTVTLPRLGTLRTCEDTGALASRVAGGTARVLSATVSRTAQRWFVSFTVEEDRHVPESHARPGTAIGVDLGVKTLLTGIDDQGKLITVQGPKPLRASLRRLRRASRACSRKQRGSNRRRKAAARLGRVHARVASVRADALHKATSGLAARYETVVVEDLNVTGMISNKKLARAVSDQGFGSVRRMLAYKTTRHGGTLLVADRWYPSSKTCSNCGSVKAKLTLKDRTFACDACGHVEDRDVNAARNLLSLAASGAERLNARGAAVRPGPAGRAAVKREPGTRQRRGKTGTAAPQGTAAA

SEQ ID NO: 55130 - protein, 379 aa, unknown
  TnpB Polypeptide
MQSRATVKIKINATPEIVATIKAYTKALQFCINYAWEHNIRNKITLQYAVYKHLKTTKLQAQLIIGCCRQSIEMVKKAKTKPVVKHTSMRYNFPRSASFKNNSLSLSTIKGRIKVPFIIPDCYKEYFSWNVAESLLRIDTKGRCFFLFTFSKEVIVNSSTLQKRVLGIDLGVNNLAVTSDCQFYNSSKVKQIKRKFKYLRSVLQAKDTRSSKQFLKKLSGREQRYMADTNHCISKNIVSSFDGNKIVMENLKGIRKQRRGKRMNYWINNWSFFQLQSFIQYKAERKGIEFVRVKPNYTSKICHRCGQPGTRLSSCFSCPHCGLSLFNADLNASRNLSHPMLVERQALVNVPIVICDDSKTDFGIADEHNYKPTTLVVGY

SEQ ID NO: 55131 - protein, 411 aa, Cyanobacteria sp.
VFVLEFKVKPKQIQIQAIDEAIRTSQFVRNKVLSFWMDNRGVGKTELFRYNTRLRKEFKFVDDLNSHACQTAVERVLRAINKFFDNCKKQIPGKKGYPKFNKNTRSVEYKVSGWQLSENRNSINFTDKKNIGKLKLIGTRDLLFIQIPQIKRVRIIRRADGHYVQFSVQLDPRDTAKPLIPAQKAVGIDVGLKYFYADSQGNIEPVPQFYRKGEKQLNRANREKSKKYDPQKRKALSPQSKNYHKARISSARKHLRVSRQREEFAKRVALRLIQSNDLIAYEDLNVKGLVRNRHLAKSISDAAWSTFRHWLEYFGYKYGKVTVAVLPHNTSQNCSNCGEKVPKTLSTRTHICPSCGYVEDRDINAAINILRLGLSTVGQTGSQAWGEGTSTLVGAILLGQVSSMNQESPCL

SEQ ID NO: 55132 - protein, 338 aa, Hydrocoleum sp.
MILFLSFGMLRKRNASLSTIDNCGKPIELNGWSHKLPFIGWVKTYEPIEATTQKITISRQAGDWYLSLAFEFTPTSKTKTTEVVGVDLGVKTLATLSNGKVFESLKSYRKLEPKLSRLQYINRNKIIGSANWRAAQLKIARLHRKVANIRKDALHKLTTYLAKNHGTIVIEDLNVSGMLSNHKLAKSIAYQGFYGFRRQLEYKCQWYGSELVVVDRFFPSSKTCCRCGHVQDMPLNLRRYDCPDCGLSIDRDLNASINLRSGGRLDRECLWTECCRQFRWKAVRPRVGVRRKRCDPATTKVARERAPREGMLTKRQEVNSRISCYMTFYIDFMKQLSL

SEQ ID NO: 55133 - protein, 248 aa, unknown
  TnpB Polypeptide
VDLGILKMAVLSDGHVFEAPMPLKHALARLKILQEIMSRAKRGSRNRQKLRVRIARLHRRIANIRSHAIHKLTAFLASNYSEVVIEDLNVKGMMANHHLARAIGDVGFYEFRRQLEYKMALRGGLLVVAPRFYPSSKRCRFCGGKNEDLTLSDRSWVCPHCGETIEDRDLNAALNLFHYSKDWDSEASASADAEGSSGSTSDKALPDTAPHDGVPASVADQALRGGDEEGALASPPAMPEEALTPSPD

SEQ ID NO: 55134 - protein, 205 aa, unknown
  TnpB Polypeptide
LFCCENQTVEKRPAERFLGIDFAMQGMCVFSTGERAGYPMFYRKAEKKLAREQRKLSHCEKESRNYQKQKKRVALCHEKIKNQRKDFQHKLSRELAERYDAVCVEDLNLKGMSGGLHLGKGVQDNGYGQFLFMLGYKLEECGKHLIKVDRYFASSKICSVCGHKKKELALSDRMYVCECGNRMDRDVNAAVNIREEGKRIYKECA

SEQ ID NO: 55135 - protein, 311 aa, unknown
  TnpB Polypeptide
MPAWSIAHTSYQKFGKAVDYLTQQAAIVPFKDCWTDYKSLNHGSLQATVKRVDFAFQRFFKGIGGYPKFQSIRKYSGWTYPDARQGFKVHSNGDNGHLELRDLGFQIQMRGKARTWGTPTTCTIVYRNNQWFASITVNCAPVRQTDTGAVGIDFGTLTAVAMSNGSKIENPRFLATAQAKVKQVSKQKRRKQAPNFKKKIKASKRWKKASRKVAKLQQKSANQRRDWAHKVAAQIVSSNSMVATEKLNIKGMTRKAKKGSKRKHQKTGLNRSILDTGWGMLRGMIEYKLVECDGVFVEVPTSLVKPSQTCH

SEQ ID NO: 55136 - protein, 408 aa, Lactobacillus sp.
  misc_feature (5)..(5): Xaa can be any naturally occurring amino acid
MKMLXDLDDAFQRFFNPDLQNGFPRFKSKKNTNQSYTSKFVNNNIRIVDEHHIKLPKLGLVYFKAGRILNGKIRAVTVRVNSRKQYQASILVESENQTFKKTKKSVGIDLGLKSLAITSDGQKEDILKVDDRLNKQLRIWERKKSRRYENAKKAMAFDEHDKVLFPRTDLKQFPRYQQALRTSENQTFKKTKKSVGIDLGLKSLTITSDGQKEDILKVDDRLNKQLRIWERKKSRRYENAKKAMAFDEHDKVLFPRTDLKQFPRYQQAVRTVAKLKKHIAERRRDNLHKLTTRLVKDYDTIVVENLSVKNMMKNHHLSASIANASWGTLISQLKYKCAWYGKRLIIIDPKNTSRICHECKQKNHEFDSLSQSEWLAAREWDCPNCHAHLDRDVNAAKNILAKGLETLS

SEQ ID NO: 55137 - protein, 399 aa, Bifidobacterium sp.
MSQKVRINGVKHTGASVFLGVDRCGNPCWTRNPERVMVWLCDGWRARFNQRREQRTRNVPVKDDATGEVVDWVKEPLGGPDVPELISDREARLQCSWMAGIPAPILSSTDRIENTEWFAGLKRRKTIGGRIPGFKSRHRGLGFVCWRNASRSGNAIFHKTGRKSDVVVITGMNPKRWVKPGEKAHWRIIVHVRVGQEIRPYTSVHVDWTHRSLVFVNMPLPLPRTGDGAIGLDRGCVHTLASSDGTFEDMPKPSKAELKRLKYLQRRMARQDHVNEARSGRTAKFVSKRRRKTLSRFNALQGRIVRRRNDWIEKTTTRLAQKNILIAMEDLDVKAMTRRPKPKPDPAKPGQYLHNGAKAKAESPKDGLASTGVAVAVVAVAVVVLAAGAIALAILGKRK

SEQ ID NO: 55138 - protein, 384 aa, unknown
  TnpB Polypeptide
MGGVLPVTRRKKRWRLSNMLINSAYRYELDPNSHQSILLAKHAGAARFAYNWGLSRRIALWEQEKKRINAIEQHKELNALKGVDFPWMYEVSKCAPQEALRDLERAFQNFFRGLKTGRKIGFPKFKKKGRHDSFRLTGAIHVFERHIQLPRLGKIRAKETTALQGRILSATVSRKADRWFVSLAVEMEICDPVPVKGPAAGIDVGLNHFAAIVSGSESVKIEAPKPLNRYLKLLRRRQRRHSRKQKGSRNRKKSALQLARLHRRVRNIRQDFLHKLTTELAKTKSVIVVEDLNVSGMVRNTRLARYIADVGWGEFRRQLEYKTKWYGSRMVVASRFYPSSKTCSACGTVQEEMPLSIREWTCPVCGTHHDRDINAAKNLLALAG

SEQ ID NO: 55139 - protein, 373 aa, Salmonella sp.
MKRAYKYRFYPTPAQVELLAQTFGCVRFVYNNILRWRTDAYYERHEKIGYTQASARLTALKKEPEFAWLNDVSSVPLQQALRHQQAAFSNFFAGRARYPTFKSKRHKQAATFSDAAFKYLDGKLFMAKSKTPLDVRWSRPLPSSPSTITISKDASGRYFVSCLCEFEPVSLPITAKTIGIDVGLKDLFVTDTGFKTGNPRHTAKYAKRLTLLQRRLSKKQKGSCNRAKAKQKVAKLHAKIADCRMDNLHKLSRKLINENQVVCVESLKVKNMIRNPKLSKAIADAGWSEFVHQLQYKGEWAGRSVVAIDQYFPSSKRCSCCGYTLPELALNVRTWRCPECGTDHDRDVNAARNIKAAGLAVLAHGATVNPDAA

SEQ ID NO: 55140 - protein, 406 aa, Nostoc sp.
VRTSYQYRLKQTLKQVEIIDNTLDMLRCQYNYQLAQRFEWYEQNRCSIDRCSLVVCHIPELKDKPNRFSQQATLTQLKKDRPWYKSIHSQVLQEVPKKVEIAFDRWLHGDANGKRSGKPRFKGKGQYKTFTYPQFKKEHFQKEKITLSKIGDIKVIVHRQIPDGFDIKTVSVTKKSDGYYVTLSLDDKTVPTVKPDFDINNIVGIDVGLIDFYVASDDTRIAAPKYLRKAERKLKSAQRRVSRRKKGSNRRKKAIKKLGIQHKKVVDTRKDFHFKTANTLLKKYDVVAVEKLNIKGLAKTWLAKSVNDAAWGQFISILNVKAENAGLKVIAINPNGTSQECSGCGIKVRKTLSQRIHNCPACKISICRDLNASINIKARGTHALKAQSMSGLGVVEKPTLTCTQEV

SEQ ID NO: 55141 - protein, 289 aa, Geomicrobium sp.
MLTYKGIQFRLYPDAKQQKQIAETFGCCRYVYNHFRASWEHTYTETGKGLSYKACANELPLLKVDFPFLKDVDSTALQKSVRSLSDAYQRFYAKLGKYPRFKSKRNPVQSYTTAIQGNTQVFTTTVTNNRIKLPKLGWVKIRGSRTIQGRIVSATITRKASGRYIVSLKVEAGVQPLPSTGLSVGVDLGITDFAILSSGEKKDNHRFTKAMRQKLAREQRKLSRRAEGAKRLGVPLHQAKNYEKQKRVVARLHEKVANQRKDFLHKRSTDLIKNHDGIVVEDLHAKGML

SEQ ID NO: 55142 - protein, 638 aa, Streptomyces sp.
  misc_feature (536)..(536): Xaa can be any naturally occurring amino acid
VGERGPHAGPCTPDAVRDVAGRRGRHRGVREGCGVLPCLFGRPEAGPRPAGRPRGPGSHRTWSAGRGCRHRSRLGTERTPPRTAPSPVRSGRCRDRGRAPRPPRPVRRRAPGGRAVGVRPAPGRSRPRGDRRRPGAGHHRSTDLDVCAPVRASGGEDPGRPRGSRGDRRGRRVKKFRPQPGSVVQAYRFALDPDATQEAALRSHCGAARAAYNWAVGWVTASWWQRKAEETYGIPEESLTPWRPWSLPSLRKAFNEAKHTDPRFSGWWEENSKEAYSTGLANASSAFDNYAKSKNGNRRGKRVNAPRFKSKRKARDACRFTTGTIRVDAGGRHVTLPRLGTIRTHEPTAKLLTRVQAGTARILSATVRHERGRWFASFQAEVKRDLVRVARPDVAVGIDLGVKTLAVLGDSAGEIRTVANPKHDERALGQLRRASRTVSRRRGPDRRTGAKPSKRWEKANAARNKVHHRVANLREDALHKLTTSVAAEYGTIVVEDLNVAGMLKNRGLARRIADAGFGEIRRQLTYKTRQRHATRXWSSTGTTTRPATSPHSRQPARLVPEWPETRTPPRWCRSLVEPTARPAPPAPAARRARSGQVAQPCRTSGGRRKRETVLKPKPSRFGDETDLPGRKARNAESR

SEQ ID NO: 55143 - protein, 319 aa, unknown
  TnpB Polypeptide
MNIAYRFRIYPNREQEVLLAKTFGCCRFLYNQMLNDKIREYEASKKMLRNTPAMYKKAYPFLKEVDSLALANVQLHLEKAYKNFFRDPKIGFPKFKSKHRSRKSYTTNVVNGNIQVEDHRIKLPKLKWIRMKKHRDIPAEYCLKSVTISMEPSGKYYASLLYEKSDCENQAEEFDYENAKILGIDYAMHGMAVFSEDIQKENEGYFRKSEKRLAREQRKLSHCVKGSNNYYRQKKRVALCHEKIRNQRKDFLHKLSHEIAEAYDVVAVEDIDMKAMSQCMHFGKSVMDNGYGKFRELLEYKLTWRGKKLVRVDRFFPFQ

SEQ ID NO: 55144 - protein, 555 aa, unknown
  TnpB Polypeptide
MPKSKHTETEYKQNRRLYRKMSARHVLVLEADMPEDMKRRTFGLSDELRICGNNLTAKLSRSLDQLFRTKKYRALQKAYGNLSERLEQHPHDKESAAELKAIAAQMSEMQKQYHVTWDDAYTYMIYLKDRAGFGSVFALTRAEDIWSGVGKVLFSGADNIHFKKRGCLPEIRAKQPNRGIVLSVKEGKLYFKCSDIGIFTYKQPDKFQSDEITAVLKYLESPGLNDEVAVNKMLETGEIADTFRPCYASLVCKKIRGRLRVYIHLTIEGKALPKFKSDGITPRHTFGKGRVGADIGTQTVAYTSYSEVGLKNLSERGMTISHAERQERLLLRKMDRSRRATNPDSYNSDGTVKKGFKVWKKSSRYKKIQRRHAELCRKNAESRKYAINGDANHLRSLGDEIVTEPANFKALQKKAKPTQNESSISKKNKRRKRFGKSLKNRSPGTFQAALKSRFESTGGSYHEVDKMYRASQYDHTADDYIKKKLSQRMFVLTGGSKVQRDWYSSFLLYNSNNHYSEPDKDECTATFDRLYKMQLDMIDDIKKAGIRVLNSGIAA

SEQ ID NO: 55145 - protein, 424 aa, Neobacillus sp.
MAEKRIKLKEKKKKEIQGDIVVKKFPLRLTTEERKLVNSLRMEAARLWNDILDLHWWLYDVYKVWSTASQKKKWVNAHTHHLHAQTIQAIIELHEETCERTRELRAKGEKKWRYPWKYKRFFSVKYKKSAIKLDGNILVFSNGRSQSKLALPKPKHICFETIKSAEIVWHKNEYWMHLAVEEQKQERIKGKDKAGCDLGLIHAATLSNGKNHLIITGKELRSLTRYRNKRLREFSKRIDRKKKGFNARYKLILRKRRFLEKMERKIDYQEHCISRMVEDWCVENHIHTLYIGTPDGVQKNTKKKKKSRKEIRQQLSNWSFGRLTDKIKYKLKLRGIKVEVVEESYTSGTCPSCGEFRKQEYRNFQCTCGAKGHRDVVGAVNILDKSINSEITKDRLLPEWKDTKYRRVNLVPIARSKKYKLAVA

SEQ ID NO: 55146 - protein, 388 aa, unknown
  TnpB Polypeptide
LSQGEALKSYAVPIEAPRDLIDAYLEVKRKALEMVMGYVSYSSKGKARLRLKAEERREIRNQLLKGWPYVSHYVDSAINSAIGLVKGWIKLHNRGKAKKKPEITRRIVYIKSTLFRVKGDRLIIRIVARERYLEVDLSRFGYLPKDYDSIGGLLMTDNRLYITFKRSSKPKEPNGWSAFDVNEVNVTEARDGHGLIRYDLRELYHIHTVYELKRRRIQSLRKTHPKRSRRLMAKYSKRERNRANDLLHKLTTTIVRELTSLNYGIILENLKGIKERTTKRASRKVRRRLSKWDARTFQFMLAYKARWLGLPVRFVNPTYSSRTCPVCSAPLKAYRGRLMRCEGCGLVIDRDEAAALNLQMWGVRGSPERGGATVMMPKRLLDKSPHFL

SEQ ID NO: 55147 - protein, 397 aa, unknown
  TnpB Polypeptide
MQLVEQHCISKGDSRYAVIDRVAFASKNLYNAALYEVRQAFIHTGVYLRYEEMYHRMKPHEAYKALPAKVAQHVLKGLDKNWKSYFEAVKAWQVDPSKFLGHPKLPKYKDKQKGRNILVFTIQAVSRKGLSKGIVQPSGVPIEIQTTHTSVNQVRIVPRGGYYVVEVVYTQEVKQADVDPNLYAGIDIGLNNLATLTANKSGFVPRLVNGRPVKSINQFYNKVRADLQARLPKEQYTSSRLERFTNKRTRKIDHYLHTASKRIIDLLVTEGIGTLVIGKNVNWKQEVNIGKRNNQNFVQVPHARFIDMLTYKATLVGIRVIVTEESYTSKCSFLDNEPIQKHEVYAGKRVKRGLFRSMRGRFINADVNGAYNIIKKVAPKSFEGVEDCVVNPVRLHV

SEQ ID NO: 55148 - protein, 281 aa, Thaumarchaeota sp.
MLTYKFRIYPTSAQARIMEETLETCRRLYNSMLADRIENGTGFYDQKKMLVELKHDDKHLKSIHSQVLQDVVLRLDKAYQRFFAGLSRYPKFRRRGRYNSFTYPQSGFELKGNRIRLSTIGRVRVTLHRKVTGAMKRVTVIRDIDQWFVALLVKEDHSVAQSGGDGKVGVDTGISNVVALSDGTMIDNPTFLSSSLGRIKSLQRRLSHKKRGSSNRERARLCLAKAWRKARRQRDDFVHKLSDQLTKENEVIVFEDLKIQNMVKNHSLASAIMDAAWAKLR

SEQ ID NO: 55149 - protein, 390 aa, Clostridium sp.
LLKSYRTEIKPTQRQITKINQSIGTCRFLYNSYIAKNKELYELYKEGKSDKAFMSANDFDKYMNHEVKTQDEWKWIGNCGAKARKKSICNAEAAFKRFFHGKSGFPKFKKKNKQKVKLYFPKNNKTDWKIERHRINIPTFKWVKLKEFGYIPGNSKVICGYVSKQADKYYVSITLEVKDAKCIKEKSEPIGIDLGLKNFAVCSNGLTKKNINKTCKVKKLEKKQKREQRKLSRKYESLKKNKNKKGEATRQNISKQVVKVQRLHQRLNNIRTDYLNKAISEIIEQNPSSITIEDLNVKGMMKNKHLSKAVAQQKFYEFRVKLENKCKQNNIELRIVDRWYPSSKRCHGCGCIKKDLKLSDREYICECGYHADRDYNASLNLRDALTYETA

SEQ ID NO: 55150 - protein, 410 aa, Oscillatoriales sp.
MKVRFRYRIYPNRPQRLMLAKTFGCARVVYNDAIRLRQERYKQGEKINDTELQKRVITQAKLTVEREWLSEVASVPLVQSLQDAHLAFRNFFRSLKGARKGHKVGFPKFKKKHSAQSIRFTTNGFSVKPNSVYLAKIVCVRVKWSRELPSDPSSVTIIKDAANRYFGSFVCEVDPIALKAIDDGVGIDLGLTTFATLSTGEKVLSPKPLARSLKRLRLAQKRFSRKVKGSNRRELARRKVARIHARIKDQRTDFLHKLSTRIVRENQAIILEDLNVSGMIKNRKLARAISDAGWYSFRQMLEGKSIRYGRDFQVISRWEPTSQRCSACGQLGGKKPLNVREWTCLHCGTIHDSPSETLRERDINAAINIQVAGGHSETENGRGGKRQTGSPAAADEASTLGLVEQLRLFG

SEQ ID NO: 55151 - protein, 432 aa, Cylindrospermum sp.
MYGCQQNLISPDSELKAVLEFICSESHKLTNCGIYYARQLYLKTKKLIGKYDLEKEYKTNQHYQVLHSQAAQQILRSVAESFKSFKELEKKYNKGDLHFKPKLPKYRQGAGYALVAYPKQALKLIGNSIKIPLGNTVKRWFKLDSFIIPMPSNLQFADIKELRILPRNQCFYAEFVYEKISTPIYYVDPSNALAIDPGINNWLSCVSNFGTSFIVDGRKVKSLNQWYNKRVSTLKKGKPQGYWDDQLAQITEKRNRQMRDAVNKAAKLVVDHCLKHHIGTVVFGWNQYQRQEATLGKTTQSFVQIPTAKLKQRVKQLCQEYRIQFVETEESYTSIASFLDDDFLPTFGEKPEGWKPSGKRVKRGTYRTGAGILINADLNGAANILRKVETQLDLCLVKVCRQVLTLATRFRIWETKTQKRNGAALALRVATV

SEQ ID NO: 55152 - protein, 242 aa, Arthrobacter sp.
MLLRLLCREPRPCPWCASEHQHAHRWPGPGFDRLRGHHLQRRHPRENPGPQYFRKAQRKLARAQRELSRRTKGSKNRAKSRTKVAKIHAKIRDDRQDFTRKIAVRLARENQTVAIETLSIKGLARTRLAKSIHDAGWGAFINDLTHAGNKYGATIIGISRWEPTSQTCSVCGIKNGRKALGIRTWECPECHTSLDRDYNAAVNIMLAAGLAESLNDCGGNVRLRLVGAIPDEAVTTHTVAAA

SEQ ID NO: 55153 - protein, 370 aa, unknown
  TnpB Polypeptide
MILARKIRLKPNPEQEKQLWKSAHTARWAYNWTLAKQEENYKNGGKFIPDGELRKQLTKLKSQEEYAWLYEVSNNVTKQAIKDACEAYKRFFNKLADKPKFKSRKKSKPSFYNDNVKLKVKNHLVLIEKVGWVKTSEQLPMNTKYTNPRISFDGKYWYLSVGIEEEPKKLQLTDEVIGIDVGIKSLAVCSNGMRFKNINKTAKVKKIEKRLRRLQRKVSRKYEMNKEGNRFAKTCNIIKVEKKIRLLHRKLTNIRLNHIHQATNAIVKTKPSIVVMENLNIQGMMKNRHLSKAVAQQRFYEFKRQIQYKCEKYGIRFVEVDRWFPSSKICSECGEIKEDLKLSDRIFKCGCGLEIDRDLNAAINLAKLAS

SEQ ID NO: 55154 - protein, 387 aa, Psychrobacter sp.
MIRGHIIELNPNNKQATYFAKACGIARLAYNWALAQWQRQYAQDKAYRDACHIMGIDVDESKLLKPTQGKLRKQLNAIKRDKYPFMLEVTKCAPQLAIMQLGDAYKRFFKGEAKYPQFRKKGVNDRFSLSNDQFTVKGRQIRIPNLGWVRMREALRFDGKILSAKIFSRGGRWFVSVAVEIDAVNLTKKRGRHTGKQTGVDLGITDLITLSDSTKVKAPKPLKTKLNKLKRLSRQLSRKQKGSNNRAKAKAKLSRLHLQISNIRKDALHKLTTGLVSEYDFIAIEDLNTKGMMQNRKLSRAIGDLGFYEFKRQLVYKADQYGKTVKELDRWFPSSKTCSNCGHLLTKDELPLSVRRWQCPCCQQANDRDVNASINILQHADKVLTHH

SEQ ID NO: 55155 - protein, 353 aa, unknown
  TnpB Polypeptide
MIRSSVIHIDNANTGKRQKLLAIMQESRRVINVFIDELWKQRKFNDKFSTLKTDTWLSSRMQQCLGKQALSIVKSQRKRKKKTKPVYDGNVLELDQRFVQFRFDENSFDVWIHLSSIGNGIILNLPGKKHRHFNLFFEDSAWTMKNSCRLSYVSGKWSITVFFEKDFEQQPGSKVVGLDCGYKKLAVVSDGQVIGKELEDKIAKISRKKQGSKSFYRALKERDDYVALEIKHIDLSNVKTVVVEDLKNVKKKTRGRISKKFMNKLQRWAYSQFLQRLRNWLEVVGVQCLSVDPAYTSQTCSKCGCVDRKSRNRERFCCTACGFESDADLNASQNILMRFLEQENMVPALEPTS

SEQ ID NO: 55156 - protein, 463 aa, Clostridium sp.
MGTIIKNVKQYSYKLDTEMLDELKFIANQYKNVKNYVYSRYSGINSIPLLNKERQIRNEWVKSEFTKQWKLPARYWKLALTEAIGNINSQWSNIKNKIKKQVKVNENLSYEDKHYINCIVKFNSYYHKVLTNQKFDIPKIFENKNLNFKYLNNLIRRYTRKYKGHIPYSKVGKTFSIDTGLYSYKNDCINITSTKKGKRISIELTDNNKYDRTMIVKIIDNRIVINCPLKIKTRKNKSTNIIVIDKGYRYLFAVSSENFYGENLNNYLSKETERLNKVNTQRNRFWALYNQYIEQDNIEKANKIKENNLGKVKYNHNKLKHDQTVKSYINYSLNQLIKEEKPKEIVLENLDFVNWNDKYPKDVKRKLSRWIKGYIRERLEYKCDFYSIKYTYINPAYTSKACSVCGGFGKRDGDVFTCPKCGEFHADINASKNILNRKYDNDITLYTNYKKVKEILENRLKVS

SEQ ID NO: 55157 - protein, 330 aa, Escherichia sp.
VAKKSRRYGWLKEYDSIALQQAVINLDVAFSNFFNPKLKAGKPTFKSKHGRQSSYHCVGIKVLDGAIKIPKILPIEARLHREITGMLKSITLSRSATGKYYASLLCDDGMEAPAKPALISNVTGLDMGLAHFVIKSDGNKIASPRHLINASRNLRRKQKALSRKKKGNANRRKARIQLAAVHERVASARADFQHKLSRAIVDENQAVIVETLKTANMMKNHHLARAIGDAGWSGFITKLEYKATEKGVHLVKLDQWFASSKTCHCCGHKMSEMPLHKRIWQCPECGVEHDRDINAALNIKRKGILELQAAGLVVSAHGGQHKSVTQTVAA

SEQ ID NO: 55158 - protein, 547 aa, Streptomyces sp.
MTEPKKLRTIAPPFVAPGPSGVSVRDRLKNLTPEDEEVLRLVGSHLGSLASRDLKARCADGLEHSTESWAARKRDLTAASSSRWAGSLTKATHDQWALARRGQAAHLHNLEASIRTIAHRLSQPIGEKGTQRAPGGYRSKNEWFQKTRRLHLLKDRLDTVRADRENGIVHVVRGSRRLLNTRHNLHAAQLTEPQWRERWETARWFLSADGESGKRYGNETIRITPDGEVSIKLPAPLAGYANAKHGRYVLAAKVSFPHRGPEWADRVEANRAVAYRIHYNVGRGRWYVDASWTFPATRTVPLDAALASGVIGVDTNADHLAAWRLDTHGNPVGQPRRFSYDLSGSADHRDAQVRHALSRLLNWAKTCGVAAIAVEDLDFADSKTREKHGRKKRFRQLISGIPTGRLRTRLISMADATGISIIAVDPAYTSKWGAQHWQKPMAAPRRRTTRHDAAGIAIGRRAQGFPIRRRTAPPRDDQSDRRGHRTVQARPDTLGREETRRPVTERAHDARARAGTTPRTRATSASKTVRDARSDQGWVQDPLLLTD

SEQ ID NO: 55159 - protein, 392 aa, unknown
  TnpB Polypeptide
MIRTFRYRLYPHARHSKKMHYFLELARLAYNAALEQRIETYRETGSGITLSMQCVHFRDLRKVDPSGLGLLNASCLQLVMRRLDKAYRAFFRRVKSGGAPGFPRFKSQNRWKSIEFTYGDGCKLRFGKNDQALLYLQNIGEVKIKYHREIPNGKIKHVVLRRWLGKWYVHFHVDLPEPEIIERPALPIGIDIGLHSLLALSNGKFVENPKWLRVSLKELRVAQRRMSRRKRGSAGRHEARYQVAKLYDHISNQRRDFWHKTTRDLVNTYSLIAIEDLNLKFMTANHHLALSAHDAGFGIFRQLLTSKAEEAGSLIVAVNPYNTTQMCSGCGEIVKKDLSVRTHSCPYCDLVLDRDTNAAINILNLAIKSARTEPPGDNVDHGIKRSLGSSLL

SEQ ID NO: 55160 - protein, 312 aa, Planktothrix sp.
LGRGRFAESFFVCWFKCANFSRTFSLINGREHIKIDAGNYQRGKLKGRKPTSAQLCKHRDGNYYIHIQIKDSAPTPIKSNNVIGVDFGRRDIAVTSNGDKWDGKQINDVRDKFSRVRASLQKKATKGTRSTRRRARQILKRLSGKERRFQQWLNHNISKSIIQSALKNHAVVAIEDLTGIRERTLQLPRSKTERRRSNSWSFYQLRSFLEYKGIQFGVEVIAVPPAWTSQTCHQCLHIGLRSDKRFKCINEACSWSGDADFNGSKNIAAIGVNLVNSPRGSNCLCCVLSVDSSGLLKAHTVPDRGSVWVVYF

SEQ ID NO: 55161 - protein, 405 aa, unknown
  TnpB Polypeptide
MIIGHVVKLDPTPRQQRELLSHIGAARFSYNTMLAYVNDNYDKGIRVNVSGYSLRKVWNENKDYWAPWWADNSKEAYANAILNLGKAWRNFFNGLKSGRNVGRPRFKRKGVGDSYTVTTGSFGVCDQVGIKLPRIGRIHTLEPVGQFLDANIKSVTIRKKADGFYASLAVDVSETPQPVKTGKGVGVDLGVSALATLSTGEVIANPKALTRQERKLRRAAHSVSRKKKGSANREKAKATLSRVYQKVTNLRTDTRHKATTDIVSRFDLVAIEDLNVSGMVSNRKLAKSVSDAGFYEFRRCIEYKAKRYGKTVAVVDRWYPSTKTCSCCGHVQNMPLSVRVYSCPECGFVCDRDVNAARNLIHVAGSASETQNACGETVSRSLVTFIGETPRVSAKQESCVRHSSV

SEQ ID NO: 55162 - protein, 405 aa, unknown
  TnpB Polypeptide
MMRTESIIVKPTNPQYQRLLEFCHLAKNLYNASLYDVRQHYFETKKHKTWQTQRVEFVRNDNPDYRALPAKISGGVLKIVSKNYSSFFALRKKGLPARIPKYLKKDGVTTLPIPKDAISLDKHPSVNKNGDTIYTHVVSPRWLNIPIATTVAHPRFITVTPKYGYICIGVVYDTKDVPTLPDNGRYMGVDVGIDNLAACLDSDGNALLFKGKAIKSINQYFNKKRASLISQLSTRREVKTSARLERLSTKRKNKISWHMHNISSLIVNYAVSHEINTIIVGRNPQWKQSINIGRVNNQKFVSIPFSMLIQQIQYKAQEHGINVIVTEESYTSKCSLLDREDICKHEEYSGRRIKRGLFRSLDGTVINADINAAGNIMRKVVPVESLTQGIEVGAVQPQTVHYARS

SEQ ID NO: 55163 - protein, 176 aa, unknown
  TnpB Polypeptide
  misc_feature (83)..(83): Xaa can be any naturally occurring amino acid
  misc_feature (110)..(110): Xaa can be any naturally occurring amino acid
  misc_feature (116)..(116): Xaa can be any naturally occurring amino acid
  misc_feature (121)..(122): Xaa can be any naturally occurring amino acid
  misc_feature (151)..(151): Xaa can be any naturally occurring amino acid
  misc_feature (161)..(163): Xaa can be any naturally occurring amino acid
  misc_feature (165)..(165): Xaa can be any naturally occurring amino acid
MKAVRRLAAARAKTARKRLDWAHQQTAALAGQYALVATEELTLKNMTRSAAGTVEEPGKQVAQKAGLNREILDTAPGLFTSLXRYKVLETGGEWVDAPTRKLKPSQRCPXCWHVAXKQLSXXMHCCEQCGHEENRDTASARVVLRWALESXSGQELAETGXXXPXETPSFATHRVE

SEQ ID NO: 55164 - protein, 443 aa, unknown
  TnpB Polypeptide
VKIVSSYKVKIKHYSAIFTEMVNKYRRAVAFFIAVCAKEWAILESLNGKNRNNKIERMTIVTKKNPNPKYNFNGLFYKMPSYLRRAAIQQAIGCYTSYISNLSNWESSDKSRKKPTLTVERNVMPVLYKSNMYVRTGRNTAKIKIFHKSDWVWLEIELREQDVKYIEKNCAHLIELVPTLKKSGKQWYLTFPFEEEVKIIDKPVNNRIVCAVDLGINKNAVCSIILSDGTVAARTFVDLSAEKDRLEKVIGRIKKAQQNGNRKTPIKWKHAKDLNTDISRKTAQAIVEFAVLHNADVIVFEYLDMQGKKRGSKKQRLHLWRKREIQRIVEHNAHRNGIRISRVNAWNTSRLAFDGSGNVTRGIYTVNGEEKYNYSICVFQSGKTYHNDLNASYNIGARYFIREILKSEPEMARLPSEAKALRYGTGTTRTLSTLIRLNADLCA

SEQ ID NO: 55165 - protein, 416 aa, Natrialbaceae sp.
MEYSRRYLAYPTQEVAAELEYHIDVHRQAYNYTRYEHENVDADNIGSAYKHHYRLPGWKDQFPIFSEVNSKALQRTVTRFYQNLSNLSEKKQNGHKVGMLKWKSLTEYQSMTYSQSGFELKTTSGQHATLELSKVGDIHIRYHREIPDRADIKEVTIKKETTGEWFVSFGLETDDEDLPEKPAVDSLNTSNSVGIDLGILNYIHTSDGRTVDWLDLEDDYDRLRREQRKLSRKEKDSNNYKKQRIEVAKVKRRIRRKVLDYQHKITTWLVKEHDAVFVEDLNAQSLLQGDGNARNKQDAAWRQFITLLEYKADLYGTHVVQVDARGTTKECSSCGVETANPIWVREHSCPSCGFECDRDANASLNVLQRGFSELGLGWPEDTPVETALPTDTHSVSAKRVVETGSLGVVRESKALS

SEQ ID NO: 55166 - protein, 371 aa, unknown
  TnpB Polypeptide
MNRAYKYRVYPTAEQEQLLTDTFGSCWFVYNHYLALQSENCQQGKAYRNKTACNNDCNRILKQEQPWLKQVDKFALTNAIYALDSAYRRFFRRQGGYPRFKSRHHSRMSYTTNYTNGNIAVLAGEIKLPKLGKVGAVVHRRAPEDWRLKQATVSRESDGSYYVSVLYEYEAAIMPQAVNPEQVIGLDYKSDGLYMDSDGRCCGMPHYYRKNQKKLTKAQRKLKAKQLQSVNYRKQQKKIARIAKKAANQRKDYLHKKSTEIANRYDLVCVEDLSLRALANRGFGNGKATMDNGYGSFLTMLKYKLEERGKRLIRIEKWYASSKTCSRCGAVKMMPLSVRRYECNCGMSMDRDLNAAINIRNRGFEIYLKAA

SEQ ID NO: 55167 - protein, 913 aa, unknown
  TnpB Polypeptide
MLEYSLIGETTMFDKGIHKRIKIVLLIMIFVFLLVIGKVFYIEVIEYRKLNTLASGLWSRNLPIEADRGKIYTVDGEVVAGNLTTTSLVFIPNQIKDKDLVATKISEILGVDKSVIEEHLYKKSMMERVHPEGRRLSYDIADKIAALNFGGVYLLKESKRYYPHDEMLSHVLGYVGIDNQGLSGLELEYDKILTGEYGSIQYFSDAKGNNLDRNSVYVEPEDGLDIYLTVNYKIQSSIERELDNIVTKYNPEGAWALAMDPNTGEILGMSSRPNFNPNKYQDYSVETINRNMAIWASYEPGSTFKILTLSAAVNEGKVDLVKDTFFDGGSVNVDGARIKCWKHGGHGSQTFLEVVQNSCNPGFVELGNRLGKEKLFDYIYKFGYGKKTGIDLNGESTGILFNLSKVGPVELATTAFGQGVSVTALQQVTAVSAAINGGTLYKPYIVKRVVEHETGQIVNEIKPTAVRENIVTKDTSEKVRMTLESVVSLGTGRNAYIDGYRVGGKTGTAQKVNNGVYMSGNYIVSFIGFLPANDPKIVVYLAIDNPKGVTQYGGTVSAPIVKNIMEDAITSLNIEKQDGGTEKRYQWYDKKYYTVPNVVGLDKKDAIKLKLFIKNDWKWVELNLKHTDMQSIRKHSINATISVPTLEKKHKKWFLRFAFTNKADLNKTPVSEQKILAVDLGINTDATCSVMDYYGTVLARSFINHASEKDYIKHNLNKIKKYQAAGQKDVVRKLWSITRNHNIELASKIANNIVNYAKQQNVDVIVFEHLDMKGRKRGSKRQLLHMWNKNTIQRIVTHKAHLSGIRISHICARNTSKLAYDGSGYVLRGKDAGLLTYELCRFQTGKIYNCDLSASYNIGARYFIREIEKIYTGKSICKKISIWSDIQAKVPECQRRTQNTLSTLRAIHQCLAV

SEQ ID NO: 55168 - protein, 464 aa, Chloroflexi sp.
MRRTGLDDARVSCEAGPRTPLCEGLAVHLCCRSRPPRQRWHIAGIAAHVSGCPEETAFALDTLVLCRDSRERIGRGHQEVHRSPEGSLMLKTFEYRLYPSKSQERLMSQTLETCRRWYNTCLAERKDAWEQERRSVGKFAQLAKVKDYRKENPSAGQVHSHVLQVVVADLDKAFQACFRRVKAGEKPGYPRFKGRNRFDSFGFKEYGNGFKLDGRRLRLSGIGRVAVRWHRPIEGTIKTVRIKRKAGKWYACFACEVEQPEPLPETGQSVGLDVGIASLITTSDGEKVENPKWYRTEQGKLRVAQRRVARRKQGSHRRRKAVRALQRQHERIRNKRKDFLNKLAADLVHRYDTIAIEDLRIGNMVHNKHLSKSILDAGWGYFRQRLSFKAEEAGRTVVEVNPAHTSKTCSQCGSLFESLTLADRWVACECGLSLDRDHNAAINILYRAGQVRQVRTYPVGDRVA

SEQ ID NO: 55169 - protein, 287 aa, Escherichia sp.
  misc_feature (119)..(119): Xaa can be any naturally occurring amino acid
  misc_feature (153)..(153): Xaa can be any naturally occurring amino acid
  misc_feature (221)..(221): Xaa can be any naturally occurring amino acid
  misc_feature (236)..(236): Xaa can be any naturally occurring amino acid
MRRFAGACRFVFNRALALQNENHEAGNKYIPYGKMASWLVEWKNATETQWLKDSPSQPLQQSLKDLERAYKNFFRKRAAFPRFKKRGQNDAFRYPQGVKLDQENSRIFLPKLGWMRYRXSRQVTGVVKNVTVSQSCGKWYISIQTESEVSTPXHPSASMVGLDAGVAKLATLSDGTVFEPVNSFQKNQKTLARLQRQLSRKVKFSNNWQKQKRKIQRLHSXIANIRRDYLHKVTTXVSKNHAMIVIEDLKVSNMSKSAAGTVSQPGRNVRAKSGLNRSILDQGWYEM

SEQ ID NO: 55170 - protein, 402 aa, unknown
  TnpB Polypeptide
MLRAVLLQIEPTKSKLKRLREFSSNACLELNRLLSERKSCSGFGLKELHRKTFSTSKDNTRFNVQVICSLIRQANRFKGEKAEGVTVKFNVPRNCKTFKTKSKFFVELGTYPRNRIAVPVKQNRNLQRFESLIQDGWICKTFGLTPALQIVAYLSKKKEIPERKNVLGIDVNAKCFAISVVSPNGKILYQTYLGKQIWVKRKKIMERRSLLQFFNAKRKLKRLRNRERNFVKTNLGQVVREIIEIAKRFDADIAIENLKRFKPIGRKFNKIVMRIPFAKFKSILQQRCFDNDINLNVGDSWHTSKWCSRCGAVGNGHSANYAIFKCKNCGQVVNSDRKASLAIAVKSLLERTHTVNPNEFCVQISNRRVPVSGLLRSNEIGCNNAVHLTQPFDGKPTPFMGG

SEQ ID NO: 55171 - protein, 268 aa, unknown
  TnpB Polypeptide
MVKSIKVMLIPNNVQKTKLFQYAGASRFAYNWALAREKETYEKGGKFISDSELRKEFTRLRHSEEYAWLLNISNNVTKQAIKDACTAYQNFFKGLQKFPRFKSRKRSMPKFYQDNVKIQFSNTHVKFEGFSSSRKANKQKRNWVRLAEHGRIPTDVKYMNPRISFDGLNWWISVCVEFPDCRETLNEDGVGIDLGIKDLAVCSDAVKYKNINKSQKVKKLEKQKRRLQRSISRSYEKNKKGESYCKTNNVIKKEKLLLKRNHRLTNHP

SEQ ID NO: 55172 - protein, 365 aa, unknown
  TnpB Polypeptide
MNEDDLDKLCSTVKTFEDACNYASEVAFRKRILDPKILHDRIYRELRVIFKLPAALAARAIQKVASFYRESSYKLHIFKERSLSLDRKLFCLKRTGRLVASIATASGRIKAELEVGDYQRSLLKNPVTGARLILKRGMPYIQICVACDVLPKEMDDPVGVDLGTRKLLVASNGFKIDGRPVNAKRQHFRGLKYSLKEKGTSSAKRRLKRLIKREKQWFRTKLHESSKALVESLDEGNYLVLERLRGTKVEKGSKRNRRSTRPSFQSLAIGRLQQMISYKCGDRGIPLILARPDFTSQRCPRCGTIDKFNRRSQALFRCVNCGYQHNADFVASINLRELALGGWAAVSQPNAFQPIGRDCEPISTA

SEQ ID NO: 55173 - protein, 365 aa, unknown; identical to SEQ ID NO: 55172
  TnpB Polypeptide

SEQ ID NO: 55174 - protein, 401 aa, Frankia sp.
VQLRYSFRLHPTAGQRASLAQAFGCARVVYNDGLRAREDARAAGLPFPKTGDLSKLLITEAKKSPERAWLAEVSAVVLQQSLRDLDTAYRNFFDGLAGKRPRMGAPRFKSKRDTRQSVRFTANARWSVTTGGKLRLPKIGDVPVRWSRRLPSAPSSVTVIRDSAGRYFASFVVEAEQVDSPAETTTEVGIDLGLGHFAVLSDGRKIDSPRFLRRTEKRLRRVQRDLSRKKKGSKNRAKARLKVAREHARVADARREFHHQLSTRLIRENQAVAVEDLAVNGLARTRLAKSVHDAGWSAFVAMLEYKAARYGRTFVRIGRFEPTSQVCSACGVKDGPKPLAVREWTCQACGSVLDRDVNAAVNVAKAAGLAVSARGAQVRPASVPAPRDEAGTHPKLTPTGA

SEQ ID NO: 55175 - protein, 394 aa, unknown
  TnpB Polypeptide
MLLAERSQVQKTPALTLLCHRAKNLYNLANFYVRQELFHLGSVLTYYNLAFMLRGQPAYQTLPAQTAQQVLRQVAGDWRAFFAACRAYRRDPKKFLGAPRPPRYRPRDGESIVTFTNQQCRIIGGWLHFPKKSGLSPIHTRIECFRQVRVVPKGICYVIEIVYHKESITPGLDPRRALGIDLGVANLVTVVNNIGVPPFAISGGAAKSANQFYNKKLARLRSAATNANNTQTTKRIQRLTRTRANKVGDIFHKASRAVVAFCKRYHIGTIAIGYNPRWKQECHLGRRNNQTFVLLPSHALIRQIQYKAKLAGIRVVLVDERYTSRCSFLDGETVGRHERYAGQRVKRGLFKARSGVLINADVNAAYNILQQAVPEASVDGIEGNGLHSVLIGLI

SEQ ID NO: 55176 - protein, 442 aa, unknown
  TnpB Polypeptide
MSDECKTLEAYLAPPTQHKQRKLHDEHERYDSLLRRSFNNECDTMTAVNEVVSGEDLNWHSKNALKQYVPNLLDEDTYDAKQLADTHPIRYANTAAVFDYDEDRHHELCWEVPLPGRGTNFWIPLQLNPAQEDWWHALIDENDENDENVWAGELRLQRDGNRWVLHVTANYEVEPDHSCSRESDDVTPVGFDVGESKLLVGCALRDNTPVDPLFVDGGRVRHLRQKQASTEDRLKSRHASKLLDDLVWGRWQDAIEDEIEKASMRAVEYASQFENPIIVLEHLNGITDEDIGKYWNRRLGKWLFSRLQSRIEDKAAEHGISVEYVYPHYTSKTCHACQHLGYRLHQGTFRCTNEACWVSEYQADLNAAANIASRLNPWGESLPWKSAGDDSPRSGGQWQAREDTSPSEGLPSERRASDDKGSSSSPAVGAGSKPETGDTYTS

SEQ ID NO: 55177 - protein, 411 aa, unknown
  TnpB Polypeptide
MIIRRVEKHIIKKSHSYYNMLCEFTHLSKNLYNHANYLVRKEFTENNKWIRYRDLDKILKKDVDYPDYRNMPTAQSAQQTLQLLDQSWKSFFSSIRDWSKNKHKYSGKPRLPKYKSKDGRTVLVVTNQQVKLKGNLLQFPKAFKGFTIKPRCVNLTNFEKLNQVRIIPRNQIFCIEIVYSVAVDDTILEDNQRIMSIDLGLDNLATVVTNTGLQPVLVNGKGLKSINQYYNKKKAYYQSVAKQMNDKHYTKRLYRLTQKRNFKIEDALHKISKYIIDTATLNDITTIVIGKNNDWKQSISLGRKTNQSFVSIPHQKLIEKIMYKAQAYGINVVLTEESYTSGTSFLDSELPTKERYDKKRRVHRGLFVSDNGISVNADVNAAYQIMKKVFPNAFADGIEGVVLHPVKVTIS

SEQ ID NO: 55178 - protein, 477 aa, unknown
  TnpB Polypeptide
VLSFGLKRFEALTQNSRYQELLAIRRQIMGEIARLKKVKKNDETLSKQIKDCNDALFDLRKSYSLTEFGLSDRLSRQRRNVGSPYEQLNSGELQVIARHAMKTLEKVIFCQIKSHRVRFRSKFASNASFRNRVNITGTRIKPSNKEGIAYRLYIHKTSTFVDIPIKAFNTYKLTSLSHCEKIKYVQIVRKTIRGKKVYFLQIVCQGTPFSKVTNGEGVVGIDPGVSTVAFASPTEVALVDLVPKNITQKEKRLKQLDRKIENSRRINNPECYQENGTIKKDARFKRPSNRQLRLQSRRRSVYRALSEERTKLQRQLVNRLVSQASSIKIEELNVKGLQKRSRDIRINPTTNRPYSKKRYGKAIFRAAPSAFRSALEAKARQLNIDFEVISPKDVKPSQYNHITQTFEKKPLSVRVYDLSDEYAGVQRDLYSAFLIAHVENGQYRQEQLEQDFPVFYRQMKSFLQQPIETKRLAWYLN

SEQ ID NO: 55179 - protein, 327 aa, Bacillus sp.
MRITVDDCGQGWLEIANPLGRTNGKTKSPRIKVPIMIPYRFYHQITNVVMGKQIGVNSKGKPIIEHQKYSVEIIRKQNEFYVNITFDETEIGRVLDFKETPQSDVIAGIDVNPDRIAVSLCTKQGNFKGSKIFYLHNLNTFSTNKRATIIGQIVQQIKTWLLENNVGGIVLEDLKFQQSHDTDKYSNRNFYQFTYKKMLNSLIRMALRNGFSVKTVNPAYTSVIGKLKYSKNFGISVHEAAAFTIARRGLELQEQLPQEIILLLKNQITTKLRILVASMEESKKNTQKVYKKWLQTIQTWKEYHNWKLWSILHKTVYMNNQQFVFKI

SEQ ID NO: 55180 - protein, 403 aa, Methanobrevibacter sp.
MELIVFMKCVNLGLKVRLYPDEDIMSKINQNIGNSRFTWNKLLECYQETYKLFKFHGYTKLKCNMTTFNAMLNMLKKEHYFLYLSESSSLQQVYRDLIHAYNKFFSGEGGYPRFKSKKHDKQSFRIQNNGNIKINDNTIVLPKLGKIYYRTSKKYHEKLKNVKINNVTIKLENGKYYAVFNIKTEISEFSKTNKAVGIDLGMRKLSTLDNGLKIANLDVTYEENMIKKYQKRLSRQKYNSNRYKDTLKTYRKWIDKKKNRINDYYHKITTHIVKKYDIIILEDLNIKEMFQNIYNSRKLQRIGWKKFVEMIKYKAEIYGKTFRQVNKWYPSSKICSHCGYYNKDLKYETEWKCPQCQEIHDRDINAAKNILKQGLINLIDETMNLWNRGDSTVILLSWESISP

SEQ ID NO: 55181 - protein, 246 aa, unknown
  TnpB Polypeptide
VLREADGRYYVSFVVDRAEQPLPPVEREVGVDLGLDRIAVTSDGEIIDNPRHLRAAQRRLGRAQRALARKQKGSANRRKAVRRVAVRHRRVRETRLDHHHKLALRLVRENQAVHLESLSVAGLARTKLARSVHDAGWSTLVRLIEEKAAHYGRIVVKVDRLFPSSQLCSVCGRRDGPKPLSVRSWICPACGTEHDRDLNAARNVLAGGRRIAAGLAEIGNACGAGVRPGLVPAVGYEAGTRLARLA

SEQ ID NO: 55182 - protein, 416 aa, Cafeteria sp.
MNIKNYHWFKNKKRKNINTDGWFNLKSINNKGFNDYDNIEKPINKFLCCKTIEIYPNLEQKNIILKWMDLFINMYNHTNYFINNNIYDFTNRKIKSNVKEILNFRKLRDNYIKNKKNETCKDEINKHMLDEAINHCVSKHKSCITNYFSKNIKFFRIRNMKKNRRKKILIIEKGLFSKKKNGFCLTKLQEIKSSESIGVNKTSILQYDKHLNKFTLFIPIEKNTTNIENRTKCGIDPGIRTFLTCYSKKEILEIGENCYEKYKNNYKKIDKTRELFDKKEINKKQFTKSINHNFDKIRNLTKDLHFKVSSYLCKKFNIITIGKISTSSIVLNTNNLNKISKRCMLSLSHFKFREILEYQCNKYNTQLNIVDESYTTKTCSNCKELNNIGSSKKYQCKSCNFKCDRDINASINIYLK

SEQ ID NO: 55183 - protein, 359 aa, Oscillospiraceae sp.
MIRHRTYKYRLCLEEEQKVALTELFNEQDRLANFLALWVNQLMENNIAPDEIMRQILGLRVKAGLEPETVKQIQDEIIAKVYRHEYIRLRKPYAGRRQMSLPPLPIWGDRVRLPGLGWVKVKFHRPLPAGISIYSVTVSEENYRREHFVRFGFYYEEAETGLYQVRPERVLGLDYKQDGLYMDSRGCSGNYPGFIAQGAERARALREMAARHRRGSCRWLKLSRRADRLERKMLNRRKDWQYKQAAALDRENDAVCVESLDLRAMEESNRALGYKLRDNNWYGFKNKLGRKLAQQGKPLIEVSMYFPSSQLCSVCGYRFGKLPLYQRIVNCPACGSLMDRDYNAARNIRNEGIRLLEAA

SEQ ID NO: 55184 - protein, 395 aa, unknown
  TnpB Polypeptide
LLSFKYRLKTSREQVEILGEQLRLCRLAYNTLLRHCFNERKAGRGTPTSTSLNYLLPAMKTRTPELEGVHSQVLQNVAKRVRSGFESYWSRKKAGLKSHLPRFRRADKYNSLTYPQSGFSLDGCMLRLSKIGDVKLIQHRPLERRVKTLTVTRSPAGKWYAVFSSEVENRPMAGREKAVGLDLGLNSLVALSDGTLIEAPRSYRNAESRLRRVQRSLSRKRRGSRNRERARLRVASVCEKVANQRRDHACKTARMVVNRYERVYVEDLNVQGMMGNRRLSKSLGDAGWGMLRNALTYMAKMSEGVTAFVNPRNTSQLCSRCGAYVRKDLSVRTHRCPECGLTIDRDVNAARNILRKGIGLGQPEYTPEGEATTTQLSVVGQATSMNQEATLLVGR

SEQ ID NO: 55185 - protein, 493 aa, unknown
  TnpB Polypeptide
MKMRFKVNKPVDMVTIPGRIYPDKTAQEKLVSFMRRFQAAKRTAYQALRRKEEPGEIVKDLYGRFFPNARWCQWAVEDAKSTIESQKEQVRMHVADLEAKIEKSEEKLERTKDKLRRQGLTFRINKLRAKLDYWKGFLERDEVPPAVFGGKKNLLLLQEGKLSKEEWRKLRSNAFYSVGQANQKGLEGQHGNANTEVVFDPATESFRLNVYIPPEPEKKKGRKRREEDWITVPLEVPARYRSLLLRHLALDGAYTVRVVRQGERFDCFISFPLGDTVPVDKSLPMAGFDLNPHVVAVTVALPDGNFKVCRCFWCPDLVHASHEKREWIAGNLAQEIACWLESLGVKQVALEELSFAQDHDTNRLFNRITHNFCKKLLFSRIVVALRKRGIAVFTVSAAFTSLIGYFKYSEAYGLSVHQAAALVIARRALGFAERMPRELLKKLSPGEGWKPFGLWGKLFGLFKAARMRALRDNMMFRSWTPAGWLSFMFSEAG

SEQ ID NO: 55186 - protein, 266 aa, Symploca sp.
LGNFNFLLSYCDIRGQSPTAATLNRTKRGDYYINICVNLPTEPTGKTPKVIGVDLGRRDIATTSTGKSWSGDKIKATRDRFSKVRANVQGKRTRSSRRLLRRLSGREQRFQKWLNHNISKQLVNEAKQSNATLAFEDLTNIRQSLNQKRRSKTERRRTNNWAFYQLRTFVGYKAAIAGVPVVFVPPAYTSQTCSRCHHVHPVKGKSYRNGKKYNCGHCGFKHDADVNAALNIAALGLSVNQPEIPGISCQLEGQLSLFPANLFELG

SEQ ID NO: 55187 - protein, 387 aa, Rhodothermaceae sp.
MPEVMRTYRYRAYPNAEQRENLARTFGCARWVYNWGLERRTNAYYGEGKSLTYNSLAVELTQLKKQEETRWLGEVSAVVLQQSLRNLERAFTNFFEKRAGYPSFKRKSGKQSATYASSAFRFDPKAMTLTLAKQKTPLKIRWSRKPEGEVVKVTVTLDPSGRYHVCLHCRCKVEPLPPADPGGKTGKSVGVDLGLNDVVVTSEGFHSGNPKHLRRAYRRLRRVQKALSRKQKGSNNWEKQRRKVARIHARIADRRSDFIHKLTTDLVKNHDVIAVESLAVKNMMKNRHLARSISGAAWGEIVRQLEYKCEWYGRTLIKVDRWFPSSKRCSACGHVRETMSLGVRRWTCEECGTEHQRDENAAENILAVGATVAACGDLSKTRAAGDV

SEQ ID NO: 55188 - protein, 392 aa, Clostridium sp.
MIVAIKIKLKPTKEQEVLFWKSAGVARWSYNYFLSESERHYQEYLEGKQDKKTIKESEVRKYINNVLKKTTHTWLEEVGSNVMKQAVKDADIARKRWFDGVANKPKFKSKRKSKVSFYVNYESLKRTNNGFRGEKIGVVKTYQALPKLKKGEKYSNPRISFDGMNWFISIGYNNEFKAVKLTDVSLGIDVGIKELAVCSDGQFKKNINKTKRVRFLEKKLKREQRKISHKLEANIKSYDKNRKPIYKRPLRDMKNIQKQNRIIRNLYKKLENIRTNYLHQCSNEIVKTKPSRIVMETLNIKGMMKNKHLSKAIANQKLYEFKRQIQYKCKKYGIKFVEADKWYPSSKTCSCCGQVKSDLKLKDRLYVCNCGLKMDRDLNASINLANYQIQSA

SEQ ID NO: 55189 - protein, 220 aa, Proteus sp.
MQALQNWPRFQAVRYTRPSAVFKVNQRKLARLQRKLSRKIKFSANWQKQKRKIQRLHSHIANIRKDYLHKVTSEISKNHAMIVIEDLKVSNMSKSAKGTTERHGRNIKAKSGLNRSILEQGWYEMRRQLEYKQLWRGGQLLAIPPAYTSQKCACCGHTAKENRPSQSQFECLECGYTANADINGARNILAAGHAVLACGGRVQSDRPSKQEPAEVIQTSV

SEQ ID NO: 55190 - protein, 331 aa, Proteus sp.
LQGACRFVFNRALARQNEEHEAGNKYIPYTKMASWLIEWKSDTETQWLKEAPSQPLQQSLKDLERAYKNFFQKRTAFPRFKKRGKSDAFRYPQGVKLDQSNSRISLPKLGWMRYRNSREVVGEVRNVTVSQSCGKWYVSIQTEYEATEPPHESTSIVGLDAGVTKLATLSDGTVYPPVSSFKVNQRKLARLQRKLSRKIKFSANWQKQKRKIQRLHSHIANIRKDYLHKVTSEISKNHAMIVIEDLKVSNMSKSAKGTTERHGRNVKAKSGLNRSILEQGWYEMRRQLEYKQLWRGGQVLAIPPAYTSQKCACCGHTAKEKPPVTKSIRVP

SEQ ID NO: 55191 - protein, 217 aa, Proteus sp.
MKRLQAFKFQLRPNGQQEREMRRFAGACRFVFNRALARQNENYEAGNKYIPYTKMASWLIEWKSDSETQWLKEAPSQPLQQSLKDLERAYKNFFQKRTAFPRFKKRGKSDAFRYPQGVKLDQSNSRISLPKLGWMRYRNSREVVGEVRNVTVSQSCGKWYVSIQTESEATEAQHESTSIVGLDAGVTKLATLSDGTVYPPVSSFKVTSESWQGFNGN

SEQ ID NO: 55192 - protein, 507 aa, Desulfuromonadaceae sp.
MKRSTTPSFVLELPLAVAPGQERILLGRFEAARRLYNAVLGEALRRQRLMREARAWHKARALKDKKERSATFRKLGADYGFTSASLSSFGTECKNAAGWKGRLGAHETQKISERAFAAVEAFGFGLRGKPRFKGRGRPLHSVEAKTNAAGIRWKAGIGCVEWSGLTFPAQLAPEGKDRWQQESLARKTKLCRLVWRNLRGRRRWYIQLLQEGTSPRKQEIGTGTVGLDVGPSTVAMVAEGAADLVGFCPTIKQPWQEVRRLQRALDRSRRATNPHCFGPDGTWKKGARQSVFSSRYRKLKTRIAEAERRLASERKRSHGEISNTILSHGTVVHSETLSYKAFQKRFGRSVKVKAPGMFMQTLRRKAESAGGEVRDLNTRMLKMSQYDHPTGQYRKKPLSQRWHLLGDDSAIVQRDIYSAFLARCVIDNRHHPSHIASMWAAAEPLLRQAGWCRTQPASAKAKAFPTVKPSERVACRRKPTIGHSPDAVAVTREPGNPDGSAFRTPGF

SEQ ID NO: 55193 - protein, 396 aa, Clostridia sp.
MVKITLTHKIRLKPTYKQENYFRQACGVARFTWNWALGEWKRQYEAGKKPTGLGLKRQFNAIKPVEFPWMYNVTKYASQQPFIFLQSAFKRFFGKKANYPQFKKKGIHDSFYIGCDHIKIEDKRVHIPKLGWVKMREALRFSGKVISATVCHVADKWFISLNVELNQRPQPCESQAVVGVDLGVSRLATLSTGQKFEGSKPLKKHLNKLKCLQQQLSRKQKGSNNRNKARIKVARLHYRISCIRQDTLHKLTSHLSNNFAAIAIEDLNVKGMMSNHVLARSIADMGFYEFRRQLGYKSQMRNNHIEVVDRWFPSSKRCSRCHVINDSITLSDRVFKCNNCGLEIDRELNAAINLESTVSSTGFQACGEKGAGPDSCRDETGLNEAGTKPCTDLYTF

SEQ ID NO: 55194 - protein, 371 aa, Blastochloris sp.
MKLTVQMKLQPTPEQADALRRTLERANEACNYISRVAWEAKTFRQFAVHKLVYQPVRETFELAAQMAVRCIAKVADAYKLDKKVQRSFSPHGAIAYDDRILSFALPKSEVSIWTLDGRQPIPFVCGERQRQLLASQRGETDLALVNGEWYLFAVCEVETPEPIDGEGVLGVDLGVTNIAVDSDGETHAGKAIKNVRHRHRRLRGKLQRLGTKGSRRRLRRLAGQEKRFATWVNHNLSKQIVAKAERTKRAIALEDLTHIRTRVRARRSQRATLHSWAFFQLRAFIVYKAALAGVLVHFVDPRNTSRTCPACGCCEKANRKTQASFVCTSCGFAGPADVIAAINIGRRAPVSVPYCSGTGVSPVVPGQSPSL

SEQ ID NO: 55195 - protein, 347 aa, Massilia sp.
MLEVTKSAPQMAIIQLGQAFENFFAHRTRFPVFRRKGVDDRFTLTNDLVCIEGERIRIPKLGWVRMREALRFTGRIVSATISCVAGNWYVGITVDIPDATSLPSAENQGAVGVDLGVNTLATLSNGEVFTGPKALCTQLNKLRRLDRSLSRKVKGSRNRAKAKLKLARLHARIANLRRESLHQLTTSITRRFHTIGIENLNVKGMLSNRRLARSLADMSFHELRRQLEYKAVWRGGCIVVADRWYPSSKQCSCCGYRLEALDLGVRRWRCPGCSALHDRDINAAINLKKLAVSSTVSACGGDGAGPTRKRGVKLAPVKQESNSRTLVAGMASFCVSLEERTGGDMMT

SEQ ID NO: 55196 - protein, 419 aa, Microcoleus sp.
MLTLTHRYRIYPDTTQEQQLIEWMELCRGAYNYALREIKDWCDSRKCLVDRCSLEKEYILPAEVKFPGEIQQLNNLPRAKKEFPRLGEVPSQGLQQAIKQLHKGWEYFQKRGFGFPRFKKYGQFKSLLFPQFKENPVTNLHIKLPKIGAIPINLHRPIPSGFVVKQVRILRKANYWYASISLQCDVSVPDPTPHGHPIGVDIGLEKFLATSDGVLVKPPKFFKKLQSELKLLQRRLSRKQKRSKNYEKQRLKVARLHHQIDNTRKDFHYKQAHMLCDAGDMVFMEDLDYRVSAKGMFGKHMLDAAFGQFRTIVKYVCWKRGKFFSEVDARGTSQQCPECGGEVKKDLSVRIHDCPHCGYKTDRDVAAGQNIRNRGIKLINTVGQTGMKTACADSLPGIEATESRQVSKSRKGKTRKSQK

SEQ ID NO: 55197 - protein, 426 aa, unknown
  TnpB Polypeptide
MATKAFKYRICPNKEVAEKLQWTLDRCRELYNAALDERTSAYRVTRKVPVEFCGDVALIDYSRATGLSIGYNQQQNDLPDIKEMRPEYKEIGSHVLQNVLRRVDLAMAGFFRRVRNGQTPGYPRFQGKGRYDSFTYPDIAGWKFVPGEKKHGKLILSKIGSINVKMHRPVDGTIKTTTIKREGTHWYVVFSCEVKAKLLEVSYEDVGIDLGITHLAALSDGGMIDNPRHYRKAEKKLKKLQESLSRKKHKNAKNGCKGHRRRKASKAVAKAHRKIRNQRRDFHHKESRKLVNRYQVIVFEDLQAANLVKRPKPKQNEDGKYLPNGAAAKGGLNKSINDAGWSSFTEMVKAKAENAGRTVLFVNPRNTSQICSACHKKGPHKDLSERTHICIHCGVVLDRDTNAAINILWLGYKQLKVRAVPTQAIA

SEQ ID NO: 55198 - protein, 373 aa, unknown
  TnpB Polypeptide
MEQSSACFNAVAAYGWEHKQRNSVELHKATYYRLRGEYPALPSQLVVSARMRAAEAIASALTLRKRGRAVSRPSGTMIPIRYDEHSYRMVDGAASLASVSGRHIVAFAVNPHAAKLLSQAVSFDSADLIFRKAKLWLHAIVTLPDVPFADSGKVVGIDLGLNRPAVTSNNMFHGSRHWRAIEQRTFRLRRQLQAKGTVQAKRRLRRLSGKTARFRRDCDHVLSKRIVQSVRPGTTLVLENLTDIRTRVRQRGSSQRRRLHAWSFAQLRSFVTYKANSAGSRVVAIDPRHTSQTCSRCRVRDKRSRVSQAIFRCRSCGFELNADLNAARNIAVKHVQNGRPVLGGAPVNCPIVGEPVEVQHGATDKLPALAGSR

SEQ ID NO: 55199 - protein, 261 aa, unknown
  TnpB Polypeptide
VFSRTFGCVRVVWNRTLAARHARFAAEGKGISYAETDQALTAMKRDPGLAFLTEVSSVPLQQTLRHQHQAFTAFYEKRARYPRFKSRVGHLARYQRRLARCQKGSANREKAKLKVARAHRKVRDARRDFLHRISTRLVRSADAIVIEDLNVSGLVRNRQLARAISDCGWAEFRRQLEYKCQRYGRKLVVIDRWFPSSKTCSTCGHRLTELVLSIRHWTCPSCRTRHDRDVNAVKNILAAGLAVTACGAGVRHSGPPGCGRR

SEQ ID NO: 55200 - protein, 362 aa, Clostridioides sp.
MLRAYKYRLYPNNEQKEYFAKTFGCSRFIYNLMLADRIKAYEENKDLDIKKIKYTTPAQYKKEYEFLKEVDSLALANEQMNLDKAYKNFFRDKSVGFPKFKSKKINYHSYTTNNQKGTVYIENGYIKVPKLKSMIRIRQHRQFEGTIKSCTISKAPSNRYYVSILVETEIDQLETIDRKIGIDVGLKEFTICSDGFRVDNPKHFRKSEKRLAKLQKDLSRKQKGSNNRYKARLKVARLHQKIADQRADFLNKLSTKLIHENQVIVIEDLKVKNMVKNHKLAKAISEASWSEFRRMLEYKAEWYGRKIIVADKNFASSQLCSVCGYKNPLVKNLALRKWICPKCNTEHDRDINASINLLNLAI

SEQ ID NO: 55201 - protein, 389 aa, Bacillus sp.
MKKAYLIEIKPTNEQITKINQTIGVCRYVYNLYLSKNKEIYESEGKFLRGYDFSKWLNNIHTKECDQWIKGVSSKAVKQAIMNGDKAFKNFFYGLSKFPRYKKKKKKKKNENVKCYFPKNNKTDWAVERHRVKIPTIGWMRLKEYGYIRKDAVVKSGTISKRAGRYFVSVLCESEETKAKPTLHSTGLGIDLGVKDFAVRSDGKTHKNINKTVKVKKIEKRLKREQRSLSRKFENIKKRGEQSVTNKRANIDKNILRVQKLHARLANIRLAYVKSVINDVVKTKPTFITVEDLNVRGMMKNRHLSKTIAKQCFYTFKTWLLTKCEEYGIELRQVDRFYPSSKLCSCCGQKKVDLKLSDRVYECDCGNVIDRDLNASINLLQAKKYTILT

SEQ ID NO: 55202 - protein, 391 aa, Butyrivibrio sp.
MLAKEQMFVMIVYMNRAVKYRAYPTTEQSVMFAKTFGCCRKIYNLMLSDKIESYKATGKFPTVTPAKYKKDYPYLKEVDSLALANKQMDLQAAFRNTFSKSRKKKNGFPKFKSAKHSRKSYTTNNQKGTVAIIDNQYIKLPKIGKVKAVIHRIPDDRWVIKSATVSQESDGKYYISVLFEFEDIANTYVVDKNNAIGLDYASDGLYVDNNGNVGTNHKYYRESHDKLAKSQRRLLRMQGSKKHEIKSNNYLKQLRKVNKIHRHIANQRLDNLHKISTEIANQYDVVCVESLNMKSMSNKGFGNGKATLDNGYGMFLSMLEYKLSDRNKYLVKVNKWFPSSQICHCCGTIHPEMKDLAIRKMVCDCGLTMNRDQNAAINILNEGLRLLTEVA

SEQ ID NO: 55203 - protein, 392 aa, unknown
  TnpB Polypeptide
MLKGFKTELRITKKHINKIHQSIGICRFLYNSYLAKNHELYNLYKEGKIDKKQVFISANDFDKYINNEVKVLEEFKWINECGSKARKKAIVNAETAYKRFFKGQSKFPRFKKKKNQDVKLYFPKNGKGDWTVKRHKIQIPTLGFVELKEKGYIPTNIKVVSGTVSMKAGRYYVSVLCDVIDRNDYSDIKNEGIGIDLGIKDLAIVSNINEPFKNINKTEDVRKLKKKLKRLQRQVSRKYEMNKDGKKFIKTKNIIKLEAQIRTIHQRLSNIRLNYAHQITNTLVKTKPEYIVIEDLNVRGMMKNKHLSRAIAEQSFYEFRRQLTYKCSWNNVELRVVDRWFPSSKTCSECGAIDKDLKLSDREYICKECGVILDRDKNASINLKNAKIFNVT

SEQ ID NO: 55204 - protein, 375 aa, Dichelobacter sp.
MLKAYKYRIYPNSEQALLIEKHFGCSRFVFNWALALQKRYYAMFGKSLSRTQIQSQLVKKKKTGKFAWLNEVNSQSLLNALLNVYTAFTNFFKGRTKFPRFKSKKILGRSYQCPQHCTVSFEQGIINLPKIKGIKTVFSREFVGNIKTVTISKNATGKYYASVLVENTDILPTPTTVEPNLTVGIDLGISHLLNLSDGSKFDNPKYLANASKRLAVQQKIFARKQKQSKNYQKQKLAVARIHEKVRQQRLDLHHKITHSLICENQATSYALEDLAVKNMVKNRKLAKAINDVGWGQFVTLLTYKATWYGKNILKVNRFFASSKICSHCHHKLDNLPLSVRNWTCPSCQTHHDRDTNAASNIRQQALADVAGLATV

SEQ ID NO: 55205 - protein, 444 aa, Oscillatoriales sp.
MLNVLKVRIYPNKEQEIALAKSFGCCRLVWNYYLEKTNNQYKETGKGLSYCEMAKDLTQLKKLPDYSFLQEATAAALQQSLKNLESAFKNFFSHRARFPKFKNKHKKQSIRYPESCSIKGNGLKLPKLGIVKAKIPKTISSKIRSVTVSKTSTDKSFAAILFETDDLIPNKIKTGKISGIDLGLTSLVTVFDGETYSKVDPIKPTRKYAKQLRRRQQSLSRKTKGSNNRKKQVKRVAKVHEKIANTRVDFLHKISRQLVDENQVIVVENLCVKGLARTKLAKSVLDAGFGMLINFLGYKLERDSGKLIEVDRFFPSTKLCNCCKFKNNSLNLSIREWVCPNCQTHHDRDENAAKNIREEGIRILSTNTVGHTEIEACGEDVRLVATCCKKHSSVKQESPVERVSLTGECQFVVFSPNSQIPFLKFESLRCPFVPGVTNLLILRR

SEQ ID NO: 55206 - protein, 409 aa, Streptomyces sp.
VNKRHNHRENASPNLESSFVKIVVRVKLLPTPEQASALHATLHACNAAANEVSAVAFTTGTTNNRELRTLTYTGIKQTWRLGAQAAQHCIKKTSDAYTALKGNLKAGNLGRPGSRRHHQATSEPITFRADAAQPYDDRMLSWQTPQRTVSIWTVTGRIKRLPYTGQDDQLRLLAQYRQGESDLTHHNGSWYLLATLDIPEAPENPAPNGFIGVDLGIANIATTSTGNRHSGRRLNRTRENDRTLRSRLQKKGTRSAKRRAKRHAGKEARRTRDINHKISKHIVAEAQRTGRGIALENLGGIRERARLKKPQRVTINSWAFGQLAAFITYKARRAGVPLVHVSPAYTSQECSRCHHIDKRNRPSQAVFTCRNCGFVEHADLNASHVIGRRGWSAWVRGAESQVPALTLLA

SEQ ID NO: 55207 - protein, 186 aa, unknown
  TnpB Polypeptide
LSTGKIFSNPKWFRTLEKKLVDAQRILSRRQQLALKRKCKLDEAKNYQKQKRKVAVIHEKIINARTDYLQKISTEIIKNHDIVCIEDWNTKGMLRNHKLAKSISDVSWSAFVSKLEYKAKWYGKTIVKISRWFPSSQICSDCGHRDGKKSLEIRDWTCPVCHEHHDRDINASKNILAEGLRTLVLA

SEQ ID NO: 55208 - protein, 349 aa, Escherichia sp.
  misc_feature (311)..(321): Xaa can be any naturally occurring amino acid
VKRLQAFKFQLRPGGQQEREMRRFAGACRFVFNRALALQNENHEAGNKYIPYGKMASWLVEWKNATETQWLKDSPSQPLQQSLKDLERAYKNFFQKRAAFPRFKKRGQNDAFRYPQGVKLDQENSRIFLPKLGWMRYRNSRQVTGVVKNVTVSQSCGKWYISIQTESEVSTPVHPSASMVGLDAGVAKLATLSDGTVFEPVNSFQKNQKTLARLQRQLSRKVKFSNNWQKQKRKIQRLHSCIANIRRDYLHKVTTTVSKNHAMIVIEDLKVSNMSKSAAGTVSQPGRNVRAKSGLNRSILDQGWYEMRRQXXXXXXXXXXXGACCSASVHKPALRVLWSYSERKPPVTK

SEQ ID NO: 55209 - protein, 543 aa, unknown
  TnpB Polypeptide
MTAELLSVKKKNERNFITVECLLAFDKDEDKEKVLNLMRKFSSMVRFAYKRLLEKMERKELKKLLAQKYGINTRYSGDAIFLAQQTLDSCIERGQNPKKLVFGSRVVFEKLKKKHLTGKRREKLRQEWEEKRCGFLYSRGDKSKEGNLNLRLVNLNNQWYLRINLGNGEYVWAKVVRSAKREKDKWINFVWDLTQAERTGNWFAYTVRLKLKNGKIYAQISKEENFPEITITKENGVIGIDINAYPFHLALAYTSRDGNLEKYERISLNGLLDGNADKREYLSWQIAHQVVEIAKREGKAIVVENLEKIPKGRRGDGMPKLRQKLQKWIYKGLLEKIEVACKRNGVQLIKVNPAYTSVIGKLKYAPIYRIDKDVAGAYVIARRGLGFKESLPKNYRKLLEDKEFLSYSVARVEDRIAKLKKEMEEEKNEYKRNKLKSELRRLKRELKLLLKFLMDSGKSESATQQTANRKMEQLRGSTQVGQKSWRVLSVAFAFSCLESFRDFSPLKRVILSGDWVGVACRVSPSFLGQGTTAQNMCSFIHFG

SEQ ID NO: 55210 - protein, 401 aa, Bacillus sp.
MEVKPMYRTMKVPFSASAVTIQKLFDIRRLCAVVWNDCVQIARYYYRLGGGWITKSDLQREVKGLYPLHSQTIQAVAHKFLQAREGAQKARKAGFNVSYPWRHKFVFNPKWVGQSFTLQGKNITLSLGIWNGKRQPRLTLKLSKVPPENVKEVELVYEQKWFICLSYETNIEEESPKQQGITTSIDPGEIHTIASVTKNGDSLVITGRYLRSIHRLRNKKLKELQKLMSRCQKGSRQWRKYNRAKKYVLSKSEEQLKDALHKTTKQFVDWCLQHDVNSVIIGDVEGVQRHTKKKRSKKMNQKLSNWSFGKLYALLVYKLKARGMTIEKVDEHFTSQTCPVCGNRKKGSHRTYQCQCGYKEHRDLHGARNTLTKQLYGKMIYYPLHDPIYLRPTYLQPAVSA

SEQ ID NO: 55211 - protein, 415 aa, unknown
  TnpB Polypeptide
MPHFYRTEILKIEPQPIFPEVNAASADLWNGCLTLMDFYQYQRGYPHAHRDFYFGKDCAGWIDKQLSDPLLHSQSRQAVVQRYFKSWKSYSALKKSGGIQKPKPPNKRQNYMTTRWKKSAITFVESSLCGNRRVQLSMAEGQPKIDIPLPKNFDMTRAAHITTIDLCYNHGQWTLHFSYKYETETTEIGEEVVGVDIGEIHPIVSHDGQDTHIYNGRYIRSLYRYRNKVLAEFSQTISRCKRHSKRWWRLTRRKWKRIRKIDNQIKDALHKQTTQFVKYCQVKGIGTIILGDLTGIRNTINYGKRANQKLHQWAFGKIAELITYKAKALGMKVKVIDESYTSQTCPKCGNRKKPTNRNYTCPCGLKYHRDGVGAINIRQKYLGHFGVPVVADMDKRAMKMTPPLGFRLKVPVTSS

SEQ ID NO: 55212 - protein, 312 aa, Bacillus sp.
MKKEFVWLKEVDSIAIQSSVRNLADAYTRFFKKQSSAPRFKSKKRNVQSYTTKQTNENIAVVGNKIKLPKLGLVRFAKSREVKGRILNATVRRNPSGRYFVSLLVETAVLELPKTHSYIGMDVGLKDFAILSDGTTYKNPKFFRLLEEKLAKAQRVLSRRKKGSSRWNKQRIKVARIYEYIMNSRKDYLDKISTEIIKNHDVIGIEDLQVSNMLKNHKLAKVINEVSWSKFRAMLEYKAKWYGKQVIVVSKTFASSQLCSYCGYQNKDVKKLKLRKWDCPSCCTHHDRDINASINLKNEAIRLLTARAAGLA

SEQ ID NO: 55213 - protein, 421 aa, unknown
  TnpB Polypeptide
MADQVVTRTLKASVSNHSQVGDDLDSHGFAASKLWNVGRWTISRVWDAIGHVPDAEELCSYLKTHDRYADLHSQSSQRVLQELGEAFVSWYEQDDPDANPPGYRKHGDDHPRLTVTWKNQGFKLDTKYNRVRLSKGTNMKESRYAADYMLCEYRLQTDDGQTLADVESVQTVRAVWNGDKWELHFVCKMRVETPETPGETTAGVDLGICNTAAVSVGDETLLYPGNALKEDAHYFRRDEYDTEGENGPSSRAEWARQKKSRRQDHFLHALSTDIVQQCVERDVRTIAVGHPKHIRDDEDWGRHGNKRLHDWAFETLLSHIEYKAEDRGIDVERVDEAALKTSKTCCVCGTEADSNRVERGLYVCEDCGLVANSDLNAAENMRTTVTPNPSQDRSNGCLAQPSVRLFDTFTGRVRPQEQVVS

SEQ ID NO: 55214 - protein, 253 aa, Lactobacillus sp.
VSKVIKGIKLRLYPNQSQREQLWQMFGNDRFVWNQMLGMAKERYQNNPNSLFVNEYGMNYLLKQLKCEYAFLRESDSTSFLVVNHNLAQAFKMLFRHRGGYPHFKNRHSLRQSYTGRSTCKVLARRRMQLPKLGSIRTSRTGLVGDAKIKRYTVSYEPTGRYYLSLQVETEVNQLPETRQSVGLDMGLADLVISSDGVKYGTFNAEWLEKQAVRWQRKYARRRYLAQCQVWKWNHNRFDHLEELDDYSNWQRA

SEQ ID NO: 55215 - protein, 375 aa, unknown
  TnpB Polypeptide
VAVLSYRYRIEPNKTQAALLAEMLADFCGLYNCALEHRIKAYEKGVSVRCNDQITALPAIRKDLPNQGRWSATAQQQVFRKLDKTFKSFFGRCKRGQTPGFPRFRARDRYHAADFRVGDGLTIRKNRKLGFVGIPGEIKVRWHRELPSKPASAILSRNAGKWYIIFHVEVEAVDRASPDSVGVDLGLTSLLALSNGETVARPNITKRNAAKLRRLQRALARCKRGSKIRRKRKAAAAKLQAHIGAARRDFLHKESRKLVNRFGRIAFEDLNTKGLAGGMLAKHVYDASWAQLTAMTSYKAANAGGEVVMVDPRGTSQTCPECGTVAKKTLAERTHRCSCGCVLDRDVASAMVVHQRAFGRSPGMGVGSLIERVAA

SEQ ID NO: 55216 - protein, 342 aa, Moraxella sp.
MWNYVNDLSYKYLQRTGKFLSAYNLNDYTKVSGEYLGLHSQTIQAINETYAKSRKQFKKAKLNWRTNNPKAKRKSLGWLPFKQSAIKHIATHQTGKKDLKSTLQLSLTKGQKPVIDLWDSYNRSLYQINTCQIVQDSRNLWYACLSVKDYPKQSCGTGSVGIDLGLKDSATTSNGDKLTIKQTQKWAEKLSIAQRAGKKKRVQAIHAKIKNTRQDLIHKFTTGLIKQNALIVVGDVKSNQSNNKKDKLAKSVYNASWFELKRQLDYKCKYSGCRLQIVNEKYTTQTCSCCGDMSGSPKGRAGLGIREWTCAKCGTRHDRDINASRNILAVGLDRLVEGIPER

SEQ ID NO: 55217 - protein, 258 aa, Moraxella sp.
MMFRVFPPSKYLDINKPPLKTSLRVVLNTQHSKRKLTSNRLNLTKVLLSTQTVSFLLPKANSRLIFVGLGICQASQVPSQSLKTVQDDIFVSYLYEFDNQILPKSDAVVGIDVGIKHMFVTDSGLTIDNPRLAAKYATKLAKAQKALSRKKLGSANRAKARMKVARIHAKILDCRLDNLHKLSRKLINDNQVICVETLRVKNMIKNPKLAQHIMDASWGRLIQQLEYKADWAGRSLVKIDQFFPSSKRCCNCGYTLLF

SEQ ID NO: 55218 - protein, 396 aa, unknown
  TnpB Polypeptide
MKLTAKLKLELDLEQQQLLLNTIRETNILCNRISQLAFKERKFGKSSLQKEFYHKLRKKYPQLSSQIFIRSFAKVAAAYKNNKRTLVKFRFNGSIAYDARLLSWMEDDDKISVWTLNGRQPIRFVCGEHQQNMLGGKIGESKLLLRKNKFYLHVSVEVKESEGFESQGYLGVDLGLAQIAYDSDATAFSGEQIRAVRKKNVHRRRQLQKKGTKSCKRKLKERSGREARFRNDVNHVLSKAIVKKAQRTKRTIVLEDLSGIRNRVRASRELRRELHSWAFYDLRKKIEYKAKRDGVEVLFVDAAYTSQTCSQCGYCDKRNRKSQSVFVCRECGTQSHADLNAARNIAEKGRQLVIKRERALFECEDDGRVAVNQPNGGVVVSEANDEASSVVQLKLF

SEQ ID NO: 55219 - protein, 306 aa, unknown
  TnpB Polypeptide
VGWPRFKSRNKGIGGFRLTGTIQIHTKTIQLPRPGKLRLKEHSYLPVGAKVAQATVTERAGRWYVSVQIEREVGEMPAGHDAPIGIDLGIKALATCSDGTSSPNPKALRTCLKQLRRASKRVSSKKKGSKNRAKARARLARVHAKIANLRKDSLQKTTTAIVTKATSNGQRASCVVIEDLNISGMLKNRRLSRAIADVGLYEFRRQLIYKLEAAGIPLKVVSRWYPSSKTCSACGWIDEDQQLSDRTFVCRQCGLVLDRDENAARTLAQAAYEDGLPPVRRELTPVDIVSDLGNKATVVEAGTEHG

SEQ ID NO: 55220 - protein, 405 aa, Actinomadura sp.
MTQRVQMTFRYRFHPTAEQAEQLGRTFGCVRLVYNMALEARIRALQDGRPLTYGETSALLTVWKKKDEFSFLRDVSCVPLQQALRHLQAAVGNFLAGRARRPRFTSRRRSRASAEFTRSAFTYCDGRLTLAKMRSPLRIVWSRPLPEGAEPSTVTVSRDAAGRWFVCLLCHVTVRPLPPTRQVIGLDAGIAALVTTSTGEKVRNPRHERSHRRRLVKAQRALSRKLPGSANHAKARLRLARVHAHIADRRRDHLHKLTTRLVRENQAVVIEDLNVGGMVRNHRLARAIADAAWRETRSMLEYKCAWYGRELIVVDRWFPSSKRCSSCGAVRQDMPLDVRKWTCGCGAEHDRDVNAARNILAVGLAERRNACGADIRPQRETSFRAGDRRRSRNLPSPEEKPSLAW

SEQ ID NO: 55221 - protein, 272 aa, Bacillus sp.
  misc_feature (212)..(245): Xaa can be any naturally occurring amino acid
MIKSIKVMLKPNNKQKTKLFLYANTARFAYNWTIAKQQENYQNGGKFISDSVLRKQFTQMKKLDEFKWLNNVSNNVTKQAIKDACDAYKRFFKGLSKYPKFKSKKKSTPSFYQDNVKIKFTKTHVKVEGFASSKKSNKQKINWIRLAEKGRIPFGENVKYTNPRFTFDGLNWWVSVGIETDSGYSPSKTEGIGIDLGIKDLAVCSDGKVYGXXXXXXXXXXXXXXXXXXXXXXXXXXXXXXXXXXIIFASFWRIDGFQVLSCVLVAEKLKKT

SEQ ID NO: 55222 - protein, 453 aa, Nocardioides sp.
MPIPATVDEAVLVSRTGVRLTRSTTFRFTLDVNQAQHRALLAHAGAARLAFNHQLARVRANLDQRAAERSYGLAEGQLTPALSWSKVALINHMNAWKDGRDASAPVNPDGTRGLAWRGEISADVFECASVNAAQALKNWADSRQGTRAGKAAGFPRFKSRHKTAPAFRLRAKYTEGAASPVRPTGPRAIRFPKLGELHVRESTKQLRRMYDSGRFHAYAASFRFERGRWIVAVTGVAADFHHARRDIRDRHQATVGVDLGVKVLAVIADEHGRVLAAVEGVKALQHAQARLKLANQAFARTKRDSAGRRKAARRLGRVHARVAHLRRNLLHELSAAIAKGHAAVVIEDLNAAGMVSNRMLARVVSDASFGELRRQIEYKTAWYGTTLTIADRWYPSSKTCSGCGQVKTDLTLTDRVYTCPDCGLAIDRDVNAAINLARYTGPATAAPPLPAAA

SEQ ID NO: 55223 - protein, 372 aa, unknown
  TnpB Polypeptide
MKLIARIKLQPTPDQHAALLQTLEAANTACNQVSEVAWQRRVFGQFALHKLCYTDLRALGIPANIAVRVFAKVADGYKLDKTTKRTFKPHGAFPFNDRLVSYNLKKRIVSIATLTSRAKMPFVISDHAAKLLEGLHGECDVVYRKGVFYLYQCCDVDEPPIDDTDGFLGVDMGVANIAVDSDGTIFQGKSMKGVRYRHRQLRRKLQAKGTKSARRRLKKLAGKEQRFAKDVNHVISKHIVAKAKDTARGIALEDLGGIRKRVTARKAQRATLSSWSFFQLRTFIEYKAKLMGVKVVAVDPRNTSRTCPCCGHIDKANRKTQDKFLCVDCGFSGLADYIASVNIGRRALLSVPNVSDVDIDFYPQRQGQALLL

SEQ ID NO: 55224 - protein, 145 aa, Burkholderia sp.
AGKHKRHSATPHAKVANARADFRHTLALDRVRRFDYIAVGNVSPAKRAGTRLAKRVHDASRSSFRDKRRYKAMAHGVTREEGDESGSPQSCSACGSKDSMTRPKGIAGLREREWDCSNWGVAHARDISTALNIFRCGRASPGVHI

SEQ ID NO: 55225 - protein, 446 aa, unknown
  TnpB Polypeptide
VVKRRKMDKTIRQIAHGTAWFKDDSRIVELMKFQCSATRSAYQAIHKHNIKENDIKIYVKKNYMKDLNQRYIADACSSAKGIIHESSLFGGKKLWDRLIKKHISKDEWQQIRNNHLYSRGDKTKNGNPNIRIIGNKIFVNDTSKRGLWIEGKIWIPKKFKLNLECYDVRLIKKNNKYEVRISWEENIPKKIEFQEGMIGIDCNPDGIAVSETDSSGNLLNHFYLKNTRIKDARKEKRDYDIFKMAKEVVNYAIEKKKRISLEKLSFKKENKYRKFNRMSNNFAYRKLLEAIYRRAIKNGIEVINIIPAFTSTLGRLKYQKMYSLDRHSSAALVIARRAQEFKERKDFKVKKDEKKKDVFNLEGRGISIALTQKAWSWLQKDFLKPNTTILTGSNLAADLEESVIRFSMSENLIGESISITGRYGELGNSSLMDNNKSNLLEDGMLP

SEQ ID NO: 55226 - protein, 424 aa, unknown
  TnpB Polypeptide
MIVQKSLKVPIHYDTTKTKIRILDRLTARITYTIQLISELITEDTEINRKTIRKLVKDSDIVAKTGLSSGFVQQCIDKFIWAWKSYHRLHRTWERQAASAEKRVASARDDKELKKRHKSFDKILKREPSIPDFRNKTPCRIDNRTGSIEHSASKLTPLWMHVSTLIKNQTIDVPLNPSQYHLNQLINAEISDFEIVKHSKKYYVHITITKVIEDQPISSIGGIDQGLNKSIAAVLLTEPYPQEEQLLDSAKRELLEKYDEIVSSLQEAKRWAKLRELRNKRENVSVYHDWCLANQVAEFTRGSYIAIGNSHFRQTQVRGNGKPKLRKRIGKWSYGQQRKFIVLKRAERGYPTELRDEYGTSKKCHECQSKLISRKWGEGHSYILCHSCGAKIDADFNAGYNIATQCRDDMLKAGMNMEKIYASL

SEQ ID NO: 55227 - protein, 398 aa, unknown
  TnpB Polypeptide
VLILEYKVRPNSGQQHGIDEAIRTVQFIRNKCVRLWIDTWGTNDMALQAYCAQIAQEYPFAARLNSMARQASADRAWVAIARFYQHCREKKSGKKGYPRFQKDNRSVEYKTSGWKLAPDGKHIVFTDGHGIGTLKLIGTRSIATFPLSQIKRVRLLKRADGYYIQFAVQAERQVDHQPTDHAVGIDVGLKVYYMDSDGRSVPNPRFHRKAEQKLKRLHRRVSRKKKGSNNRQKARKQLAKGYLKVSRQRKDFAAKKASALVTSSDVIAYEHLHIKNLVKNRHLAKSIHDASWGLFLAWVRYYGDLHGIAVVAVPAAYTTQDCSGCGYRVLKSLSVRTHICPNCGLIMDRDHNSAVSIRDAGLRTLGHRETDQGSTLVNASGQTTATRRGRLRSRKSAG

SEQ ID NO: 55228 - protein, 497 aa, Oscillatoria sp.
LVLDSKQDAELRSRFQAARQLYNACLNEAMVRMELLRNSDAYRAAKKIPREQKSERNLAFGDARKQYRYSDYDIQAYATTVANKSKWIGKKVDSNTQQTLATRAFKASEKVLFGLAKKVRYKVPTRFKSVEGKTNKQGIRWKDNQFVWGKLELTPIIDWDNPVILHGLTSKVKYVRVLWRELNGKRRWYVQLINEGVPYQKEKNSVSDGVVGLDLNISHIAFVGDSGAGLLPFAEGVPTYEREIKALQRQMERSRRANNPDNYNSDFEGKRGRKTVLKKGKCKKGKSKWNNSKRYQCVSRKKRELERRKAAYAKSQNRKVVNEILRHGKNIKTEKVSIKGWQKRYGKAIAAKSPGFVQSELKRKAENAGGSFYKFSTQKTALSQTHLNGERIKKKLSERVHRDVTGVVMHRDLFSAYLSRYVDEDDKLSLQDASNSYRGTEPFLVEAWKQYQEAAKRVGESESRKSHSPSERFSRKHRKCSQIANRKKLGRKAAPNS

SEQ ID NO: 55229 - protein, 398 aa, unknown
  TnpB Polypeptide
MRKINRTYKFRLYPNKAQTDLMARHFGCARFVYNYFLNQRIEQYRLTGKSDSCYEQMKTLTTLKKKEETEWLKEVNSQSLQFVIKCLEVAYTNFFQKRTKFPKFKSKRSKNSFTAPQFASISDNRLFIPKFRDGIKCRVHREIRGKICRVTVSKTPSGKYFASVLTEEEYETPLEKTNKSVGLDMGLKDFIITSEGEVFKNNKYTRKYEDKLVRAQRHLSRKKKGSREFENQRLKVARLHEKISNSRADYLHKCSISLIRRYDTICIEDLNVKGMIRNHHLSKSIADVSWSSFIDMLTYKADLNGKRIVKIDRYYPSSQTCNVCGNVNKDIKDLSIREWECPSCHTNHNRDVNAAINILRLGLNKNISAGTVDYTDGEDVRANLLKGQSSMKSEVHEF

SEQ ID NO: 55230 - protein, 403 aa, unknown
  TnpB Polypeptide
MMRKINRTYRFRLYPNNEQVEFLEKHFGCSRFVYNYFLNQRIEQYSLTGKSDNFYAQCKTLTKLKEKEETAWLKEVNAQTLQFAIRILEVAYTNFFQKRAKFPKFKSKRSKNSFTVPQCSSIENNRLFIPKFKGGIKCRVHREIVGKIGKVTVSKTPSGKYLASIFTEEEYETPLKKTNKSVGLDLGLKDLIITSEGEIFKNNRYTRKYEKKLANAQRHLSRKKKGSKGFENQRLKVARIHEKISNSRTDYLHKCSISLIRRYDIICIEDLNVKGMIRNHHLAKSIADASWSTLVSMLTYKADWNGKEVIKIDRYYPSSQTCNVCGHVNKETKDLSIRHWECPVCHTHHNRDVNAAINILNLGLNNLLSAGTVDYTDGEDVRADLSIGQSSVKSEAHKIKTCA

SEQ ID NO: 55231 - protein, 477 aa, unknown
  TnpB Polypeptide
LKKNTKPKNPLVEKRVCQSWLNALSNQEYSFLEKLSLHSSLMYNFSFYQIRQFFFKNRDIYKETGSFGENLQFKENYHICKLNENFSILQNACSQQVVQLAHRDFNSFFCLLKKKAKGEYSPDVKLPKYKKKNGETVLSNIVIQGKGVLLDKKKSALYNDVNVYSINSSKKFKELYPITETAHKFEFFVPKSINKIDEIRIIPYGKAPVKFKLEVVYSVQIEAKKADNQNYLSIDPGLNNLAACFNSQNGASFIFDGKYLKSINSFYNKNASKLQSKIDKNRNANLEFNFLIRKKNKLTHKRNNKINDYFHRVTKYIVEYCVKHDINKIIVGENKGQKKDINIGKINNQNFVFIPHAKFKNILEYKAKSKGIELIREEESYTSKTSFIDLEPMKHQETYLGRRTKRGIFKTKEGILINSDINGAANILRKYLTRIGKFEIWRDLYFKEAIKGIVNYPIKLNLDSLLFEFGFKKINAR

SEQ ID NO: 55232 - protein, 255 aa, unknown
  TnpB Polypeptide
VGSGSLPGCRQVRVKAHRPVVGRVKTLRLKREARRWYVIVVTEQQPVPQPATGREIGLDVGVARFAATSDGEVVANPRFLAAIVSELAAAQRGVTRCRPGSGNRRRARRRLAKLHRTLANQRRDFHHQTARKLIDTCDVIAVEDLAITNMTRSASGTVQAPGRNVAAKAGLNRSILDAGWGQFLAILLAKAEGAGRRVVKVNPRDTSIICCRCGARCARPRQDTVLCPVHGGMDADLNGACNILTRAGLGSGRAA

SEQ ID NO: 55233 - protein, 493 aa, Mycolicibacterium sp.
MTRHTTFKFCLDPTAEQEAALARHAGAARFAYNQCLRLVKCALDKRNVDASVDVPWTAFDLINLFNRWKKTEGAGRVFAVDSRGVVDTIVTGLAWRSDVCQQVFEEAAVDLGRALSAWSNSRGGQRRGRRIGFPRFKKKSAAAPTFRLRNNHRKGMPSLIRLGDENRVRSVRLPGIGQLRVHDDTRPLRRMLAKHRARILFATVSRRGGRWWVSLNVVAAEFHSARQHQPRVEPNRHGGWVGIDRGLSVFLVAATADGKEVDRIDAPPKALATGMSKQRRLAKSLSRKKKGSRNRRTTSARLARHHLHVANVRRHFLHQVSNSLVKTHDRLVVEDLNVSGMLANRRLAKAISDAGWAAFARMLTYKQAWRGGELVVADRWFPSSKLCPQCGVIDCGLTLADRVFACGCGYLADRDTNAAVNLARWSEDRISPDPRTSKQRGRATNARRRDGTDLHLARAGETSLNDAGTEVDTALAGLNRRTPEKGGGDDRSA

SEQ ID NO: 55234 - protein, 532 aa, Desulfovirgula sp.
LILTTSVRLPSDFIGPVKNLTALGVKLQEQALENYWSYEGLGRVAAHSGQIWKLLDTELSRPRGVYVPSRPWRCILESAGRILRSQAERKRIFEHLLPLFTDGAKSAAKKLYEEFKAEGNPEKFGYLLNVAEQLGEFYAEHERPPRDFFEFQRKPEPKRFTYTLAPDDGSENGQAARWRLEGDQLVGEIKLPIVPEPRSKKDWRWLPFSVKLPAELLEKLAAGGVLCAPDLRLKVKPDGELVALLDVKVEVPEEEPSGNSGCALACDWGLRKLVTCTVVSREGQLTPPFFVFWSGLKAKLFRIREHIGKLQGLRDRYEKGSAAWKELNRKIAAAWQKYHRIQHALAHAVSTLLVLLAKIFRCRHIYVEWLVGLRGKKGRGKDLNWWVTTVVRGLLFRLLKYKARLAGIRVFAVPPGGTSRICPRCLDAGKHVVSPGDKTERDSGSWFVCPSCGWQADRDYAGSLNIARVGFSLTRPLSYKVGGAALPFPSRAASAEVFREAMAFTTTLGYVCSVYLANVGCLAKLLDMQSCT

SEQ ID NO: 55235 - protein, 457 aa, Lentzea sp.
MVTVIQAYRFALDPTAGQQAALQSHCGAQRYAYNWGLARIKANLDQRAAEQSYDIPADQLTPPVSWSAYRLRKDWNQAKDEVAPWWGENSKEAYSSGLANLATALTNWRGSLIGTRRGPRVWFPRFKGKRAGVSCRFTTGAFGLTDDRRHVTLPRIGTVRTHESTRKPARHVERGTARIRSATVSYQSGRWFGSFSVEITRADPAATRLGAVVGVDLGLKSLAVLSTGEVVPNPRHLDLAQRELRRLQRQADRRVGPDKRSGQRPSNRWRKTQVRIARLHTRIAHARRDGLHKLTTRLVRGFGTIVLEDLNVSGMLRNRRLSRYIADTGMGELRRQATYKATWAGGRLVVADRWYPSSKTCSDCGAVKTKLPLHVRVYHCDECDLVLDRDLNAARNLVALVGETAGGTSAASCAGTLNKPDGNPCQTHTVWAAGSATGRPSPPPGVGQRRRRKATTA

SEQ ID NO: 55236 - protein, 457 aa, Moorea sp.
MYKTIPVRANFSYEEKAFWEFQCRQANSLFNCAVYYAKQKQYKWLEEQEAFTTYWRDDELRAGWKTYKCSIKYPEIDKALKMSPHYKGMAAQSAQQTLKTVGEAIASYNKLVGLYYQGKVDRPRFPRYRKSGGMAFVTFPKQALSYKEGLFYPSVSKESKPELLTQIALDPPDFIDPDWVKEVTIRPCYGQLWIDWVIDDGKQPLTTNPNLDYSHALGIDHGGDNWLTCVSTLGKSFIIDGKKLKAMNQGYSRLVAKYKSGKSEKYWDSNLDRIQLRRNNQMRDAINKAARFIINRCLNDGIGNIVIGWNEGQKNRSNMGKKSNQQFVAIPTKRLIERLKQLCSEYGTNLIITEESYTSKASFLDSDSLPNHGEKPNGWRSSGKRVRRGLYRTASGKLINADTNGAANIIRKVTTQSFDLTKVVRGALTLPHRYDLFTSLSKSYRNKGGAVRVHPTA

SEQ ID NO: 55237 - protein, 377 aa, unknown
  TnpB Polypeptide
VEKGIKFRLYPNKKQQILINKTFGCCRFVYNYYLAKHIELYKTEQKFMNYNASSADLTKLKQEKEWLQEPDKYALSNSLKDLDTSYQNYFRRIKQNANKVGFPKFKNKHNYKQSYRTICNYRKNSVPSIEIKDNKIKLPKLGLIKYTKSQEIQGRILNCTITKTKSNKYYISICCTDIKIKKYEQVNNIIGIDLGIKEFATISDGEIIENPKYLSKLEKKLKREHKKLSKKKKGSKNKNKQRIKLARIYEKITNRRTDFLHKLSTRLIKENQIICLEDLKIKDMVKNHKLAKSINDVSWYEFKRQLLYKGQWYERHIILIDQYFPSSQLCSDCGFKNIEVKNLSIREWICPNCGEVHNRDINAAINIKNEGLRLLSV

SEQ ID NO: 55238 - protein, 380 aa, unknown
  TnpB Polypeptide
MQCNKYSAIIWNNCVRADQENRKDNGKSLTRSELQFMMKKLVPHILANSINFTILKYVTARDAMWKSIKAKHKYSNKVKLPYKEKKFYNTGWTYQNIKICKDKGYLTLAKPVLADEQDILRKQKPIKCHMKNIPENIVEIELIYRNGLKLAIKTKYENDNILIQSENEASIDLGEIHSITSIDNNLNAIIITGRKIREVKQLRNKHLSKLRSRRSKCTKYSRQYKKYSKAIQKLKYITDKKILDIVHKTTKYYLDYCIRNNIRKVYYGDLDSCIRDTKKEKRGGKKTRQKLSQWNYGQIVLQLINKLSRYGIELVKVKEYYTSKKCPICKTLNSPKGRNYICDNCNYSIHRDINGAINILNDNSKYNISKYKTLKYLQIA

SEQ ID NO: 55239 - protein, 313 aa, Clostridioides sp.
LTNLKKELKWLKEPDKFSLQNALKDLDNAYKKFFKEKAGFPKFKSKKINRFSYKTNFTNGNIMYFSQHIKLPKLGMVKIRDKQVPQGRILNATISKEPSGRYYVSLCCTDVDIEAFENTNNQIGLDLGIKEFCISSCGEFIENPKYLKKSLNKLAKLQRELSRKTIGSLNRNKARLKVARFQEHIANQRNDFLQKLSTKLIKENDIICIEDLQVKNMIRNRKLSRLISDVSWSEFIRQLEYKANWYGRQIVKVGKFFASSQICNKCGYKNEEVKDLNIREWICPSCNETHDRDINASINILKEGLRLITIQNK

SEQ ID NO: 55240 - protein, 392 aa, unknown
  TnpB Polypeptide
LNKAFRYLLYPNREQAEAMASLLNTHRHLYNSALAERKSSYETQKRTVGYQEQSAHLKTSRKENPDLAVANFSSCQRTLKRLDRAFQAFFRRIKSGETPGYPRFRGYGRFDSVEFTHDDGAKLTTDGRAYFQNVGEVKVKMHRPVEGKLKTVTFCHQAGRWYVVFVCDVPDVEMEPSEKPAVGIDLGLKSFFVTSDGEEVKPPKFYRKAQKKLRRVQRAVSRKRKGGRNRRKAVQHLARVHQHVGNQRKDWHHKTALSLVCRYGLIAHEDLNVKGIARTRLAKSTHDAGWSQFLGILSRKAESAGVRTVGVNPRNTTQTCSNCGRLPAVSLQLSERMYHCAFCGFQADRDFNAARNILSGIYFQEYTLQGGDTAFGSQRRPVGHAFPKKPAP

SEQ ID NO: 55241 - protein, 258 aa, Okeania sp.
MRTAYQYKLRPNKEQLATIEMWLELLRWQYNYRLGERFSWWEENRCPVNACPLVMPIPQLREIPDYYSQKKDLVNTKDKFPEYKLIHSQVLQDCIKRVKLAFDRWLKTDKNGDKLGKPRFKGKGRYRSFTYPKIKLDCIEGNKINLPKIGKVKLIQHRPIPEGLIIKTVTISRKADGYYVTLSLEDKSAPAFTTKVEPTLKNTLGIDMGLKEFLVTSKGESVSIPQYYRKSQQQLKSLQQRLSRKKKEVKGGLRLLKL

SEQ ID NO: 55242 - protein, 299 aa, unknown
  TnpB Polypeptide
MVSRKGYQFRIYPNKKQEIFFTKTFGCVRFLYNHMLDDKIKYYEETKKMKQTTPASYKKDHPFLKEVDSLALANAQLHLEAAFKKFFKETDIGFPKWKSKHQAKQSYTTNMVNGNIRLFSTIQNQTTYLRLPKAGDVRIHMHRIPQGILKAVTISKQQDRYIATCLFEYENKVERKEVVHVLGLDYSQKHLYVDSEGQVCDYPHFYCASEKRLAREQRKLSKMVKGSNNYKKQRNKVAKLHAHVAQQRKDFLHKESRKIANSWDMVVVEDIDMKAMSQGLQLGKNLMDNGFGTLRNYLR

SEQ ID NO: 55243 - protein, 335 aa, unknown
  TnpB Polypeptide
LNVIRQKHHSTPFHIIDHEHRFVSMQHLDGFFKLRDQIDYRALPAQENQNVLHMLYRDWKSFFAALADYKAHPDKYEAVPHIPRYADKDGYKPLIFTNQICKLRKDKHGWYVKFPKAVLQTGCIRDRYDLGRMDLHEQKLKAVRLIPNEDTIKLEIVCEIEIKEPAIPIHEATRVAGIDIGVDNLTAIAFTSGHRPVLIKGNEIKAVNQYYNKQIAHYRSLLRIGKKDSKGIHQTKRMKRISEKRNRRVKDILHKASRKIIDLCVEEGIEVIVVGNHAGWKKLKKIKRGLYRSKNGILMNADINGASNIIRKVYPCMPKRERWSRGTVNVPVTCI

SEQ ID NO: 55244 - protein, 436 aa, unknown
  TnpB Polypeptide
MQIQKTIKFKVGNLSNTKKERIDLVLQKSLSCLKDIIQISIINNTTSNKKLHHLCYKDMRKKYKLPACVIHQARNKAIEMLKSWKKLQRIQKKNLLPPNPQALRIRYDNVVFNILKIESKKFEYFVSFLVNSGYKKDKSRIYIPLIVNSKFQKEYIKDLVNKNYKLCSSDLVKKDKDYFIHITFSKETNLPKLNSSFQPIGIDVGINNLAVVSVAQQKNPVKFFSGKRLLWKKKQLNKLKQKLQKDCNERLLEKVGLKEQRYVNQLNNVISAYIIERAKELEKPVVVMEDLKHILETTKVRKKQRYNHITWAFKKLQDMIVYKANWEGIPVVFINPSYTSQICPKCFSTNKRVKHLYKCSHCGYQANSDFVGSVNIGKKFFEFIQFKEQASINNALNTTCSESKTLKIGSVQNSIKLENVSPPNPKGMGIRNIEIL

SEQ ID NO: 55245 - protein, 366 aa, unknown
  TnpB Polypeptide
MKYKAMKYRLYPTKAQAAQMAWTLETCRHVYNSLVNDRKCQYEVSGKAPTWLEQKRAITSWKPAHPELSDVYSQVLQDVSKRVDFAFQAFFRRVKDGETPGYPRIKGDGYDSFTYPQSGFGFHQGKLRLSKIGDVAIRLHRPIDGTLKTCTIHCIRHKWYACFSCEVGPELLPPSEEQVGIDVGLKTFASLSNGENVENPRFFRRDEKALAKAQRKLAKQVRGSRKRRKAKQVVSRIHERIHNRRHDFVHQTARRLVNHYGVIAVEKLNIKGMVKNHCLAKSISDASWSMFRAVLTTKAESAGRQVVAVNPAYTSMMCSGCGDIQKKSLSVRMHRCLVCGLVLDRDTNAAVNIKTVGQYSLATRVA

SEQ ID NO: 55246 - protein, 455 aa, unknown
  TnpB Polypeptide
MKQVTVAVKLRLHPNLLAISCLDDQSRKCNSLYNKVLERANQLKDQFKKTGDLESSKILYSPRGLRNLVPGIKEEYPYLKSVYSAPLKNTALRVTDAIKAYQQSRKGKRAGAKTGWPGFRSWSSSWFSLLYDEPTKGYRFEGNNLVLSLGTGIEKKRHSLMVPISDIHALEGKEIRNLRIVKESGVFSAVVTVIRSLPETKPIKKILALDPNHKNFAYGVDNEGKAVEIAAPFWLKAFDVRLDELKSKLDRCKKKSYLVPVVDIQGAIVKQRWQPSRRYAKIAAVYAKTLTKRRELTKLFCYRLASYFYKHYDLVAVGDYTPRGNGITTPMRRAMNNRSLIGRFKEVLSWVALKSGKSYHEFAEKGTTRTCHACDFIVPNGLAPHIRQWTCPSCSAHHIRDENAACNGLRKTLRDLSLKSKELSLPVPSSGHVLIQERWAWRVLSSGALCIAGIQ

SEQ ID NO: 55247 - protein, 356 aa, Lactobacillus sp.
  misc_feature (310)..(338): Xaa can be any naturally occurring amino acid
MPIKTHKIRIYPNDEMVTVITELMDYNRFCWNKGLAAWNDMYDASLAVADKKLRPSEYKVRDELVKNKTDWQHQFSARVLQTAVHRLHQAWQNFFNPAMPDAHKPKFHHKRDPKQSFTTDRAVITGKYLTLDRPHAASHRFSAIKMAETLRFTGEIKTVTITKRGKKFYASVNALIEDTPRPAFYDCWDIVGIDVNVGHIRWNGGDVNTFTPRMAALHQRIKYYQKCLNRKRRRNPGDYRSKTYQRIKAKMNRTYEQVHALQDDLIHKFSHKIIKNYPVPCLEDLDVHAMMMDGKKVKGLQRGLFRRLRXXXXXXXXXXXXXXXXXXXXXXXXXXXXXLRLYQERRKLWRQDDASR

SEQ ID NO: 55248 - protein, 355 aa, Peptostreptococcaceae sp.
VQNKAYKFRLYPNKQQQELINMTFGCTRFVFNRILGDAIKYYEENKKTKINTPATYKSDYPFLKEVDSLALANAQLQVKVAYKNFYNGSGFPKFRSKKNNYQSYTTNNQKGSVRIESSKIKLPKVGFVKIKLHQAVQGVIKSVTISKNPSGKYYISILTQQEIAQLASIDKKLGIDLGLKNFAITSDGDIFENPKFLRKTEKQLTKAQRELSRKKKGSNNRYKARLKVAKLHEKIANQRKDFLHKLSTKLIRENQTIVMEDLSVKNMMKNHKLAKAISEVSWYQFRLMLDYKSKWYGREIIIAPSNYASSQLCSNCGYKNTDVKDLKIREWKCPSCGSVHDRDINASKNLLKLAM

SEQ ID NO: 55249 - protein, 354 aa, unknown
  TnpB Polypeptide
VTTSTNSDGLPQNSGTSVATTHKKWDETGEIPDDGELKAELKGHERYTDLHSQSSQRVLEELAEAFNGWFGKRRNGDDRARPPGYRKHGDSHPRSTVSFKAAGFKHDTQFTRVRLSKGRNLKEHRSDFILCEYQTRQDIDLTEWDIQQVRAVYKRDEWRLQFVCRTTIDPEPPGDEVAGVDLGICNFAAVSFGGESLLYPGGALKEDEYYFTKKKAKCDDSSSREATRLDRTRTGRRTHFLHALSKAIVEECVERSVGRLVVGDLGGIREDDENGEPRNWGDHGNLDLHGTGGRSTASQRFSTTRLKPRVSTWSWFRNEIRRNRVRRVVTRMTISALNADYTCAMSAIRLQTRM

SEQ ID NO: 55250 - protein, 443 aa, Lactobacillus sp.
MTKKTKNVPRNSTQYTHLCSEYIIPASNILDKISYKAYDLYNRALYDLRQGLFHKQYVKGYEQLDSMFKKRYKARECILYHELGYVQSAQQTLKEVNMIWQAWFKANKAYQKNPGKFTGKPRMPKYLRKKERHTFFVTNQNAKVKDGYLTIPKLKIKVELALQVKKIQRVAFKPIYGGYKLIVQYKINKEINYLPDNGRYIGIDPGVDNAFACVSNTENMPLLINGRNLKSVNQYYNKERARLKKLQAQYHQLESIINTKQGPKPVYQETKAMKRLTVWRNDKIRQFAHKASKRIVNYALSCEANTIVIGNNKSWKRSSNMGKKNNQNFIGIPHKVMIEMIQYKANLAGISVIRTNESYTSQTSALDNEKPCWENGNKNRQRQGKSPVNRRIKRGLFKTNNGTLINADINGAMQIIRKVFPKTSFVNGIAGVVLRPVKWTALI

SEQ ID NO: 55251 - protein, 433 aa, Streptomyces sp.
MQLRYQYRAYPDSSQRGALARAFGCARVVWNDCLRARQEAHAAGLPYVRSAELSRTCITQAKRTAERSWLADVSAVVLQQSLRDLDAAYKNFFDGLRSKRQGRKVGPPRFKSKKDSRQSVRLNSNAFSLTGNGRVYVAKVGSIRVKWSRPLPARPTSVTIIKDSSDRYFLSFVVDADPDVLPETETETGIDLGLSAFAVLSDGRKVESPRFLRRAEKKLKRLQRDLSRKKKGSKNRAKARIKVARQHARVADRRRDFHHKASTQIIRDSQAVYVEDLAVSGLGRTGLAKSVHDAGWSAFVGMLKYKAVKCGRTFVKVGRFFPSSQVCSVCGFRDGPKPLHVREWACTACGAVHDRDHNAARNVLSEGRRIVAAGRAETQNASWSAGKTGTRVPAQRGEAGSPRKARAGALGPQSRGARQRRNAFRDMAVTPVN

SEQ ID NO: 55252 - protein, 420 aa, Clostridia sp.
MRLIFQYTFKPNLIQKEIIEDIMWHCEKVYNTLNYDIYRGKEKISLEKSLNIQSSKIYKKYRKENWHSKYLHSHTLLEIILNCVSDHKSYLALKEKYNNRDKNIKGEPKKPKYKNLGKIQITFTKYAIRLEGNKLKLSISKEMQEKFKVKSLNFLIPKKLKKLINFSAIKMIKVRKDKENKYKMEMIYEKEEKAKEGTNVMAIDLGLNNLATCTNMNNNETLIIAGESIKSKIRYYNKEIERLERIQMKMVGSKKYKNTTQIEKIYIKRRKYCNTYMHKASRMIVNYAIENECDRIVIGNIKNIKQEMKNNKRFVEMPIQKLVQKIKYKAELEGKEVIFIEESYTSGVSSIDKEEINRENYKKARRIKRGLFKTNTGKIINSDINGSLNILRKYVKSFSPNLEIAMDIGREQRPLKKRVA

SEQ ID NO: 55253 - protein, 400 aa, Lentzea sp.
MLVKRAYKYRFYPTEQQQRQLLRTFGCVRLVYNRALQARADTWGREQRTVNYAETSAMLTVWKKSSELTFLNHVSSVPLQQTLRHLQSAFTSFFNKRAKFPRFKSRKKSRASAEYTRSAFVWRDGRLKLAKMDQPLSIRWSRPLPEGATPSTVTVSLDPAGRWFVSILIETGVSELPRSRTAVGVDLGVTSLVTLSTGEKIGNPRHEQLARVKLARAQRRLARRVKGSANRAKARRAVARIHAGIADRRRDLLHKLTTRLVRENQTIVIEDLNVSGMLGRSRLARAISDAAWSEFRTMIEYKAAWRGRAVVVVDRWFPSSKICSGCRLLLDSLDLSVRTWTCTGCGTEHDRDINAAKNILTAGLAVAACGGDVRPTRHQSARRSPVKQESRSARVEVPCP

SEQ ID NO: 55254 - protein, 286 aa, Clostridium sp.
LKILVLGYDKYYKKIGGKPKFKSKKNEIQSYTTKLVKAKGNVNIEIVGKRIKLPKLGLVKIENSRNVDGNIKRVTVSRTQSGKYFASILCDVNIQELPKIDKKVGVDVGLKTFAVCSDGYEEANPKHFRKAEKRLIKLQRDLARKEYNSKNYHKNRIMIAKLHERIANQRMDFLQKFSTKLIRENQSIAIEDLRVSNMLKNHKLAKVISEASWSEFRRMLEYKAEWYGREIVIAPPDYASSQLCSECGYKNIEVKNLGLREWVCPECGTHHQRDLNASINLEKLIA

SEQ ID NO: 55255 - protein, 485 aa, Haloferacaceae sp.
VRPRSHRDTLLLLELLDASAACNNQVNYDRRQTLFTTQDNADTRVPVNKLKSTVKQAVTQEEYRQQYIQTLGSAAPQQVVQKNWEPWKAYFAILSKYRDPNNSKVTERPSPPGYWKENGTRIPRTVIRNDQYTLELGDRSRLEIPVGMDLKEKYGLGYQERLRLEVAGQPRWTGKQGRLEIVYDRDTETFTAYRTVGDEDNPPRRRDSYQPTSLATTTSGNKVVAAVDIGANNLAAATTTEGDHRLYHGRPAFRTFHAHTERIAELQSRLPDEIWSSEQIRNLSQTRSRQRNHAMDALIRDLGEWLTERNVTELIVGALSDVREKHWSATVNEKTDLFWAHGRFRRRLSNVLEFEYGITVTEKSEAGTSSECPACESADVHRSGDLLQCHSCGREGHSDIAGSTNFLRKHAAESIDIETNGSMARPVAAGENTKADGHHISVPCLEWNDHTWTGKHAGHSIKKEPTNQSTTQSARGNVAPGVSDD

SEQ ID NO: 55256 - protein, 396 aa, Microbispora sp.
VALRRSYKFLIRPTSKQDAALSACLEDHRQLYNAALEHRRTAYAKARVSIRYGDQSGELKHVRADDPGGQGRWSFSSQQATLRRLDKAFRAFFDRLKAGRTPGFPRFKGRGWFDTVTWPKDGDGCRWDSQPEHPTATYVRLQGVGHVRVHQHRAVRGQVKTISVKREGSRWFVVLSCDEVPAEPLPATSAVVGLDVGVASLVTTSDGEHLANPRHLQSSADRLRAAQQDLARKKRGSKRRRKAVARVAALHAKVRRQRLDGAHKTALALVRAYDVIAHEDLRIANMTRSASGTIEAPGRNVAQKCGLNRSILDAGWGVFLTVLAHKAESAGRELIAVEPRNTSRTCARCGHCAADNRLTRAEFRCVSCGHAAHADVNAAKNILRAGLALRDAAEAA

SEQ ID NO: 55257 - protein, 251 aa, Clostridioides sp.
MYFSQHIKLPKLDMVKIRDKQVPQGRILNATISKEPSGRYYVSLCCTDVDIEAFENTNNHIGLDLGIKEFCISSCGEFIENPKYLKKSLNKLAKLQRELSRKTIGSLNRNKARLKVARLQEHIANQRNDFLQKLSTKLIKENDIICIEDLQVKNMIKNRKLSRLISDVSWSEFIHQLKYKANWYGRQIVKVGKFFASSQICNKCGYKNEEVKNLNIREWICPSCNETHDRDINASINILKEGLRLITIQNK

SEQ ID NO: 55258 - protein, 447 aa, Micromonospora sp.
MAVQLRYNYRITPDAAQRTALAQAFGCARVVFNDGLRLRQQAREAGEKYISDGDLSKLVITAAKASEDRAWLGEVSAVVLQQALADLNTAYRNLFNSLSGKRRGRKVAPPRYRSRKDNRQAIRFTENSRFKVCDNGRLRLPRIGDVPVRWSRGLPSDPTSVTVIKDTAGRYFASFVVRIGEDETLPPVDSEIGIDLGLTHFAVMSDGTKVTAPKFLRRAARKLKRLQQALSRKQRGSNRRKKAVIEVARAHARVADTRRDWQHKLSTAIIRENQAVYVEDLCVVGLGRTRLAKSVHDAGWAAFTGMLEYKAKRYGRAFARVDRWLPSTRMCCDCGRINEKIALNVREWDCPCGSHHDRDINAAINIKAAGQADFNDRRAHVRPGLVPAVRSEAVTHPDAACSTRSVEGISVLQLQGGEDVKTETHIYRDGSLCGVIRRSAVCSAKRV

SEQ ID NO: 55259 - protein, 380 aa, Lentzea sp.
MKVVVQVRLLPCAAQAAALVATLHACNAAADNASKMAFERGVSSRNDLQKLVYGDMRAAGLGAQAAVRTVKKVVDAYASVHARIRIGSLAGPGKAKAESKAIRFREDAAQPFDDRMLSWRYDDQTVSIWTVAGRLKGVRFAGHPAQLAMLVAHRQGESDLVFRGGKWLLIATCEVPEPEVVPPTDWIGVDRGIINLATTSDGENFQGRRLRRYRRWHARKRAELQARRTRSATRRLRRRVRREHRHVTQVNHEIAKKLVAVAQRTGRGIALEDLSGIRDRVRPRRDQRATHSSWPFRQLGAFIEYKAKRAGVQVITVDARHTSQMCPRCGHTARNNRLNRDCFRCRQCGLAGPSDHVAGINVRDRARSVWVLVNVPEPAA

SEQ ID NO: 55260 - protein, 400 aa, Massilia sp.
MLMAHKIRLDPNNVQVTHLARAAGVARFAYNWALNEWGCLYQAYLVDPALPKPTEAALGRKLNAIKRIEFPWMLEVTKCAPQMAILQLGRAFSNFFAHRARYPKFRCKGRDDRFTLSNDQFQVKDKRIRVPKLGWVRMCERLRFTGRIVSACIRRVADHWYASITVDVPERAHRPPSENQGAVGVDLGVSRLATLSTGETFTGPKALRHSLQRLRRLSKALSRKVKGSRNRVKAKRKLGRHHARIAAIRHDGLHRVTTNITRRFHTIGVEDLNVKGMVKNGRLSRAIVDMGFAELRRQLEYKAEWCGGQVVVIDRWYPSSKTCSCCGTRIDTLYLAQRQWCCAACGTTHDRDINAAINLRDMAVSSTVSACGGEGTGLVSEHKVKPALVKQESIGKASFR

SEQ ID NO: 55261 - protein, 467 aa, Massilia sp.
MNLAERAVSKTYLPHTWRDMLLAHRIRLEPTPAQRDYFARAAGTARRVWNWALAEWNRLAASGQRPDAMRLKKHFNAIKYAHPDWLDDQGNPWLRTVHRDAHAQPFAHLARAWSRYFEARRTGEHARPPRFKKKSRCRDSFYVANDQFRIEGKIAVLPRVGRVSLSETLRWPGKIMGGSVSREADDWFLAVQVDVPDDVGRCRRSGSGVVGVDLGITAAATFDSGYKVAAPRPLKAALRRLRIRSRRQSRKHEAAKALAGIDVGGTKGWTLPKSKNQTKGAKALARLQARIARVRRDFLHKLTTRLCRENQAVGIEDLHVKGMLANHRLARSIADIGFHEFRRQLLYKAQRYGTRIVVAERWYPSSRLCSGCGAKNSKLALGERSWTCGCGARHDRDVNAAINLQRLATAALGVETALPVASQALTPGTAAGTVPAAGGKVTPARHEHGQQDGSGQEENAAHLRARF

SEQ ID NO: 55262 - protein, 395 aa, unknown
  TnpB Polypeptide
MQTVLDSLCDYRRYCWNQGLELWNAMYEARLIGLSVELRAKIKASLTDKSIKFSEEEQALRARFPAPSQNLVQNELVAQKADWQYELSARVLLLAIKDLTVAWNLFFNNQKNANKPKFQSRKKPKQGFKTDRARIINGRLILDQPHAYKGEWSSIRFKGANIPDGNLKLCAVTRTKGKYIATITIDVDTVTLPKTGKKTAVDANVDHFDTTDGQTSLKPEVLDPLYERVRIYQRQLARKRKVNKNYRHSKGYQATRAKLQATYERIRNIQNDLLHKFTTDLYRQNDTVVIEDLDVKGMQMKKKAKNLHRSLFGRFRQFMEYKAEKFGKTLILADRFYPSTQRCSHCGHIKTGDEKITLSGNAKHGTKHHEYVCYHCSHEDDRDHNAVLNLLALAK

SEQ ID NO: 55263 - protein, 514 aa, unknown
  TnpB Polypeptide
MRSQTPSYVVSTKLYLPESVAKLLEKSFRISNSAYNEALSFGLNRFEALKRNSHYQELLEALRLARKGIAQLEKAEKTAKGLKQQVKCYNKALSELRKAYSLTEYGLSAHLSQQRRKQGSPYQQFNAGEIQVIAGQAMKTLEKVIFYQIKPHKVRFRSKFDLDVSFRNRVNTTGTRLEPSNRKDMAYRLYIHKASTFVDIPVKAFNKYQQLSLLRSEKIKYVQIIRKTIRGKKVYYLQIVCQGFPPSKVTKGEGVVGIDPGISTVAFASPSEAALVDLVPKNITRKEKLLKQLDRRIERSRRVNNPECYDARGKIKKCARFKRPSNRQMRLRNRRRKVYRSLSEERKKIQGQLVNRLVSQASHIKVEELNVKGLQKRSRDIRINPMTNRPYSKKRYGKAIFRAAPSTLRVALETRAFQLGIEFEVISPKDVKPSQYNHITQTFEKKPLSTRVYDLSDEYTGVQRDLYSAFLIGHIENGHYQQAQLNQDFPDFYDQMKDFLQQTPKTERLAWYLN

SEQ ID NO: 55264 - protein, 418 aa, Clostridiales sp.
MFLTQSNIIRGLTKSEYAMLREMCQYANNLYNVGLYHIRQHYFATKTFLRYESNYHECKNNENYKLLQAGISQQILRVVDRSFKSFFNLIRKAKTGDYRYQDIKMPHYQKKGGLFALILSTNAIAMENGYLKIPVSHAFQKLHGKVNIRVPFPDRLAGKTIKEVRILPIHNGQYFKVQYVYLQEEEPLGLDKTQALGIDLGVNNFATCLPSNGTPFIIDGRKLKSYNRYWNKQKACYQSIADHQNIKRITNRMAALNMKRNNKVHDYICKSARYIINYCIANHIGTIVVGYNEDFKYKPHMGKINNQNFVQIPFGDLRESLFFLCERYGIQYIQQEESYTSASSYLDNDELPVYKPEQPYTGTFSGKRIKRGLYRTADKTTLNADVNGAANILRKVSGYSYELPCSGCLAHPLRISIG

SEQ ID NO: 55265 - protein, 183 aa, Paenibacillus sp.
LAFDRSRPSGIHLVKIRNIVKVEKSIRLFHRRLTNIRTNHIHQTTSAIAKTKPRAVVMEDLNVSGMMKNRQLSKAIAGQKLHEFIRQMKYRCEMIGAKFIQADKGFPSSKLCSCCGQIKLDLKLSDCTYECNCGLKIDRDMNAAINLSKLTYPNWQSSTKRLCQYVGFVASEFSPVECHTKRE

SEQ ID NO: 55266 - protein, 368 aa, unknown
  TnpB Polypeptide
MEKAYKFRIYPNKTQEILIQKTFGCVRFVYNYFLDKRIKAYEKSKKTLGFSECSRELTKLKKELIWLKEPDKCSLQNALKHLDLAYQNFFRRVEVGYPKFKSKKNRHKSYKTSYTNNNIAFVNGKIKLPKLGWLRVRDKYTPQGRILNATISQTPSGKYFVSICCTDIESQEPIRTDKYVGIDLGIKDFAITSDGERYSNHKYLKQSLKKLAKLQRELSRKTRGGSNWEKARIKVAKLHEKIANQRRDTLHKLSSTITRSYDVICIEDLQVSNMVKNHKLAQSISDASWSEFIGQLEYKAKWRGKEVVKVDTFFASTQICHVCGYQNKDVKDLSVRNWLCPNCQAEHNRDVNAAINILNEGLRILNIT

SEQ ID NO: 55267 - protein, 444 aa, unknown
  TnpB Polypeptide
MKQQLTAKLKLTITPDEFRVLRQTQLAYRDALNFVSAYAFAHGKTSNALRLQKETYSAIRGQFGISAQMACNIPRQVGASYKALWTKAKKHAEARRLGYTKKRFKGLDDAPRYISPTLTYSYGRDYSLKDGQRVSLLTSIDRLILPYQGYTKHVALLQAGATIGAGKLWYDRSKKRFYLLIALEVDIPDPAPEGQQQIGGVDVGQRYLATVATLGNGAQFYSGKEIRSQADHYARLQKRLQQKGTRSATRRRLIIGQRERRLKLNTNHTISKHILDTHPHSFIGLEELTGIRDRTKRKKGKKASKRRRRANRNASKWAFAELRSFLDYKAVLSGSLCVKVDADYTSQACPKCGYSSPDNRPKKGLRFLCQNCHYTLHADLVGARNIALRTLVIRQDWMTTGQLSGAPDVTDGEAKAARLSRYAELRWSPATSPSPKGDWVSDVL

SEQ ID NO: 55268 - protein, 393 aa, unknown
  TnpB Polypeptide
MLTRKACKYRLYPTHSQEQALHWTLARCRELYNVALQERRDAYRMRGVSIRCYDQINQLPSIKAARPEYADIHSQVLQDVLRRVDKAMQAFFRRGKLGQKPGYPRFQGRNRYDSFTYPQAGFALAGERLTLSKMGDIKVRLHRPMVGQVKTCTIKRDADQWYVCFSCEVEEEALPPSDEAIGIDLGLLHFATLSTGETIENPRYYRKGRKKLALAQQKVSRCQRGSHRRERARKAVARAHRTIRNQRRDFLHKAARSLVNHCGVIVMEDLKIMNMSATPDPKPDPENDGAYLPNGANAKAGLNQSILDAGWGQFQALCVAKAASAGRTVEFMAPHYTSQRCSQCGAIVKKDLAQRWHSCSCGCELDRDHNAAINILLAGKQPTGLRACRSPAL

SEQ ID NO: 55269 - protein, 432 aa, Richelia sp.
MYGCQQVLVKKNQDLLAILEFLCSESHKLTNMGIYYARQLYFKAKTGIGKYDLEKVYKDSNHYKVLHSQAAQQILRTVTESFKSFYSLIKAYLEGKITDRPRIPNYRKKGGMATVSYPKQALKLKEGQIRIPLGNTCKRWFGIDSFYIPMPRNINFADIKELRILPRNKCFYFEFVYNKVIDKLELKQENVLGIDPGLTNWLTCVSNVGTSFIIDGKQVKSMNRWYNKKVSTLKDNKPHGFWSKKLAAITEKRNRQMRDGINKAAKIVINHCLENNIGTIVFGWNKGNKNQIELGKKNNSEFVPIPTARLKNRISQLCEQYGIGFVETEESYTSQSSFLDGDYLPKYGAKPTDWKPSGKRTKRGLYRTANNFYINADANACANIIRKVSRTFLLNLDRLCRGVLSRPTRINLWVTAKNKRSNEVLTRCVVTS

SEQ ID NO: 55270 - protein, 408 aa, Pectinatus sp.
MPDLTKTIKLKLNVNQDQIELLKTMTELYRQVCNSVSAYIFEHDFELSANSLNHELYRDIRRQFGLKSQLTQSVFRTTTARYKTVKKQLLQHPFKYKGEDGKWHHINRTLEWLWRPIKFRRPQADLVRGRDYSFVDNGNMLSINTLEGRIKVTYESKHFSEYLNNKNWQLGTGKIVEYKGFWYIHIPVKGKVKEFTKNNVRHTVGIDRGLRFLAVSYDEQGKTEFVSGRQILRKRSKFLKTRSQLQAKKTKSAMRALKRISGRENRWMADVNHQISKTLVEKYGPNTLFTIEDLSGVSFEESNLSKTAKHNYEIRSWSFYQLEQFLIYKAHENCSKAIKVPAKYTSQRCPRCGAVCKEQRSHDTHEYICKCGYRSNDDRIGAMNIQVLGTRWASGEENPKFSKLTASE

SEQ ID NO: 55271 - protein, 404 aa, Pectinatus sp.
VERDVLVEKLLFADNRRCSYRDDSEIYRKSGQVIIVNKAYRYRLYPTAEQKIMFAKTFGCARFIYNKMLGDRLNHYKEAGKKLNNTPARYKSEFPWLKEVDSLALANAQMNLNKSYNNFWNHCKNFGKPRFKSKKTGHCSYSTNNQKGSVRVEENKVKLPKIGWVKLCLHRPLMENGIIKTVTISKTPSGKFYISILVEYENQILPIIPKRFLGLDFAMHGLYVASDEDDADYPNFLRRAEKRLAKAQRKLSKRRKGSHNRDKQRLRVAILHEKTANQRRDFLHKKARCLVDHYDAIGIEDISVKAMAKHKKGGKFSFGKSIADNGWNKFVNILEYKLAWQGKMLIKIYKWYPSSQLCHVCGYQNNKTKDLSVREWNCPKCGSHHNRDKNAAINIREEARRISA

SEQ ID NO: 55272 - protein, 377 aa, unknown
  TnpB Polypeptide
MLIAYKYRLYPNKEQREYFAKCFGCVRFIYNRMLSDKIDYYKETKKKLNNTPAQYKKEFEWLKEVDSLALANAQVNLQTAYNNFFKRPEVGFPKFKSKKNHYYSYTTNNQGGNIYMSDRYIKLPKIGLVRVKKHRNFEGLIKSVTVSKTPSNKYYVSVLVNQEEKEKLPKTNNQIGIDLGLKEFAITSDGEMIENPKYLRKSEKRLRKLQKDLSRCKKGSKNREKCRIKVAKQHEKIANQRKDFLNKVSKRIIDENQVVVLESLKVKNMMSNHKLAKSIADVSWSEFVRQLGYKADWYRREIIKIDTWYPSSQVCSNCGHKDGKKALSVREWTCSVCGTHHERDINAAINILNEGLRLYNKNKIVGTTRIAYVNLSH

SEQ ID NO: 55273 - protein, 147 aa, unknown
  TnpB Polypeptide
MQKGSSNRNKQRIKVAKLHEKVADQRKDFLHKLSRQIANAYDCICIEDLNMKAMSRSLHFGRSVSDNGWGMFTAFLKYKLEEQGKRLIRVDKFFASSQTCNVCGYKNNATKDLSIREWDCPQCGTHHDRDVNVAINIKNEGVRMLLA

SEQ ID NO: 55274 - protein, 348 aa, unknown
  TnpB Polypeptide
LYHTDRSERRGGQLQAEWIRKECAQEVRPATHDDVQRRRTSRCPPRPFHERRATTRPQARERYRVVRQNPAPRGLSPLDASTTESRTTDWLEALNAGDATMGESRLFERDGTWYLHVTATRDAEGGSEVSDEERTPIGVDIGEASLVTVCHRDDHGCPTAPELWADEGKTVRRLRKTYFTATRRLQTRGSERIAESFGDDLWNQIDDVFHRVTREVVDYAESVKNPVLVLENLTYIRESMDYGEYMNRRLHGWGFAKLHAQIRYKAVEKGIPVKTVNPRNTSKECHACGEVGYRPQQATFKCTNDACWMGEYQADVNGAVNIADRYLSGESRFREHENDDDSAEDGGV

SEQ ID NO: 55275 - protein, 310 aa, Bacillus sp.
MGSQAYKETGKGLTYGTCSAKLPAMKKELVWLKEVDSIAMQSSVRNLADAYTRLFKKQNSAPRFKSKKNNVQSYTTKQTNENIAVVGNKIKLPKLGLVRFAKSREVEGRIVNATVRRNPSGRYFVSLLVKTEVQELPKTHSYIGIDVGLKDFAILSDGTHYENPKFFRSLEDKLAKAQRVLSRRMKGSSRWNKQRVEVARIHEYISNTRKDYLDKISTEIIKNHDVIGIEDLQVSNMLKNHKLAKVISEISWSQFRSMLEYKAKWYGKQVIVVSKTFASSQLCSCCGYQNKDVKNLNLREWDCPSCRTHQ

SEQ ID NO: 55276 - protein, 402 aa, Escherichia sp.
VKRLQAFKFQLRPGGQQECEMRRFAGACRFVFNRALARQNENHEAGNKYIPYGKMASWLVEWKNATETQWLKDSPSQPLQQSLKDLERAYKNFFQNRAAFPRFKKRGQNDAFRYPQGVKLDQENSRIFLPKLGWMRYRNSRQVTGVVKNVTVSQSSGKWYISIQTESEVSTPVHPSASMIGLDAGVAKLATLSDGTVFEPVNSFQKNQKKLARLQRQLSRKVKFSNNWQKQKRKIQRLHSCTANIRRDYLHKVTTTVSKNHAMIVIEDLKVSNMSKSAAGTVSQPGRNVRAKSGLNRSILDQGWYEMRRQLAYKQLWRGGQVLAVPPAYTSQRCACCGHTAKENRLSQSKFRCQVCGYTANADVNGARNILAAGHAVLACGGMVQSGRPLKQEPTEMIQATA

SEQ ID NO: 55277 - protein, 275 aa, unknown
  TnpB Polypeptide
MASNPRTAFSWDATSHTLKLAKMDTPLKIKWSRYFTGTPTTITVSQDRAGRYFVSFLVEEEIGMLPLVDAAVGVDLGLKDLAVLSTGEKIANPKHLAKSLKRLKRAQQSLNRKVKGSKNREKARRTVARIHAQIADQRLDGLHTLTTRLIRENQTICVESLAVKQMIGNHKLTRAISDVGWGELVRQLTYKAAWYGRTLVKIDRWYPSSKRCFDCGHVLPTLDLAVREWTCPACGATHDRDVNAAKNMCAVGHTVLACGERRRPPTDMSCGGAAQ

SEQ ID NO: 55278 - protein, 175 aa, unknown
  TnpB Polypeptide
MRLDRVSLNTLAGRVVCRLLPGPRQHAMLVDPAWKMGGADLVWKRGVYYLHVTQSQEAPALPEEDGQYLGVDLGIVNLATDSEGQTFSGDAIRTARQRYQKRRQILQKVGAQSAKRRLKQLSGREHRFQRDTNHKISKALVQKATQSRKALAIEDLTGIRARTTVRREQRNARHA

SEQ ID NO: 55279 - protein, 352 aa, unknown
  TnpB Polypeptide
MRSTKEQEHTLVRQAGARRWVGNWGLARWKEVYAETGKSISLKQLSAELTTLKSKPGTAWLKEADAQLLQQALKDLHHAFVNFFARRAHYPRFKSRKRDSLRFRIPQRVKVADGKVYVPKVGLVRMRQSQAVGRRTKSATFRRDLCGQWYASLTVEFDLPDVAPSMPHPTKVVGVDLGLIDFATLSDGSDPIPAPKFYRGAQRRLRRAQKTVSRRASGSKRRTKARIRLARVHRKTANQRGDFLHKLTTKLIHDYDRVCIGALELQATDRSRSFLPFIQAVQRMWCAQRPSQALGSGVGLRLWSTPQGGSTLGEPVSDLRWRQSASSRESPAFRRGECQGVARLRVPSSPPR

SEQ ID NO: 55280 - protein, 395 aa, unknown
  TnpB Polypeptide
MQLTYRYRLYPSRAQEQKLFATIDQCRWLYNHFLEKLNQKPGKIPQRYELQATLPKLKREHSELKRVHSKVLQMVLHQLYSNLSALAKLKRNGRKVGRLRFKGDGWFKSFTYNQSGFKVIERCGKRRELWLSKIGAIPIVLHRDLEGEIKQVHIKREHSGRWFACFGVKVKDTPRADKISKPVGIDLGIEHYIADTNGNFVEHPHTITKSEWRLKREQRRLSRKKRGSKNRAKHCIKLARVHERIRNRRLDFLHKLSHHYVNSYDFIAVEDLDVKKLIEMAYNGKNRADAAWATFLHMLTYKAARAGRWVMKVEPRGTTNKCSKCGEIVKKPLWVRIHQCPKCGLELDRDLNAAWNILQDGLKQVGREPTEFTPVEIGPLLIRASPVIETGSPVF

SEQ ID NO: 55281 - protein, 407 aa, Aphanothece sp.
MKQSVITLTYQFKLKLTCQQTQEIENILVVCRRVYNFGLAERKAWLKSRKSPVNACSIISEYIFGVDTPYPNYFVQAKALTIAKQSLESLRSVNAQVLQQTLKTLDKAFTDMKAKGNGFPRFKKVMRSFVFPAMLKNCLANGKVKLPQLGWVNIRQSREYPTGFEAKQARIVKKASGYYLMITFQQYEECPDPVVGKTSLGIDAGIESFMATNLGELIKAPRFLLKAMRKLKWLQRRLKHKIKGSNNWLKLQRKIARLYESVANTRRDWQFKLAHYLCDKADNIFVEDINFNSWSRGIVRKRSLESGIGQFINEILPYISWKRNKFYLKVNKNGTSQECPKCHKMTGKKKLNQRLHDCQFCGHQENRDTAAAKVIKYRGKIAVGQSVMITENACGDGLAGVKQLTNL

SEQ ID NO: 55282 - protein, 173 aa, Escherichia sp.
LQQSLKDLERAYKNFFRKRAAFPRFKKRGQNDVFRYPQGVKLDQENSRIFLPKLGWMRYRNSPQVTGVVKNVTVSQSCGKWYISIQTESEVSTPVHPSASMVGLDAGVAKLATLSDGTVFEPVNSFQKNQKKLARLQRQLSRKVKFSDCIPVSQISAGTTFTKSQRPSAKTTQ

SEQ ID NO: 55283 - protein, 334 aa, unknown
  TnpB Polypeptide
LRKEFTVMRNSAEYAWLRTISNNVIKQAIKDCVDAYQKFFKKQSGRPKFKSKRRGDFSFYQDTDKIRITATHVKLEAIATSKKRNKQQLNWIRLAERGRIPLGVKYKEPRITFDGLNWFISVAVEFAEPKTAENCTETFGIDLGIKNLATCSNGTTYPNINRTMTVRRLKKKQRRLQRSISRKYEMNNTKGESYSKTRNIIKSEKKLLRIHHRLASIRQNYRHQITSEIIGRKPNPIVLEDLNVRGMMSNRHLAKAVQEQGFYEFRRQIEYKAAWKGLRVVIADRFYPSSKTCIACGHVKKNLRLSERIYHCEHFGNEIDRDLQAAINLKRYVS

SEQ ID NO: 55284 - protein, 395 aa, unknown
  TnpB Polypeptide
MNPDNAYKELFGNIFMNIIRAYKFRLYPTNVQSKDMQTHLWLSKNLWNDLLELTKQMYADYERFPSMNALNEFAKTSGLYSQVSQDIFRRLNKAIGNMRARREKGLDAGFPRFKGMDRMKSMTYPQSGFKLLPKKRLRVTPFGDINLRQHRPVEGKIKTLTLKKEADTWYAVLTTEATPPVPKENHGAKVGIDLGLMTFAMLSNGESIRKPKHIQGYETALAFHQRKLSKKKLGGMNRRKARLKISRIHSRVANTRKDWLHKTANNLLSRYSMIAFEDLDVQGIAEKHGKGVSDAGWSMFTDIISYKAEEAGCEVIFVNPKNTTKDCSRCGTCVPKEEHERVHNCPSCGLGIDRDLNAAINVLKRATVGMTGSNACGDVAIATSMNQEADQFIGR

SEQ ID NO: 55285 - protein, 413 aa, unknown
  TnpB Polypeptide
LTESELQKHLAQQRRQTGSSYQQLAACEIQIIAAQAMKTLEKVLFYQIKPDKVRFRSKFDLDVSYRNRVNTEATRLVPSDRKGIAYRLYIHKASTFVDIPVKAFNKYQQISLLRSERIKYVQIIRKTIRGKKVYYLQIVCQGFPPSKVTKGEGVVGIDPGISTVAFASPSEVALVDLVPKNITRKEKHLKQLDRKIEWCRRVNNPECYKEDGTIKKGARFKRPSNRQIRLQTRRRKAYRSLSEERKKLQGQLVNRIVSQASIIRVEDLNVKGLQKRSRDIRINPKTNRPYSKKRFGKAIFRAAPSTFKTALETRASQLGIDVEFISPTEVKPSQYNHITQTFEKKPLSTRVYDLSDEYTGVQRDLYSAFLIGHIENGHYQREQLEQDFPDFYEQMKAFLQQTPKTNRLAWYLT

SEQ ID NO: 55286 - protein, 446 aa, unknown
  TnpB Polypeptide
MKITSSYGIKLTGDVKALENSIRIYRDALHFVIPIVYTHWDEMKDFEYSKQRMICVEKLVHSTAVHHARYNFDEEFPKFPSYLRRAVLNCAVGIVSAYHGHLANWEKNPKGQAPQLSLTHYTYPAYYKRDLFRNFDPVRQTVELKVFKNGDWVFEVYRLKTSDCRYYQTHLTGKKQNVPIIQKKGRRFYVLFSYEEEVSLVKEESISKICAVDLGLGTDATCSIMDQDGTVYARKFISFSEEHDRLHTQLGRIKRNQKRGSRHNKTLWRSVAGISQDIADKTVKAILDFGNEHGVDVFVLEYLDFKGKNAVKRAQFWRYRRIYKVLAQKAHQHGLRVARVNARNTSRLAFDGSGWSKRGHEIAPETPYALMEFPSGKTYNADLNASYNIGARFWFFIRHLLKTVTATQRLALEAKVPQVAKRSTCTLSHLINLRSEFAALTAKTQA

SEQ ID NO: 55287 - protein, 437 aa, Acanthocystis sp.
MRIRPFWSQKCAEVSQQLPWLDEKIPHSFTNEITTKDVFRTRKVKLNPTREQKLNLNSYADGARYSYNTAIDAINTKEHTANKIQLQNAFVSLKRRDGTYNPFFNKRRWLLRTPKIIRQQAVFEAAKNFKAAFTNVKNKNIDHFKMTFKTKKQQQQHGYSLGVGKHLHYKNNVLTILPRTIGAMRFFGKLPFEGIPEAECRIRRDPYGDFWLLVPMKKTTSSSSSGPIVAIDPGVRTPFACFATNGTTKTLGEDMNERLNVIRTKISLNDRRCSKATTSELRKKCISHRRRLYRQHQRVRDAYHWRIINDITNKSGGVVLPPFETQKLSRGLKAKTNRSLLGIGHFTFRERMKGRCEEKSLLYEEPTEEYTSKTCGSCGRINFLLGSKKTFECFCGVVCDRDTHAARNILVKWLSTTETGARALEAFPVSRSILTSL

SEQ ID NO: 55288 - protein, 482 aa, Halorubrum sp.
  misc_feature (98)..(98): Xaa can be any naturally occurring amino acid
MGELTKTLELKLVEPTVHKRLKLRETRDAYQQALHAAFAAGCDTQSATNDVVVEYDLSGYAKNALKKFVPQLHTSYDADELHDDHPVRFTNEGLQLDXVPQLHTSYDADELHDDHPVRFTNEGLQLDHQPQNAIEWYVKIPHHEDYHLWIPAHANPDQREWLEAVYADDAEMGIPHHEDYHLWIPAHANPDQREWLEAVYADDAEMGESRLFERDGTWYLHVTVTRDVADQFEASNDERTPIGVDIGEASLITVCHRDDSGSPVRPRLWADEGKAVRRLRKTYFTAKRRLQQRGSERIAESYGEQLWDRIDDVFHRVTREVVDYAESTENPVLVLEDLRDIRENMDYDTYMNRRLHGWGFAKLSAQIRYKAAEKGIPVATVNPRHTSKACHACGEVGSRPRQATFRCSNDNCWVSEYQADVNGAINIGDRYRSGESHHRNDRAPRQKAGADDSATDGASLTGPQDSHADAETQQVTRGTNAS

SEQ ID NO: 55289 - protein, 437 aa, Halorubrum sp.
MSAVVRRTNTLTVRPLSDADERLLRDLLDASASLWNELNYERRQQFFDGESVWDTADYRKQYVGVLGSATAQQVIRKNKSAWQSFFAARENGENTAPPGYWGNEDNGRELRMFIRNDQYTLETGERSRVEIPVGQDLKDEYGLGNHDRLRLEGCGAPKWGGKQGRLEIQYDEVDDTFRAFQPVTVPDSRQDSPLASEEAALDVGANNLVACTTTTGQRYLYEGREMFNRFRETTDKIACLQSKLRERRDSSQRIRRLYRKRTRRRDHAQETLSRDLMERLYADGVDTVYVGDLTDVLEAHWCAEVNAKTHQFWAFRAFINRLSYTAEEYGITVKVESEADTTRTCPACGEQDDTHRDGDVFRCPCGHEAHADLCASRTFLKQQAGKIEAGSMARPVRLKWDDHNWSELPHSPEKESPNEERTNRSTGDGKLASVGTA

SEQ ID NO: 55290 - protein, 401 aa, unknown
  TnpB Polypeptide
MRNLLKAFKTEIQLTRSQKEKIIQSIGICRFLYNAYIAYNRKLYHLYQRGIRDEHQNHFVSAYDFDKYVNHKLKKKFPWLNQCGAKARKKILMNAESAFNRFFAGKTSFPRFKKKARQDVKLYFPRNNSGAWKIWRHKMMIPTLKQVRLKEFGYLPRGVHIKNGYVSHEAGRFYVSVTAEIQETSSYHNDAENSHHSETEGIGIDLGIKKLAFVSTGAMFQNINKTSKVKRLEKRLRREQRRLSRKYECNTKKGGNPAASANIEKKRLSVQKLYQRLKNIRMNHENQVIHVLVKQKPRFIAIEDLNIKGLMKNRHLAKSIRDERFYTFVLKLKRKAKIIGIELRVVNRYFPSSKHCHACGHIHRELKLRDRIYRCPVCGYTADRDFNAALNLRDTTEYKII

SEQ ID NO: 55291 - protein, 264 aa, unknown
  TnpB Polypeptide
VLLKAYKYRIYPTKFTKDGIKAKLHREIPQEAILKQATISRQNNQYFVSILIDDTISIPKPTKAKNAVGLDMGITDLIITSDGTKYPNNKYFVKSQHILKKLQRRLSKKQKGSNNRNKAKLKVQKLHTKISNQRKDTIHKISNEITNQYDIICLETLNVKGMIKNRHLSKSIADVAWSEFMRQLEYKAQWRGKTILKIDQWFPSSQICSHCGASTGKKPLNIRKFDCPECHIKDIDRDVNASINIKNYGLGQVDNRNTVGTIGI

SEQ ID NO: 55292 - protein, 391 aa, unknown
  TnpB Polypeptide
MRKKTSNGKCEQMAYRFYGIPSKQDAAQEDKTFGCCRYLWNRMLGDHNTLYSEIGEVPANTPADYKDLDECIWLNEVDSLALANVQLNLDSAFSRFFKKTARYPNFKSRKFAKKSYTTNAVYLKKKDGSICCNISLDPVSGLLKLPKHKDPVQLRLHRSIRPDGKLKSVTVTMESDGKRYYSILMEYPKQELTRDLDTDNAIGLDMSLPKLYVDSNGNTPDFPKPYRTMESKIKREQRKLSRKEKGSKNYEKQRIKLAKQHAKAKHLRNDVLHKLSCALTDRYDLIAIEDLDMSAIKRSLRFGKSASDNGWGMFTDMLSYKAKRKGKQLVKVDRWFPSSKTCSHCGHIHKELRLSDRIYLCPKCGHTMDRDQQAAQNIVKEAKRMLLNAAF

SEQ ID NO: 55293 - protein, 373 aa, unknown
  TnpB Polypeptide
MVANRAYKFRIYPNDEQKILFAKTFGCVRMVYNHWLDRKIRQYEENKTNVTYTICAKEMAAMKKTEEYGFLKEADSIALQQALRHLDTAFQNFFKQPKTGFPRFKSKKRNKNSYSTVCINGNITLSNGYLRLPKIGQVRLKQHRSVPGEYRLKSVTVSQTPSGKYYASILFEYEDQVQEKELQKFLGLDFSMHELYRDSNGKEPAYPGYYRNAEKKLAREQRKLSRMQKGSNNRNKQRIKVAKLHEKVSNQRKDFLHKQSRQITNAYDCVCIEDLDMKAMSRSLNFGKSVSDNGWGMFTTFLRYKLEEQGKKLVKVDRFFASSQTCSVCGYKNAKTKNLALREWDCPQCGTHHDRDVNAAINIRNEGMRLVNA

SEQ ID NO: 55294 - protein, 351 aa, unknown
  TnpB Polypeptide
MIRSLKFSLAGANINKLELLDDLWFEYRKLLQSFFMRLKRGEGLDYSYLKTIDTPLSCKYRQCICRQAMKSWKLWCRSKGKYDKKIPDFLNPQLVLSNGLVVISPGANSFDLWIKVSTLSKGHPMHLPIKSYNYANKYFINWEPSKSCQFNKKDGRWYVTLYFRKNLDPVPVRETIGVDVGYRKTVTTSNNISIGKIKDLCEKSDRKKCGSRAKQRSLVEIRNHIGRVVNQLIDGTNNIVIEDLKNLKKNKKGKWRKSTNRKFRSWYYPLILKRIRNRTEVVGVQCHAVNPSYTSQDCPECGYRDSKNRRKEEFRCIRCGYSADADYVGALNILKKFLRGTQELIVPGVIS

SEQ ID NO: 55295 - protein, 522 aa, unknown
  TnpB Polypeptide
MFVSLQFKLELRKEDREKLIKLMRKQSSAIRVAYNMLKELEKEKTKNPHAQIYQRLRQLFPELPTKYIDSAIYKAKQYPTDRPVVFGGRRLFEKLCKNHLSGKAREKLKKQWRELRQGTLISIGSKADKGNRLMRFEDLNGQLCLRITAGNREFIYAKVLREPSNSKDKWLTFMAMLLESWQTKNYFAYTVELKLRDGEVYGSVSFELPTPEVKYTKENGVIAIDINASPIHLAIAEVSKTGELLSYQTISLHHLLGLSQNSKDHQEWILAHQIVDFAIQKGKAIAIENLKKLKRGSRGDGKATLRKRLHHWNAKKFMQKLIRVAMLKGVEVVEVNPAYTSVIGMLKYAPQLSIDKDIASAFVIGRRALGFKEDMPENYEKLLKDKAYLEFALKKYEEREEELRELIEKESNEYKRNALESELKVVENSKKLLVNLIQSLQSESSSCEGANGRNPEQGRVAKTTLQSVWQVLKVALLFPILGRVLPRDLSPPKPVLVEGVWDRVRSRLVPFEAGGTVPIRDF

SEQ ID NO: 55296 - protein, 388 aa, unknown
  TnpB Polypeptide
MERTYKFRLYPKREQVDILDRTLMLCRHLYNNALEERIVAYRMAGKTVNQYEQSRELVQVKEENPEYKDVYSHALQNVIKRLDKSYANFFRRVKEKKEKAGFPRFKGRNRFNSVTYDIYGFRLRDNGNLYATGIGTIRMFKHREIEGTPKTCIIKRDGVGDWWTSISVALPDVSKRELKTAIGIDVGLKQLVKVTDGTKIMPPKFLRASEEKIKIIQREVSRKVKGSDNRRKSVKRLAKAHRRVERQRDDFLHKASRSLALKADTIVFENLNINGMLKNHHLAKSIGDASWGKLMQYTAYKAEEAGGSVYYVNPNGTSQICSRCGERVQKSLSERVHVCTNCGFSADRDYNASLNILGRLPSDRGELLKTPVETEPPLSSKGGSEFGR

SEQ ID NO: 55297 - protein, 406 aa, Bacillus sp.
MGNLDLFFPKNNDYNFDVQIKRMQAKIGHLTHRQSRLTQKFSSDQTNIPSGVFGSKKLFRSQFTIREFIRNHEKWKTVFSRARNKQLILSGRKDAKHGNFVLQYVLETKELWMTTSSGKTLMFPAVTFPYGQEAIEEVITTQLQCKNKKKYGKPIARSVEDHGEYYIVKCLLDVPKNPHTNYSTSDGMIGVDCNLEHFAWANVTKDGNYKGSGSLQFSIMGKSTGQITKIIEVEAIRLVDLAERYNKPIVIEKLDTTQSKTGNRYGNKRANRMKSMFAYEKMTSAILNRADKRGVAVFQVNPAYTSISGKMKYMRKFGISIHQSAAFIIGRRGLGYKEKVPKVLQPYIPKKDAHHWSHWHQLNNQLDIRTHHFYQLYDVDQPKEVLQIERLHLFESEKKKLAKRFA

SEQ ID NO: 55298 - protein, 377 aa, Bacillus sp.
MTMLLSQKYEIFPTKEQGETLDRWLQYCRQTYNSALLDKQRKYKENKELYTRSDMQKQQTIDKKKYPFLKEVPSQPLQEVFLRLKKAYDGFFRGDANYPKLKKYKDYNSLTFPQFGFKPNGKHRLAMSFAENGKLYNKGLGEIEIHLHRPIEGTIKQLILKRQAKRWYAIFSVERQAVSPSIDRENAVGIDVGLHAYAVLSNETVFENPRFLLQKEKQLKKAQRNLSKKNKGSVNYRKQVERIRNLHEKVANQRKDFLHKLSYHLTQMYSVICIENLDIRNMVRSRNVSKSISDAGWGIFRKLLMYKCEKFGGLLVKVDPAYTSQDCSSCGNRVKKSLSIRTHICTKCGTVLNRDHNASLNILQKGLEQLFVRTIED

SEQ ID NO: 55299 - protein, 454 aa, unknown
  TnpB Polypeptide
MTRRPARSCQGRSPSRVGGGRADGHGVPFPLNSGGWSRRSHLGVRSHLGVVGHGYVRCMRFRLYPTPAQEVLLSEQCAHARYVWNLGLEQRLMWARWKGPTPGYVEQSRQLTEARAARPWLAQGSQTVQQQALRDLDQAWRNFFAGTHNRPTWRKRGAHEGLRIVGPQALRIRQDNGRWSAALVPKVGWIPFRRTRAVVDWKSYRINRDRAGRWHLAFAMVPEPVPGPGTGGVVGVDRGVIVAVALSSGEMTSPSKLAAKESERLLRLQRHLARAQRGSNRRARVTTQIARLKARETDRRKDWVEKTSTDLARRFDVIRVEDLHIAGMTRSARGTIAEPGRNVAAKAGLNRGILANGWGLLITRLEQKAPGRVEKVNPAYTSQTCDACKHIARESRKSQADFECVACGHQDNADVNAARNIAERSTAAGLAVAARGDRVRLARSVKREPQLVAS

SEQ ID NO: 55300 - protein, 403 aa, unknown
  TnpB Polypeptide
MRASKSEETKNKIKQTLAETRQIRKNQDCKVVELKIDESSLSLIQKQKLSSFFYEAKCLYNYLLGLEDIFSFDPKTTEITKLDKDRNVVFIELTELSAAARLAVFTRTKQNIINLSKAKKKGLSIGRLRFKSEVNSIPFPQYGISHYVKSKSFFKIGGIRKAVRVRGLHQIPENARFANCTLVKRPSGYYILQTIFLPKEERIKTNKTVGLDFGIKTSITTSDGEKFNVSIKESERLKNLQRKLATQQKRSNNWYKTRSSIQKEYETLTNRKKDQANKIVHYLLKEYDTICLQDENLQGWHSGWFGKEVQHSALGAIKGKLLTKKSRIRLIDRYQPTTKGCHHCGNIVSISLAERTFKCSCGYEEDRDIKSAKTIKALGMGHIEAFQKTPESNQEAAESLAQQ

SEQ ID NO: 55301 - protein, 388 aa, Okeania sp.
MKSIRTKLKLNNKQKTLLAQHAGYSRWVYNWGLSLWNAAYKDGYKPNARKLRVVFTNHTKPLYPWMKNLSSKVYQYAFINLGEAFKRFFQGLGKYPRFKKKGKHDSFTIDNCGKPIELNGWNHKLPFIGMVKTYEPIEATTQKITISRQAGSWYLSCSYEFHAITTPKTTDVIGVDLGVKTLATLSDGKVFESVKSYRRFEAKLSRLQYLNRHKKVGSANGRAAQLKIARLHRRVANIRKDALHKLTTYLAKNHSVVVIEDLNVSGMLANHKLAKSIADQGFYEFRRQLEYKCQWYGSELVVDRFFPSSKTCSNCDHIQDMPLNLRTYDCQSCGLSIDRDLNASINLRKRVRNSEVSSECKTHSRDAVGLTVDACGRSAADSSGGSRK

SEQ ID NO: 55302 - protein, 433 aa, Chroococcidiopsis sp.
MMRLYGYQQILLHPENELEAILEFVCKTANSLINCGIYYARQIYFKTKKFLGKYDLEAEYKTNKHFKALHSQAAQQVLRSVSESFESFKKLKQAFNRGKIVDKPKPPKYRKSGGFALVSYPKQALKLVDNQIRIPLGKQVKCWFGLDCFFVPMPSNLNFADIKELRILPRNRCFYVEFIYKTNIIEVDVDSNNVLGIDPGLSNWLTCVSNVGTSFIVDGRHVKSLNRWYNKQVSTLKENKSQGFWSNRLAAITEKRNRQMRDAINKAARLVINHCIENRIGTVVFGWNQGQRQEVKLGKSTQSFVQIPTAKLKKRVSQLCQQYGIKFVETEEANTSAASFLDNDTLPKRGEKPTNWRASGKRVKRGLYRTANNWYVNCDAQAAANIIRKVAVTLGLDLSGIGRGSLTAPQRIRLWSVKQKRSGVVSTHHVASV

SEQ ID NO: 55303 - protein, 393 aa, Thermovibrio sp.
MLYVYRFRLYPTKEQVEFLNRQIGHCRFVYNKLLEIAKENYEKEGKKWNYYEYKKLLPKLKGESPFLKEANTQSLQEAVKWLDRAFKNFFKGLAKFPKFKSKKSVNSISIPQHFRIEGNKIKIPKLKTPIKFKKHRKIEGKVRSVSITKLPSGKFYLNVLVDREIEPLSKTENVVAIDVGLTHFCTLSTGEKIENPRHLLKTEEKLQKLQRKLSRKVKGSKKYLKLQRRIAKLHEKIVNQRNDFLHKLSKKIIGDNQAVIVEDLNVKGLLKNSNFSKHIADASWRRFISYLEYKAKLYGRKLIKINLFYPSSKLYSVCGYKNENLKLSDRKWKCPKCGAEHDRDYNAPLNLLKEGLKQLKGLLTIRVVGLERPELTPVERANALVEAGNSSLK

SEQ ID NO: 55304 - protein, 308 aa, unknown
  TnpB Polypeptide
LPKYKHKTEGRNILVYTVQALSKPGMRDGLIRPSGLPITIVTEHTVVDQVRIVPRNGHYVVEIVYTKEPVQTKVDPSFCVGIDLGVTNLAAIASNREGFVPRLVNGRPVKAWNQWYNKRMKELKKRLPKADRERVTKQMERITNTRNRQIQHYLHTASKRIIDFLVKEGVGTVIIGKNPLWKQETGMGRKNNQNFVSIPHARFIDMLTYKAALVGIQVEVREESYTSKASFLDLDPIPTYIPNAEEKHVFSGKRIGRRNRLYRTKDGRTICADVNGAYNIVRKSRPDAFADAGAKGIAAYVVCAQRGL

SEQ ID NO: 55305 - protein, 439 aa, Cyanobacteria sp.
VILLFGCQQVLIHTNKDTQAVIEYICSESNKVFNCAVYYARQIYFKAHRYVTKAELDEEIKSNKHFQAMHSQAAQQTCHSVFESFKSFKALNKLFQQGKLLQKPKPPKYRKRGLNVVTYPKQALRSIDGNIRIPLGSRVKAWFGIDSFTIPMPSNLEFKDIRELRILPRNQCFYAEFVYKLTPVETILNPNNALGIDPGMDNWVTCVSTVGTSFIIDGKHVKSLNRWYNKKVATIKDGKPQGFWSKKLAYLTEKRNRQMRDAVNKAARLVINHCLENNIGTVVFGWNQGQKQESNMGSKNNQKWVQVPTARLKERISQLCQQYGIRFVETEESYTSKASFVDGDYLPKYGEKPDSWKPSGRRVKRGLYRTALNWYLNADCNGAGNILRKVSRMLGIVLSGLSRVSLTAPQRIFLWSAKKKLQGRGFNPSRSIRLESAVF

SEQ ID NO: 55306 - protein, 404 aa, unknown
  TnpB Polypeptide
MLVKGVVFYLESDLPFEAKSLIEDFRLAVNNAIRAGLQARVTSTNALNKLAYKDSRREHPRMYAQHLVSAFEVAGSVLNNHRKRIRKGAICRTPYVNRLMMKAENQAYKLDRKSGVIDLPIRAGCHVELKLVVSQYHRKYLDDMTLSLESLTVLPDRVMVAFRKDAPKPFVPESVLSLDTNERSLDGVFVEGDVAKAIKAGFPEVAIIQQRHHDRRRRLQKKKAHDRRTSRNLCRREGTREHHRIDYRLHQVANSVLKFAEERRSAIVLEDLKGMRPKRSKELNRRLSIWPRRKLHQIIEYKAHWKGIPVVKVNPRNSSRTCPICGRIQYSRMGAEFVCECGWRLEGHINASMNLLQTAISKRMAGGLRFNPGAFQHDVMMILYNPVTGARSEPNGTSGIVGVT

SEQ ID NO: 55307 - protein, 350 aa, Bacteroidales sp.
MGKTFGCCRKVYNHYLEVRKTAWETEKKRISCFDCMKDLTSLKETEEFAYLRKVNAVSLQQSLRDLDRAYANFFRGIKNGQNVGYPRFKSKKNRQSYRVIGSGVHLFDKYAQLPKIGKVKCRVSKKVEGRILSITVIKNPSDKYYISVCCADVPEKHLPKTGKSVGIDLNSADNLMMFSDGTAIPNPKFLKQSQKKITRLQKELSRKTNGSENWKKARIKLAKAMEHVANQRKDYINKLTTDIVRKYDNICIEDLKVSEMQKNHFSAKAAQEVSFYEIRRQLEYKCAWYGKNLHIVDRYFPSSQLCSFCGWKNPKIKDLSVREWNCPCCGVHHVRDLNAALNILQEGLTK

SEQ ID NO: 55308 - protein, 454 aa, Gemmatimonadetes sp.
MNEVLRTDLLDHGMNAGKEQKVFDLLRAWRRCAALVGREQWRLFFEDGRIEKMHRSPAESDLAAVVGAANRLQMVRHQVVGILGSFLSNRQNEFSRIVECSSLPGETKHQLHFVNRWRAWFGREGLVMKDGAEIPGETRALARRIMRAVLSRHRKPDFSRINMVMDQRAASVREAEDTTTFDLWLRLSTMERGQRIEVPLRSHAYLSDRKGVCKKTVQVNEREGRLFFGIVTDIAGVCAEQKEAYQPRCEEIALDYGLRTLFATDQGDLLGQGFLRKLERFDQRISRLAAYRQKHDLRTRSPRYDREIRRLRGFLGTEIGRVLNRLARVQRPGRIVVERLWFQSPRLSRRMNRLVTNAGRRVVEHKLADLTERFGIEIEYINPAYSSQECSACGYVDRKNRAGERFECRWCGKKVHADVNAPRNLRSRRSRPAVGSVKQAKAAVLRALVLEFQR

SEQ ID NO: 55309 - protein, 457 aa, unknown
  TnpB Polypeptide
MLASGQLLEDEGREPIPPAIPEGGIYEVKYTSRRTNVVRLLPNGFQGRKLRRLANTSARLFNEVNYERRQQFFRGEKVDFEGTWDKYYERYKGALGVNAQAVLQKNNEAWSSFFSLLKLKKEGKLPPHMKRVSPPRYWKDRESKERRLLLVVRQDRYIVDEQNRRLILKDFGLEIDFAGRLRWYGKQGRLEIRYDEARRAWYASIPVEVGVETTRNGNESKHVVRGERKSIRIAGPRGDGAAGVDLGINILASAVTGGGAWLLYRGSRAKEDFFYLTKKIAKIQSEADEVRKGGDEEKSRRLNRKRRRLFRKLTERMAHLYRNLAGHLVRGLWELGVSKIYLGYPYDIAQDNGNKLTSNMWRYRELMDAIELKAQEYGIRVYEVVEYNTSNHCAIHGTKVARGPRGVVTCPLGHRLHSDLNGALNILKRGAGSIPATLKGPLSFFVDHSGIAPVKRA

SEQ ID NO: 55310 - protein, 301 aa, Lactobacillus sp.
  misc_feature (4)..(35): Xaa can be any naturally occurring amino acid
LWLXXXXXXXXXXXXXXXXXXXXXXXXXXXXXXXXISITTLDKRTKLGFTNKGFEKYFTDDWKFGTAKLVHNRGKWFLHIGITKEVSDFSPKDNPKIVGIDRGLRFLATAFDDEGKTLFFDGQKILRKRKKFLGIRRQLQSKGSKAAKRKLKRLAQRENCWMTDVNHRLAKTLVAAYGSHTLFVLEDLTNVTFNTDDLPKSMRNSHRSWSFFQLESFLTYKAQAIQSAVVKVNPAFTSQRCPKCGLVEKTNRHHETHEYWCAQCQYRCNDDRLGAMNISMLGQEWLSGVKYPRIKKLTTAG

SEQ ID NO: 55311 - protein, 374 aa, Proteiniclasticum sp.
MILGRKVRLFPSEEQEKALWRSAGTARFVYNWTLARQEENYNNGNKFISDNELRKEITQMKKEEEYRWLSEVSNNVAKQAVKDACDAYKRYFKKVSEKPKFKSRKRSKPSFYNDNMKIKFRDSSVLLEKVGWVSIKKNQIPLGKKYSSPRVSYDGKYWYVAVGVEMEKPELELTGESLGIDVGIKDLAVCSNGKVYKNINKSKEMRKKEKKLRRLQRQVSRKYEMNKIGGKFVKTSNIVKLEKQIKLLHREISNIRSNYLHQTTSEIVKTKPSRVVMETLNIRGMMSNRHLAKAIGRQGLYEFRRQMKYKCEFNGIEFVEVDTWYPSSKTCSDCGHVKSRLSLSERNYICEECGCVIDRDYNASINLSRYGLAA

SEQ ID NO: 55312 - protein, 243 aa, Anaerolineae sp.
VEVERPEQEHVQESAGIDLGIKTLAVLSKGTQYENQGLLRPELRKLKRLNRELSRRQEGCGRWNRTKQKLARLHRRITNRRLDYQHQMTTPIARTYGVIGVEDLNVAEMIRNHRRAWSIADAGFGETHHQLAYKSEGYGGMPVAMNRFFPSSRLCHFCGWINSDLTLADRTWAYDCGAVLDRDLNAALNIERQALKMVTAVGSRRPKTPGERMSDSSEQSAAKRENMAEERRPSKPCQSSTVW

SEQ ID NO: 55313 - protein, 415 aa, Moorea sp.
MNYTYRIYPDLHQSATMLEWLETSRQVYNRALGELKDWINSRKCLMDRCSLNREYIIPADVPFPSYHRQQNDLPKLKQTWPDLKNVYSQVLQTTIRRLHDTWKAFQKRGFGFPRFKKFGQFKSFLFPQFKDNPINGFEIKLPKIGSILISYSRPIPDGFKVKQVRVLSKARGTQWYVIVSIQSQVSIPDISVHGRAIGIDLGLERFATTSDGNFFERPKFLKSQYSKLKLLQRRAARKQKRSANWEKAQIKVARLHNEITAKRKDFHYKTAHNLCDQAQTIFAEDLNTVGLNRGMLRKECIDASFGAFLSRLEWVCWKRGVFFMRVNPNGTSQTCPSCGATVGKPLGERVHHCPECGYQTHRDHAAAEMVLWRGVNSVPVGNRGMETACAGVLAGAQTSSQVPKSRQGTTRNSKK

SEQ ID NO: 55314 - protein, 370 aa, Nonomuraea sp.
MCGVARIVKRAYTYRFYPTSGQADELVRTFGCVRLVYNKALEERTRAYAEGRRVSYGESSAMLTGWKCSDALGFLSAVSSVPLQQALRHLQAAFANFFAKRAKYPVFKSRKKARAPAEYTRSAFRWREGRLTLAKMDAPLAIVWSRPLPEGAEPSTVTVSRDAAGRWFVSILVENEIIPLPPVAASVGVDVGIAALVTLSTGEKIANPGHGRRERRRLAGAQRALARKAKGSANRGKARLRVARVYARIADRRRDYLHKVTTRLVRENQAVAVEDLAVRNLVKNGKLANAISDASWRELRSMLEYKAQGYGRTLVVVDRWFPSSKLCSACGTRQEAMPLSVRAWECACGVVHDRDVNAAKNVLAAGLAES

SEQ ID NO: 55315 - protein, 368 aa, Deinococcus sp.
LGSKNPPPFWGVRRGGRRTPLEEVTHIQATTHLKTFRYRLRPTKAQEVALLEQLRLCRGLYNAALQERRDAYRKAGKTVTAYDQMKYLTEIKAALPEYAGVYSQVLQDVLKRLEKAFKAFFRRVKAGQTPGYPRFKGAGWYDSICYPQSGFSVSDKTAFFSKIGNIRIRLHRPLEGKLKTATIRRECGEWYVSYVCEVEAAPLPATSSQVGVDVGTTWFCITSDGEFVENPRHFQGGHEETPGSSAHAQPEEARLQSPQDSQSRCCQAAPEGRPATAGLPPQDGCQAHPRERLGGARSPQRVGNGQRELGPQHPRCWMGSVLFSPVPQGCKRRTDSYRRRPPATPRRRVTSAVTPAERIGLGRRSSGA

SEQ ID NO: 55316 - protein, 204 aa, Deinococcus sp.
VVRQSPQKSSAKGTRSAVRRLVQLSGRERRFIADVNSSLAVQILNTFPHAFIGVEELTGVRDRTERRSRKNSSEKTRKANRRRARWSYAELLGFLAYKAPLRGSMVIKVDAHYTSQTCPKCGHCSKENRPHKGLMFVCESCGYQLHSDLVGARNVGLRALLVRQDWASTGCLSCTPDVSDTETKAERLKRYSELRWSPDTSLGL

SEQ ID NO: 55317 - protein, 165 aa, Deinococcus sp.
LKKLRVQQRTVSRRKRGGNRRRKAALQVAKTHRKIRRSRQDFHHKTARKLVNEHDLIAHEGLKVSNMVQSNLSRSISDVGWSAFFDILRGKAESAGRVVVRVPPQYTSQRCHACGHTCRENRNNEVFKCVSCGHEDHADWNAAKNILARALPSGVNGNEVSYAVA

SEQ ID NO: 55318 - protein, 381 aa, Rhodococcus sp.
VQLRYQYRVYPTPGQQNRLARAFGCARVVFNDALRARQDAYAAGVKLSDTDVQKQVVTAAKKTPQRAWLAEVASVVLVQACQDARRAYRNWFDSMSGKRKGRRIGPPRFRSRKDNRQSIRLTRNGFSLRSSGKLYVAKVGEVKVAWSRELPSEPSSVSIIKDSAGRYFASFVVEVDQQPLPEVDAEVGIDLGLATFAVMSDGKIIASQKFLRRAERTLRKAQQTLSRKEKGSSNRAKARLKVARAHARVADSRRNFAHQQSTAIIRENQAVFVEDLAVSGLARTRLAKSVHDAGWSMFTTMLEEKARRYGRTFVKVDRWFPSSQLCSACGRIDGPKPLSIREWTCLCGAVHDRDLNAAKNILAAGRAERRNACGGTVSPTV

SEQ ID NO: 55319 - protein, 370 aa, Halomonas sp.
MKQTKTLKVRVRDKHIAQLNRMARSVNFCWNYLNELSSRAIRERGLFLSAYDLHPYTKGAGKELGLHSQTLQCIAAEYVTRRKQFRKARLNWRKSRGVRRSLGWIPVNTGAAKWKSGQVFHNGSYFKVWDSYGLSQYKLRSASFNEDARGRWYFNVVVEIEVDPPAGQDKIGIDLGLKDTATCSDGTRLEAGRFYRDMEDKLAVAQRAGKKKRTKNIHAKIANRRKDALHKFSRQLVNRAGEIYVGNVKSSSLAKTKMAKSVLDAGWAMLKTMLEYKCDSAGIVFKEVNESYTTQACSSCGCISVSSPKGRSGLRIREWTCSECGVTHDRDVNAAKNILAVGHGRPEVGIPVLRAGRMSNSTVDQDLSTG

SEQ ID NO: 55320 - protein, 400 aa, Gloeocapsa sp.
MSLVGFKTSLRLNNQQATLAAKHAGVARHAYNWGLATCLQALENKTKLPSSVDLHKKLVAEVKSVYAWYYEVSKCAPQQALRNLSQAFMNWWKHKHCKKPIFKKKGKRDSFYLEGNIRISGNKIKIPIFGWVTCDEILPTVIPKNVTISKRANKWFISFKYELGDKLTVKKSERVGVDVGINALATCSDGTVYPNPKAYRKAKKKIARLQRKVSRKVKGSNNRKKAIAKLAIAHKRVSDIRKDNLHKITTSLAKNHSQVVIEDLNVSGMLKNHKLASAIADCGFFEFKRQLEYKCNWYGSELIVVDRFYPSSQLCSNCGNRQKMPLKERVYRCACCKTSLDRDLNASINFKNYASTPSSGETFKKACGEVKSLDNIVVETSLKQEVSVKPIQLSLFDLLE

SEQ ID NO: 55321 - protein, 409 aa, unknown
  TnpB Polypeptide
MLKAIKIRLYPNETQKVYIGKLLGSYRFVYNNCLALKKSKYLEDKSNLGLKELGFFFHNELTKNEEYGWLQEHNTKVLKQSIMNLMEAYKRFFVNGNGFPKFKSKHDNQHSCRFPLESISKRNDYSTFKLTLTSDLKNIKFACSDKYVNYLVKHKNGIKSATLTKAKSGKYFLSILVDGDITRILNKPINDIIGIDLGIKTFIVDSKGNEYENLKLKRNNEKKIAKLHKELSRKQKGSKNRDKSRVKLAILYEKLNNKKQEYLHNVTNKLLNENQVISMEDLNIKGMMKNHKLARSIQELSLYDFKSKLIYKSGWYGRDIVEIGRYFASSKLCNKCGYKNNDLTLNDREWLCQCGVKHNRDINAAINIENEGKKILNNKIPTRCGELTPLDTRDYSVVELGNEDLGNIV

SEQ ID NO: 55322 - protein, 376 aa, unknown
  TnpB Polypeptide
MLTYKYKLYKTHRTVWLDRMLRECAFVWNHALALQRRYYRMYGKYVSTVDMQKHFTKRIKRHLLYSHNSIEVLQRLAAAYQRFFKKLAKRPPKFRCAADFQSFAYKLHYGYKIDGNCFTINRLKKTYKFHKSRNFDGAIKTVRVKRAPCGDFWLYVVTDAKVESSNTTHDGAVVGIDFGLKTYLTLSDGRSYENPQFFKQTLRDIRKAHRRLSQSVKGSNNHRRRRLELSRLYRGISNHRDDYQWRLAHDLCQCYSTICLETLILDGMRRLWGRKVSDLSHASFVSRLEFVATKYNTNVVHVDKWFASSKLCSGCGYVNKELRLVDRSWLCPQCGTHHDRDLNAALNIRRSGMDALISGSKPTSVAAMSESRIPRL

SEQ ID NO: 55323 - protein, 462 aa, unknown
  TnpB Polypeptide
MVIQSKYTKIFHSKDLTRQKYDELYNFAILIQNHKNIVSRYVNENLLYYLECNKFQFVKEMIRKFKGSVSSSFYEQIYTQVFICYQNKFNNIQRRLVFKVTIVKGFEYYKRDTKKYKKGELKKVILEKKHTPLSNCLTYLARYGNENTIAYIKSNIDKCDINKREFYNNILRCCEKYGFERLYKLALSKRKRIIDKYANNPIEFRSLTFSGRCRKKKIIDYNHRFGSVINSFITLSGFNRKSFDIPVTFNKGWHGNMKDYRKSNPDYEYTLTFNEKKHQVSVKICKDGERYIPEPNGKTIGIDVNCKHNLFSLSNETTYDYDRKLVNDFCKLSLEIDRLKEDRSYVIGKRKQLKLNKLKEKIIKNEQQTIATMCKTLQSQCVGHIVMENLNDGFGKCYVKDGDNEDINYNRKVKFLSLSSLKQEVEHIARKYDIAVSTVQASYTSKMCPICGCIEDGNRPNQ

SEQ ID NO: 55324 - protein, 412 aa, unknown
  TnpB Polypeptide
MVNRAIRYGIQNNITSKFGLCRQLYAAFRRDHPIYAKHIVSSFEIAASILKNFRRRVRRGLQTRTPFVRRLFLKTESQAFRLDRRTGSLSLPIRAREHIELVLPLSAYHRRFLDDDELSVGSLTVLTDRVILILRKERPAAYTPAGVIALDTNESSLDGVYAEGNNIAFIRAPFPEVRRIQQTHFRRRRALDKRKSNDLRTRNRLVRREARRERQRVRQRLHRIANAVVDLAEQRRSAIVLEDLAIPAMSGPSRRMNRRLGSWPRSEIQRQIEYKAQWRGVPVVKVNPKNTSRKCPICGWRQQSRTRASKSDGLFECWDCGWSLNRQLNAGLNILKTALASEEVLARAVWFQPGALRHDAVIPLYSLEGGARQEPNAGSLVACAAIRMTETEPNPIVRRPSRGRARAERERA

SEQ ID NO: 55325 - protein, 414 aa, unknown
  TnpB Polypeptide
MNLFMRVLATARVEAAAPEGGEALLIQFIKMYRDAVQCVVNRIWSLDDVPSEEKLHKMFYSELRRLGFRAHHVSEIYKRAREVVEGAKKNKGSKPVLKKLTARIHPLDYKIDFNAKTLRIAVLNDEWVELKLKWYNYLDKYLDGSWRPGEILVSYRNGKILVYITFHKDVKPIDSRAVMGVDINFSNITYTVIDLNSNLITIGVIPFKGLERALHLKKLAEDLQKRFSRSWWFLKWVRGVRGRWLNKARNILIDSAHRASKRLAEIAKEYNALIVFEDFEKLKENSNNNHKLSWEKSLWCYKRIQMFVEYKAAFHGIKTVYVNPAKTSRKSPNGKKLRFINYRYVELGGVVTSRDVIASWNIALRGLKKLKRMRGSRVKLSPDSPANEGMRTRPNAGNPEAKTKYSQLITAIRR

SEQ ID NO: 55326 - protein, 508 aa, Brasilonema sp.
MKVTYQYKFYPDTKQKLELNSWLRISRYWYNRQLGERFTWWQNNHLQLQAFPQWKEIFPCLFGNRPNYYTQKLQLPVIKQDLVVVVHSGELLDLTRVDSTILQDICKRVDKGFERYIIGDCDGKRSGKPRLKTEASFRTMTFATANNDWIKLVRKNWFYLRLPKIAVVKVRMHRPLPNGFKLKQVSVTKKVDGWYMQMVLEDTSVPDFNPDEEVLHEKNGQYRSFDRRKPPLKLLAYCDMRLDPTINREVLKPAHFLADKCDEITPTWENSMGLDAVLHGDDYLATSEGTKLPSLKSLRKNQHKLDKISRKRNKRSRGSKSRRKLAKKEAKQHQKIALCRKDFQYKTAHKLVRTGKKFFFHEKLNLQSLSKRNAPKQDENGLFLPNGQSAKSGLNKSWMDAAFAQFFEILGHIAGKAGAVVVPQNPAYSSQVLCYRNEIVFSDTDMREYWDEQLLLLVDRDINAAINLKRLGLDIFPRIKRRNGKVSIVGAIDKSTMNEIVYILKRTA

SEQ ID NO: 55327 - protein, 544 aa, unknown
  TnpB Polypeptide
MARGNEVACGVPALELAKVCDTATGVELSPMEWEALFWNHLDHARHCQNMMIRLNRNLSSKGEGFGNEWARKNVRLVSLPTGFRNLSHQNRVNQCETARLTLAWKARERVADALDEIGWDKATLKDVEKLVGEKVDPQLFSNVLSHDAHCELPTVRCTRFPYDQSNNNSCRQGKIDVEHGLVTYRRMAVADQFVDVTLRFPCMKERYPNLVRVSRPTMRLRGDGMIVFDLVAFERRMRTVDVSKSAHVVGFDLNADWHGGISGARLAYNGHVSRELVAGVDTRRQQEKLERLYVEYRRCLAQLKRLMPWQRPSDPDDPIQVAAHPKWARLYKQSLELRDKMYRIKTLLDWRYAHDIIDHARPDELIAVEKLDAFDASGRYEFRHGSQLAKLEHVASRNGRRIVQVNPAHTSDTCPWCHTRIKKLGKAREYQCPGCGRTIPRDYGSAVNIAGKGCRYLGHKHVTPTPPKGRPTRKRPKLTRKRHSGVDHNPSSGTGKGPASFHSQGLPGVATATIRNKRKQTTTVTLRASVAMQLWQEPQLPHSE

SEQ ID NO: 55328 - protein, 375 aa, unknown
  TnpB Polypeptide
MQRTVKIRLDNNEALVKTIQFYSEIYKYILGIGLKNKTFNKVELHKLTYYKIRKKHPNFPSALIQTVRDVSAETLKRTKLKKKIKTKQFTSMRLDKRNLSIKFEDKLISISSIAGRLKINFKDNPMSLRYKEWKPIAGTLSYKNGNLYLNVVVEKENPKTLEFKENEILGIDRGINNILVCSNNQFFNSKRLKKVKGQYQYLRTVLQSKGSPSSRRHLKRLSGKEKRFVLDTNHCLSKTLANSDFKVFVLEDLKRMTNKKLGKKFNKKIGNWSFKQFEMFLNYKSEALGKLVLNVNPKYTSQKCSVFGHQEKTNRKGAIFKCQKCGFELNADLNASRNIANLGKSEVSRLYVNQPIVTSQDSYKPTISMIGIWHS

SEQ ID NO: 55329 - protein, 347 aa, unknown
  TnpB Polypeptide
MQLTYHYRVKSYGGFLNGLARKVNFVWNYCNDVQRQAVRSHRKWLGEFDLNRLMVGSSQELGLHSDSIQAVARRYVQSRTQHKKPWLKWRGSKSLKWIPVSVRALRYNNGDFIFMGHIFRVFLDRPIPAEAKILCGSSFSQDSRGRWFLNVVVEMPVTPKREGGAPVGIDLGLKDFATFSDGTKIANPRTLSKHARKLAVAQRANKRNQIRKIHQKIKDVRKDFHHKLSNDVTKKYNHIFVGDVSPSKLSKTNLAKSVLDVGWSSFRTMLRYKSIRNGAIYTEVMENFTTQTCHICGLKTGPKGLAGLNKREWICDCGACHDRDVNSAINILQRGLKHQALDEGAGS

SEQ ID NO: 55330 - protein, 362 aa, Deinococcus sp.
MQKQSTHNLRVSVDQSAQLRELVRTGWMRQTTEPVSGLAGGRVYVPNAAALTRQCGWHDERLQLGDVRLQTQLYRLPTLEQTALVQASPGYAQHQDERLLTQGLLGQLGPAQQRTWVRQVIQTTCQGRRALPVVLGGGGVRWLQAGTRLVELEGLWFASLTFELPTVPRRAGGIAIGIDVGLSPLVTAAGPGALVQLAPPALPDRLRWATFAAHLDLLPPTAQRELQGRIQRLHYAAARQQLDQMTAWLLGQAACVGVERLDWRTFSTDFPERGREMAMVDWLQSWLPQRLYAAGVRLRRVAPYGTSQGCHLCGRPGARTNHQFVCLSGCGVMDAHENAAHNVRHRAWGGRPYARRKRQRRR

SEQ ID NO: 55331 - protein, 527 aa, Dictyobacter sp.
LKGKAHYEASEDIDLSHRIALQIDWNQEADLRAHLEAARCLYNALLSECNKRLRCMRNDPVWAQARAIPHAHKQERAQAFSLLRKKYHFSEYALHEYAKRARVSWIADHIDSTMAQTLATRAYQATNRVCTGHAKRVRFRSKGRGIDSVEGKRNDVGMRFVLDPNASDGGFLIWNKHVIPALIDWRDPVVQHGMRHPIKYVRLVRRKASSPQARGADRDGNRYWVQLVLEGHAFIKPKHEKVGQDTIGLDIGPSTLAIVPRQGSADLVTSCQEVAPNTSKKRRLQRKMDRQRRATNPENYDEVGRVKKGRLRWKESKRYQATRRHHGTAERRLAAHRKSLHGHLAHRIAQMGTTIIIEKTSFKGWQKQYGRSMSIRAPGMFVAHLARIVAKTGGSLNEIAAFKTKLSQYCHQCGNYVKKTRSQRWHACSCGCGPVQRDLYSAFLLAHLEPEQTIPSITQHVWEGAEPRLRAVMEGLQQRANEGQTLPRSMGLSASRKAARAGARRLKSLAYPHQEPVALTGATGSVG

SEQ ID NO: 55332 - protein, 376 aa, Dictyobacter sp.
MHMLVFEYKIDGNQQQYAAIDEAIRITQFIRNKCLRLWMDERGISQNDLRKYCAVLAHAFSFAACLNSQARQSAADRAWMAISRFYDNCRQKKPGKKGYPTFQHDNRSLEYKTSGWKLAADGRHILFTDGCGIGRLRLVGTRAVETFPLKQIKRVRLIKRADGIYCQFCVRAERVVEHIPTGAIVGIDVGLNAYTTDSNGHTVENPRYLRKAEKRLKHLHRRLSRTQKQSRNRMKARKRLAKAHLKVQRQREDFARKQANALVTSHDLIAFEHLKIANMVKNRHLAKSINDAAWGGFLAWIGYYGAMHAIPIIKVAPHFTSQKCSRCGTMVKKSLSVRTHICSCGLIMDRDENAARNILQKALENGTAGQAGTTTP

SEQ ID NO: 55333 - protein, 423 aa, Dictyobacter sp.
MNPTPEHVEYLKRACGTRRFIYNWGREQWEKQYQAYTLEQETVPEEHRVLTPPNALALKKQFNAIRAEAYPWTYEVTKCVVEGAFDDLGKAYSNFFAGRAAYPKYKKKGKSHESFYLSNDKFTLGSHWIAIPGLGRFILDQRKQEKNRGKLRRKLGTVNLSEKLRFVELGKASAPRKKRPRRKQVLCEKVTILGATMSCEADHWYLSIQVEIKKPLPPTPVPVVGVDVGVKQAAVVSDGRVLENQKPLACHLNKLGKLQRQLSRKQKTKDPHTGKTTFSKNYQKQRVKVARKHQHIANIRRDVQHKFTTELARTCGTIGVEDLNLLGMMANRKLSRAVADAAMGQLLQFLKTKVANAGGEIFIASRWFPSTKQCSCCKHVKKRMPLKHRTYECLMCGLVIERDLNAALNLAWFATEQLRHLRA

SEQ ID NO: 55334 - protein, 430 aa, Dictyobacter sp.
MDTVKIYQLNHLPEKNYHRLRSAQQEAALVWNACVDLHQKARMQHTTWPGRDALQKATKGRFALQSQSVQMVTHAFLANVETTRQLRQSHPEMRMRYPHKEKRFYPVSWPAQAVSKEGKRVVLPMGRGRDSLVLPVELPEQSRSVTLVWNNGYELHVSVEVPQAEEAPGKVHATVDLGEIHLASVTTNTSKAIIVTGRGIRSLKRQRTKALRSIAKKQARCRKHSRRWKKLQRAKGKQSRRAERRIRDQRHQATRQVIDFCVKQHVGTLFIGNPHGVRNKNNGRHHNQRMSLWEYGRDIDYLTHKAEQAHIECFTGSERGTSSQCPRCGHKHKPKKRQWTCKACGFSGHRDLVGSINMHTITFGEQVNFPRSFTYLRPAKSRKSSSRADMPLVSHETCCLSQSALHPHVADVVSSETGYRSDDAEKPVSL

SEQ ID NO: 55335 - protein, 238 aa, Acanthamoeba sp.
MIDKTVTLQYDSDTRKYILFVPRVTPKYSVNKEKNSCGIDPGLRDFLTVYSENETQSICPIEIVVNTTKNEYKKIDKINEIIKTKPNLNSKRKKKLNRGLRKYHRRVTNKMKDMHYKVSHELVNTFDKICIGKLNVKSILSKANTVLKSALKRKLATLSFYRFTQRLTHMGYKYGTEVVNVNEYLTTKTCSNCGKIKDLGASKIYECESCGMYADRDENAAKNILKVGLKPWVQTKIV

SEQ ID NO: 55336 - protein, 527 aa, Acanthamoeba sp.
MKEAVKTVKPKVPAKKRIVTGSKTKKKVFVKKKPPAKKPPDKKPLKKTTKKTVKKVINRPKSIHIPNKDLKIFKWIPTPKKEFTEIETNSWYEHRKFENPNGSPIQSYNKIVPVVPPESIKQQNLANKRRKTNKPIVFISSEKIRIYPTKEQQKILQTWFRLFACMYNSSIDYINSKKVVLESGRINVAATRKVCNKISVRKALKTIRDNLIQSTNPSIMTHIMDEAIGLACSNYKTCLTNYIEGQIKKFDIKPWSISKRRKIIVIEPGYFKGNSFCPTVFPKMKSSKPLIMIDKTVTLQYDSDTRKYILFVPRVTPKYSVNKEKNSCGIDPGLRDFLTVYSENETQSICPIETVINTTKNEYNKIDKINEIIKTKPNLNSKRKKKLKRGLRKYHGKVTNKMKDMHYKVSHELVHTFDKIYIGKLNVKSILSKANTVLKSALKRKLATLSFYRFTQRLTHMGYKYGTEVVNVNEYLTTKTCSNCGKIKDLGASKIYECESCGMYADRDENAAKNILKVGLKPWYKQK

SEQ ID NO: 55337 - protein, 202 aa, Enterococcus sp.
LDFHVSKVRKNPVQSYTTNNQNGTIALIDSKFIKVPKLKSLVRIKLHRQPKGIIKSATISRHSSGKYYISLLCKEEIIELPKTNSTIGIDLGIMDFAILSDGQKIDNNKFTSKMEKKLKREQRKLSRRALLAKNKGTNLFEAKNYQKQKRKVARLHEKVMNQRTDFLNKLSTEMIKNHDIICIEDLNTKGMLRNHKLAKKYF

SEQ ID NO: 55338 - protein, 266 aa, Geitlerinema sp.
MKARYKYRFYPTDRQRVSLAQLFGCVRVAWNDALASSKSDKYPGYKALSKALTQSKKTEERRWLNDVSSVPLQQSLKQLDAAFKNFFNSLKGKRKGKKVGQTRFKKKTNRQAATFTKTAFSIKGDVVYLAKIGDFKPIWSRKLPASPSSVTVIKDCANRYFLSFVVEIEPTNIEAKNPSIGIDLGLKTFAVMSDGTQAESPDYSKPDRRIRKLQRKLARQQKGSKRRNKTRLRMAKLHNQIADTRSDFLPTFRTSNCSTPSSTRRG

SEQ ID NO: 55339 - protein, 396 aa, unknown
  TnpB Polypeptide
MRRAYKFLLRPTAHQRAALESCLEDTRQLYNAALEERREAWRMGKHRITFYSQDAQLKEIRAADPERYSRWAYSCERAAIRRLDRAFQAFYRRCKAGEKPGYPRFKGHGWWDSVEWEYKHGAVWDSVPHPTVTRVRLQGIGHVRVHQHRPVEGRVKTVTVKREADRWYVVLSCDDVPAEPLEPTGAVVGIDVGVASFLTMSDGRHVPNPRPLAAAADRLTAVQQSLARKQRGSNRRKKARRKVAALHGKVRRTRLDNAHKTALALVRDHDVIVHEALQVANMTRRPKPRPAEDGSFEPNRAAAKAGLNRSIYDAGWGIFLNILHGKAESAGRAVVEVNPRHTSQRCAECGHVAKGNRTSQAVFKCLSCGHEAHADVNAAINILRAGLALQEASDAA

SEQ ID NO: 55340 - protein, 416 aa, Richelia sp.
MLKVVKVRLYPDAHQQQSLAQAFGCCRWLWNYCLNLMNQTYKETGKGLSGYAVKKIIPQLKKEYEWLTSTYSQCLQQVCLNLGVAFNNFFEKRAKYPRFKSKHGKQSIQYPQNVKVTDNYLGLPKIGDISAIIHRTIEGKIKTVTISKNCSNQYFAAILFDNGQEKPELSADGKAIGIDLGLTHFAVTSDGSKFDNSRILNKHEKNLKLKQQQLSRKQKGSSNRVKSRNKVARVHRKITNCREDFLHKLSRRIVNENQVIVVENLNVKGMMQNHKLAKAIQQVGWGMFCTMLKYKAEMEGKVYQEVDRFFPSSKTCHVCLNQVDSLPLDVRFWACENCHTKHDRDVNAAINLRDEGLRILTCQSPQRGEPPQGAGSSGTGDKACRPDVSRSKGGRKKSTTALSVGQEAYCGSFASL

SEQ ID NO: 55341 - protein, 522 aa, Paraburkholderia sp.
MQTQKPSRAKRQKRPKHSGVVRVYRFPLDTNRQESAKLFNTVHLCWEARERLVADREADRVAQRALRAAGEKPRYLTVADQYISVARLARDEPRFAAVQSQVLQNVAVRVDEATKRWLETFKSGRRGVRPPHSIEKKEYTSFTYPQYGASARLRHGVLHLSKLGQFRVRDYRRMRGTPKTVTVKFADGRWWVLISCHLQAVDVYRSATEVQELDDTGADTGLTALLTTAHGEVFDPPKALKESLAKLRHEQRNMSRKFEVRKAQYLEEQARRAAQNAEPLPALREIAYSNRLKKQISTVAKLHTKAKNIRQYHHRKIADRIEKTYRCVAVEEHPIKFMLKNRKLARSVADRSIYAQKQQLKSKLGNRYVPVPNKRPGIGGNSQSCLCGEAVPKSLKDRIHECPKCGLRDNRDVVSANIAMLIGFGRAQLMSRPAAGLAVVIRGETEEVGTSPHLERASASEVSVKRTPHANLRKRGKTGGAKATPAAKTPVHRPKKPLPGAAKFPIPPVEGTESRKHRPLGR

SEQ ID NO: 55342 - protein, 410 aa, unknown
  TnpB Polypeptide
MQLTEQHLIRKGDPRYAAIDSAAFASKNLYNQATYQIRQAYIHEGQYLPYAEIFHRVKHLECYQALPRKVSNSILILIDKNWRSFRAALKEWHEHPEKFTGRPKIPGYKHKEKGRNILIYDIQAIGKRAYKKTGRIVLSGLGIEIQTKVEWESIDQVRIVPRGSCYVVEVVYQKAEKQAEVDHRVVAALDLGVNVLAACTSTKPGFQPLLINGRPLKSINQQYNKHRAHLQAQLAKASTKRFTSRQLDRLTTKRNRRVNAYMHAASRRIIDLLVAEGIGTLIIGKNRYWKQEVEMGRKNNQQFVQIPHARFIDMLIYKAKLMGIDVRITEESYTSKASFLDLDEIPTYDREQSGTHQFSGKRAGRWYRARSGRRIHADINGSYNTLRKVIPTAFELGIEGFAVIPRRLAV

SEQ ID NO: 55343 - protein, 281 aa, Mycobacterium sp.
VGGPDLHREFGVLYDHPPPGSRRALPHGGVAIPALPYWVSPGNDATPQGDLFATGPVVGVDLNDGHLAVRRLDAHGNPVGGAHRIDIDLRGSSARRDAQVRHAITRLIRYTQRHHINAIAVEDLDFADARATGRETMGRGGRGKRFRRTVAGIPTAVFRSRLAAQSHTAGIELFAVNPAYSSIWGDAHWRTPYKNVTRDQAAATVIGRRAQGLKARRRKGVTRQRPEDRGVRATNQAAPQNQQANTDSRHRPGTRGAKSRAPHRIRTRLPDRATATPGNGQ

SEQ ID NO: 55344 - protein, 225 aa, Sulfobacillus sp.
VIKSATISKTPTGKYYVSLLVEFEMSSQPVAPVTETVLGLDYSSKSLVIDSQGNSVDYPKFYRQAEAKLKKAQRKLSQRKKGRKNREKQRRKVAKLHEKVANQRKDFLHKLSRQIANAYTAVVIEDVNMRDMAQSLNLGKSTNDNGFGMFKTFLAYKLADQGKQLVVIDKWFPSSKRCRFCQKDNKPLTLADRVWICPHCGAELDRDINAAINIKNEGCRILGIA

SEQ ID NO: 55345 - protein, 395 aa, Sulfobacillus sp.
MILAHKIALDPNDAQETYFRKAAGTARFAYNWALTEWQRQYDAWKADPTGSKPSDPALRKQLNAMKREQFPWMLEVTKNAPQMAIIHLGQAFKNFWNGHADYPTFKKKGRHDRFTLSNDQFAIQGHKVRMPHIGWVRLREPLRFLGRVIEGTVSRTADRWFLSVTVEIPDPPRIRRENQAVVGVDLGVSALATLSTGEKVVGPKAYAAAQAKLRRLQQHFSRQMEVAKARAGLQPGQPIPKGMHIPWSKNMVKTQRRLARLHAQIVNIRADVLHKLTTDLVARFDVMAIEDLHVAGMLKNHKLARAIADMGFGEFRRQLEYKAAQRGKTVVVVSRWYPSSKICSACGYRMAQMPLSVREWTCPACGMHHDRDINAAINLQTVAESSMGGCPSVLA

SEQ ID NO: 55346 - protein, 405 aa, unknown
  TnpB Polypeptide
LRQRFFAKESFFTRTELDKFVRANSAEDYRAMPSAASAQRQVLMVFEQMKGWSKAMASYKQQPEKFQGKPNLPGYKKKYRTFIINRNGYKIENHHLYLTGGKEYGFPPLKIRCCETQAFNAKIKETVVGDVRIMPLGNSFVLELTFEYDGAQTENLKPDASAACSIDWGLNNFATMISTKAEVPFLLVKGGKLKLINPWRNKQVAELKSLGKPGHIATKSRRRYSRMEDYLHKASCLVIEYCLAYDLGTVIIGHNPQRKTECNLGKVNNQNFVFIPHARFINKVKYKAQSYGIKVIVREESYTSKANALDFDVVPNYGVDEQPVKGKFSGNREKHDLYCTANGTAISADINGALNIARKELGDEWLKKQLKANGGRMNRPVSVRNIGQTLKEGLRSLETASVRAL

SEQ ID NO: 55347 - protein, 399 aa, unknown
  TnpB Polypeptide
MLISHRIALDPNDRQTTYFARACGTARFAYNWALAEWQRQYKEGGKPSEAALRRQLNDIKAEQFPWMLEVTKNAPQQGIKNLGAAFKRFFTGEGRYPRFKKKGVADSFRADNGTDKNHQHAVEVNGRRVKLPVLGWVRMHEPLRFNGKVLSAVVSRTADRWFISLTVEIEHQTPVRESQAVGGVDLGVSSLATISDGSTWVGPKALRSNLARLKRLSRSLSRKVKGSANRRKAKAKIARLHARIAHIRAYALHKLTTALVTRFAVIGIEDLNVRGMMANDRLSRSIADMGFHEFRRQLEYKAAMYGSRVVVADRWHPSSKTCSECGIVLVALPLSVREWDCLDCGAHHNRDVNAAKNLMKMAVSSTVTACGEEGPGLGLAAKVKPASMKQESNIEATYA

SEQ ID NO: 55348 - protein, 408 aa, Weissella sp.
MKVVRKMIKTHKVKIYPNATMSKELEKLFDYRRFIWNKGLKVWQEMYEESQLMADKHILPNERKVRDELVRDKADWQYRLSARVLQLAVKDLAQAWHNFFNPNMPNHQRPRFKSKKRSAKSFTTERAKIIAGKLRLDKPREGISTWFDIRLAEMPRWHGELKLVTVKLEQDGYYASLAIEMPEVVVDYNRSKATGVDANIGRFVYQDDDGYQTQATLPNSLLKLYERVTLYQRQLARKRVENPKNYNSKQYQTTRAKLKRCYQRIMRIQGDILNKFTSKLVAKYGVIGIENLDCQHMKMNKRLAKNLHRSMFGKFQLMMQYKAAWQGVTLVCADQFFSSTQRCSNCGHIKIGVDKITLSGNRKHGTKHHEYVCYECGFEADRDENAVENLKQYAINSVWGQAIVPTIG

SEQ ID NO: 55349 - protein, 450 aa, Weissella sp.
MKLENLSKTVDHIYVRRYRVVVTPELIEHHARNMQTQKQLWNFANKYLERTYGRKHLNRPYPNNKKQKSVVIDNIRAKFIKENYSLDRWNAKVVGLHSQGANEFLTTLLTNFGEYRKVLYRASKMTTQENTDCVNNVHGNNSQHRSWYRKGSLNYLHGNNSFKTVSLPNNNQVEIVSAHHIKIQDYGELQVVENISNLRNVTIAITKLKRKSNGQFELQLVLKRQVARVEPTAKVAGDWNMTNNKVFHTSNDEEIYISNDIVTKADALERQINGLKSKRDKSVWLGRSSRRFARMNDEIRRLNIKRENVLDEQYRQLAHVLMDDYDVVVIEDLDAKDMRAKKRQARSANRKLAMIKPYRMAQLIEMLANRTGKTLIKVDAYKTSQVEFGTTHEEKHDTSVREWVSTLTGKLVKRDLNAAWNILYWGLHPEHHIKLKDYPRLSVSSLVTIN

SEQ ID NO: 55350 - protein, 440 aa, Okeania sp.
MRTAYQYKLRPNKEQLATIEMWLELLRRQYNYRLGERFSWWDENRCPVNACPLVMPIPRLRDNPDYYSQKKDLVNTKDKFPDYKLIHSQVLQDCIKRVKLAFDRWLKADKKGTRLGKPRFKGKGRYRSFTYPQIKQNCIEENKINLPKIGKIKLIQHRPLPSGFQIKTVTISRKADGYYVTLSLEDKSVPYFPDVEPTTENTLGIDMGLKEFFVTSEGESVPIPQYYRSSQKRLKTLQKRLSRKKKGSKRWLKAILAVAKKHKKVADKRKDFHFKTANKLLSKAEVIAHENLNIKGLAKTRLSKSINDAGWGQFLTILTVKAGNAGQKTIAVNPQNTSQDCSNCGKKVPKELNIRTHSCPHCGILIDRDLNAAINIKNRATGHPVLKARACPMQWQDYETRSPHYSESLVWEYVTTGLFEYCVIMADNVKFRVDYNPTEV

SEQ ID NO: 55351 - protein, 409 aa, unknown
  TnpB Polypeptide
MLIRKAFRFQLRTDAALEHELRRASGCVRFVWNRALAMQKERLGKSERCLSYPKMTAELVLWKKAPETSFLQEGHSQALQQTLKDLDRALKDAFDKKSPKRFPKFKKKGVHDSFRFPQGTKLDGDRIYLPKFGWVRFRKSREVEGKIKNVTVSRHLEHWYISVQTEMEIGVPVHPSTSAVGIDLGVAKLATLSTGEVIQPLNSFRGKEKQLARAQRALARKKKFSNNWKKQKAKIARLHARIADARKDLLHKTSTTISKNHAVVVLEDLRVKNMSASAKGTLEKPGKNVRAKAGLNKSILDQGWFELRRQLEYKEAWLGGQVIVIEAHHTSQRCSACGHVSPNNRLSQAIFACEECGHRENADLNAAKNILAAGHAVIACGEVVRPVSTKAASGKQEPTERVAKNAKAA

SEQ ID NO: 55352 - protein, 371 aa, Bifidobacterium sp.
MQVKRHAAVVYRAYPTRGQCALIERTIGCARFVYNQMLADRIEHYKQTKESLRNTPAQYKDRFPFLKEVDSMALCNAQLHLNRAYSRFFKDPQHVGFPKFKAKHKAKPSYTTNCIKGNIRLEDDGRYLRLPKLGRVRVRQHKRIPDDWVLKSVTVQHTRSGKYTMTILFEYETQIPEPRAPKHFVGLDYSSHDLYVSSDAEKPDYPRFYRRAEQCLAREQRKLSHMQEQSNNWYRQKTKIARLHERVRNTRRDFLHKTANKLVEQYDCVCVEDLNLQAVSQSLKLGKSTMDNGFGLLRDMLAYKLEKHGGCMVKIDRFYPSSQLCRDCGYKNTDIKNLSVREWDCPQCGVHHDRDVNAALNIRDEGKRLIS

SEQ ID NO: 55353 - protein, 515 aa, unknown
  TnpB Polypeptide
MSATTPTFVIEFALRVNDQQNRSLTQKFEFGRMLYNATLGTALGRLQRMRESEQWRQVCAMPKGKERNKRFSELQKSCGLTENGLRTIANNHRKASGRNDIGAHEAQCIGRTVWRALGRYLFKDAGKPRFKSFTRGLNSIEGTDNHEIMYKPERQVIVWRKQVFQLIDVDTPYRKEALTDLNDKTGFKRIKYCRIVRRTIKGSKRWYAQICLQGYPPVRKVYAPQSEVVGIDPGPSQIAYFHERYAAVVKVAPNVDLQEKVVRCLQRKIDRARRANNPGNYNVDGTIKKGKLKWEISHRMQKLSAELAEHHRCLAATRERDHGTLANLLLQMGGTIKIEKNSYLSYQRNFGKTTTRSGMGSFVAHLKRSAERAGAKVLELNAYELKLSQYDPVTDAYRKKPLKERWHRWGGSETLVQRDVMSAFLACYVTENGHNRALLLEKWPTAEALLSGSGLCRQEPRNDQGEPNSLRLTKPESESQTARVRGLPRTLCARSEVWTEKTKVIPSERASCKSK

SEQ ID NO: 55354 - protein, 405 aa, Symploca sp.
MIVYEMKLAGEKEQYGRLDEAIRTGRFIRNSVIKAWMEGGIKSRNDAYKYCKVLSDNPAFPWARQLNSMARQAHAERAWAAIERFARNCKNSKIKKKGYPKFKKYRVRESVEYKTSGWKLSSDRRYLTFTDKFNAGIFKLWGSRELHYYQLEQIKRVRVLRRHDGYYAQFLIDHQREEEKELTRKQTGLDVGLNHFYTDSEGNKVENPRFLRKDERRIKKLQKRLSRKKKGSKNRAKARNRLGRTHLKVSRRRNDWVCKLAQRVIQSSDLVAVENLKVRNMVKNHKLAKSISDAAWYRFREWLEYFGSIYGVPVIAVEPAYTSQNCSNCGEKVVKALSTRTHKCPHCGYETDRDKNAAINILKLALKHLSTTVGQTESNASRENPLYLELETSSNKGTRRKRKYP

SEQ ID NO: 55355 - protein, 375 aa, unknown
  TnpB Polypeptide
MQQTITAKLRILVNSSDKQIICDTMKAYSNACNYVSEYIYKTHNLNRYGVQENTYYQIREIFGLRSQMAVSCVRTVIAKYKTILENQKERIKPVFRLPQLDLVWNRDYSLNSKNDIFSVNTLNGRIKVSFYKNGFEQYFSDNCKFGTAKLVSKHGKFYLHIPVTYEISELKQSEISNVVGIDRGIRFLAVSYDSKGKSVFYDGNVVKQKRAHYKALRKQLQQVGTPSSRRRLKAIGQRENRWMQDMNHCISKALVESNADGTLFVIEDLSGIRSATEKVLVKNRYVSVSWSYYDLEQKLSYKALKHHQLVEKVNPAYTSQTCPKCGHTEKANRNKKLHTFCCKNCCYKSNDDRIGAMNLYRMGIELLVPDAVATE

SEQ ID NO: 55356 - protein, 414 aa, unknown
  TnpB Polypeptide
MKLKVRVETHQITKSHKLYEFCDRKCYESKNLYNEVNYILRQRFTNQKEFNKNKFTSNYYDLIKEFKNCDASEHLTNQFYEPILKLLGEDWKSFFKTIKDWKENKNKYKGRPNLPGYAPTGETGRKIAINRKIYRRKDGKFKFAGEPVDFKPQTENKLKQARIVPKPNGKNVEYYNLEIVYDKEVPETNEKRENIAGIDFGQDRLASVVNNIGEKPFAINGKPINSINAYFNKKRAKYMSYVDNRGTSNKIKKLTRKRNNKIKYFFHNVSKYIVDWCDENDIDTLVIGKNKNWKNESNMGKKNNQNWISIPHNMLVEQIEYKCEDIGIEVLRQEESYTSKASFLDKDKIPVYKSGEKNAYEFSGKRIKRGLYKASDGTIIHADLNGAYNIVRKKLGNVFNKKIYLHPEIININN

SEQ ID NO: 55357 - protein, 617 aa, Mycobacterium sp.
  misc_feature (392)..(528): Xaa can be any naturally occurring amino acid
MPKFEVPDGWTVQAFRFTLDPTEDQAKALARHFGARRKAYNWTVATLKADIQAWHASGTVTAKPSLRVLRKRWNTVKDDVCVNTETGVAWWPECSKEAYADGIAGAVEAYWNWQTSRAGKRAGKRVGFPRFKRKGRDQDRVSFTTGAMRVEPDRRHLTLPVIGTVRTHENTRRIERLIKAGRARVLAISVRRNGTRLDASVRVLVQRPQQPKVVHPGSRVGVDVGVRRLATVATADGTAIEQVENPRPLGAALRELRHVCRARSRCTKGSRRYRERTTQISRLHRRVNDVRTHHLHVLTTRLAQTHGRIVVEGLDATEMLRQKGLPGARARRRGLSDAALGTPRRHLSYKTVWYGSALVVADRWFPSSKTCHACRHVQDIGWDEKWQCDSCXXXXXXXXXXXXXXXXXXXXXXXXXXXXXXXXXXXXXXXXXXXXXXXXXXXXXXXXXXXXXXXXXXXXXXXXXXXXXXXXXXXXXXXXXXXXXXXXXXXXXXXXXXXXXXXXXXXXXXXXXXXXXXXXXXXXXXXXXPAGMCKTSAGTNNGNATDAQWSISVMTALPSTSHATRTPVASSAQLGPPSSVEPTVRPGLAGLVAVKRGREAAARLPNNPETGCKSRDH

SEQ ID NO: 55358 - protein, 280 aa, unknown
  TnpB Polypeptide
MARRVKAIRATVSMKIALSDSLLALVNNYVKALRFTLFWLKENVPNPNEKGVLSKVHEELYTRLREEYNLPSKVAEDCYRDALSIYKGWYNNPRRGRFPRVYKPTVWLTPKASYNVDFERMTVRIASVGELPILGYPRNLKEYMSWRMREARLVIKGDKVFLKVVFEKEEENVEPKESIAVDINMAEVVVGKDDKNYVRIPTRLEEVHHWKSLAENLQKKYPRRWRGIRGSFTGFIPSTKRLGELQRILLGKLGSGLLKLPRIFVLMLLSWRVLRTSSRT

SEQ ID NO: 55359 - protein, 553 aa, Halopolyspora sp.
VRSARPCRCCRRPTRPWIPSSSSLPSVRRSYAGSPTWPSCSDTADRETRYAPGAPASDRERPVWLRGGWSNSPRTLRGGPVTCCYGHEASGTTTGRSPGCGFLASSGLPIGGSLGVQPGRSRSRMVVGDQHGTSSHIRNCYHMIMARTRVKRAYKYRFYPTQQQRTELLRTFGCVRKVYNLALDARTRAWFTEHRRVNYAETSKMLTEWKRSEELSYLGEVSSVPLQQALRHLQTAFANFFAQRARYPRFKSRKKSRPSPEYTRSAFTWRDGRLTLAKMAESLTIVWSRPLPEGAEPSTVTVSRDAADRWFVSILVETSTEHFPTTDNTVGVDAGLDSLATLSTGEKITNPKHERRDRKKLAKAQRELARKDKGSNNRAKARRKVARIHARITDRRRDHLHKVSTRLVRENQTVVIEDLQVRNMVKNGTLARAISDAAWRDFRMMLEYKAEWYGRAVIAVDRWFPSSKTCSVCGRLAGAMPLHMRTWTCSGCGTSHDRDVNAAVNIKAAGLAVSACGAGVRPQRESSRTGQSVEKQELSGASRKEVPALQGRE

SEQ ID NO: 55360 - protein, 309 aa, unknown
  TnpB Polypeptide
LKRILLNTEIIDLTFHHTNKVRNKTWLFFTNCNCRVKGDNCIYFVKDIIKPIKTNVKKDELKQVRIIPQATCYVVEVVYERKETDLGLNKDNFLSIDLGLNNLCSCISNVETNSFIINGRVMKSVNQWYNKKKAKLMSFVGNKGTSNRIRKITLFRNCWIEDKLHKISRYIVDFCKSNNIGTIIIGLNKEWKNEINIGKRNNQHFVSIPHSKLIDKIVYKANLLGIEVITHEESYTSKIDHLAFEPLKKQESYLGKRKKRGLFQSSVGKLINADINGAIGIARKVVGDSFIGKIIDSGFVFNPVRINIL

SEQ ID NO: 55361 - protein, 421 aa, Brasilonema sp.
MTCASGKLYNTVQFTQRQGFFYGWGTQSQAKLDVMFKSDSNYAAMPAKVAQLVLKQNADAWSAYFKAIDAYKLEPEKFTGYPKPPSYIDDKNVVKFNYQAVSKKEFKKGYIVPSMSPIRIPVKPGLKFDDLCEVRIVPLSGCFVIEIVSEIPDKSEFFCSRNPELAASIDIGLDNLATIVFSDPTIQPIAVNGKPLKSANQFYNKQLARFRGFLPDGRGTSRRIQNIVRNRNNFVDSYLHQSTKMIVDELVKKGVRLVAIGKNLQWKTSVNIGKRNNQAFTQIPHARFIEMLTYKLEKVNITVKVGEESYTSKASLIDWDIIPTFDPNNKSHSRAEVPSVERSGVIKNTFSGKRVKRAWYVSKDGFRIHADVNGAFNIGRKVIPNSFNCLQDIVVRDRGCLVVHPRRLTPVFCPKGKIGVA

SEQ ID NO: 55362 - protein, 410 aa, unknown
  TnpB Polypeptide
MIVSRAYKVEIKPNNVQKTFLNKSCGISRLAYNWGLDFVKTSYENGDKYLGAIGLHKELCKIKSTKYPFMYEVSKLAPQNALRDLDKAMKNFFRGVNQGKHIGFPKFKSKRYSKNTFRIDGANIKVSNSHIKLPKISTIRLKENGYIPIKNVKYMNCTISKDIDRWFVSVVVQYDENENKNHIEEVIGIDLGIKELATCSNGDVYHNPKFTKKYERKLKREQRKLSRKKKGSQNRNKQKIKVAKVYRKIRNSRVDNLHKLTSSITKTKCRMIVLEDLNTKGMMKNHKLSKAIADSSFYEMKRQLEYKTKFYGGETFVINRWFPSSKTCSSCGAIKKDLKLSDRIYKCDCGFEMDRDLNASINIQNYYTVSSTEFKDYGENVRLGSDLLEPKPSSLSEVVNEHENSFAKFL

SEQ ID NO: 55363 - protein, 412 aa, Campylobacter sp.
MQITKGFKYRIYPNLEQQKLLNHQFFIYNQAYNIILDLQKKQMQINKNLDKSQRTYLIAVQLDNKVKEILRQRELAFKSVVTQQARINLLRALKDKTKGFPKFKNSKFAKQSFNWNNQGYQIKDSNNPKFKIFHLMKLPLKMRYHKDLPQNYKLNQITISKSHNKYFVSFSITYENPSVSLISSQNLDIKKAVGIDLNINEIALSSGRLIKTNSKLISKAKYDNAFKRLQRKQSRRVLRAKKEKVKLGANFFKTQIELNRIYEKASNIKKDLQHKITSQIVNDFDLIAVEALQTKNMTKRAKLKNVKVKSGLNKSILDTSFYQFLSFLEYKTSHNGKIFTKIPPQYTSKTCSKCGSIKADLRLSDRIYICKECGNEMHRDINASINILNRALESFELGINSLDYKQQALCVS

SEQ ID NO: 55364 - protein, 431 aa, Actinomadura sp.
VDTLCYDVGVKLVMQVKLLPTSEQASALSATLQTCNALANRVSATAYREKVFSRAGLQKLVYAELKAAGLSAQPALHVIRKTADAYTTLHAQIDAGLLGGENSKRRRKAASKPITFGDLAAQPFDDRCLSWQTDARTVSIWTVHGRVQGIAFTGHPSHLKTLATRRKGESDLVYRDGKWFLYATCEIKAAEPFDPVDWIGVDRGIVNLATTCDGTNYQGKGLSRYRRAQARRRAELQSKKAAGSRSAARRLSRRRAREGRHAANVNHRIAKQIVADAQRTGRGIALEELSGIRDRVRLKRHQRATLSTWPFHQLGTAIAYKSQRAGVPLLHVDPAYTSQTCPRCGHVARGNRPARDRFSCRRCGLAGPADHIAAVNVRQRARTAWAFVSMPDPAPVQGKGDATPGPQPVVKGSATKRARSSRKLGRSRPRS

SEQ ID NO: 55365 - protein, 374 aa, Ktedonobacterales sp.
MNKNITRTICIKLDLATHDPVLTATMKAFNSAAAWIARVCWDEGITNTNTAHHRVYGETRERFGLAAQLAVNARAKAVEAVKSVKAKKRETCPVFGPRGSVRMDNHHSYSFKPLDHVSLLTMEGRITCRMILGARQHAMLTDPAWESGTADLVWRRGVYYLHVTQSRVAPDVDDTGGVIGVDLGIVNVAVDSDGQIFTGEQVRKVRARYKRQREELQKVGTKSAKRKAKRKSGTEARFQSDVNHCISKTLVAKAVASCKALALEDLTGIRERLTVRHEQRYERHSWAFYQLRTYIAYKSAHAGVRVTLVDPRNTSRTCPECGHCAKANRRTQSEFLCQQCGYTALADFVGARNIQTVAVNQPMVAAPVSVCRKS

SEQ ID NO: 55366 - protein, 405 aa, Methylococcus sp.
MSVNKGPIVLMPAAEVEPTMLRVHKIKLDPNQEQEVYFRKACGVARHAYNWALATWKRQYEAGEKPNEANLRKQYNAIKPVEFPWALEVTKCAPQQAIKNAGTAYKNFFDRLKKGKKGRDVGYPTFKKKGLRDSFRADNGPARKGANAVPTDGKKIKLPIIGWIRLREAVRFSGTIQSTTVSLMADGWYISVLVETQDVLQAKKNHGVVGIDLGLKTLATLSTGECVKGPKAHRALGKRLRRLNQSLSRKTQGSANFRKAKAKLSKLHKRIADIRQDAVHKLSHRIATEFSVIGIEDLHVRGMSRNGNLARSVGDAGMRMFRTQIEYKTSMTGAFVYVHPRFAPSSKVCSGCGQLHDMPLGKDTLSCDCGLVMDRDLNASLILEYAASSAVSACGENGSGAALAA

SEQ ID NO: 55367 - protein, 365 aa, Azohydromonas sp.
MLYKMTVRVLRLRIKDRHAKWLSERAREVNTVWNYCNELSRKVWERERRFLSGFDFWPFLKGVTKEGLGLPVQTVQEVAEQYAVKRRTVKKTRLAWRKSGGTRRSLGWLPFKVRTIRYAHGQVCYAGHWLSLWDSYGLGNFELRAGCISEDARGRWYLNVTVNEPDFVGPLPMPPVSDCIGIDLGLKELAALSSGEKVAAQRFYRDLEPALATAQRAGKKTRTKAIHAKVANRRRDHLQKLSTTLVRQHRGIFVGNVNAAALARTHLAKSVLDAGWSALRTMLQTKCDRAGVWFREVNEAFSTQTCSSCGAMSPERPRGIAGLGIREWTCSGCHTTHDRDVNAARNILAVGHGRLAGGITVLQGA

SEQ ID NO: 55368 - protein, 395 aa, Chloracidobacterium sp.
VKAYKYKLKPSAKIVAIFEIWLRLLCELYNAAIQERRDAHRRCGVSIGKKEQSAQLPDIKKDRPDVARIYSQVLQETLNRVSLAFQHFFRRVKEKKEKAGFPRFRSHRRYDSFTYPQSGFKLDQKRKKLHLSKIGSVKVHLSRPIEGVIKTCTIKREADGWYVVFAVEEAAHKITVAPDQTLGIDVGIKVFASLSTGEQIDNPQFLRHGEVELKKAQRRVSRRVKRSNRRKKAVKLLAKKHQQVRRQRRDFHFKEAKKLVVRFRVIKFEDIQIKNMVRNHHLAKSISDAGWRQFISIVAHKAEEAGGRVEEVKAAGTSTKCSRCGQHRKMPLHIRTYRCGACGLIIDRDHNAAINIKERKGRTVLSSRRSVATVEEARTYRATDPESPTIKRPRA

SEQ ID NO: 55369 - protein, 372 aa, Defluviitaleaceae sp.
MIKAVKIRLRPTKAQEQKLLQSAGVARFAYNWALAREKENHETGGKFLNDQALRKEFTELKQKPEYSWLYETSNNITKQAIKDACIAYKNFFKHKAGFPKFKSRRRSTPAFYNDNVKLKFKNERFLLEKVGWVKLSEPERVLQGKFYNPRITFDGKYWYISVGQEVQKPKMQLTDESIGVDLGIKKLAVCSSKYEVENINKAPKAKKQAKKLRRLQRKISRKYEINKKGKEYVKTSNIIKLEKEIRLIHRKLTNIRLNHIHQATTAIVKTKPSRVVMENLNIKGMMKNRHLSKVIGEQGFYNFKRILEYKCNFYGIQFVKANRFYPSSKTCCECGHIKKDLKLSDRLFKCSHCNSEIDRDYQASVNLSRYTA

SEQ ID NO: 55370 - protein, 253 aa, Okeania sp.
VPKFKKKGRDDGFTLDGSISVGFNRIKLPRIGWIKTYEILPDNVTPKSVTISRKANRWFISFKVETIPQITEKSVDIVGVDLGVKNLATLSTGEVFPGAKPYRELEAKLSREQYLNRHKSKLSNNWKKAQLKIAGLHRKMANIRKDTLHKLTTYLALNHSQIVIEDLNVSGMMANHSYVACNVAKAVADIGFYEFRRQLEYKCELYGSKLTIVDRWFPSSKTCSRCGTESRVSVVIRARNQIANTAILAVTGT

SEQ ID NO: 55371 - protein, 310 aa, Hydrococcus sp.
MRFFVSRKITDNWEVRTVTISSQADGWYVSVLLRDETIPDFPLKKETELQTVAAVDVGIRKIASISNGETIPNPKIYKQLERRLKIRQRRYSRTKKGSHNRTKQIDRVSRVHQQIRRQREDFQWKLGRFIAISADVIVFEDLNIKGMKARCKPKRDQLTGKYLKNNSQAKSQLNKAISDGAWHSLRLKTQHQAAKLGNWVELVDPRCSSQQCHQCGYVSPKSRQGEKFICENCSFHEDADVNAAKNLAVRAQNKLGIATLRVVSPKVTPKPELTGIKETSLTLVGEPGNLQSVRYMQLSLFDLIQEWETG

SEQ ID NO: 55372 - protein, 194 aa, Mycobacterium sp.
MEHIDNPRWGRRAADKLTAAQQRLQRARRGGRNRQAKRATVAARHRKIANQRKDFHHKQARGLVEVYDLSVVEDLAIANMVRRAKPVPDPDTPGQFLPNEARAKSGLNRSIYDAGWGGFLAMLRAKAEDAGRVWIEVDPRHTSDGCEKCGHAARGNRVSQAEFVCQRCGHRAQADEHAARNILRAGLALHTQAA

SEQ ID NO: 55373 - protein, 388 aa, unknown
  TnpB Polypeptide
VKTYNVKINTTDSPFLIQTLKDVRNCYNFISELVFNYDKGWNTLNLKSMHHLVYDKARTQFPNLPSQTIIKCYKNVLSNYRTIKANKQKITEPITSKNLSLRLDKRLYNRLTKTSIDLFSSTKYKLCKAQFILYPKVKELLNKYDVCDPLLFVRNDELYISLTFNVPSPLASNDDVLGIDRGIRRLITTSDGLVIKGSEYQKHKRKIRFLKKKLQSKGTKSSKRKLKKIKRRERNFSNNYCHLVVNEILKTDKDVIVLENLKGIKSKTSKHKDSNKKRTTHNRVFSQIPMFKLEEILTYKAAHLGKMVQTVSPYKTSQNDCRGLKDGIRLGTRYCTIDGFQLDADINAAVNIGNRYVKHLKITYPHRGDIVYLSRLIVNKPNAVGSNS

SEQ ID NO: 55374 - protein, 394 aa, unknown
  TnpB Polypeptide
MIQVSRFRLYPSKGVEKKLFSSFDKCCSVYNYCLEHQAFKDNVLPQLKQEYPELYEVHSIVLQNVVHQLQSNLHVLHALKAKGHRVGKLRFKKRHHSMIFEQTGFKIDGDTLVLSKIGRISMRVSQPIVGTVKQVIVKCNRTHKWFACLVCEDSVEPLKSIGRKVVGIDLNVSNFCMDSDGLIVEHPRNVKKASRQLAKQQQKLAHKKKRSHNYRKQKRRVALVHERVELRRNDFLHKVSRYYVNRYDLIAVEDLNINGLVQINGGAMRKLMLDAGWRKFIDFCGYKAESAGKRRVKVDPKGTSQDCSCCGRTVWKTLSERTHRCSFCKTVMPRDYNAALNIKHRGLEMVGWDTAEPSFPDNFGKSSTLAEIKISTLVSEREQILVEEARISRL

SEQ ID NO: 55375 - protein, 394 aa, unknown; identical to SEQ ID NO: 55374
  TnpB Polypeptide

SEQ ID NO: 55376 - protein, 285 aa, unknown
  TnpB Polypeptide
VNFEKGLLYLPKIREGVKIELHRKFDDKVKSVTISRTNEGKYYASILVETQNPRNKVVEPKSRACGIDLGLEHFVTVTNDFRSYKVEHPKYLLKGEERLKRLQKSFSKKQKGSKNSEKARLRLARQHAYITNARNDFLHKLSKAIIDENQVVVVEDIHVKGLLKTRLAKSIADSGWSKFLSYLKYKAEWYGRTFIQVDRFFPSSKLCHRCGYKNDDLTLHDRTWCCPACGETHDRDENASINLYYVGLGRPEVTPVEQALVDDRSPNGLPKKPSCDETGSLTSYG

SEQ ID NO: 55377 - protein, 410 aa, unknown
  TnpB Polypeptide
MLLKDQMLFKGVVFRLDSGLPADARFLLEDFRLAVNNAIRAGLQARVTSRNALSRLVYKDFREGHPKMYAQHLVSALEVAAGILRNHRRLVRRGAARSIPYVRRLMMKAENQAYKLDRKSGVIDLPIRAGRHVKLGLIVSQYHRKYLDDMALTLGSLTLLPDRVIISFRKEAPSAYTPESALSLDTNERSLDGVLVEGDDGVVVKADYRDVAVIQQRHHDRRRKLQKKKAHDRRMARLLCRGEGAIEHHRIEYRLHQVADAVLSFAEGKKSAVVLEDLTGMRFKRGKEMNRRLSFWPRRKLHQIIEYKAQWRGIPVVKVDPRYSSRKCPICGRIQDSRMGTEFVCECGWHLDRHINASLNLLQTAISNGMVGGLRFDPGAFQHDVMMILYEPAMAARSEPNGTSQADAMS

SEQ ID NO: 55378 - protein, 490 aa, Moorea sp.
MPKKKGVTKKISTQIVPVIGMTETVKAELLSTMKKLGIVRSESYNKLGSICYWGIDWKKAYPEVKGFRTPESLGLPSKLAEWTVSDVAKAITAQQAACKDAVIKNIYQRFPGKENQNKRKELCKQLKTLAFLENTLLHRLVRKEYQRGHSWVRNQIVYQQGGYKCKRLSRNTYQLELAGLKRGKRNKIVVKYNRKIKGQIRLIYNQLLQRFEVHFLVDYGTIEIPVERRSIGVDKGYTEAFYDSDGQAHGKGLGKVTTKKSDRICAKNRNRGKLWALHRKLEKIDPDKSARILENNLTRKTENRRYRQNQTELAAIIGAASKSLFNEEALKVFAEDLTQPIRNKRQSKAVSRKLNSWMKGAMRDSLQKWANWTGSVVTEVQPSYTSQIDSRTGTLLGKRTGDNFTGFDGVVLQADYNAALNILARGTDKEITRYMNKTEVQAVLLRRTARYLRGMGLSLLDGVELGWLDLKHSKTKAFKQLLAGMPGTPR

SEQ ID NO: 55379 - protein, 370 aa, unknown
  TnpB Polypeptide
MLKNKAYKFRLYPNKEQSILFSKTFGCVRFIYNQMLSDKIKHYEKTKEKLNNTPAKYKSEFVWLKEVDSLALANAQMNLQSAYNNFFRDKSVGFPKFKSKHKDRNSYTTNNQGGNIRIENKHIKLPKVGFVRIKQHRQIPDNQIIKSCTISKTPSGKYYVSILVEYEQEEIEFNPNTDNFIGFDMDMKNLYTSSNGVRAEYPRYYRKIQDRLAREQRKLSKCQKGSNNRNKQRIKVARLHEKVANQRKDFLHKLSNQITNDYDGACIESLNMRAMSQCLNLGKSVSDNGWGMFTVFLGYKLGCQGKPLIKIDKWFPSSKTCNHCGYVNDSLTLSDREWVCDGCGTHHDRDWNAAINIKNEGIRIYVADVA

SEQ ID NO: 55380 - protein, 413 aa, Lactobacillus sp.
MDQTVTVKAKLLNIDEETAHSFMQTMVKYKDACNFISQYVFNHAFELKQSKLNKALYRDLRNKFGLKSQMAQSAIKTVIARYKTVKTQLKQKPYRYDAGKKDGKGHAIWAQTFRNLSWLWYPIQFKRPQLDLQRNRDWSYLSSTKQISLNTLQGRKKVDFVCKSFDQYLDSDKWKFGTIKLLKFRNQWYMHLSATVSLPEYQPEEAEHVVGIDRGLRFLASCYDEKGKTLLFNGQKALRTRRKYKKLRAQLQAKGTKSAKRRLKQIGQRENRWMSDVNHRLTKTLVDHYGANTLFVLEDLTDVRFATEKTAKDKRYEMVSWAFYQFEQFLTYKANLNSSAIVKVPAKYTSQRCPKCGRIRKENRDHQLHLYVCDRCGYKSNDDRLASMNIQFLGTLYRSGEEAPQFNKQASAE

SEQ ID NO: 55381 - protein, 461 aa, Lactobacillus sp.
MFAYPVKYKYLIYEEVKYMKRMSSLAYHFSVKLRFYPSSKQKKIIKLNYDAQRFVYNSYVGRNRSSYHAKRYLAVKQSHAMPFAFPAFNHYEKKLAEAVVANNELLAKPKNIRDTYSFLRVKEIDSLALANAIQNYQKAWNNYRKIGHGIPTFHKKRSDWSYQTNCQYPKQSEAYLDNGTARFIDAKHIKLPKLGIVRIAGFRKLIKERLLKQIPTRIGTVTIKKTADDQFYLSMQLGSDTAFVKELPKTQSQIGIDLNLDNFLTASNGAMVANPRFYRKTKKKLAHAQRVLSRRQRRAKKEGRNLWLAKNYQKQRLIVAKLHDKIRRQRNDFLQVLSTALIKNHDLVVAEELRNRNLLKNHALSQSISDVGWRSFLNMLAYKADLYGKEFLTIDPKYTTQRCHACGSIMGQNGYKKLTLKDREWTCPICRMPHIRDWNAAVNILEKGLGNWQNPKIKKAA

SEQ ID NO: 55382 - protein, 593 aa, unknown
  TnpB Polypeptide
MLKATKSIERAISASMSKHCWTLKDRYDSQFSVAFYPIQLSDTKRVEIIHRAEEIRSVRNDISEIFFSDMLGFQDMTKFEAFNFFNPTFNTRLSGHYLKKAIEDVWRAYQFRFDAIRKKIEFVKVDELVPSFYKINVKGHKKGELKSIEVHTKKTELTKVLTWLARYGKEETVYWLESVIPTVQESKQKFYRTILDKIRKFGFSRLMRLALSRRTAVFSEYEKRGKITFESLTFSGRSRITRPIVGARRNETGKFDYFIEISWDWFNQGYRGDSKNTLCMPFKYNKAYHRSLNRYCNGRDTSYTMVVREKDIHVVLTRDGYRYKNTDEITEENTVGIDVNSKHNMFALSTGEFIPNDDDLIADLETELLKIDQKQKNYNARFDKDEEHDAFKISKKDKARIEAITLKLSESNKRSIVLLCQAFAAKGIKHIAMENLDGFQGSKLHADDSKGFNLGRLYLRTGLSSLKDEFIHIAPHYGLLVSLVQPEYTSKMCGECGCIDNRNRQTQEEFCCIECHHSENADIHSAKNIKFRLTSTVLRGYLLERAGDSGYRYFQPKSLFRWQVRKFLEKCRCDGLFKRAIGNHERLIVSKFE

SEQ ID NO: 55383 - protein, 189 aa, unknown
  TnpB Polypeptide
LKSINQYYNKRKAELQSLLPKGQYTSNKIKAITFKRNKKISDYLHKTSSLLVSHLVSNNISTLVIGKNDNWKQGTNMKKANNQNFVSIPFNILIRQITYKCQMNGINVLLQEESYTSKCSFLDGELPKKHETYKGRRAKRGMFKTSFGRKINADVNASYNIMIKAVPNAFNGEGIEGVAVRPSRYNIAC

SEQ ID NO: 55384 - protein, 383 aa, unknown
  TnpB Polypeptide
MGKTLEICRQTYNELLSIRQTTYEVTREGLSKFDMNNCIRYGVDADISQVHSQVLQNINDRICMAYANFFRRLKEKRSGKKIKVGYPRFKKKYKSFTYPQNEHGFSLKGNKLHLSKIGIVNVRIGRTQNKPNGQIKTLTVKKEPSGKWFAIFSSIEKEKKRHKINNKKIGIDVGLEYFAMLSNGIEVDNPRFLIESEKRLKLLQRRLSRKKLHGQNWNSAKNQVALLHEHIANQRHDFQHQLSHRIVSGYGTIAIEKLNIKGMIRHPYLAKHISDASWGTFARMLCYKAENAGAELLEVEPRGTSQMCSVCGNKVPKTLAQRWHRCPYCGIKIQRDLNSANAILTVGTTGRYACGDRSPVLASQKRLEHSLSKKQEAPQLVGG

SEQ ID NO: 55385 - protein, 408 aa, unknown
  TnpB Polypeptide
MNKAIKLQGIGLTHKKQKELAEARTEAKRIIEKFILPNIDSCEDNGQLQKKVYADIRRESHLPSQVLLNLIRSSFHLKQKPTDKRNAERITLDYNIPRACKMFTLDNGKLCFAITLRPRHRIVIPIEMNGSVKRFQKHIDNGWKIKQIGLTQNNDIIATISKKKTSKNYKNILGIDTNSNNVSVTALAPQGRVLKQLYLGKNLYNRKAKILRRKAKLQSYADKGSSKAKEKLRRLRRKVRNINKNAVGEIAKEIHKIAERYQAKIVFERLHKFEANKDKAFNRKVTLIPFKMLAMNTAMRSVDTGVPMSYVESYHTSKWCSGCGSVNPPHDSRNYAIYRCGNCGLIVNSDRKASLAVAVKKFAERKEYFQFSAKRVPVNALFRGNERDATQATENAIALPDPKEAICL

SEQ ID NO: 55386 - protein, 350 aa, Salmonella sp.
LIILRATKVRIYPTPEQAEYLNAQFGAVRFAYNKALHIKKHAYQRHGVNLNPRKDLKPLLAVAKKSRRYGWLKEYDSIALQQAVINLDVAFSNFFNPKLKARFPAFKRKHGKQSSYHCVGVKVLDGAVKIPKIPAIEARLHREITGTLKSITISRSATGKYYASLLCDDGMEAPAKPALISNVTGLDMGLTHFAIESDGNKIANPRHLINTSHNLRRKQKALSRKKKGSANRRKARIQLASVHERVANARCLGIVGLRYRPPQTNRQLSPAYLHFPTCQKLGVKYPEVTPHGLSPPPAARSAWSCWWPSPPVRVNSSLCRLMLPLLRWHQSMTPCVPLPGPGQYKHQRTG

SEQ ID NO: 55387 - protein, 409 aa, unknown
  TnpB Polypeptide
MSEVKEDRIFGSYLFVNYANKGKLEKVRRVLKEYRKTAKAIADFLWREFFENGYFPHKKSIKKEQMQCIQSKLSERYKYVCLWQVYGVLGGYIANLQNQFARIVWRSTLSREDKLILLALNNSKGWLRYEKESITIYDNGEQREVEVKAWHKHLAKKIFKHLLGKNRRPRFEGIALHLDGKVAELEPRKEGKAKAFDYWLKLSTLDKGKPVLIPLKKNPYAESLEGEFRTFYQILEENGDIKVRVVKELKKKNYVPATDTIAIDLGLNPLIATNSGDLMGRRFFDFLRKMDEKIVKRMAQVQRSGDLPSRDSKYREYVRRLREFLKNEINRVLNRLINLYKPMKIIVEKLDFRSPELSKRMNRLIQNFGKRYVKEKLARLQQLYGIEIVEVFCFRSFEHPALLCQRLLW

SEQ ID NO: 55388 - protein, 429 aa, unknown
  TnpB Polypeptide
MLLTQTVRLKLNNSEKEKLISLCRLSKNLFNVGLYTVRQYFFQQQKYLSYESNYHLCKDNENYQLLATDCGQQTLKYVDRCFKAFFRLLSMRKQGTYQERVNLPRYLPKDGYFPLIIPIRERHNFAKDDWRFKIPTSRKYAREFGTIYVVVPPNLRGYRIKEIRILPKQKGRFLDAAFIYESQDERVNILHNEAISIDLGLNNLATVVSSTNESFIIDGRWLKSINQWFNKRRAKLVSHKDRQRIEHLTKLEACLSYRRKNQINDYLNKAARYIINFCIARKIGTIVVGYNPTLKQETNLGKRNNQNFVQIPIFTLRAKLESLCSRIGLNYVEQEESYTSIASSLDRDQIPVYNADNPLQPKFSGRRIKRGLYKTKAGHLINADANGSLGIGLKSSYKEVFLRVSRVCLTQPVRVNVLQESPVIATDGA

SEQ ID NO: 55389 - protein, 453 aa, unknown
  TnpB Polypeptide
VYSAQHTLIREQKYSALFAYLDLNSRLAKNLYNASLYRVRQIFTGWDKDSRTANEQEVFDEVRKTEEMYNIGIRRVISYYHLEKLMRATHNPDFFSGLPMHTAQHVLKLAVQNFKAWLEALKAYRRDESAFLGKPRMPGYLKNERTTFVVSNQEAVVYREKGHIKLPHTKEKLSASNVRESWRLKQITVKPMHGAFDVVSVFEMPDTEGRIADGTYTESAAIDFGVKNIAAIVYTDGRSRIYKGGALLSELQLYAKRRAKAVQAMTHGHKNRKASSKRLTRMDLDHENYVRDALHQISRSIVNNCLEHKAGTLVLGVNKLWKQESGIGRQSNQQFVLMPIARLRSMITYKAERAGIKVIVQEESYTSRASFPDGDDIPEYGKAVEPTFSGKRVRRGLYRTADGLILNADCNAAANILKKALPAETGKIKDFQGLVSPEVIRPKRSPVKGIAAA

SEQ ID NO: 55390 - protein, 387 aa, Lactobacillus sp.
MIVTKTQLVRLCPNQIMTKQLVALCDYRRYCWNQGLATWNDMYEANTINPIDNPKPNQYRVRNELVANKEDWQDKLSARCLQLAIKDLAQAWQNFFDKAQPDWGKPQFKSKKAARQGFKTDRAKIINGKLRLDRPRGVVKEDWFDIKLAEKPQMTKLLTVSILKESGHYTAALTYQFEPKVKAKTGQKTAVDVNIGHFNWTGGNLQVLPRKLVKLYERIKHYQRQLARKRTVNGLKTALKSCNYQAVKNKLQRDYRKVNNIQTDLLQKFTTKLVTDYDQIVIEDLDVKAMKMGIASKGLHRSMFGKFRQELVYKCKWYGKELVLASRLYPSTQRCANCGYIKTGPEKITLAGNVKHHTKHNEYICYQCGYKADRDENAVRNLLALAK

SEQ ID NO: 55391 - protein, 454 aa, unknown
  TnpB Polypeptide
MVPQVVRKAYKLNICPLTKTKTKKLTDLEDRYRTVLNIIKTGVEFWDAIPGSDDLPFKKYNLQKLLYKGISKDSNLQSQQIIDALSDAWVNRKDPCARFKHPTIPYNCPRSGKLGQTAKGNPVIAIAIDDSGSKRMAIPIAMDGAWNRFRKEIDKGWTFTYFELHHRKSKGDDQWCVIVTLRKEFIVKDLEQSKTVLGIDIGCGTLAAGSVLNKKGMVLRQRYFGRDLAHRQRNIGLRRSKLQSYASNGSRKARKKLKKLKGYEKNLVKTRCYQVAHEVVDWALKYDSMIAIEDLKGLHRHRKRTKAKDGKRIGQPRFIERKINRKVHRMPNDIFSSALTSVSYQNCIGAGKVDPSYSSQTCSRCFAVNSEYRKGCIFHCGKCGLLVNADRNASVDIGRALLAERSKVDMTVAQISGRDDRVNGHAWDHDGGRDTGRGPARTPESKPVNLFTGG

SEQ ID NO: 55392 - protein, 397 aa, unknown
  TnpB Polypeptide
MNLAYRYKAHPSKEQQKELHRQFNIHADIYNKALETLNNSDEWISHYKMNNKLPKWKREEHPEFKTVHSKAAQETVGRIYRAIQGLSAQKQKNRKVGKLRYKNTVNSIEYNQSGFTVHDDYIELSKIGEIPITKHRPVGGDEIKSVVIKQTQTGDWFISVIVSVDETEEIPIEDIHADDVIGIDVNVSNLFADTEGNKLESLYKFLKPELERVKKEHRNLSRKEYGSNNYYKQKQKLAKAYTDLVNKRDDVLHKLSKWYVEKYDVIALEDIDSKELSEQGLGKYIRSQAWSRFAEFVNYKASQVGVHVVSVDPSYTSQDCSNPECDNRVKKSLSEREHSCSECGLKLDRDVNAARNILRKGLEKIGQGLTEFTPVETGTSCDTVSLRSVVEAGSLDP

SEQ ID NO: 55393 - protein, 457 aa, unknown
  TnpB Polypeptide
VSVVFEAVKVALDPSPVQERLLLSHAGAARFAFNAGLAHVKAGIDTGAKPEWSYYALVRWWNANKDALAVNADGTPWWAENSKEAANTGLRSLASALSNWVKSRRGARKGRRVGFPRFKAKDRAAPRFAYTTGSFGLIEGDPKALRLPKVGRVHCMENVAARVGGARVLRMTVSRRAGRWYAALTVEREDKPVTQVPKGGAVGVDLGVKTLATLSDGTVINNPRCLAASERRLKRAQKALSRKTVGSNRRAKARAKVARLHARVAYQRSDAIHKATTMIAQTYLHISVEDLNAAGMVKNHHLAKAVSDAAFGEFRRQLEYKTARTGAVLHVIDRWYPSSKTCSGCGRVKAKLSLSERTYRCDGCGLVMDRDLNAAINIEVAGSAPETINAHGGTGRRNDLGSCNAGPSEVRTKLRYKPRETWSGRAQARPTSHKQVACNGTARERGESWPVTLTIGR

SEQ ID NO: 55394 - protein, 485 aa, Moorea sp.
MQGLPTFFAFDFAILLSSVFLYYRNTDDTQSKVDAMQLGYVYKLIPNLQQEVTMGRWLDMLLAQYNYLLRDRNDSYEQVKSPKMGDYCDFKTKVEACPLTCSVNKSTSIGYPWKKSQKNPRRSVYEVQSSTLPTLKKERPWYKEINSTVLQQMLRQLDTAFSKFFKGEAGYPKPKRRSRYRSFKYAPGQVKLDGNRIYLPGIGWMRFHNSRPIPVGFTMKSVTVRRKSRGWFVSIQIEDKSVPLPPVKKKSEINPDYVKGCDLGVRKLVSTSDGRTITNPANSAKYKRQGRRLRLRQRAASRKQKGSNNRKQSFSRVASLHEKLANKRSAHHWEVAKKLTDGADALVFEDLNIKAMKSRCKPKPNENGGYERNGQSAKRGLNRVISDAAWGELIKKVEVVAAKSGIPVIKVNPRHTSVECPKCHHTSAENRDGEKFVCTECGYHDDADVNGGVNIKNKGLKKLGIDPTQLPSVRRKVTPMETTVV

SEQ ID NO: 55395 - protein, 385 aa, Halomonas sp.
MLHVMMKRAYKYRFYPTPEQALLLARTFGCVRFVYNAVLRYRIDAFYEHNEKIGYTAANAHLSRMKKADETAFLNEVSSVPLQQCLRHQQTAFKNFFAGCARYPRFKSKRHRQSAEFTRSAFTYRDGRLFLAKCKEPLAVRWSRELPGEPTTVTVSKDSAGRYFVSCLCEFDPETLPVIPKMVGIDLGLKDLFVTSDGHRIGNPRHTAKYATRLAKAQRRLSKKKLGSKNRAKARQKVARLHARISDCRMDNLHKLSRQIVNENQVICVESLRMKNMLRNPTLAKSISDAGWGEFVRQLEYKAVWAGRQLVAIDPWYPSSKRCSGCGHVMDEMPLHVRTWTCPGCATDHDRDVNAAVNIKAAGLAVLALGEKVSGMGQVSMSGSR

SEQ ID NO: 55396 - protein, 389 aa, unknown
  TnpB Polypeptide
MKRTNTFDLKPGKEEEAVLREWADNCARMYNEINYKRRQAFFNGEFDWNTDEFYHKYKKSVGAATAQQIIRKNDEAWKSFFALLKAYKKGKIEDKPHPPGYWKDRTTGKRILRIFVRNDSYSIDRKYIRLPFGLKVRWRGRNKWSGKPGRLEIVYDALSGRWICYMPVEVDQPLHQPIGDKTADVDLGVRCPIFASVEGETWGYTANSILADWWYLTNRIAKLQKELENSGKNTSKSLRRLYRKRKRRFRAKINKIVADFVRKCWARGVAEIVCGDLRDIRNNAKFSKKSNSMIHNFWSVGYTYKRIREKAEEYGIVVRRVDERGSSSECPLCHSKRVVKRGRLFKCLDCELEAHRDAVGGVNIGLARGEALPAGVINRAVTRPLLFTV

SEQ ID NO: 55397 - protein, 336 aa, unknown
  TnpB Polypeptide
MILTYKIKHGMDFTAELAKARRVAEFAVEHHTLSSKDVKHIGLKSIISNQILRKYSRNKNIKRVHNVNLIVPNQGIKVDKTKRKIRIPCLNFSFLYRFPNNFTKVNQIEISKEYIFVSVTVPEEPQMETDKWIGVDLNTTGHVAVVANPYTGKMKKLGKKASHVHNKYKNIRRWLQKRGKYRVVKRLKDRESRIIRDMNHKISREIVETAKEAGCGIRMEKLKGIRKRARVRKPFRYSLHSWSFYQLQRMIEYKARLLGVPIEYIDPHNTSKVCSRCGAIGERNGKEFKCPKCGHVDHADANAAFNISMALHRGIGQSTADRDVVEGSAGTPEGQW

SEQ ID NO: 55398 - protein, 412 aa, unknown
  TnpB Polypeptide
MQLTQQIKIGMSIAQEIVLLALSEKCRLIYNFALKEREDAFEQNIKEINYVKQQNDLPELKNKFSEYHWVYSKVLQYTLRTLDADYKSFFALHKKGDKNARPPKFKSKNFFTTMCYNQSGFKVGNGWLELSHKHPLGTKLRFEIPTKLIFDKISQVSIYKKNNDYFLSIIYDKPEIEFQDNQQYQAFDLGIIKQTAINLQSKFKEFTNQRPDKYWQKPISKLQSRRDHCKRLSKKWYVLNNLHNKCKKKLSNQQKDFQHKLSRKIVDNTKANTIIVGDLQVKNMCKINKYEKGLHRSLQNTGHIGRIVWFLTYKAKLIGKRIVEISERGTSKKCCCCGKEQDMPLQNRKYICDCGNQIDRDRNSSVNIMLCYLSQNGLWIVYWQFVNNLRQTGLIIISHSQEAMSSNLLFRV

SEQ ID NO: 55399 - protein, 423 aa, Natrarchaeobius sp.
MDVAPRRTVKIKLDVPRERRGDLHQTKDQFLHCTNRTSEWAWRYDDYCVTSKNKAENALYDELREETDLTANLVQKGIRRAIEAVQGGVEKLKKGEKTSQPEFDSWSVVYDKRSATFNTDHATLSTPNARVTCEYVFPLKEEREDTPFGRYYENDDWDASSATLQYDEQDDTFYLHVTLKNPDYEGDGTERQEASHDDDGAENGVVLGVDLNVTGAFAVTSTGKFIGSADYLTHKRDQYEQRRAKLQQTGTRSAHLTIQSIGSKFSDWSLDWLHNRANNLIVEAQRADVDGIIFEKLDHIRENIANGSKFQQWAYARFVELVEYKVESTALFVDTVNPAYTSQRCSCCGFTHENNRNDKQFECVDCGYEVNADYNAAKNIANRYCGYIHRGQKSRGGWATSQLALKSGTLNVNGAYTPAELLG

SEQ ID NO: 55400 - protein, 233 aa, Campylobacter sp.
VLRAKATNLIENSFLSIDLGLNNFVTSIDNQSKQPFIINGRAIKSVNQFFNKLRAKYTQTLKLSNNKFHSKKLANPALKRDCKINDFMHKSSDFIIKHCVEHKIANIVIGKNKEWKQEMNLGKKTNQNFVSIPYNSFIEKMAYKCENYGIKLHLTEESHTSKCDHLANEPLGHRENYLGKRVKRGLFKSSTGKFINADLNGAIGIARKVFPNAVQTLRDSGTAFVPIKISIGF

SEQ ID NO: 55401 - protein, 403 aa, Moorea sp.
VIKVLVMEFKAVLKESQKKAVDEAIRTSKFVRNKVLRYWIDNKGIGKKELYRYNTQLRDEFKFVKDLNSHACQASVENVERAVARFFDNCKKNVPGKKGFPKFKKHYRSVEYKQSGWKLSPDKKSLKFTDKKGIGKVKLKGTWDLWWFDQKLIKRVRIVKRADGYYVQLCIKVDNSENLEVTGYALGLDVGLKEFYTDSEGRTEPNPRFYRKSEKRVKFCQRRVSRKKKGSANRRKARNRLGRAHLKISRQRKEHAKRLARCVIRSNDLVAYEDLKVKNLVKNHCLAKSINDAGWRQFREWLEHFGQRFGRITVAVNPAYTSQNCSECGEVVKKSLSTRTHVCKCGCRLDRDHNAAKNILNRALSTVGHTGTYKNAWGDLSSTKPGSGLVEQDKSVNQESPDF

SEQ ID NO: 55402 - protein, 285 aa, Rhodoferax sp.
VSEEYCTRRRQFKKCKLRWRASRGAKRSLGWIAVKAVALRYKNGQIHYQGQPISLWDSYGLANYDLRSGSFCEDARGRWYLNVTVDVKKPPSSQGKGSIGIDLGLNDFAVMSDGTKIEAQRIYRGAEQKLAVAQRANSKKRIKALHAQIANRRRDFLHKLSTELVQNNGAIFVGDVNACGLGKTTLSKSVYDSGWSTFRTMLRCKSYSAVRQWTCSVCGIGHDRDTNAAKNILARGLALMADLAFCQISVAGEAKAGEAAMNEVVGASTTAGLDMALWMQESSRI

SEQ ID NO: 55403 - protein, 210 aa, Cyanobacteria sp.
VIVNKGYRGVAASIISLHPFLKQSLKPIRASNKQLSQKRKGSRQREKARKHLLRQYDKVANQRCDWFWQLAHQLTDSFDRLCFETLHLKGMKHLWGRKVCDLALGDFLQIVEWVATKKGKQVVYIDPWYPNSKTCSNCSYVLESLDLSTREWQCPCCRCYHRRDWNAANNIKAVGTPTVGLGKVRQTLSAIPARTPLHRLNPWEWVKIYD

SEQ ID NO: 55404 - protein, 397 aa, unknown
  TnpB Polypeptide
MSRYRLLPTPAQEAVLRDHCAHARFIWNLAVEQQSHWRPGRKSAPGYLAQCRQLTAARKEYPWLAAGSQMVQQQALRDFAQAMANFFGGTHGHPSWRKAGRDEGFRVVAVEPGEVRRLSRHVGEVRVPKAGLVRFRWSRAVPPGVKSYRVTRDRAGRWHVAFASVPQPIPAPGSGLAVGIDRGVAVSAALSTGELLRVPGLGGAERKRMLRLERKFARARRGSNRRRRVRHAIARLKARETDRRKDWAEKTSTDIARGFDVIRVEDLRITDMTRSAGGTAGNPGRNVRAKAGLNREIMRSGWGLLVRRLEEKAPGRVEKVKPAYTSQQCSACGHVDAKSRESQARFACTACGFACNADVNAARNIAAGHAVTARGGDGVARPVNREPQLLASLTGRE

SEQ ID NO: 55405 - protein, 397 aa, unknown
  TnpB Polypeptide
LARTGNLALQGGEECAFSSLLEVLTKLNFKFRTSKMKIAINLKLKPTEDQAKILFETLEVCNNLCNAFSRHAFETKNFNQFSLHQAKYHETRESSELSSQMVVRCIAKVSDSYRADRTTLHVFRKWAAQPYDDRIFSFKEGDQVSLWTLSGRMKIPFVCGEHQRKYLRFRKGEVDLVYGKHRKKWFVNLVCDIPEQEPEFSEKVLGVDFGIVHIATDSEGEVFSGTPIENKRLWYQERRKRLQKKKTKASKRRLIKLSGKQARFQTWVNHNISQHLVSKAKRTRSGIAVEDLSGIRDGVTARKSQRNRLHNWSFDQLRSFVSDKSRRKGVALFVVDPRNTSRTCPECGCVDKKNRKSQDRFSCIACDYSALSDYVAARNIAKVAVNRPEFPTRRKAG

SEQ ID NO: 55406 - protein, 454 aa, unknown
  TnpB Polypeptide
MYTAEPVSDRYRKCLFDWLAAHAPLWNQINYRRCQQYFDDNGDVWDAEYTDLYGKYAPILGKATCQQVARKNAAAWRSHFELLSLYRDESNQAVTEKPSPPGYWGNRDDGHELHGVVRNDLYTFDWNEQRSTVEFGVGDVLKDRYDFEHNERITLQVRGDPQWRGNDSRLELIYEEHADQLRVQHPVRIQPDDLTEQRQAAFTHTLNRENTTQAAAIDVGANNTLAIVTEAGDTAVYHARPEFERFQTQSDRIASLQSHLPADQWTSDRIRRLYDDRSRKRDHSRDAAVKHAAEWLLERNVATVYVGDLTDVLETHWSAEVNEKTHAFWSHRQLVTRIKLTFGDVGITVTETGEYDSSSECPACTSDRVTRAGDSFRCDGCDLAAHADVAGAWNILQSEVGPMARPAALSAERDRDAPTDGAYWQWNDHNWIPADYRKQLWSPDQPSVSKPARS

SEQ ID NO: 55407 - protein, 401 aa, Methylobacterium sp.
VILTYRQKLRPTAPQHRLLDERLERQRLLYNAALQERRDAWRLARKPITRIDQQKSLTVIRADDPDGHCADPVNMGRWTLKRVEDAFTGFFGRVKKGGKAGFPRFKPLSRWRSFGLLEATGLRHEGDRIRLKGMDRPIRLNHDRPLPGDAKILGVTFTKVGRHWYAGFTVETSEVVATTPPAGEALLTLSTGERIPNIRPASRREREIRVSRWALARCKKGSARRRKVKARLGRQLRRVANARDTHLHRVSAQLTREHSLIVLEDLRIANLTGSAAGTVDEPGTNVAQKRGLNRSILDAGWGKLVGLVRYKAVRAGGKLILVDARNSSAECRDCGAVAAKPLSLRRHVCPCGADEHRDVNAAGVILGRGLAALAASEGGQPLGDANVGRQAVRRPGTLLAA

SEQ ID NO: 55408 - protein, 208 aa, Okeania sp.
MFVLEFKVKAKTKQYQAIDDAIRTSQFIRNKCLRHWMDNRGVNKYDLSAYCRVLAHDFKFANELNSQARQASAERAWSSISHFFDNCKKKVPGKKGYPQFKKFSRSVEYKTMGWKLLNPKTINFSDKKRIGILKLKGTWDLRYFNESDIKRVRLIKRADGYYCQFVLSCQIKEEVKPSGQCIGLDVGLASFYLNVDRRPALSRRGASG

SEQ ID NO: 55409 - protein, 242 aa, Limnoraphis sp.
MEQVLTIVCKIEPAPEQVKKLELTLGAFASACNYINSTVNPKIKNKNRIQAEVYKTVRERFQLSANLAVRACARVASNRKTADLKKRPVKVFKPTSADYDARIFSYREKDQTVSLSTVEGRERVQLILGNYQIGKLKGKTPTSANLSKHRDGQLYIHIQIKNTTPTPKSTDNVIGVDLGRRDLAVTSEGINWSGENITKVRDRFSRIRASVQKKGTKGAKRLLKRLSGREKRLSYLGKPQHQ

SEQ ID NO: 55410 - protein, 400 aa, Holophagaceae sp.
MKRAFRYGFYPTREQAHLLNRTFGCVRMVWNETLRTSDARWKNGGSRLTYRLASSHLTDLKKRLEFQFLNEVSSVPLQQCLRHQEAAFSAFFAKRARHPRFKGRRGRQSAEFTSSAFRWKDGQLALAKMKEPLAIRWSRPLPLEAVPSTVTVSRDASGRWHVSLLVEDPTVVPLPAVAETVGVDLGLKDFAVLSTGERIAHPKHYQRKLATLTRRQRRLSRKKKGGANRRKAQAKVARAHAHVVDARRDFLHKLSTNLVRRFKRISVEDLNVAGMVRNRCLAQSIATSGWAEFRMQLFYKCQWYGRTFVQVNRFFPSSKTCSTCGHVLDLLDLGTRAWTCPECGTRHDRDINAAINIDLAAGRAVRVCGADVRPRHGAIHIGQSALKQKTSVAKPGIPFV

SEQ ID NO: 55411 - protein, 474 aa, unknown
  TnpB Polypeptide
MKRTVKTKANCSNNEEEILLIGTIQRNIKNYVWSRYSGIGSLLKQSGWTIRDELIQKDLLSSKISKTLSRVAIEKSASTIKINWKATKKKVKRAITQNENLTEDDKRYLYLCLKYTPTLYNILNYKKVDYQTDYLKDLSVNIHRLNNLLRRYIRRYKTKSYTKQTNVILTSNLYKFNPNNNEFSFTGKKSYSQLKITLIGNIPKLKGTLELVKNQKSNQYYLHVPLDRFISKKQMTDESEILGLDIGITDLITLSNGSVYGANSAELFYTLSDNLVNKNRSRLFSYKRKLEERILTEQDLSKKSILELKLRNLEENNLGTQKRSAKIGKYKSRIVSHINCELNKMVKYEDVQEIVREDLSWPNKKRKKRNLSRKQRNRFSTWSKGTLLERLSVKLTEKRITETIINPAYTSQVCCKCNHLGSRNGKVFKCSNCNISIDADFNASINIKKRKFIEEINIYTPYKQVKKYYENTPV

SEQ ID NO: 55412 - protein, 368 aa, unknown
  TnpB Polypeptide
MMVYKIEISPTQEQKSIIFRTFDATRLVYNYFIEVNKARYENGYPYMDNMEFSKTFNNYMSRLDWVRDKSLKISSKAVKEAMKDADKAYQRFFKGLSRYPRFKSRRESRKSYYLCGSIHVKRHAVRLPNLGWVLLKEKNYIPAGSGVVSCRLIYEGGRFYVAILTQDDNSVNNQLSNDGLGVDVGIRFLATDSDKDVYPNINKSSRVKHLKKRLKREQRKLVRRNKKSLRREKTRQIINRIHYKISCICIDHKNKVVSALVKKKPSYITIETLNIKGMLKNRHLSRVIHEQGLHDFMTRLANKARQYGIELRRVSQYFASSKLCSTCGTKNDPKHKTFWVCASCNTRHDRDINASLNLLNATQYMIDK

SEQ ID NO: 55413 - protein, 383 aa, Actinoplanes sp.
VKLVVQVKLLPSQGQAAVLESTLRACNTAATEVAAVARKIGCYRNYDLRKHVYQAIKTSHRLGAQAAQHVIKKVCDAYKTLAANVRAGNYGKPGSQRRRAVETNPISFRWQAAQPYDARMLSWQHDARTVSIWTVDGRVKNVAYTGSPDQLEAVTTGPVGESDLVHRDGMWFLHATVEVDEPESIDPDGFLGVDMGIANIAYDCDGTRYAGTKLNGYRRRQLRLRRRLQAKNTKSARRLLARRRKKEARHAANVNHVIAKKIVTEAARTSRGIAVEDLTGIRARVRLRKPQRVTLSSWSFHQLGSFLAYKACRAGVPLVEVDPRYTSQTCHRCGHRDKRNRPDQETFHCRSCGVVAHADHNAALNIAVRGAQGWGAVNRPHAA

SEQ ID NO: 55414 - protein, 230 aa, unknown
  TnpB Polypeptide
LKGATVSQEADDKYYVSLLYVAEEPEHEIRSVKTAIGLDFSMRELYVDSHGAHADYPHFFRKSQEKLAREQRRLSHCEKGSGRYMKQKKKIARLHAHIARQRKDYLHKESRKITNFYDLVCIESLNMKEMSQDSRFGTSVHDNGWGMFTDFLSYKLERAGKKLVRIDKWYPSSKICSCCGKLKKELKLEDRIYSCTCGNQMNRDENAAINICREGLRISGVELETERKIS

SEQ ID NO: 55415 - protein, 137 aa, unknown
  TnpB Polypeptide
VARCHEKITNKRKDTLHKLSSTLVKENKIICVEDLNVKGMVRNHNLAKSISDASWGEFFRQLDYKSSWAGRVVVKVPTFYPSSQTCSCCGYQNKEVKNLNVRHWVCPKCNTSHDRDKNAAENILKKGMDMLAMPAAS

SEQ ID NO: 55416 - protein, 325 aa, Actinomadura sp.
MSRAAVDCGVAAETPTGHGTPGRDEQARPGEQHRSRGAENGLRALTPPFVAAGPSGVSISTRLKRLTPEGEVSIRLPTPLTDLANAAHGRYVLSARATFPHRGTEWADRVEADRAVAYRIHHVVDRGRWYLTASWQRRPAPALPLEAARAGGIVGVDTDKTREKHGRRKRFRQLISGLPTGRLQARLTSMAAEQGLAIVVVDPAYTSRWGAQHWQQPMRTPDREVSRHDAASIAVGRRALGHPIRRRTAPPPAHRSDEQGHRTVQTEPETPGREETRHPGPEPAHDARPRTGQRTRATSASNTVRDARRTRTRVQDPLLNTVWER

SEQ ID NO: 55417 - protein, 393 aa, Mycolicibacterium sp.
VSRYRLLPSAGQAVKLAEHCRDARYVWNLAVEQQRHWQPGRRVPRYNEQCAQLTAARAEYDWLAAGSHNVQQQALRDFAQAMTNFFAGTHRRPTWRKAGLHEGFRQVAVKPHHVERLNRRIGRVWVPKVGWVRFRLSRAVPQGVKSYRVTCDRSGRWHIAFAHVPDPIVGPGDGSVVGIDRGVVVSAALSTGELLHVPGLSAGEAKRLRVLQQRLARAERGSKRRARTKRAIAKLNARETDRRKDWGEKTTTAIARRFDAIRIEALDTRAMTRSARGTVEQPGRQVAQKRGLNRGILRSGWGLLARRLQHKAYGRVEQIPAAYTSQRCSACGYVAIGNRKSQAVFECQSCTAGPCNADVNAARNIAAGRAVTARGDLGASRSVNREPQLCLPT

SEQ ID NO: 55418 - protein, 353 aa, unknown
  TnpB Polypeptide
VKKRKKRAKKGEPQTITKAVTHIRLQATNPGKLTALDTLATVYLELTQQYTTFFCTDELPNGFRAPCFLTPLSERWHRVAMQHGAGIAKSWRSNRAHAYQDHLDALVAYQEQQADGTREEGTKEPEWDEWTIPTLRQPCIQANGNVIKLDEAKESTFDYWLKVSTLDKGNPLLISVQLADYHKEQLTDPKTGKRRMINRSMMLNKREETWWLTLTYDETIAVQTVPDAPVIGIDVGIANFVTTSDGKQYGTFRRRLRERQKRDREKRRRKAKLRSCLEKRGVPKEKLPSTSSATGQRLVRHIRQSINRAVNLCFEEHEGSQFAYEQLSVGSMRYDARALNWHTERQISIFTRR

SEQ ID NO: 55419 - protein, 383 aa, Streptosporangium sp.
MKIVVQVKLLPDAPTETALRETLRACNHAANHASRRAFDTGITGKTPLQRLVYGELKEMGLSAQPAIHAARKTAGAYATLKANLKAGNHGREGSKRRTTVEAKPIRFRKDAAQPFDDRCLSWQLDARTVSIWTVRGRSGRIPFVCSPQQLKTLTEHRQGESDLVYRGGQWYLYATCDIPEPEPIEPDAFLGVDLGIANIATTNDGTVHAGKHLNQVRHRNRRLRSRLQAKGTKSAKRLLRKLSGREARFAADTNHRISKQIVTEAQRTCRGIALEDLGGIRERVRLRKPQRVTLHSWSFRQLGAYIAYKATRAGLPVVHVDPRYTSQGCSACGHIDKKNRPDQATFSCTSCGFAEHADVNAARNIAARGVASWAVSHAADDAA

SEQ ID NO: 55420 - protein, 425 aa, unknown
  TnpB Polypeptide
LPHFLEKCDTLKTGNWMKTGFCIKTIKYQLRCSHAEWFISTEGYYRDVLNFYYHLLLHRKELWNLNTFQMQRELECLTIEGRDGRKPVYPLPFSKVPLYFRRSAINKAIGCLKSHLGLSPSVDKTEEYDPPLPETIDASLTYFKGMYRELTDTGITLKVWDGSSWHWMECRLKGIPFPANAMVLSPSVVPGSKICWLHVPVKQETTDARNAKERMKSGDNICSVQFTNTDIFAMCCVMDGNGKQLAVRTCRGGDAYRHQCRKLLDKIEFSRQYTDKDNVEQPNKKYYIHLKNLSEYCAHKVSREIVDFCVEKEAKVIVLPLYNTDFSRMVQYRSGNFTPLHLSSRIRAYLKYKAWEAGIIVLEHSADHTSSRCAICGGSIKKQGSQYLCENGHQGSRFLNSARNLGRKCQEDFRKKRGCLNKINI

SEQ ID NO: 55421 - protein, 386 aa, unknown
  TnpB Polypeptide
MLVQRGYKYRIIPTKEQEKSLFQHGGNVRFLWNYALKINQEYYKEVGKFKFYYELAVSLPKLKEEYTFLKESFSQSLQMVLRQFDRALKDSFKKEKGFPTFKKKMLLNDSFTCPQKWRLGKGFVFIPKIGEVKWIKHRAMEGKPKSITISQDGNKWYCSVLCEYTISDKEKGFNDIAGCDVGLKEFVTLSDGTIISNPKHTKKYENKLAKEQRKLTKKQKGSKNRFKQRLKVRRIQNKIRDVRKDFLHKTSNLIAKNYDGIVVEDLNVKGMMKNHCLAKSIGDASWSEFNRQLKYKCCCNFKHYIKIGRFEPTSKMCSNCGCIQEMPLNRRIFNCPDCKISIDRDLNASINIRNIGLNTLGHSGFQACGDGLLKSSLKQEKECLVN

SEQ ID NO: 55422 - protein, 390 aa, unknown
  TnpB Polypeptide
VNTICLKVRLCPTKAQETTLDVSLDTCRILYNRLLEWRKTAYEETGKSPSRYEQQAAFPAWKAENEYLARVHSQVLQEVGTRVDRTYQNFFRRCKEGKEKAGFPRFKGRGHYDSFTFPQSGFELQEDAVKLSKIGSVKAIVHRTVEGKIKTCTIRRQNGKWFACFAVEVETVPLEPNGEAHERNARDERNARAVGIDVGLSSFATLSNGEQIENPRFYRKDEKALAKAQRRMSKFEKGTKERRKARKVVARIHERIRNRRHNFVHQEARKIVDRFETIAVEKLNVKGMQGNHCLAKSIGDASWTMFRTVLAHKAASAGRQYAEVSPHFTSQDCSGCGLRAKKKLSERWHFCPVCGTSLDRDENAARNILALGLQSLGIQSVEAPPFMAGE

SEQ ID NO: 55423 - protein, 342 aa, unknown
  TnpB Polypeptide
MLTFKFRHNRDFTEELKKAFEVAEFTVDNKIRRNNSALVKDIRGCLPSAIASQVMRKYGNQKKIKAVHSVNLIVAGYYIKFFEETNSIWIPCLKLHLENTIPYQFTKINQIEIDREFAYVAVTVPEQPEMIPKTFIGVDRNTTGHVAVAANPDTGKVEKLGKKARHIHRKYSAIRKRLQKQERFKELKAVKDRESRIVKDLNHKISRKLVEMAKVQHAALVFEELSGIRKTRKQTRSFRHALHSWSFYQLQQFVEYKAKLLGVPVLYVDPAYTSQDCSRCGARGERLGKEFKCPTCGHVDHADANAAFNIASRQVSMINRAVSESCTMGALIPHWSSGAECH

SEQ ID NO: 55424 - protein, 419 aa, Haloterrigena sp.
MRTVRTFEASIANPQQVSDDLDQLGWAASKLWNVSRYYAQEQWDDTGEIPDDGELKAELKGHDRYTDLHSQSSQRVLEELAEAFTGWFAKRRNGDDRARPPGYRKRGDSHPRSTVSFKAAGFKHDAQFTRVRLSKGRNLKEHRSDFVLCDYELRPDVDLSEWDIQQVRAVYTYGEWRLQFVCRKSIDPDPPGDGVAGVDLGISNIAALSFGSESILFPGNALKEDEYYFGKQKAKCDESRSNERLRLDRKRTERRTHFLHTLSKQIVSECVERGVGTIVVGDLEGIRDDENGESRNWGSHGNLDLHGWAFDRFTSILDYKAETEGIDVLIESERDTSKTCSACGTTDGNQRVERGLYVCEECDTVANADVNGAENIRQKVTPSPSQDRSNGWLAQPSVQLFDRSEGRFVPREQVMDCKP

SEQ ID NO: 55425 - protein, 240 aa, unknown
  TnpB Polypeptide
MVKTRVSRPVTGVVKSATVSRNPAGEYYVTIKCAGVHKSMAPAKGDAIGIDLGLKDYCITSEGVKHPNHRYFKQSEKRLRHAKRKLSRKPKGGNNREKQRIKVARLEQKVARQRRDTLDKLSTMLVRRHPIICMETLMPKNMVKNHRLAKHVSDAAWGEFARMLDYKAGWYGRKVVHVDRFYPSSQLCHDCGYLNPEVKNLDVREWTCPQCGVFHDRDVNAANNLRDEGLRILGQLETAA

SEQ ID NO: 55426 - protein, 387 aa, unknown
  TnpB Polypeptide
MFIVSDTKGGVYLVNKSFTENFNKSFKVRIYPNKVQKVLIDKAFGCARFIYNFMLNLKQKLYKFFGISLSYNQSSKVLAELKKHKTWLKEVDKWSLTNALKDLDFAYKMFFRGSGYPKFKSKKQDKNSYRTNGYLFLDQDEKKIRVPKVGMLHFRDKSNFKGLTKINNITISKSSSGNYFASISAEVDIATFEKTNQKCGIDLGLKDFCILNDGTKFKNPKFLVRNEKRLRLLQKSLSRKDYGSKNYMKAKLKLAKFHGYIVNCRKDYLHKISIFLIKNYDILCAETLIVKNMVKNHKLAKSIGDVSWYEFCQQLEYKCLWYGKKFVQIDTYFASSQICSNCGYKNSDVKNLNIREWTCPECDTHHDRDVNASTNILNEGLRILNVV

SEQ ID NO: 55427 - protein, 385 aa, unknown
  TnpB Polypeptide
MLKSFKTEINPTAEQIIKINKTIGVCRFIYNFYIAHNKELYENGEKFMTGRAFSVWLNNEYLPNNPDKMWIKEVSTKSTKKSMEDGYRAFVSFFKHKSKFPRFKKKNKSDVKMYFVKNNKTDCLSERHRIKVPTLGWVRLKEKGYIPTSKDGFIIRSGTISCKAGRYYISVLVDIQKQDTEVINNFGIGIDLGLKNLAICSDDSVFHNINKTYNVRKVEKSLKREQRKLSRKIISIKKGESTQKNFVKQKLKVQRLHQRLLNIRTDYLNKTIHSIVKTKPAFIVIEDLNVSGMMKNRHLSKAVAQQKFFEFKTKLVNKCKENNIELRVVDRFYPSSKICHKCGHIKKDLKLSDRTYVCSECGYVEDRDINASLNLRDAETYTIIQ

SEQ ID NO: 55428 - protein, 410 aa, unknown
  TnpB Polypeptide
LKEKLNSNDNKIYRSVKIRLLPTKEQEILFWKSVGVARWSYNYFLSESYRVYQEWLEDNSKPKHISELEVRKYINNVLKKTTHTWLKEVGSNVMKQGVKDANIALQNFFKHGKGYPKFKSKKRSKPSFYVNYESLRRTQNGFHGEKIGVVKTRESLPKICKSQKYHSPRISFDGRFWYLSVGYEVDRVDTKLSDNRLGIDLGIKELAVVSNQNGTEIKKYHNINKTYEVKRLEKKLKREQRKFSRKILMNTSQSDSNIRPKYKRELELCKNIQKQNSIIQRLYNRLLNIRTNYLHQTTTEIVKTKPFQIVLEDLNVSGMMKNRHLSRSIMIQKLYEFRRQIEYKAELYGIEVLIADRFYPSSKTCSCCGNVKKDLKLSDRVYRCDCCGNIIDRDVNASINLANYNIESVN

SEQ ID NO: 55429 - protein, 363 aa, unknown
  TnpB Polypeptide
MNKSFKVRIYPTQEQKILLEKTFGANRFVYNYFLNLKSKLYEFYKIRISYNNSSKILTELKKQKTWFKEVDSVSLQQTLRDLDSAYQNFFSRRCKYPKFKRKDDKNSYRTNSNIKIDNWYITVPKVGMLHFRDKNRFSGVTKIYNVTISKTSSGKYFASISAEVNIEHFEKTNQNVGIDLGLKDFAILNTGEKIHNPRILKHLEDKYRKLAKSVSRKVKGSVNYQKARIKLARFHEYIVNIRKDFLHKLSTNIVKTYDIMCIENLNISGLMKNRRLAKSFQNVSLYEFIWMLEYKAKWYGKTISKVDRFYPSSQLCSNCGYKNKEVKNLSVREWDCPECGTIHDRDINSAINILHEGLRLLEI

SEQ ID NO: 55430 - protein, 365 aa, unknown
  TnpB Polypeptide
LNRSFKVRIYPTKEQQILLEKTFGANRFIYNYFLNLKSKLYEFYKISLSFNNSSKVLTELKKTKTWLKEVDSVSLVQTLRDFDSAYQNFFSGRCKYPNFKKKQDKNSYRTGGYIKIDNQYITVPKIGILRFRDNYKLEDSNILKIYNITISKTSSGKYFASISAEVYIPCFEKTNQNVGIDLGLKDYLILNTGEKIHNPRILKHLEKRYRRLAKSLSRKVKGSANYQKAKLKLARFHERVTNIRKDFLHKLSTKLIKSYDIICIENLNIKWFMKNHKLAKSFQDVSLYEFIRQLEYKAKWYGKTISKVDRFYPSSQLCSNCGFKDKDVKNINIREWICPVCGTHHDRDINSAINILNEGLRVLSS

SEQ ID NO: 55431 - protein, 438 aa, Krasilnikovia sp.
VPIGEHLVPACADALNLSHRLNNETLRIVQLRYRYRVYPDAAQRTALAQAFGCARVVFNDGLRLRQQAREAGEKYISDGDLSKRVITQAKDTEERAWLCEVSAVVLQQALADLNTAYRNYFASVTGKRKGRKVAPPRYRSRKDNRQAIRFTRNSRFKVLDNGRLRLPKIGDVPVRWSRDLPSEATSVTVIKDAADRYFASFVVTTTENETLPPVESEVGIDLGLMHFAVMSDGATVTAPKFLRRAARKLKRLQQDLSRKEKGSNRRRKAVMKVARAHARVADTRRDWQHKLSTAIIRDNQAVYVEDLAVAGLGRTRLAKSVHDAGWASFTTMLQYKAQRYGRTFARVDRYFPSTRMCSDCGRINEKMPLDVRAWHCPCGSHQDRDLNAAINIKAAGQADFNDRRAQVRPGLVPAPRSEAVTHQNAARATRSVAGIAVP

SEQ ID NO: 55432 - protein, 545 aa, Streptomyces sp.
MPEKKQLRTIETPFVALGPSGVAIRDRLKDLTPGDEKVLRLVGEHLGSLASRDLAVRCGQGHDHSSETWAARKRELTPVSSSRWAGAITKATHDQWALSRRAQLAHIQNLEAGTRTLMHRLSLPLGEKGSKRAAGGYRSKSEWFSKTRRLAVLERRLDQARAEREAGTVRVVRGGRRLLNTRHNLEAAQITEPQWRERWEAERWFLATDGESGKRYGNETIRITPGGEVSIKLPAPLAHLANSRHGRYVLTSVVAFKHRGAEWADRIEANRAVAYRIHLDVSRGRWYLTAAWQRPVVQTIPLATAHAQGIVGVDTNADHFAAYRLDQHGNPVGNPRRFHYDLPGTADHRDAQIRHAITQVLHWTKASGAQAVAIEDLDFTAEKTREKHGRRKRFRQLISGIPTGRLKARLVSMAAEQGLSIVAVDPAYTSMWGDQHWRKPLASPRRTMSRHDAASIAIGRRALGHPIRRRTAPPHDDQSDRRGHRTVQAGPETRGREETRPRLPGPRTRSVRPDAERTRATRTPKTVRDVRSDQEWVQDSLLLTD

SEQ ID NO: 55433 - protein, 405 aa, Streptomyces sp.
MQLRYSFRLYPNGPQRSALARAFGCARVVYNDALRARETARAGGKTFPKTGDLSKLLITEAKKTEERAWLGEVSAVVLQQSLRDLDTAYKNFFDGLKSKRPRMGAPRFKSRRDNRQAVRFTANARWKITTGGDLLLPKIGNVRVKWSRTLPSTPSTVTVVHDAAGRYFASFVVEAGTESLPSTGNVVGIDLGLTHFAILSDGTKIDSPRFLRRAEKKLKRDQNRLSRKMKGSANRAKARIKVARAHAQVADARREFHHQLSSRLIRENQAVAVEDLAVKGLARTRMAKSVHDAGWSAFVTMLEYKAARYGRGFHRIGRFEPTSQVCSACGIKDGPKPLHIREWTCGACGAVLDRDINAAVNVARAAGLAVSACRARVRPGAFPAQRKEAGTHRDGQPTVVGIPSL

SEQ ID NO: 55434 - protein, 362 aa, unknown
  TnpB Polypeptide
MFNGKRFVWNHFLTLNKERLKNNEIILTYNQMSSLLTQLKKEQEWLKQCEKSILQNTLKDLYNAFQEYFKKIRGFPKFKSYKNNHQSVKINFTNNNIEIKEKEIQYTSTNKYKKQNCRIKLPKIKKVKIAYSREYEGRILSATILQIPSGKYFVSLCCTDVENNKFQQTNNKIGIDLGIKEFAIFNTGEKIDNPKYYRQYEQKLKKQQRKLSSKQKGSKNRNKQRIKVAKLHEKIYNTRLDFLHKLSTRLVKENNIICIEDLKISKMLQNKKNKKLHKSISDASFYEFRRQLEYKCLWNDKILSIIDQYFPSSKLCSDCGFKYDDLTLDIREWECNNCGSIHDRDINAAINILNEGLRLLVN

SEQ ID NO: 55435 - protein, 294 aa, Streptomyces sp.
MVGLVRFRWTKDLPGVTRSGPTGRITGARLVKEANGWHIVFRTESVVDEPAPHMGPGVGIDLGVSKPLALSDGTFREHGDWLKPKEADRLRRLERTRERQKRHSKRGACASNRLNRTNRRIAALRARATRRAVNWQHETTTGIADRFGLVGVEALSITNMVTSAKGTVEEPGKNVRQKAGLNRSISGEAWGRTVTMLEYKLADRGGRLIKVPAPNTSLRCHACGLITKGSRETQSKFVCQNPRCCWSGNADTNGACNIEIAAKHQAPQDIAGARTWSLSRWAGDETSTTQRAAH

SEQ ID NO: 55436 - protein, 391 aa, unknown
  TnpB Polypeptide
MIKSIKIRLRPNKKQLTKLFQYARYAQFAYNWAIAQEQENYKQENKFLYNDDLRKEFTQLKKLEEYKWLNHVSNNVPKQAIKDACNAYKRFFKGQCKYPKFKTKKHTTPSFYQDTNKIQFTDTHVKVEGFAVSKKQNKQRLNWIKLCEKGRIPPNSKYVNPRFTYDGLYWYVSVGIELPNSTEILTNEGIGIDLGIKDLAVCSDGYTYKNINKTNKIRKIEKRQRRLQRSVSRRYEKNKKGERYCKTRNLIKRQKALLKVTKRLTNIRRNHLHQTTSDIIKRKPSFICIEDLNVRGMMKNRHLSASVQQQGFYELRRQLQYKAERNNISVIIADRFFPSSKLCNCCGNVKSDLKLSERIYKCECGNTIDRDVQASLNLKTYGETVLQQSVV

SEQ ID NO: 55437 - protein, 262 aa, Mycobacterium sp.
MPVCGCLSSVRSSRRWCTPVRGVGVDVGVRRLATVATADGTAIEQVENPRPLGAALRELRHVCRARSRCTKGSRRYRERTTQISRLHRRVNDVRTHHLHVLTTRLAQTHGRIVVEGLDATEMLRQKGLPGARARRRGLSDAALGTPRRHLSYKTVWYGSALVVADRWFPSSKTCHACRHVQDIGWGEQWQCDRCSVVHQRDDCAAINLARYEETSSIVGPVGAAVKRGADRKTGPRPAGGCEARKGSSPKAAEQPRDGVQVA

SEQ ID NO: 55438 - protein, 367 aa, unknown
  TnpB Polypeptide
MKKGIKFRIYPNKEQTILIQQNFGCCRLVYNKGLAMRDEAYKNGEKIGYTQTCAMLTELKKCEKFSFLKIADSVALQQSLRDLDRGFVNFFEKRAAHPTFKSKKNSRQTYRTINQNDSIRITNTGRYIKLPKLGLIKIRQSMEVGKINNVTIEHTPTGKYFAILNVNFEPEKFPNREESIGIDVGIKKFYSDSNGRIVPNPKYLEKSMHKLIREQRKFSKKQNGSNNHEKQRIKLALVHEKICNRRKDFLHKQSTMLVRENQTICIENLNVQEMVRNHKFARSISSVSWSKFFSMLEYKTNWYSGNLIKVPTMYPSSQTCSCCGYQNKLIKNLAIRKWECPKCHAIHDRDINASINILNKGLQMQMA

SEQ ID NO: 55439 - protein, 344 aa, unknown
  TnpB Polypeptide
MKRKGYKYRIYPNEIQEVLINKTFGCVRKVHNLLLNEKESVYQLFHDYPELLKSHKYLTPAYYKNVFEYLKEVDSQALTSAWKNLETAFTNFFKGTHNYPNYKSKRHFRNTYTTHTTNDNVRIEDNGVKLPKLGIVKLRKHRELPYGAVIKAAIISKSATNKYYVSLRIEYEEEILVIDDSFQKVIGLDFALNGFYVDTTGKKANYPMYYINTLQKLAKAQRKLSKRMKGSNNYYKQKLVVANIHEKIRNQRDDFLHQESRRLVNMYDIVCVETLDLVEMMKTKYFSKQVSDISYNKFVNYLSYKCEDSGNVIDRDHNAAINIATKGMMSWLTNTIEAGTALLA

SEQ ID NO: 55440 - protein, 432 aa, unknown
  TnpB Polypeptide
MHLVEKHIIRRGDPRHATLDAACFASKNLYNAALYVIRQAFLLEGKYLNYNEMDRRMQSHVAYKALPAKVAQQVLLLLDRNWKSFFEALDAYRRDPAPFRRRPQLPKYKHKTTGRNVLIYTMQAISRSKRTLGRRLIQPSGLGMRVKTQQDPEAIVQVRVVPKHGFVVIEIIYEQELRCSSVDPALIAGIDPGLDNLIALTSNKPGFVPVVVNGRGLKSTNQFYNKRRAELQQALGRPGTTRRMERLTIWRNRRIEHDLHTISRFVIDLLVAEGIGTLVIGHNAGWKQEITLGKRTNQHFVQVPHARLIQMLTYKAEQKGIRVILTEESYTSKASFLDRDPLPTYQQSQEPVPVFSGKRITRRLYRASNGQLIHADCNGSYNIIRKAAPDAFGLEGVEDGERRVHLPVVHPVRLSFPHKPAREKILSPVRIR

SEQ ID NO: 55441 - protein, 391 aa, unknown
  TnpB Polypeptide
MLKGYRYRLYPNSSQQIQLEKSFGVCRLIYNTALECRIRAWQSARISLSACDLINQLPDLKEAFPWIAEVDSHALQASILNLNKAFQYFFAGAGFPRFKKKSGWQSVRFPDHKREVNFEKGWITLPKIPRIKASIDRAFRGKIKTVTVSRTPTGKYYASILVDTGIPIPEKPAVNPASTQGIDLGLKSFVVTSNGRTFASNRYLKNSLARLQCLQRRVSRKRKGSQNRKKANLRVARLHERINHQRKDYIHKITTGLIRESQAESFVLEDLHVAGMIKNRKLSQAIQDASFGEFIRQMKYKCDWYGKNLIVIGRFEPSSKTCSHCGKIREELTLSEREWTCEACAVHHDRDLNAAINIRVMGLKQYTRTGSPGEPVESRRLGRARKQEFVS

SEQ ID NO: 55442 - protein, 467 aa, unknown
  TnpB Polypeptide
MRYTTFRPSLPVPWSRFDLINAFNAWKRSEDAGRVFVVAVDGSITKRVTGLAWRGEVSAQVFEEAAVDLGRALAAYRNSRNRTRRGPPIGFPRRKRRGRCRDSFRLRNRTQANGRQLIGVGQDHPRAVTLPTLGRIRVHDDTRRLRRLLRPTDHISPQTGERMVAPLARIMFATVSRHGSRWYVSLNVCAPDLHSERRHPRSPDRKRDDWVGVDRGLNVFAVAAMANGDEVGRFHAPKPLTRQLPRLRRASRALSRTVPGPRNRAEAARRLSRQHARIVNQRRSFSHQTSTRLVKTHGKLVIEDLNVAGLMRNLRLGRTISDAAWAEFGRQLRYKTAWLGGELVVCDRWFPSTRTCSRCGMVGRPMPLAQRIFHCSACGLVADRDRNAAANLAAWPRTAGVAANQTPDRQAGGRVTNAPGGKGAGRHPDDGATIPDEGGTNALAHAGTEDTREGWRLSSSSPLLNAL

SEQ ID NO: 55443 - protein, 375 aa, unknown
  TnpB Polypeptide
MLIYEYKLDGSSAQYAAIDEAIRIVQFIRNKGLRLWMDEHATKNDLQCYCAVLAKTFPFASCLNSQARQAGADRAWSAIARFYENCKAKKPGKQGYPRFQKDNRSVEYKTTGWKLEPDGRHIIFTDGCGIGRLRLVGTRDIEGFPLKQIKRVRLLRRADGYYVQFCVQAERHMKHVPTGKHVGIDMGLLVFYTDSEGQTVKNPRNGRKAEKRLKRLQRRLSKKQKKSANRKKARQAVAKAHLKVQRQREDFARKAANALVSSHDLIAFEDLPIRNMVKNRHLAKSISDASWRRFLSWVNYYSALHGIPVVAVPPQFTSQNCSVCGTLVKKSLSVRTHICTGCGVVLDRDQNAAVNILAKAYRTVGQTGTGSQATA

SEQ ID NO: 55444 - protein, 298 aa, unknown
  TnpB Polypeptide
LKRLSKLTYGELKQYDVPSCYKLCAISKAAGMLASRKKSIRRGFPTKNPHLSKPILVSCYGFKIENGSLVMPLGDRKFESIPLNSHTLTVLSQLGAQARSFTLTERSLSLYIAKQVEEIKAEGMVGIDRNLRNVTVGNAERITYYDVSKAAGIAETTRSIVRSFKRNDVRIRRQVAAKYGQRRQERVRQILNRVSKTIVTEAKKNKQVIAFENIGGIRKLYRKGNGQGCKFRGRMNSWPFHELKRQVEYKAAWEGVPVVTLSAKETRGTTMDCPRCGERLQAPVRGDSQHYHQLWCEG

SEQ ID NO: 55445 - protein, 479 aa, unknown
  TnpB Polypeptide
MKARISYVALETNSGKIQKLEELYTIYRSYVQTCIDKMISDKSPKVLPSNRRTYFPTSDILSSQILKNAQMHSVQVVETWIKQRYAHKLRKYLNTQDLTSHQKLELRCIGKYQLKKPGKFGKGIISQEMIDLYWGWVWNPEIAGKTPQISESFPMWMSEMTCVFGSSEDSSHFGWWLRFSSLQNGVRIQIPLAYNPYLKKVEGLAKSVLVRKREGRWTFQFCEKDLEEENEEEKKPKEFDGSQGKIGIDVGLNVIAATSDGRLYGEAFKSEFDYLYAKVRNLRSNRFRQGLKSDSRRLARLEVKLSGQIKTITGTISNQLVKAYLNYTFVIEDLDLRGCRGQKRFAYRALHSSLSHKAKIEEVNPAYTSQPCPSCGHISRSNRSGVKFICQNCGRRSHADVIGAINLLGRSGDKQIDRCEDPSEVRALLRERSLLRRISSLDRLKTKELKPNSQRLTTKGSENSDVGTASNQVEAHVQV

SEQ ID NO: 55446 - protein, 468 aa, unknown
  TnpB Polypeptide
MSEVTRIAFSKNLNQGKFDQLTELAARLGLIRTEVWRQFGSLAGLNFEGDRQVRDEWLEEGKKFNVPARLWKATLADVWGDIVAYREASKVQVRKIIHKHTKNEAEKKRLYTLLKTDRWNEESYLRRLMRKNFKHGKTTVNNQILFIPGSYTTFSCKGKAWLRVMSLERGKRIAVPLNTLVEPQKTLRLILQNNRVEIHYAVDEKEVCSIKPCGDQTLGIDKGYTEAFTDSNGKRHGKGLGNLLPTESDRLKLRYQRRNKLKSLAEKHSESNNPKKRDNILTNNLGRKKLDSQKKKHTSNVHNLVFKAAHSIVDKASIIAVEDLTSPIKSKRLQSKDQSRRLSAWVKGILVQAINTVSHRRGSTVVLVNAAYTSQMDSRNGFLLGTRSGDKFYCFDGAVLDADQNAAQNILARMYDPEIKLYTPFRQVKEILVRRTGSRLGLLNQDSSYNGKPLLTESEMLNSANDQL

SEQ ID NO: 55447 - protein, 415 aa, unknown
  TnpB Polypeptide
MPQLAHRIKLCPNQEAERYLRKASGTARFAYNWALKTWKDKYSQSEKGMSGYSLVKEFNSIKDDQFPWVREVSKWAPQKAIQNLGDAFKRFFKKESKYPQFKKKGKSKDSFYVGENDFKVTGKYLKLPLLKKPIKMIQSLRFKGEVKSVVISRSVDKWFASFSIQIPDETFVYAHACDSQDAVGVDVGIKTLATLSTGEKIENPKPLRKAERKIRILSKSLSKKQKGSSNRAKACLRLAKAHRKVAQIRSNVWHRITSKLVRTFRFIGIEDLNVRGILKNHKLAKSIQDAAFYEFHRQVEYKSKLSGSNIALAGRFFPSSKTCSCCGYIYKELVLGESEWVCPSCGAVHDRDANASINLRNVALRYRETLNACGEDVRPETKAGSPEGAGHGRGRSFMKQESELNLDLRTERLLV

SEQ ID NO: 55448 - protein, 463 aa, unknown
  TnpB Polypeptide
MSKVTRIAFSKNLNQGKFDQLVELATRLGVLRFDIWRRFGSLAGLYFEDDREVRDSWLEAKKKFNVSARLWKATLADVWGDIVSYREAAKTQVRKIIYKRTKNKVEIKRLFTLLKTNAWNEDSYLRRLMRKHFKHGITTVNNQIILDTDCYTTFFHNNKLWLKVTGLNKGKRIAIPLNTSVPPTKTLRLILRDNKVEIHYPVDEKDGCSVKPCGDQTVGIDKGYTEAFTDSDGQRHGINLGVMLSIESDRLKVRHQRRNKLRALAEKHNESNNPKKRNNILTNNLGRKKLDSQKRRHTSNVRDLVFKAAHSIVARASTIAVEDLTSPIKNKKPRSKNQSRRLSSWVKGILAQAINVVSHRRGSTVVLVNAAYTSQMDSRNGCLLGTRSGDKFYCFDGAVLDADQNAAQNILARMYDPEIKRFTPFKEVKEILVRRTGSRLGLLNQDSSYNGRPLLTESEMPNF

SEQ ID NO: 55449 - protein, 381 aa, unknown
  TnpB Polypeptide
MIRAFRYPLRLNQQEEAGLDEIRLNCQRLYNAALEQRREAYRKQKKTVSRYDQHKDLTELREADLEGYGSIAAIILRSPLNRLDKAYKAFFRRIKQGQKPGFPRFKGKDRYDSFSFPSPIIKGNLLTITKFGQVRLHLYRPLKGTPLEAHVRKTCKGWEASIVCDLSVALPKVEIKTAIGIDVGLTHFAVHSNGSEVKNPRFFQKSEALIAYRQQKLVHKKNKRSNSRKRAKLLVSKAYQHTHNQRLDFARKLAKEVVSKYDLVAIEDLDIKGMAKSNKAKPKSIHDAAWAIYAACLNFKAEEAGKTVVAVDPRGTTQDCSRCGTKVPKTLRDRWHLCPNCGLSIGRDHNSAREILVRGLRMASQQGMKIPCLAEVIKETL

SEQ ID NO: 55450 - protein, 446 aa, unknown
  TnpB Polypeptide
VKKSRFLFFHPETNRGKIQALESLQVEYKRYLQACIDQMISSKRMKVPNKGLRSFFPKENILSTNIVTACQHHANEVVLGWISSLYTRKIKFEIKKLYKKAQITETVKIALFTIGKYSIDHPTETISQEAIDLYWTLLLDPTISGKTPTVSNRIGIRTSVHTSDIRKLEGHKLASWWLGFSNLKKGKKIQIPLKANPHLSSPDDIVDGCLIRKNRRGRWTVGVLEKKVVEAPKLFQGMPKVGVDVGLNVLAATSNGRLYGEKIKPKFDKLYKAVKDLRANRQRQDLKENSPKLDHLEDKLSGLIKTSTGEAANRLVRDFPNHAFVIEDLNLSGCRGQKRFAYRALHNSLKRKAPTIEVNPAYTSQTCPSCGYISRSNRRGTQFICKSCGRISHADVVGAINLLRRSEDKQINGYDNPSEVKTLLRERFRFRRTSSLRELEVNEPYG

SEQ ID NO: 55451 - protein, 384 aa, unknown
  TnpB Polypeptide
MIRTVSIPVSLKPEVFLPLMAECADIFNQHVAWSLKNRTYNKNKAHKALYRSIRIQHSNVPSALIQTVRDTALESIKATKFERSPKKKPTSSLRYDKRTFTLRGSQLTLSCLGPRTKVILPEIPKYFKDKSEKWDLSSLTLSYCCTQKRFFVNLAYEHPDPEPLKEEAVQGLDRGLHHLVVTSDGDFFSNQAIRASQRKRLFQRQQLQAKGTHSSKKRLKFLSGKEKRFSRDVNHRVTKSLISQRNVTTFVLEDLSGIRNQYRGRKFNKRIGGWPFYQFEQFLSYKAITAGKRITFVDARYTSQRCNCCGYIERRNRKGAIFVCVRCGHRDHADKNAAKNIRDRYILSITGDPSIEQGAVNHPNVAGYQLAESVTNLRPCACGS

SEQ ID NO: 55452 - protein, 398 aa, unknown
  TnpB Polypeptide
VKTIFRTYQFELKPTQEQKVLLDKHFGCVRYVYNHFLNQRKEQYQANKKSDNYYVQAKTLTELKKQDETVWLKEVNSQTLQFALRSLDTAFLNFFRGNAQFPKFKSRKHKNTFTIPQFGTLADNKISIPKFKEGIKVKLHREVKGKIGKMSITKTPTGKYYVSIFTEQEADELPKTNRQVGIDLGLKDFVITSDNKKFKNNRYTKKYAKQLKKAQQHLSRKQKGSNGFEKQKIKVAKIHEKIANCRLDTLHKVSKELVESYDLISIEDLNVKGMIKNHKLSKHIADASWGNFVTLLQYKCDWYGKELVKVNRFYPSSKTCGDCGWINQELKLSDREWTCKSCGVVHDRDVNASRNILKEGLKIYRQGLSITKVEDKSDYSGSTSVETRSPSHRFSVGG

SEQ ID NO: 55453 - protein, 409 aa, unknown
  TnpB Polypeptide
MLVYEYKVSGTKQQYAAIDEAIRIVQFIRNKSLRVWMDNRGTSKNDLQTNCALLAKEYPFASRLNSMARQASADRAWFAIARFYENCKTKKPGKKGYPRFQKNNRSVEYKTSGWKLDHDGKHIMFTDGCGIGRLKLIGNKKQRIEAFPVKQIKRMRLVKRADGYYAQACVETERTVEHIPSGKQTGIDVGLKTYLTDSEGQTIENPRQYRKAEKKLARLQRRLSRKQKTSANRKKAQKRLAKHHLKVQRQREDFARKVANAYVSSHDLIAYEDLQIRNMVRNRKLAKSIHDAGWGIFLHWVKRYGLLHAIPIIAVPPHYTSQACSDCGTIVKKSLSIRTHICPGCGVVLDRDHNAALNILQKALQKGTEGHSGTGGRKNPSNASGQIASTASPSRESGKRTGRRKNPCH

SEQ ID NO: 55454 - protein, 372 aa, unknown
  TnpB Polypeptide
MLKTYKYRLWTTKKQTTKLLQTLEECRWLYNHFLEQRKTSWEQEKKSLNYHSQAVSIVKLKQTRQTLSDIHSQVLQNVAVRVDLAFKAFFRRVKAGEKAGYPRFKGKGCYDSFTFPQTGFEITEQGLKLSKIGTIKIKLHRQPEGIIKTCTIRKSATSKWYVSFSCLTEPKPLPKSDKTIGIDVGLTSFATFSNGSKINNPRFFRKDEKDLAKVQRKLSKAEKGTPERKKRRKAVAKVHERISNRRNNFAHQEARKIVNRYGVICIEDLSINKMVHNHCLSKSISDAAWSQFTQYQSYKAESADRTLVRVNPAYTSQTCSKCGHREAKKLSDRVHHCSCCGFVCDRDHNASLNILRLGTQSLGFALEAPFNL

SEQ ID NO: 55455 - protein, 479 aa, unknown
  TnpB Polypeptide
MIKAYKLQHSANLGKMEKVIKVVKAYRALATSVAQAQWMLFYKTGSFDKDLDVKKIKTPLSARYKQTCQYQAVGMLASFLSNRQNDFVTVVRKSRLNEDIKHKLFIINRLGLWQSTAPFSQLKHKKEIDAGTLKLARKIFQHILSMNRKPAMKHINMALDSKVALVTDSMPGETRHFDHWIRFSTLEKGDPIYIPILGNEYYDNIPGIRKNFIQVNVSGQNVISFAFIKDVPARTDYLPETDKLSLDLGWSTLFASDRGDLFGRAFFSVLKKYDNLLTALAKNRQRQGQRTRSPKYDGLVDNIREFMKNEINRVLNRAVDIHKPAELVIERLNFRSPDLSRRMNRLTSMFGMSLIRSKLDSLKSSIGIKITETNAAYSSQECSACGYVAANNRPTQSEFKCRCCGTGMHADVNAARNHHARSSDMVIDVYQGTQTVLHILTDRFLSDMERTIRHYRMATGLLSSNPYFAGPLAQPKGFS

SEQ ID NO: 55456 - protein, 446 aa, unknown
  TnpB Polypeptide
MQLTHKIALCPTPAQVDYFKRACGTARRVWNWALNEWKKQYAAGGKPNAMALKKQFNAIKYTDPQWLDKNGRPWLRDIHRDAHAQPFAHLAKAWERFFTDLKAGKKAHEPRFKKKGRCRDSFYVANDKFRLDGKTIRLPKIGDVAMTEELRFTGTILGATVSRTADRWFVAIQVEVPDAQFYRHRTAHEVNGIDLGVKAVATVSNGEVIDAPKPLNAALRRLRIRSRRLSRKLEAAKKAAGFGHHTCLPKGTRLPVSNNRQKSAATLARLHARIANIRADFVHKLTTRLCRENQALVIEDVNVKGMLANEKLARAISDVGFGMFRSQLEYKARRYRTRLVIADRWYPSSQLCSVCGWKNEALTLQDREWVCAECGTHHDRDLNAALNLKRLATETALPVASPSSNGGAAAERVSAAVGKVTPVRYECGQQDTSGQEENRAHVCARS

SEQ ID NO: 55457 - protein, 509 aa, Streptomyces sp.
VVRRGARCAGPQVSHARGGRPGAVPVHGRRRHPRHTVAHGRLHGPPRRCVAAPRGRRRRDAGLRHRDSRHDRPHQCRTYPHVFPVSLWDSVGGRDTRARRQVARSWQVGPFSARFRNFALREHVYDEIKQRWGLGAQAAQHVIKKTCDAYATLNGNLKAGNLGKPGSRRYRRATEKPIVFRAQSAQPYDDRMLSWQTARRTVSIWTLSGRMKNVAFTAAPEQLARLALYRRGESDLLYRDGMWFLNATCEVPEAGPNTDLVDFLGIDLGIVNIATTSDGEIMAGRALNRGRLRERTLRTKLQRKNTPSSKRRLKKRRRKESRRAKDINHKIAKHVVAEAGGTSHALEAVGEHRPRNRPGRPDGHPRTGTASQAWGYLPRPLGSGGGPPTPAGPFISWGSSSHTRPAGQGCRWCTSIRRTPPAPAPSAATSTGRTGSRRPGPRAGPADSLITRTGTAPATSALARKSCGAAGRSQSPQTHRRNRTWDRTQAQHHTQWRPLCKPGALATGS

SEQ ID NO: 55458 - protein, 448 aa, Sutterella sp.
MQITCGFRFELLPDKDQRSLMSRTAGCCRLVFNKALALQNELKDQQKKLLTYNELSRELTAWKKESETAFLREVPSQPLQQTLMDLSRGLSDYFRKKADPAKKGWPHFKSKDIGDGFRLPQIKPEHIDEGNARVKLPKLGWVRYRKSRDIRFRDGNGSWVKGSVKQATVSKEVGKWFISFAVVFEIEQPAMKTLDVGIDLGVVHAVTISDGLFFDLDTEAIKAQELKIAKLQRQLSLNASSRKKLAKKKLAEPFDKHQPSRKRRKLLHRLQKAHQKIRHIRQDFHKKTAHTLAQEYGCVYAEDLRVRNMTKSAKGTIENPGKNVKQKSGLNRSILRTGFYDFRRTLDWALQKEGGLLVTVAPQYTTQTCPHCGHCDSKNRPKQAVFDCVQCGYEENADVVGAINVKKKGRTGPTAHDKKRIACEVNGVLTGNGEYSVSNRNLPCEAKS

SEQ ID NO: 55459 - protein, 432 aa, Limnoraphis sp.
MRNVAKVRLYPTDDQKQALAKAFGSVRWVWNYCLELNNQAYKETGKGISGMQLKKQLPILKKKEETAWLKETYSQCLQQSVLNLSRAFVNFFEGRAKYPNFKSKHSKQSIQYPQNVKIIENCLSFPVIGKIKANIHRTFDGNIKTVTITKTQTEKYYASIVFENEDIEPQISAQGKAIGLDLGLTHFLITSEGSKYDNPRHFKKHSHNLKRKQQKLSRKQKASNSRNKARRLVARAHEKVSNARQDFLHKLSRQIVNENQVIIAENLNVKGMVRNHNLAKAISDCGWGMFLNFVNYKAKRDGKTFLEIYRFFPSSKTCNVCLNIVESLPLDIRQWECNHCHTQHDRDINAAINIRDEGLRVIAGRINCAGDPRRQPLASGTGATASGGGVRLARGRKSSVRQLPISEQSVDASTKTVQETGSLRQKAKLCRG

SEQ ID NO: 55460 - protein, 414 aa, Tolypothrix sp.
MQTISVKCKLEVPVELRSKIDRTLQGFADACNQIYEVAKRENCWNTTKLHHLVYKPVREASGLKANHVCQAIRRVIGNAKAVKQVHKFRPTSLNLDVRTFQYIEDLQTVGVTLMCGRVKFKLSIGNYQLALLKGQSPTSATLNKTKRGDYYINICVDLPTSPTGKTPKASTERLALTCAEHLDFARWNRSRGGAAERSRSVIGVDLGRRDIATTSTGESWSGKQIQATRDRYSKVRGKIQSKRTRSSRRLMRRLSGREQRFQKWLNHNISKQLVHNAKQANATLAFEDLTNIRESLNHLPRSKVERRRTNNWAFYQLRLFVGYKANIAGIPVVFVPPAYTSQTCSRCGHIHPIKGKSYRNGKSFKCGHCGFEHDADINAALNIAALGASVSSPESPGMSCQLEGQTSLFSISQI

SEQ ID NO: 55461 - protein, 396 aa, unknown
  TnpB Polypeptide
MNNIFIDTWFKQCAIYKAKQLNDQDEIIFGGRKLFLERNSKKISREEFQIKKLLPLYVIGEAGRYGNRKFNFDFIENNKLVFKPDVKTKIDIQLPKLRKNYRKILYKLEELSNNKKLPITVSLDLDYVYITYDEYHLKIEDIKIKNRIMSLDLNPNYIGYSIIDWKSEDENTVIKTGCISIKELNDKQFDLKKLKVSTEDKRMKFLVNKRHFEIFEISKYITNLARHYKIESFGIEDLTIKSSDKEKGIRFNRLTNNLWNRNKLIQNLEKRLNIYGIRLYKIWPQYSSFIGNILNRNYFDPIASSIEINRRTFKFSNKLKPVVFPEFKKLSNVISKSLEEFGNGLIKLGTCKHWVDLYKQVVKNSKLRYRVSLDLKKTKVCRLFNRKSLLYEFISN

SEQ ID NO: 55462 - protein, 360 aa, unknown
  TnpB Polypeptide
VEFEETMRIYNQICQEIIDFGWKESSFNKTVLHNGTYKSLRLKYPKFSSAMVQTARDSAGEILKRTMKKNKDLDYKNKTRTKKIKLLAKPIKQELSSIRYDRRSLTFMFDKKIISINTVFGRMKIPFKMAKYYNKYLDWKYSNAQLIQRRNGDYYINLQMNKDIPKKSTECKILGIDLGIKKIAVTSDNKFYKSSHLKNIKGKYQKLKRDLQSKGTKSAKRKLQKISRKENRFVRDVNHCVSKKIVNTNNTVFALEDLKNIRFNARTYNKKLNHMIGNWSFAQLQSFIEYKSERLGKSVVYIKPHYTSQQCSKCSHTEKSNRNGNIFLCKKCKYELDADLNASRNIARIGRTDFFAGLSQ

SEQ ID NO: 55463 - protein, 417 aa, unknown
  TnpB Polypeptide
MYLTVKQQVKHLTKEEYNILRELCRTAKNLTNQAIYNIRQHYFQEKQYLRYEANYHEIKSYDNYKLLNSNMAQQILKNVDTMFKSFFALIKLAKQGKYNFRHIKLPNYLPKNSYANLIIANFTIKKNRTLTIPFSYNFKKKYETKIQIKIPKVLEDKKIKQIQIIPKFNARFFEIQYIYEVQEEEIKLNTNNALAIDLGVNNLCTCVTNTGKSFIADGRKLKSINQFFNKQNAKLQSIKDKQNIKKQTKRQYLISQKRKNRIDDYINKTCRYIIDYCLSNNIGTLIIGYNQSFQCKSNLGKRNNQIFTQLPFGRIREKLEYLCKRYNINYILQEESYTSKASFFDNDDLPIYNMDNPQTYEFSGKRVKRGLYQTKDGYHFNADCNGALNILRKSKAVDLSVLCNRGELDTPKRIRIF

SEQ ID NO: 55464 - protein, 455 aa, Thermobifida sp.
MSARPKKGRGFAPAPGRVVQAYRFALDPGAEAGARLRSHCGAARAAYNWAVAHVLASWEQRRAEESYGIAEADRTPWRAWSLPALRRAGNATRRHDPRFCDWWSANSKEAYNTGFAAAAAAFDHYARSRRGERAGAPVGRPRFTSKHRARLACRFTTGALRVADDRRHVVLPVIGRIRTHENTRRLHRRLANGSARILSATVCHTRGRWFVSFQVEVERATATPGRPGAVAGVDLGVRTLAVVADTSGRVRHVANPRHLEGELKRLRRACRTVSRRRGPDRRSRQEASRRWRRADAERNRIHDRVANLRTDALHQLTTFLAREYGTVVVEDLNVAGMLANRRLSRVVADAGFGEIRRQLAYKTAWNGGRLIVADRWFASSKTCSGCGAAKARLALSCAPSPATPVAWWWIGTTTPHGTSPLGWPARPVPEWPETGTRQCRSLAEPTLRPALPAPA

SEQ ID NO: 55465 - protein, 357 aa, unknown
  TnpB Polypeptide
MNFITYKFRVKDSVTKRRLERMSQSVNFVWNFCAETQRKTQSKRAAGANIPWLSAFSFSMLTTGVAAELGLHSDTVTQISRRFVQSRDQHSRCPRFRASFGAKRALGWIPFVPRALKIDGDAVVYLKRRYRFWKSREIEGAFKTGAFVQDARGRWYVTFQCEVADALPAGSGAVGIDLGLKDLATCSDGTKVPALQHYRRYADALAKAQRSRNKKRVRAIHAKIANSRRHHHHVESSRIARENKIVVVGDVSASKLAKTRMAKSISDAGWYAFKEMLRYKTARRRGTFLEVSERFTTQACSRCGCISGSSPKGIGALGIRHWQCSECGASHDRDVNAAQNILRAGLECQPPVEEIAA

SEQ ID NO: 55466 - protein, 258 aa, Planktothrix sp.
LFWSTSLEGKNISIAQLMRLVQLLLKLDIRDITPQLEPTQQCVGLDMGLKYLYADTNQNVVECPKYYRRAEKRLNKLNRRKSKKFIQGKKPSNNYIKARRKYAKGHLKVSRQREEFAKRLALRLIQSNDLIAYEDLKVKNLVRHPKLAKSINDAGWSQLRKWIEYFGVKYGRLTIAVNPAYTSQECFNCGQLIKKSLSVRTHICSCGYCEDRDKIAALNILKKATIGHIGSWSEDLNAWGDTTSIWAGSNTCQDKLSQ

SEQ ID NO: 55467 - protein, 365 aa, unknown
  TnpB Polypeptide
MQITYVLELLKPTKRKQDIFHKNIAEVVKNRQSIAEKLKAGETKLSSADFKEHDLPSAVKNQNIREVKALYKEFLKSNSDKENITFKKNQPICYNNQNYKIDGHIISIPLYTNKCQRFAFPVKQTERFKKLQEHIKNDCKLGKASLFYKNDKLFFAVTVNVENKENNHSNIMGIDIGLKQLAVASIQNPDGKEINRQFHNGNQAGFIRKKYRSLRRKFGQSKKVNAIKKINDKEQRWMTDLNHKISRQLVNLAVQEEVSTIVMENLENIRQTAQSLNRADRNLHSWTFYQLQSLIEYKAKLTGIKVEYVNPEHTSQCCSKCSLVKKSNRKGDLYSCNCGNHIHADLNASRNIAHLEQQSAWMVIV

SEQ ID NO: 55468 - protein, 199 aa, Paenibacillus sp.
MKECSPTLVRKEKRYALHIAYEGDVKLTQAEFSKQRVCAARFRINTFRSLFRDGRFTGKLKQAQRQSGIGAKPNFWRQMNGLQTHIVHDTAHQIIAFTQKHSADVIIMEYLGKMRLPKGTWGAKRLRAKLQFWAKRRIQTKVTEMAHFLGMRVSMVNPANTSALAFDGSGWVKRNTKRDVAERIGCWLPSFGCNRRLSL

SEQ ID NO: 55469 - protein, 382 aa, unknown
  TnpB Polypeptide
VKLTLKIKLLPSKEQADLLLKTIKEANAVCNTISEIAWEKKIFNQFKIHNEVYHSLKGSSNLSAQVLVRCISKVADAYKLDKKVKRTFKPLGSITYDSRILSYKGDTVSIWSVGGRLKMPFVCHNPNYLPYIKGEADLLFRKGKFYLFQAVDIVEDDVKDVEEFIGCDLGLTDIAVTSDGTKHSAEWLNQYREKRQKVRGSIQRKGTKGKTRSCKRGCAKLLKRLKGKERTTATIQNHTIAKRIVQSAKEQSKGIAIEDLTNIRFTSKRRNKKFRTKLGRWSFGQLRSFLEYKAALSGVKLVVVEPAYTSKTCSVCHHIGDRNNKSFKCNNCGNNMDADVNASLNIATLGRVVNHAGESDMYSCSVHYLGSKPIPSALAVGG

SEQ ID NO: 55470 - protein, 348 aa, unknown
  TnpB Polypeptide
MMIQYQLKLRMCKSQEQKCEQFLYHLSSVWNWAVRKIELNAKDHIYFSKMEFQNFLSNHSEKMGIPSHTLQGVICTAHDAWKRCFKKIGGKPKLKGMRNKMSSIPFPDPIKAPKGNRINLPALGSVRFHKMELPDGKIKCGRIVKRTSGWYLCLFIDAQPKVIERTGYGVIGVDGGFKDLLTLSTGEKISHPRELEVAAERLAQAQRGHDTKLAARIQEKIANRRKDRNHKLSRRLIAENVVIKFSADNHKAVARRFGKSVASSGHSQLQRMLAYKSPQSGTQYFEIAPKDSTKTCWVCGEPTGPTGLAGLSVRQWRCTTCGTFHDRDQNAAVNTLIAAAGCAVEVCI

SEQ ID NO: 55471 - protein, 663 aa, Vulcanisaeta sp.
VWGLSIRFIKLCLAGWLVPGLVPPRGGLVSLDELVGRLPTLFANPGTPSSSKSSNVRTVRLRLLPSGAQERRLRRLADATAKLWNELNYARLVQYRETGRVDFEGTEHEFYHRYRDRLGVNAGVAIQLNNNAWKSYFELLKLYRQGELPKFMNKPSPPGFWKDKLLGKRRLIILVRNDRYYIEPINGGEGYIILRDWGLRIKYAGRIKWSGKQGTLVIKLEDNRWFAYVPIEVGAKPAKSNPKGYVRGIHEKIQIENPRGSNKAFIDIGLNNLFAVIFNHSDTAILIKGSTIKAEYYYWKREVKTYQSIRDWLRNHGFESWKKYHTHYLHAVYKRRERLRHYYRTAIRFLARAMHEMGVDEVFIGYPYLVSQDNGNEFNTNIWWFNKIIKWLSEVLQEYGIKLNIVNEYGTSKQCSICNMEHENGRVKRGLYICPLTGIKINADINAARNIAKRVGYKTPIPKKILSYIITSNGVKPITPKRGSNGRDPQGGNPTLQGEKGVIYYNVHDGLSTFMVGILYMENGLLVVFLQDLIGRYLKRPSLIALGMVIYGISYLAVAFIPNFTWAIVDMFFITLAEMIVSPISQSIANMLADPKARGRYMGLYSLVTGLGRTIASSVSSLLMPYALREPLALWGFVLVIAALSSGIYLNVTKGALTVQRSA

SEQ ID NO: 55472 - protein, 434 aa, Vulcanisaeta sp.
VRTVRLRLLPSGAQERRLRRLADATAKLWNELNYARLVQYRETGRVDFEGTEHEFYHRYRDRLGVNAGVAIQLNNNAWKSYFELLKLYRQGELPKFMNKPSPPGFWKDKLLGKRRLIILVRNDRYYIEPINGGEGYIILRDWGLRIKYAGRIKWSGKQGTLVIKLEDNRWFAYVPIEVGAKPAKSNPKGYVRGIHEKIQIENPRGSNKAFIDIGLNNLFAVIFNHSDTAILIKGSTIKAEYYYWKREVKTYQSIRDWLRNHGFESWKKYHTHYLHAVYKRRERLRHYYRTAIRFLARAMHEMGVDEVFIGYPYLVSQDNGNEFNTNIWWFNKIIKWLSEVLQEYGIKLNIVNEYGTSKQCSICNMEHENGRVKRGLYICPLTGIKINADINAARNIAKRVGYKTPIPKKILSYIITSNGVKPITPKRGSNGRDP

SEQ ID NO: 55473 - protein, 292 aa, Microcystis sp.
KKDLAKKGYPKFKKFSRSVEYKTSGWKLTEDKKFIHITDKTGIGKLKLIGTFNREILDKSTIKRIRLIKRADGFYCQFVLDIERVETFESTGKEVGIDLGLNHFLTDSNGDKIDNPRFLRKSEKRLKKAQRKLSKKKKGSQKRLKQKSKVARLHLKVSRQRKDFAVKTAKALIRSNDLVVYEELKVSNMVKNPKLAKSISDASWSMFTDWLDYFGKIHGKFVVAVNPQYTSQQCSSCGNIVKKTLSVRTHVCSCGCVLDRDENAAINILARANTVGRTEIQALGQADPLSIR

SEQ ID NO: 55474 - protein, 390 aa, Deinococcus sp.
MHMENTTLRAFKYRLRPTKAQEAQLTETLILCQRLYNGMLEERRGAYRKAGKSLTAYDQMKSLPEVKAALPEYASVNAQVLQDVAKRLDKSFKGFFRRIKAGQKAGYPRFKGRDRYDSFTYPQPSQNSVTADGKHIYLPKIGNVRIRLHRPFAGKIKTLAVKREGAEWYAVLTCEVQKAKLLPPTGSTVGIDLGVNHLVITSDGEFVDNPRFLRSARKRLRVAQRSLCRKKRGSKRRKKAKAAVAKLHLKVRRQRDDLHHKVARKLVQQHDLIAHEELNITGLARTRMANSVLDAGWAGLLDKLASKAEEAGRQLIGVDPRYTSQDCHQCGHREKHSLSVREFTCKGCGAVLNRDINAALNILARALPSVGNVDQRVMRSPRSPVLQGGE

SEQ ID NO: 55475 - protein, 411 aa, Sinosporangium sp.
MAQTVKRAYKYRFHPTPGQAAELARTFGCVRLVYNKALEERTRAYRLEGRRVSFVESSAALTAWKRSGDYDFLFEVSSVPLQQALRHLQAGFANFFARRAKYPVFKSRKRSRASAEYTRSAFRWRNGTLTLAKMDGPLDIVWSRPLPEGAEPSTVTVSRDAAGRWFVSILVEEEIAPLPPVEASVGVDAGITALATLSTGEKIVNPRHERADRRKLAKAQRALARKEKGSNNRARARLKAARIHARITDRRRDHLHKVTTRLVRENQVIAVEDLTVRNMVRNHSLARAVSDASWRELRTMLEYKAAWYGRELVAVDRWFPSSKLCSECGALQGSMPLGVRMWECPCGAVHDRDVNAAKNILAAGLAERRNACGAGVRPQRGIPPGGRLAVKQEGRPVTVGIPSLQGGEDVK

SEQ ID NO: 55476 - protein, 406 aa, unknown
  TnpB Polypeptide
MLIKGVVFRLDADLPSEAKSLLEDFRLAVNNAIRTGLQARMTSRNALVRIAYKDFRQEHPRIYSQHLVSAFEVAGGVLKNHRRRVRKGVACKVPYVKRLMMKAENQAYKLNRKSGTIDLPIRAGCHVKLNLVVSRYHRKYLDDTTLSMGSLTLLPDRVIIAFRKGAPAPYTPESVLSLDTNERSFDGVFVEVRSQATVSVTAAFPDVAIIQQRHHDRRRRLQKKKAHDRRTTRNLCRREGTREHHRIDYRLHQVADAILSFAEGKKSAVLLEDLTGIRFKRSKDLNRRLSLWPRRKLHQIIEYKAQWKGIPVIKVDPRYSSRKCPACGRIQDSRMGTEFVCECGWHLDRHINASLNLLQTAISNGMAGGLRFDPGAFQHDVMMILYDPVKGARSEPNGTSCDCEVA

SEQ ID NO: 55477 - protein, 402 aa, Escherichia sp.
VKRLQAFKFQLRPGGQQECEMRRFAGACRFVFNRALALQNENHEAGNKYIPYGKMASWLVEWKNATETQWLKDSPSQPLQQSLKDLERAYKNFFQNRAAFPRFKKRGQNDAFRYPQGVKLDQENSRIFLPKLGWMRYRNSRQVTGVVKNVTVSQSCGKWYISIQTESEVSTPVHPSASMVGLDAGVAKLATLSDGTVFEPVNSFQKNQKKLARLQRQLSRKVKFSNNWQKQKRKIQRLHSCIANIRRDYLHKVTTTVSKNHAMIVIEDLKVSNMSKSAAGTLSQPGRNVRAKSGLNRSILDQGWYEMRRQLEYKQLWSGGQLLAVPPAYTSQRCACCGHTAKENRLSQSQFRCQVCGYTANADVNGARNILAAGHAVLACGEMVQSGRSLKQEPTEMIQATA

SEQ ID NO: 55478 - protein, 365 aa, Homo sp.
VEKAYKYRIYPNEKQKEIIAKTFGCCRFVYNKYLAQRIGLYQTSKENLSYVKCAKAMSELKDELEWLTEVDSTALQSSLKDLDNAYKKFFKEHAGYPKFKSKKDNRRSYKSKYVNCNIEYLNNHIKLPKLGLVRTKNKLIPQGRIVSATISQEPSGKYYVSLCCVDVDIQPLPITNNAVGIDLGIKEFCITSDGELVSNPKYLKQSLDKLAKAQRELSRKAKGSSNRNKARIKVARLHEKISNQRKDFLQKLSTNIIRENDVICIEDLQVKNMAKNHKLAQAISDVSWSEFVRELEYKARWYGRLVIKVDKFFPSSQTCSVCGYKNEETKDLKVREWDCPVCHTHHDRDVNAAINILNEGLEQLA

SEQ ID NO: 55479 - protein, 367 aa, unknown
  TnpB Polypeptide
MEYSYKFRIYPNTEQQMLIQKTFGCARFVYNYFLAQRISEYKATGKSSTRFQQDKFLTVLKQEIEWLREPDKCALQNALKDLDIAYKNFFRSVKSGGKIGFPQFKSKRNRRKSYKTNSNIAIFNSYVRLPKLGLVKCRISKEVRGRILSATVSQNPSGKYFVALCCTDVDIETLPSTGTVVGLDMGLKSFAVTSNGVEYSSHKFLAKSQQKLARLQRQLSRKSKGSNRREKARVNVARFQEHIANQRKDMLHKLSTSLVRDYDLIAIEDLALKNMVKNHKLVRSISDASWGEFRRQLEYKAVWYGKQVVTVDRFFPSSQLCSVCGAQWPGTKDLSVREWTCPSCGTAHNRDTNAAKNILNEGLRLLA

SEQ ID NO: 55480 - protein, 270 aa, unknown
  TnpB Polypeptide
MLKAYKYRIYPNNEQKIQIAKTFGCCRFVYNQTLAYRKEVYEKEKKTVSKTDCNNYCNRQLKKEYEWLKEVDKFALTNAIYHMDAAYQKFFKEHAGYPKFKSKHDNHKSYTTNFTNGNIRVDFECNRVKLPKLKDVKAKLHRIFSGQIKSATISQVPSGKYYVSILVETEHMELLHTNQNTGIDLGIKDLCITSEGKKYENPKIIRKYEKKLAKLQRQLVHKEKRSQNYYKVKKKIALCHEKITNTRKDYLHKMSHEIISENQVIVSEDK

SEQ ID NO: 55481 - protein, 125 aa, unknown
  TnpB Polypeptide
MHRRLANIRNNHLHQTTTSIVKVKPYRVVIEDLAVSNMMKNKHLSDAIRKQGFYEFRRQLEYKCNFRGIELVVADRFYPSSKSCSQCGVIKKDLKLKDRLYKCSCGLNIDRDLNASINLSKYKLA

SEQ ID NO: 55482 - protein, 294 aa, unknown
  TnpB Polypeptide
VLRIAVLNNEWVELRLQWYGYLDKYFNSNWKPKEILVSYKDGKIRIYITFEKDVILRKPGHIMGIDINFNNVTYTIVNMSEELVSMGVILFNGLNRALARRVIAEKIERRYSRRWRFVKGIREAIKRLGRRARNILTDSCHYISKRIVEIAKEYKALIVLENLNKLKVGANGSRGFNKKLSLWTYRRIQSYIHYKALIEGLSVTYVNPRNTSKTSPIEGKLEFINYRRVKLPNRYIITRDIIASWNIALKGLKLYTRDVGSRGSVETPKALEEDVAPNPMKGKPVRVPLVSKIT

SEQ ID NO: 55483 - protein, 467 aa, unknown
  TnpB Polypeptide
VFDMAADVAACRLVHRTATVRLRLTRRQTRRCYGLLRSAGDLWAWLLDSNRRRRQQGEQPVTGYQALCRELTRAGALGELSVVGARSVLQHYADAWFQAAKRRKAGRQDAGFPRRKRALVPVRFYSGTFRIEGQRMRLPVAKGQPELWVRLARALPYPPEQVRSVTLLHDGGRLWLAVTAAVPIEQHDLDPARVAGVDLGIIHPYAAVTEDAGLLVSGRALRAESYLHLHDQQARQTKAARRAPKPGQRGSRRWRNHRVRLRRAEARHRRRVHQAQHEAAKQVVAFAVQQKVGTLLVGDPKGITEKDAGKVHNLRLRQWRRTHLLQALRDKAEQAGIGVRLVDERGTSSTCPACRRRVAKPTGRHFGCPYCGLQGHRDLVGAANIAARAGGGSTSMGVPVLVEHRRAGRVPARRDRRRHLYDQRRGFCLDSGHLQDAPVSLGCRSPRVPDLAPGEDQAAVPNRADVA

SEQ ID NO: 55484 - protein, 332 aa, unknown
  TnpB Polypeptide
LLQRAVSVVRQADPAGYEPRRRNRQVLSGLKRDGRIHKPHPEVKRVAIRFAKDSWSYKKAISTATPVKIAVSLPGGRKEVWIKPHRRPWLYWWKVLRKEAELASTLIVRRKRGKWYAVFIFDVAPKKETPAEVVAFDVNENWVAVARLSLLSTVDAVAQWNRQYVDPAVYFIKTDFGRLAKRYEAVRSAKLEELKQGYPYAGRDEEEKRQNVADTREFRRFARRLRERRRKEGRVRQVARQMTKSPAVIITEELGKNPQEEMIGLEKTKKIVRKKVDRRKLRHRVKQTPFRKILRAVEDKAREVGSAVFYVSSFRNSKVCPIHFPKLEDGDD

SEQ ID NO: 55485 - protein, 403 aa, unknown
  TnpB Polypeptide
VGTYGILHILWQQYQKIQKNKLEGIFKIRKESEVKSVEKAYKYRIYPNKKQKELIAKTFGCSRFVYNTYLAKRIKLYEESKKSLSYVQCANDMKKLKSELEWLKEVDSTALQSSLRDLDIAYQKFFKEHSGYPKFKSKKTHKFSYKSKCTNGNIQYCDKHIKLPKLGMVKTKNKLVPQGRILNATVSQEPSGKYYVSLCCTDVDIKPLKRTGNSVALDLGIKEFCITSDGEMIENHKYLKKSLAKLAKLQQKLSRKPKGSSNRNKARIKVAQQHEKIANQRKDFLQKLSTELIKKNDIICIEDLQVKNMIKNHKLARSISDVSWSEFVRQLEYKAEWYGKQIVKVDKFYASSQTCNVCGYVNKGTKNLGVREWDCPCCNTHHDRDINAAINILNEGLRLLEVA

SEQ ID NO: 55486 - protein, 367 aa, unknown
  TnpB Polypeptide
MIKAYKVRCFPTEEQKHLIIKTFGCCRWYWNQALFDNIKYYKENKKSKINTPASYKKEYEWLKEVDGQALCFTQIDLQSAFSGFFKQPNKGFPKYKSKKCPKNSYKTMTAKGFPMDDWTIKLPKLGKVKIVNHRHKTGIAKSCTISMTPTNEFYVSILWKGDEVDETLPKVDKEIGIDLGLTDLAICSDGTKFPILQSLRKNFSKLKKEQRKLSKMTRGSNNYNRQKLRVAKLHQHIVNQRKDYLHKVSHKLTIENQVISLEDLNVKGLMKNHHLALSIADVGWSMFVNMLEYKAKNKGRTIVKIDTWYPSSQICSNCGCVTGKKPLHIREWTCPKCGVHHDRDINAAKNILTEGKRILGAGSSPDR

SEQ ID NO: 55487 - protein, 459 aa, Solobacterium sp.
MKDYQIARRQYGKKFTGKDVGKLSKEEKQEQARLIAYMKKCQKRVPISKSELEHYAIVGRQQYSHYMSAHQAQWIAVQVYNSVQKYLYSDGKQIHFKRMVQFDTIGQKCATNGVVMQGWYRMRMNKKIFRLQVPDTSYMHAVIEKNDRIVTVSLKRIEFNSGWKYYVILTLDGNPPVMHSKAENNTVGIDLGTSTVAAESSSGVMLENLAPDASRYEKQIRHLQALIDYKLRAANPDNYDTTGKVRKGRHFWKISKAVRRMRRYVRVLYRQQTACTRTSHRTQINRILSHASAVVIEPMSFRPLQKKAKQTERSDKVSEIKKSDGTVILVRKYKRKKRYGHSIKNRSPGFFQSELKRKAGLMKVPVIAIDAKRYKASQLHHDTGEYIPAGLNERYKTIADHQVQRDLYSAFLIRHTDTSLRRPDFEKCATDFQHFVALQNALLSEMRASHISNIPCWGF

SEQ ID NO: 55488 - protein, 501 aa, unknown
  TnpB Polypeptide
MRLGVESGPGTPRGEDESVTRKSSRTGIDPGARGGAPGLRPRSAKRAKKKIDGEGIIIEPLNAWARLLVGQCGEPRGSGVSEARAVRVWRCDVVRLLPTPRQEELLCLVGDQTARLINMENFRRRQLFFSAGKIDYSWRSAWGRRKTEYTEVYRVLGSVNFHEACRLIGEEWRSFVELLKAEREGRLPPWQRVRPPGYRKREGQRTPIVVVRFDNYRVDMEGKVLHLGYWNASIPFRGKPRWLIKPGAKQGRLVITYDPVRKRWYAHVSVEVLLERKRCGGSFMGIDLGREVLVAAVASDGTALLYKGGVLKSDYFYFERRIAVVDRALSDAGMRDARRSALQEERRRLFEKRERRRDQAFANTASHLKRFACVRNVGIVFIGYPWYISQEKPGKGNTNMWGQRKLLLRLATTLENAGIPAFAVSEDGTSRKCAYHNVEVQRKPRGLVHCPHGHTLHADINGGLNIMLRGLEALGIEVQLPERIRVLSFLATPSGVKPIKP

SEQ ID NO: 55489 - protein, 368 aa, unknown
  TnpB Polypeptide
MVNVCIAVGIEESVTSLKTLSTRSYHRLSYGVLGYYRLGAISTATSILRNYRKANKKNPRTKIPYARKLMLTTCYGFKIQNNHLRLPIKPRKYVYVKLNNHMLKALAGLDVRSVTVTPHSISISYAKETVETKPVGFVGVDRNLDNVTTASTDGRIGRYDLSKATRIKSGYRCVKSHFKRSDKRIITRVFSKYGELERNRVQPLLHNVSRRIVDEAKTRRYGIVMEKLTGIRRLYRKGNGQSRNYRARMNSWSYGELQRQVEYKARWEGVKVIYVPARDTSKRCSICGYKTLESAQRKLWCPQCGAMLDRDENAARNIATGGLRFGPYGPPGEAMVEEREPENTTLILKVDGGKLSQPTNDNKYPTKT

SEQ ID NO: 55490 - protein, 384 aa, unknown
  TnpB Polypeptide
VRKAFKFRLFTNANQERELEIMLESHRRLYNLCLEQRRDLYQQHGHSVKYSDQSAEFKDLRTDNVYFARLNFSSAQATMRHLDKAYVAFFRRIKIGQAPGYPRFKARGRFNSIEFPSYGDGIRLNGHRLRVQHVGVIRCKVHREIEGVVKTATLKLEGDKWFVILSCDLGAVTIQPSAFPAIGIDVGLENFLTTSDGEVVDNPRFLKQELPALRRAQHAVSRKKKGGKNRRKAVKVVRVLHAHVANQRREHHFKTALKLVRCYGLIAVERLNIHGMLRSQWMSRAISDAGWASFIEILTYKAASAGATVVAVNPRGTSQLCSGCDTKVLKALSVRQHTCPHCGLSLHRDENAARNILARALLARTGPVGANRESPVAQEAACFS

SEQ ID NO: 55491 - protein, 217 aa, unknown
  TnpB Polypeptide
LHGERIQAGGWREGAAHERIPHAGRWMASLTVERKDGPMPTPLKGGSVGIDLGVKQLATLSDGTIIRNPRALDSNLRRLRREQKNLSRKRKGSNRRREARTRVARLHARVADLRRDLLDKTTTMLARTYADISIEDLNVAGMVRNHRLARSVEDAAFAEFRRQLEYKTARTGARLHVIDRWYPSSKTCSNCGTVKAKLSLSERVYHCEECGLVIDAI

SEQ ID NO: 55492 - protein, 395 aa, unknown
  TnpB Polypeptide
VGETVKLTACFKIEGEVPDMFNLYKQLVNELLNYVFLRNITSFKRLKSEKYYEMRGKYPEFPSHYVYTACQMTCSIYKSFRKLKRKGKAKGDKPVFRKDVIMLDDILFTLKLDDWVAAIATPNGRVKLKLLHGKYHEKFKYWKIGQAWLIKRNNDLFLNVVFSKDVEVEKPINVIGADVNENNVTIAKPNGFERRVTGEKNIRIAYFLKRRRIQSKIKGGKIRRKLLAKYGEREKNRVLDVYHVVANWVVKEALKSNSAIALEDIKNIRKRIKFSREMNGRLHRWSFRKLQKIIEYKAKLNGIPVVYIDAKGTSTYCPICGAKLSPNGQYRTMKCKRCGLIADRDVIGAWNIRLKVLKTDRCGEPRSRRKPPNETGGRKGDKILQNVKPPRTVTR

SEQ ID NO: 55493 - protein, 372 aa, unknown
  TnpB Polypeptide
MIQRAHKIRLKPTKAQEQLLRKTVGVTRYAYNWGLDKWKELYSRGEKTGAYVLSELWTRERPDWSKEVSTCPPRHAFMNLQGAYKAFFRHQNEEPVRHKKYKHDSFYMTNDKAHVDGKRIYLQRIGWIRMREALRYEDARILSYVISCVAGEWYVSIQCEILEEVRTDSTSVVGVDVGIKHWAVSSDGLTLDEPKRLKHLRREVKRKQRLADRKKKGSQNRKKTQLKVSKLYHRIDNIKKDAIHKFTSTIAKNHGIVVIEDLCIEGMRKGVKSIRKGVQDSCMGEVHRQLMYKCNNFVKVDRYFPSSKTCSHCGSVLAELSLNDRTYHCPSCGHTIDRDLNAALNLLNEGLRKLSTVGHTVKDCGASPKDLE

SEQ ID NO: 55494 - protein, 535 aa, unknown
  TnpB Polypeptide
  misc_feature (454)..(503): Xaa can be any naturally occurring amino acid
LDVRGDCRSGFRHELQQERLEAVTRRNHRRARRSPGRRPQRPLVAFWRGTGVRNLRSERRGGAHHSVFGTAVWQPLSQEPETARWREAGCGGGIVLTAHKIALDPNNAQATYFARAAGTARFAYNWALAEWQRQYEACKTDPSLPKPSQMALRRQLNGIKGEQFPWMLEVTKNAPQMAIIQLGEAFKNFFAGRTKYPKFRKKGVHDRFNLSNDQFNIDGPCIRIPRLGWVRMRETLRFNGKIMSATVSRVADRWFVSITVDTLDDSHLPKAENQGAVGVDLGVSALATLSTGERITGPKAHKALLSRLQRLSRSLSRKVKGSENSKKAKRKLARLHARIGNIRKDALHQLTTDLTRRFHTIGIEDLNVRGMVKNRSLSRAVADMGFFEFRRQLQYKSAQRGGVVVVADRWYPSSKTCSACGYKLETLPLALREWACPACGSVHDRDVNAATNLXXXXXXXXXXXXXXXXXXXXXXXXXXXXXXXXXXXXXXXXXXXXXXXXXXCSLWRGRLWPWARAQDETGLGEAGIQQQATCG

SEQ ID NO: 55495 - protein, 159 aa, unknown
  TnpB Polypeptide
MKKRLAREQRKLSRCVKESRNYVRQKKKVARCHEKIRNQRKDYLHKLSRRITDQYDIVAVEDIDMKAMGQCLHFGKSVQDNGYGMFRNMLDYKLAWKGKKLVKIDRFFPSSKKCSKCGKIKKELGLSERVYRCTCGNEMDRDRNAAINIREEARRMLAV

SEQ ID NO: 55496 - protein, 400 aa, unknown
  TnpB Polypeptide
MLRRFCHLAKNLYNHGNYLVRQELFKNGTWIRYQMLDSLLKRDLDHPDYRAMPTARSAQQLLGLLDKNWKSVFVAIKDWKKHPEKYNGRPKFPHYKRKDALSVLILTNQDCKIRDGILRFPRIFNGFTIQPQFIGNVKAKLKQVRIVPAGGSLTLEIVYEIPESAPLADNGRYAAIDIGVNNLAAVATNTEAGTFLVKGTPLKAMNQFYNKQLAKIRSICELMNAQRSSKRISRLTSKRNRKVDDYLHKASRQIVDLCAQHEISTIVIGKNNGWKQRVNLGKKNNQHFMQIPFARFIQMIRYKAETLGIKVILTEESYTSGTSFLDGEAPTKAFYNKARRVYRGLFVANNGKKINADINGAFQIMKKVFPNVNADGIEGVALRPAIVAPSMNACHGSGCT

SEQ ID NO: 55497 - protein, 379 aa, unknown
  TnpB Polypeptide
LYAYTYKTETEYKTDYPFLKKADSIALQGSREHLEAAYKNFFNGSGFPTFKSKKARESYTTKMTNGNIKIDFQRKRIKLPKLSWISYADDRIFAQNIKHVTVSKTKTGKYYASLTLEKQPDMSLLRYLLFSKITAFDMSARDFLVNHLVKMENPRFYRAEEKRIVKAQRILSRKQEGSKNYEKARRKVAKIHEKVYNRKKDWTHKLTHTLADEYHAIILEDLNIKGMQKFHSGLSKSVTLDFSWHQFVTYLTYKMKWNGHHVIKVDRFHPSSQLCSACGEKTNHLTLDMREWTCSHCGTHHDRDVNASLNLLYKGLLALVSENPLMLIHDDTPTVGTTGSHAFGEEVRPISILTNLYRHTSRNKELRLAKDESPPFMVE

SEQ ID NO: 55498 - protein, 438 aa, unknown
  TnpB Polypeptide
MIEAIKIRIYPIKKQRTKLNKTLGSGRFLYNKMLEERNEVYERLKDDKEALYHYTYKTEKQYKQEFLFLKEANSRALQNKTRNLITAFHNFCEGLNIPRKVGHPKFKSKKGVQKYTNDNVNNNIKMDFTRHKIKLPKVSWISFRDDRVFSGKIRHVTVSRTRTNQYFVAITLKAQDDAEPKNTIHEKDIAAFDMSAKDFLVNDAVRMKNPRFYRSVEKKPKHPHRNLSRKQKGSKNWEKARLELATHYEKIYNQKKDWTHKTTRDLVNKYDVIVLETLNIKGMQKFNSGLSKSVTLDFSWHQFKTYVEYKMKWTGKHFIQVKWNFPSSKKCSHCGQITNDLPLDVRVWTCSTCRTTHDRDLNASIKLKVGGIRILKEEKHITIIHDDKNTAGMAESQAFGDDVRPVAILQNACRRFSMRKEAHTYGKDLHESPSFRKE

SEQ ID NO: 55499 - protein, 184 aa, Providencia sp.
LLYHSSVEKVPAVFRGKNQVYNQLADVIKKEKSSTNHCKARLQLAVQYKLSRAIVDENQAVIVETLKAANMMKNHYLARAIGDAGWSGFIAKLKYKATEKGVHVVKLEQWFASSKTCHCCGHKMPEMPLNKRTWQCPECGVEHERDINAAINIERKGILELQAAGLVVSAHGGQHKSVAETVAA

SEQ ID NO: 55500 - protein, 408 aa, Providencia sp.
MLILKAYKFRLEPTSEQSQRLRQLCGCARFVWNYGLAETQRILALGEKLPSAFELNRMVTVWKKIPEHAFLQEAYTDNLQQKLKDLHGAWKRCFDKKLAAKAPVFKKKNDGRDSIRFVNFEKYCCLEKRRVRLPSGLGWVKFRQSQCVDGKIKNATISQSADKWYISFQVEVEAAETNHASTTIVGLDAGVTKLAALSDGTIYQPVNSFKTRQRKLATLQRQLSRKVKFSANWQKQKRKIQRLHSHIANIRRDYLHKVTSEISKNHAMIIIEDLKVSHMSKSAKGTAEQHGRNVRAKSGLNRSILDQGWYEMRRQLEYKQLWRGGHVIAIPPAYTSQRCACCGHTAKENRVSQSNFECLECGYTENADINGARNILAAGHAVLACGGMVQSDRPLKQEPDTEQSVVTH

SEQ ID NO: 55501 - protein, 194 aa, Providencia sp.
LYLPKIGWVRYRNSRDVVGEIKNVTVSQKCGRFFVSIQTEFEYEIPIHKGSEIGFDMGVARFATLSNGEFFEPSNAFKTYKGKLAKLQRQLKNKVKFSQNWQKLKTKIAKLHHKIANCRQDFLHQTSSKISKNPAMTYVEDLQVSNMSKSAKGTAEAHGKSVAAKSGLIRAILDQSWFELRRQLDYKTQWQRGF

SEQ ID NO: 55502 - protein, 484 aa, Halobacteriales sp.
MEVKRTVPVKLDVPDGRRDDLHITIEQFNDAANYTLENGRNGDGYLILNKSKMHDRVYHDLRERTDLPANLCIRAYSKAVEAMKSTVADWEDGKNRPLPSFDQPSAVYDKRTLTINDRSATLSTVNGRVEVAYGLGDYQRSYLDDDDYERRMGTLHYDEDDNSFYLHIVLLKEVERREGDRVMGVDLNLKNVAVTSTGTFYDGGELLWGQNHYFRVRRSLQDKGTRSAKQALARLSGRENRFVLDRLHTISRRLVEEARSHNCSYIAVERLTHIRERMDNGNDRIKRQMHNWAFRELQEMLEWKAAEDGIRVEDVHPAFSSQTCSVCGHQSSTNRDSDGWFSCNECGYELDGDYNAAKNIGIRLLTVPEGKTPLGVGRRSARPEVRDAEPERRPLVRRVSARMGVPRTIPRLQSWVADSYGTVRCSRHEDRLWWNSPSPRTATRNIRSRRPSNGSPTTAMPVSRCSPTNRTRTSRPSTRRTRLN

SEQ ID NO: 55503 - protein, 372 aa, Geobacillus sp.
MDMTLTAKIKIYPTAEQAEVLKATLSAYRQACNAVSVVIFDTKVLAQAKLHDMTYRLLRSNYALRSQMAQSVIKTVIARYRSLKSNGHEWTLVRFKKPEYDLVWNRDYSIVQGLFSVNTLEVRIKVSFEPKGMEPYFDGSWTFGTAKLVYKHNKFFLHIPMTKTIPTVDEHNIRQVVGVDVGVNFLAVAYDSQGKTIFFNGRKIKHMRAKYKRMRKTLQQKGTASARRKLKTIGQRENRWMTDVNHAVTKALVRQYGERTLFVLEDLTGIREKTERVRIHDRYETVSWAFYQFRQMLEYKARLHGSKVIVVAPHYTSLTCPKCGHTEKANRKKRTHTFCCRTCGYTSNDDRIGAMNLQRKGIEYIVEGTTQA

SEQ ID NO: 55504 - protein, 409 aa, Streptomyces sp.
LKAPARQTLVAHHDRRRWRDAHAKGLQRPTAAELSRQVITEAKKTSERAWLGAVSAVVLQQSLRDLETAYSNFFASKNGTRKGPSMGPPKLKRKTARQAIRFTANARWSITEGGKLRLPKVGDIEVRWSRELPSQPSSVTIIKDLSGRYFASFVVEVEDKPLPELDVEETDTGIDLGLSSYAVLRGRKIASPKFFRRRERKLRRAQRAVSRKQKGSNNRREAQRAVARIHARVADQRRDFIEQETTRIVRESQAVYAEDLNVKGMASRNGRLGKSVHDQSLGRFVRILEAKCARHGRIFVKVDRWFPSTRLCSRCGCLTGPKGREELHIRVWTCAECGTWHDRDENAEANIRAAGRKHAAEMRHGAERRNACGEHVRPRKPGQHSLKQEPTRSLAVNGGAGGNHPRTRG

SEQ ID NO: 55505 - protein, 548 aa, Nocardia sp.
MIFELSVPESAPVDPPSCDRIGVPWCAIARPTDLRTLALCRTRGHPAAGLHGGAVALLNFVASVTIRSARRPSCPRNTFSGKAVAPYCRHVQLRYRYRLDPSPGQRTALAKAFGCARVVFNDALRTRQDARAAGLPYPTDAELSKLLTESKKTPERAWLSDVSAAVLQQALADLNTAYRNFFGSITGKRKGAKVAPPRYRSRKDNRQSIRFTRNTRFAVTGGGKLRLPKIGDVPVRWSRPLPAEPSSVTIIKDAADRYFASFVVQVEDRPLPELDAEVGIDLGLTTFAVMSNGDRIESPKFFHRAERRLRKAQKALSSKQKGSKNRAKARVRVAKAHAKVLDAHMDWAHKHTTAIIRDNQAVYVEDLCVKGLASARLAKSVRDASWGLFLQLLGEKARRYGRHFARVDRFFPSSQICHACGERDGPKPLSVRVWTCPGCGAVMDRDANAAQNILAAGRAERLNASWRPDKTEPGSAPADEAGTHRGVRSVDPAGIAALKGSEDVKTTSTPSARRARRTTGGPTTAAGSWRCSSAASAERPRDALPESR

SEQ ID NO: 55506 - protein, 369 aa, Bacillus sp.
MVTITAKIQIYVSDNQADSLRITTNAYRKACNWLSKIIFETKNLNQVNLNNLYYLDLRNQFGLKSQMAQSVMKTVIARYKSAKSNGHEWALIQFKLPEYDLVWNRDYSLTQKQFSINTIDGRLKLNYECKAMKKYFNGTWKFGTAKLVYKFQKWFLHIPMTKNFTELDFVNVNNIVGIDLGINFLATTYDSLGKTTFYNGHVVKHKRGKFKATRKQLQVKQTPSARKKLKQIGSRENRYVTDVNHQITKALVDKYPKGTLFVLENLSGVRNTTEKVRVKERYVTVSWSFYQFRKMLEYKAQMNGQKVIVIDPKYTSQTCPKCGHIKKTNRNKKLHTFCCENCQYKSNDDRIGAMNLHRKGFEHIGVVIT

SEQ ID NO: 55507 - protein, 373 aa, unknown
  TnpB Polypeptide
MKILRAFKTELDLNHAQRTVCARHAGAARYAYNWGLARKIEAYQAGQKVPSAIDLHRELNVLKKAELPWMYAVSKCAPQEALRNLDQAYAHFFRRVKEKQAGKKVKVGFPKFKSKKTGLGSFRLTGAIHIFENAIQLPRLGMLRLKEHGYLPTADVHILSATVSERGGRWFVSVQVEMEIPDPEPVEKGAVGVDLGILRMATVSDGNAVDNPRALKQGLNKIKRLQRRVSRRQKGSANRKKAVRQLARAHYRVANIRKDALHQATSWLAKTKSVIVMEDLNVSGMLKNHHLAQAIADVGLYEFRRQMSYKGAWYGCEVLIADRYYPSSKRCSGCGQVKPDLSLNEREYRCECCGLVIDRDLNAAINLEQLLYT

SEQ ID NO: 55508 - protein, 402 aa, Frankia sp.
VLLGPLFGAAVGRALAARTHPVPSAALGAAPAVGLAPGRAGQRCFPRWKKRGKARDGFRYTTGAYGPAGEAYVKLPRIGRVKVGEPMGALTARLADGRARRLGATVSRTADRWFVSFTIEVERDVPARPSRRQRTGGPVGVDLGVKHLAVLSTGQSVANPKHCQRAERKLRRASRAHARSKPGSAGRRQRAATLAQVQNRIADQRRDGLHKITTAYRSVSPLAFRDPQVSLLAEPVPRSGCPSSCRGRRVRAGSARRRSVAPGEFTATLLPRDRADGGLTLEHSFFLFESPSSSFITTSPANTRIRCGTRSTRRGPRGRRTADRQSSGRRRCPAPPPGRARMPRPRRGRWCSRRYPIPAWARATGPEPRCRSGYPAAICVTVFRSALTRYFTVTPALVPTTR

SEQ ID NO: 55509 - protein, 401 aa, unknown
  TnpB Polypeptide
MGKINRTYKFRLYPNKVQIELLAKHFGCTRFVYNYFLNQRKEQYKLTGKSDNYYAQAKYLTELKNQEETAWLKEVNAQTLQFAIRSLETAYINFFHKRAKFPNFKSKHSKNSFTVPQSASVADGRLFIRKFKEGIKCRVHREIKGKVGKVSITKTASGKYFVSVFTEEEYVTPLKKTNKSIGLDMGLKDLLVTSDGETFKNSRYTRKYEHKLAKAQQHLSRKKKGSRGFENQKLKVAKLYEKISNSRADYLHKCSISLVRRYDTICIEDLNVKGMVKNHRLAKFIADASWGSFVAMLSYKADWNGKKVVKIDRYFPSSQTCNVCGYVNKQIKDLSVREWDCPNCHTHHDRDVNAAINILKIGLNNTSAGTVDYTGGEEVRADRLGSHSSVKSETNESLAHG

SEQ ID NO: 55510 - protein, 311 aa, Sarcina sp.
MYMADTTVLSKDRYPGLFGHLEGSAELSKCLYNAALFRIRQVFTGWDKEDRSENEKEVFREIAVMKEVYPDIKAGRVLSYRALDAVMRANRNPDFFAGLPMQTAQRILKEAVSTFKGWLSAVKGYKKAPGRFTGRPRMPKYLKNGVHTFYISSQDAVLYPVYRDIDTPDSCADRTEGPACRGYAGMELKLPLIRERLYLPHIHRDSVLKEVQVKPYYGKIMLVLVLETEEVSVSASRPHAAGIDLGTDNIAAIVSTDHASRIYKGGAVLSENRSFHKKRARAVTGAGSRALIWERPMTRTLSACRMTGSGR

SEQ ID NO: 55511 - protein, 532 aa, Bacillus sp.
MARKDMKPSYVLELEMRTTARDRKVLDKKMRIGKHIYNACLGEAQKRLSAVIADKTYRMTVKEKQASSAKYHNAKAKKANKRTAEEKEIMRKFKRLTDEIHTIEQIYGYSEYQLHAFVAPIQAKFAKNIGSLEAQKLATRAFNAVEKVHYRQANKVNFKRWSDDFSIENKLNTTGLRFEDGYILWGEQTLVSKKNPISQPKKGAIKVPLIVKRNDRYAQVALCDRTKYVRVIVREIRGEIRYFAQLVQEGFPPDKSWKKNRKISGDETKRVGLDIGTSTFAISSEKTVELHELAPECVVDGKKIRRIERAMDRSKRATNPENYNEDRTIKRGVKLEWRFSKRYLRLKTIRKDLHRKIVVKRKQSHEILANHVLSLGSEIRVETMRVQGLQKRTKKTTRNKKNDKINKKKRYGKVIANRAPAMLIEIIDRKLNYQGRKIKKINTAEVKASQFNHVTGEYNKKDLSERWNECILGERIQRDLYSAFLIGNTVDTLDAVDVDLCNRGWQNFVALHHQEVARIQQHRNKQMRWYVA

SEQ ID NO: 55512 - protein, 505 aa, unknown
  TnpB Polypeptide
VQIYWTCVYIFNSTLCASLTSFLPNVLFVRGLLPEFLITTLSDTGMSAPFSVLSLEHARQTSIGRDVAQAVFLRVYPTKDQQVKLRQWIGTCRWVWNQFVAYNQSLYASRKQFAFHKELSAFLPDMKRVEGCEWLTSAPAISLVDVSRSYDLALRNALADRKALRAGKRLGGKARGFPTFRKKRDSYGDVYLSSQSIRIHEPRLDVPHKARGAISVSKLGDLKARGGRWPKGRILSATLSQRADQWFLSVRFEAVAPWDGRPPEVDAIGGDLGFSHFLTWDDGTAIHEVDPPRYLRKAEKKLKRRHRQMSRAIKESARRKRQIVKLARTHRRVANQRENFLHQLSHRLTAKAGVIGLEDLDVHSMACNYRLAKSVADGGISKLIRQCCYKADWRGRAFTQLDRWMRSTGVCPDCGTVHKRLDLKVRVWTCGGCGAVHDRDHAAARIIRLQAIELVGKGISEPASVTRRKRGESGPLRRGRGLRRKSARRTVNVAEAQAVTAADPQ

SEQ ID NO: 55513 - protein, 417 aa, unknown
  TnpB Polypeptide
MKDSIKNKIKETIKKTRLKRKSQKCRTFELKIDESHLNKTQKEYLKMFFVEAKWLYNYILSQDNPFDYDYKTNPIKKKNKDGEFEDITLKYLSAKNKQDILYQLRQNIYSLSKAKKKGLEIGELKFKSNCKAIELSQYGTTHEIISINRIRINKINKPLKVHGLDQIKEDYDLANAKLIKKPSGYYIKLTCYEFIKPEQPTNKKDIGIDFGIKNNITTSEGEIFNISIEETERLKRLMTKMNRRQIKGSKNRYKTKHLIQKEYEKINNKKKDAANKIVNYLLTNYSHVYIQDENLRGWQSGWFGKQIQHSCMGTIKSKLKQFNSVTVVDGYFPTTKMCYKCGKINTISLDERTYTCVCGLSEDRDIKAAKTILLAGQNKLIPMERRNSKPVEKQTSVLTDSNVVRVSSTSMNQEASL

SEQ ID NO: 55514 - protein, 433 aa, Cyanobacteria sp.
MYNYRMIISYQFKLLPTKEQRQRMFRWLDMLRHAYNWMLADRFDWWEMNRCPINACPLVCSIAQPREQPGYYGQKRSLVSLKAEREWYKDVHADVLQDMVKRVDLAFTRFIKGDTEGNRSGKPRFKGKNRYRTFAYPRGEHDCIQGNRIELPKLGRIKLIQHRPIPDSFIIKRALMTQKADGWYVTISLEDVSVPDKATINIQPTEANSIGVDAGLEYFVACSNGTMVEPPKFYRKTEDKLAVLQAKRELRTKGSTSRRKLNQRIAKLHQRIARQRRQWHFELAGSLVDKAEVIFVEDLNVSNMTRRNKPKQDEEGNFLPNGQVAKSGRNKSFADAGISGFLNEILPYKAERAGRSVVKVNPRGTSQHCAICLNRVPKELSDRWHECSCGASMHRDLNSGILIKKVGLGVRLTIKRESCKREEKPALYPIGLV

SEQ ID NO: 55515 - protein, 431 aa, Saccharopolyspora sp.
MKFRLHPDRMQAERLTSWSHTSRAVWNIALAQRIWAYRSAQRKAVRAVAQCAELTEARREHAWLRDLPAQCAQQVLQQLDAAYDNFWNPAHPARFPQFKKKSHRQKITFPGQAVRVHKVSRRMAQVKLPKIGWVRFRLSRPINGTVRNATVSRDGLGWHVTFGIHMPELEQPPVNTGMPIGVDVGIACSVFVSNEHHERQRPDTIVEDEQNRLRGLEQRKARQLTYAKKHNGGKYSNRLRKTIGQIAALKARQARRRADWNHKLTTDLTKNHGMIAVEDLKVRNMLRSAKGTIELPGANVAQKSGLNRRIADQGWHQIRRQLEYKTRRHGGVLVVVAAPGSSQTCNECGVRDPKSRHGCGRLFACTACGHTEHADRNAAHIILDRALCTAGWAGPAGSGSTRPQSTRSPQKGRGTLTGSRMREPTSSVTAT

SEQ ID NO: 55516 - protein, 428 aa, unknown
  TnpB Polypeptide
LKQISQEIRINPNNIQKTYLAKCFGCKRFAYNWGVEQFNQNVSKGIFKSGHDLKKEFNALKESKFPFVYEVTKYAAQQPFINLNKAIKDAWKNRKKGEPVRLSFKKKSNHESFYIGGDQIKIVTKPYSKKQFLKIPLLDKPLKLTEKIKYNTKILSCTISHIYSLYFVSFTFEISEEELINEKAKLANMTNKAVGIDLGIKSALTLSVPINIHFPVRIKKENRKLIKLSRQLDRKVHPRTKGDTTKKSKNYLKAAFRLQKQYMRIFNMKKDFIEKVSSLIVRNFDYICMEDLNVQGMLKNHHLAKAISDVSFYKLREKIHEKCNMVGKFFILADRFFPSTKTCSCCGTYNSRIKLSDRDFNCDYCEVTIDRDFNAATNLHKYLIGKIGRVTAEFTLADLTALENDFCINHLPTSKVETRNQYNSCNCL

SEQ ID NO: 55517 - protein, 388 aa, unknown
  TnpB Polypeptide
MLCSQYNYRLAQRFDWYDETRCRIDACPLICSILPVEEIFKDIPAKRIGSQGYVDWKALQKGDLPQTKIERPWYKDIYSQVLQDCVLRVDKTFERFIFGDKNGRRSGRPRFKPRSRYRSFTFPQIKQDCIESNRITLPKIGDVRIVLHRPLPDGFKIKTATVIHKADGWYVTLSLQDDTVPVLSPEIDFTKVVGIDVGLKDFLVTSDEDVVLIPQFARKSERRRKVLNKSLSRKKRKGTERRQKAGKRLSKHYLHVARQRKDFHYNIAKRLLDNYDVIAYEDLNIKGLAKTHLSKSILDAGWGNFIAIVACKAENAGKTTVAINPSGTTQNCSNCGTKVPKTLEDRVHQCTCGLEICRDLNAAINIKNLAAGHSVSKAQRLLSASRIG

SEQ ID NO: 55518 - protein, 277 aa, unknown
  TnpB Polypeptide
MLVSGSLSVTSPSIGKAIFHPGKRVRHQANHYARLRKRLQKKGTRGAKRRLKRIEQRERRLKLQAKHSIAKQIIKQHPQALIGLAQLTDIRERTRRRKRKRKKHGKGYERVSHKARKANRVYSQWSFAELHALLSYKATLAGSRAIKVDADYTSQTCPMCGYRSEENRPQKGLLFVCHNPECRYRLHADLVGARNVTMRTLLVRQDWIRTGILSMCPDASDKEAKAARLARYGSRCGGVQMQASALRAEVIDTKGKDLFLPVRYQGFRKTTTVMLQH

SEQ ID NO: 55519 - protein, 516 aa, unknown
  TnpB Polypeptide
MRQKPTPSFVLTLPLLVNSQQATHLHAHFECARQLYNALLAEAMKRLTRMKADPAWQTARNIPRSDKHARGQAFARLRAQYGFSAYGLHEAAKRLRTSWLAEHIDSLMAQKLASRAYQAANRVCVGQARRVRFRSKGRGLDSVEGKTNSSGLRFLVQAGAEGNQGRLSWKGDQIPALIEWEDEVVHHALRQRIKYVRLIRQRASSPQAQGADCRGYAYSVQLILEGHPLQKPKNLPGKGAVGLDLGPSTVAIVSQEGTARLLLLAEELAPDGRKRRRLQRHLERQRRANNQEHYDEKGRIRKRSKGQGRRMWRESQGYQRTRRRLAAAERRLAAHRRSLHGKLANEIIRLGDDLRIEKVSYKGWQRCFGRSVGVRAPGRFVDVVKCVVARTRTAQLHEIPTVQTKLSQYCHACGTYTRKPLAQRFHDCPHCGLGSDDLIQRDLYSAWLASVLDPIGLTFLSRGQLKSNWQSMEACLSAALEETRQHASAQGLLRRFGIPGVGACRPAVLSAQHKSR

SEQ ID NO: 55520 - protein, 340 aa, unknown
  TnpB Polypeptide
MYYKENGRLMPLGMLLHAETSSKHYLGSGFYLARQARTNFYTSFLKNNKPIKQTGKPMSITFKPKVQGNRITMPATKFSPPITFEAELICDRKDIKTVTIYTHNRRMGYWRAAIAYEQPSTENPPIHSYNGLVCAGLDFGIENFATICTSNGKSLIVDGRRLKSIVHCYIKNGRSVAASIRYTNRTIDYINKSVSVIVEFCIKNDVKAVVLGEGVINGAFRVQQQNKFLNLFCFSQFQKNLIQKLRMNGIATYGVNEAYTSAASFLDNDSMPTHTTRTKPNFSGKRKRRGLYVSSNGTKINADINGSLNILRKSRIVDLTELQQNPSLIEHPKRVDPLDP

SEQ ID NO: 55521 - protein, 482 aa, unknown
  TnpB Polypeptide
MTTESAALKLDKNDPDVIVRAYKFALKPTTSQEQKLRQHTGGARFVYNYLISQWRNDIHTRIEEKEHDVPEDELTPFTFKPSTYDMINYWNHTKRECAPWWPEVSKDISNDAAHRAHDSMKNWLNSRSGKRKGRRVGFPRFHKRGHHESCTFWVEPLRVNPDRRSVTLPRIGTIKTYENTRGLQRKIAKGTARIIRATISRGFNYWHVSFAVYEKKRIPETHRNPGSVVGVDMDAGDHVIVAANPHGDEVMRRGLPPSIKKDEARVRHLQRKMSRKRGPDRRTKTTPSNRWVRANNQVRKYYNTMSNVRHDFAAKAVHELAKNYETIVVEDLNVRAMMTHGGAYKRGLNRAIAQASFADLRRRITYKTRWNGGTTIVADRWFPSSKTCSRCGEVKSKLSLSEREYICYRCGVVVNRDLNAATNLAKLAVPKSGVSTIDRTGSSPGMGRGGVGKTSSLSGEMAPADEASMARKGLSGRKASTR

SEQ ID NO: 55522 - protein, 412 aa, unknown
  TnpB Polypeptide
MLTMTYQYALKPTQQQIKTMTEWLNVCRGVWNYALAERKDWYNSRSCRIDAASIKSEYIIPSNAPRPNFALQCKALTEAKKTKPWLKSVQSQVLQQVLKQLENAFTSMWEQKHGFPRFKKAGRMRSFLFPQVGANPVIGNRVKLPVIGWMKMRLSRPIPDEFELKQIRIVKKASGWFAMLSLQCDVNVPPAMPHGHSLGIDLGLISFLATSDNETIARPKFFVDAQRKLKLLQKRVSRKVKGSSNWRKAQAKVAKFHEHISNTRKDFHFKTAHHLCNSSGMIFAENLNLKAMSRGMLCKHTLDAGFGQFLNILEWVCQRRDVLFLKVDANGTSQICPNCQTYTGKKELSQRVHQCECGYKTERDVAAAQVVVQRGLAAVGHMVKMLSEGKVVGLPVTEESPSFNNSRVARIV

SEQ ID NO: 55523 - protein, 413 aa, unknown
  TnpB Polypeptide
MLTGRRFQVQLTDEQVEYAERIAGVCRAVWNIGLEQRRTYRQRGAWINYREQAGELAEAKAEHAWLAEAPGHCLQQTLMDLDKACRQHGAFGVRWRASRRWRPSFRFPEGKKIVVEQLNRHHARVKLPRLGWVRFRLSRRLEGAVIRSATLTRDGTHWCVSFLVDDGHQTPATHALPRTAVGVDRGVEVAIATSDGSLADRDFLTGGERSRALRLQRRLSRSAKDSHNRVKCRAALGAIRARERHRRHDFCAYTAHRLTTNNELVVIEALKTKQMTRSAKGTLEAPGSNVRAKSGLNRAILAKGWHQFALALSSAARYSGTRVVTVPAQYTSQRCSACGQVDPKSRESQSVFRCTYCSHTEHADVNAAKCILAAGLAVTACEDTTRPSGQDVSSKQEPAGNREQLLLQPPTAA

SEQ ID NO: 55524 - protein, 413 aa, unknown; identical to SEQ ID NO: 55523
  TnpB Polypeptide

SEQ ID NO: 55525 - protein, 362 aa, unknown
  TnpB Polypeptide
MLETHRRLYNACLAQKKDVYELEKKTVKYTEQSAWFKIERNTNEYFARINFSSAQATMRRLDKAFQNFFRRVKAGDKPGYPRFKGRDFFDSVEFPSHGDGIRLTTNRLRVQHVGTIRVCLHRPVEGTIKTLSLKRKVGKWYLVVSCDLGNAVVKPSTNPAVGIDVGIKSFLVTSDGEHVPNPRFLKAELPELRRRQRSLSRKKKLGSNRRKAIKKVQKLHAKVKNVRREFHFKTANELTRRFGMIATESLNIKSMIKNRRLAQSISDVAWASFQGILRHKAEGAGVTVIGVNPKNTSQMCSSCGQIVEKSLSVRVHHCTCGLVLDRDHNAARNILVRGVQAWTEPVGPKLGIAPIVPRSRLL

SEQ ID NO: 55526 - protein, 397 aa, unknown
  TnpB Polypeptide
MAYRAYKYRVYPTQRQAELINKTIGCARFVYNALLADAKKQYKETGKSKIKTPASLKNEYEWLKEVDSLALCNSQLHIQTAYRNFFNKTAKFPEFHSKHKGSQTYTTNSVNGTIRIEKGKLKLPKLGLVKIVLHRFCKGKIKSVTISRTPTNKYFVSILTEQIPEIIEKDITQENVLGIDMSYKELAVYSDGTKAKYPKFYRKAQRKLAHVQRNFSRTKKGSKRHEKARLRVAKVFEKISNQRKDFLDKESARIARKYNAVVVEKLNMRAMANRGMKNGKTVNDIGFGMFRDMLRYKLGRNLGQLIEADKFYPSSQLCSNCGFKNIAVKNLTVREWDCPQCGLHHDRDINAAINLKNYYTVATTGIEARGEDVRPIAEVYRTETKGRLSETRKVVGL

SEQ ID NO: 55527 - protein, 394 aa, Mycobacterium sp.
MARYRLLPISDQVAALDEHCRHARFVWNLAVEQQQHWRPGRHAPCYIEQCAQLTAARAEHGWLAAGSQTVQQQALRDFSQAMRNFFNGTHRRPTWRKAGVHEGFRQVAVKTHHVERLNRSSGRVWVPKVGWVRFRMSRPVPHGVKSYRVTRDRAGRWHIAFTYIPEPIAGPDDGSVVGIDRGVVVSAALSTGELLHAPSLTVGESKRLKVLQQRLARAKRGSQRRVRTKRAIAKIKAVERDRRKDWVEKATTDIARRFDTIRIEALDVRAMTRSARGTTERPGERVAQKRSLNRAIGRSGWGLLAARLQQKACGRVEQIPAAYTSQRCSSCGHAAPGNRKSQAVFKCQACTAEPCNADVNAARNIAAGRAVTARGDLGVSRSANREPQLCPPAP

SEQ ID NO: 55528 - protein, 353 aa, Zetaproteobacteria sp.
MVQCQIKLCLTRAQEAELDRWLWHFTGVYNWAIRKIGCDAAGGIYYRKRDFQNLLAGHGRKLGIPFHTLQGVLVQVRTASDRCGKRLDKNPRLKGHRNRLNSIPLPDPIKRPDGCRIKVPSIGSIRFHKQDIPDGRIKCGRIIKRASGWYLALSVDAQPNIVRTFKMKAHREVGIDSGYMAIVTLSDGERVDAPKECSAMEKRLTQAQRSGNRKLVEQLHEGIVSRKKDRNHKLSRYLVGTCAVMTFVHDNNQALQQKPGKSVANANIHQLQKMLAYKSSSFGRWFELMDGCWSTRTCSAYGSLAGPKGRHGLSVRRWVSEAYGASHERDIDTARNALISAVGSVVEEARDAA

SEQ ID NO: 55529 - protein, 412 aa, Halomicrobium sp.
VTELTKTLELKLVQPNAHKQQKLRETQEAYQQALQAAFDAGCATQTEANDVVVDYDLTGYAKNALKQYVPQLTTTYNAGELHDDHPVRFTNEGLRLNHKPENAIEWYVKIPHHEDYHLWLPAQPNPEQRDWLEAVNAGDAEMGESRLFQRNERWYLHVTATRDVEDGSELLAKERTPIGVDIGEASLVTVCHRDDGGCPTAPELWADAGKTVRRLRKTYFTAKRRLQKRGSERIAESYGDCLWSQIDDVFHRVTREVVEYAESVENPVLVLEDLTHIRESMDYGEYMNRRLHGWGFAKLHAQIRYKAVEKGIPVETVNPRNTSKECHACGEVAYRPKQATFKCPNDDCWVGEYQADVNGAVNIADRYLSGESRSREHENDDDSAEDGARLTAPQDSHADAETQQETRGTYAS

SEQ ID NO: 55530 - protein, 410 aa, Streptomyces sp.
MIMVADQEGGEPVIRAYKFLMRPTVGQHGTLTAMLRDHCTLYNAALQERRDAYQHVNKTTVRYGQQSAQLKDIRAFDSDHARWSFSSQQATLRRLDKAFTAFFRRVKAGEKPGYPRFRSHKRFDTVDFPKDGDGCRWDSTPHDPVTRVRLQGIGHVRVHQHRPVVGKVKTISVKREGQRWYVILTAEQPRLEPLPKTGSVIGIDLGIANFLADSHGEFLPNPRHGAKAAAKLEAAQQALSRCKRGSQRRRKAVEKFATLPRKVRRQRLDHAHKTALTLVREHDVIAHEDLKIRNMSKAPAPKPDPDQPGTFLPNGASAKAGLNRSIADAGWGVFLAILAAKAEGAGREVIAVDPRNTSRRCPECGHTAKENRPTQEKFHCVACGHHAHADTVGAINVLRAGLVRRQAQPA

SEQ ID NO: 55531 - protein, 398 aa, unknown
  TnpB Polypeptide
MLKAYKYRIFPTKEQETFLQKELGLKRLYWNISLANKNADHSYKLTSYKETFSKYKPEALEWCKEIDSTVMANVWNDLTQAFRNFFASCNGTRKGKFVKPPKFKSKKNMKESIGYTAMAKPKFVNGKLFITRKLGLLKGAYYCQFCEGKLKNVTISRTATGKWFVSICVEKKDELKNNNGKAIGIDWNRRDDVFLTLSDGTKVKCPRFLREKEKQLAHYQKLLSKKFVKGKQEQSQNYYKAKYKVAKLHEKVSWQRQDWLHKLSYDLAQKYQYVIVEDINLQSMAQMHHGIAVGDQGFGMLRNMIAYKTTLVKVSAKNTSKTCHTCGYVNPKVVLGVEKWKCPVCSSEHDRDINAALNILNKGVTSLGIVGRERAESTNACGEPQSSAKQEVHVAIEP

SEQ ID NO: 55532 - protein, 421 aa, unknown
  TnpB Polypeptide
MSNQVVTRTLKASIQNHSQVRNDLDSHGFAASKLWNVGRWTVSRVWDAIGYIPNAGELCSYLKTHDRYADLHSQSSQRVLQELGEAFESWYGQDNSDANPPGYRKHGDDHPRSTVTWKNQGFKLDTQYNRVRLSKGTNMKASQYAADYILCEYSLQTDDDQTLAAVDSVQTVRAVWSGEQWELHFVCKMQVEPPENPGEKTAGIDLGLCNAAAVSIGEETLLYPGNALKEDAHYFRHEEYETKGENGPSTHAKWARQKKSRRQNHFLHVVSKDIVEQCAARDVGTIAVGHPKNIRDDQDWGRHGNKRLHDWAFETLLSHIEYKAEERGIDVERVDEADLKTSKTCCECGIEADSNRVERGLYVCDSCGLVANSDLNAAENMRATVTPNPAQDRSNGCLAQPSVRLFNKSTGRVRPQEQAVS

SEQ ID NO: 55533 - protein, 424 aa, Hydrococcus sp.
MRKTYQYKLIPTANQRQEIDRWLDMLRHQYNYLLADRFRWWQMNRCNLVIPQGENCLRWCEIGSGELRNNPDWHSQSATLPQLKQERPWYKDIYSQVLQDCVKRVKLAFDRFISGDSKGNRSGRPRFKNKARYRTLTFPKVPDKNLVNSSIKLPKLGVLKFRQSRNIEPGFKLKTVSITKKADGYYVNLSVEDKSIPEIEIDTVATESNTNAIDIGLEKLYVDSKNNQALPQKHLRKSESKLAKLQRKLEDKTRSQKAKRLVRRAISKLHQKIARQRRDWHYKEAHKLASNCSVLAIEDLKIARMKRRNKPKKIDGVFVPNGQAASEGMNKSWSDNGVGNFLEILATVAQKYGTKIIKVNPRGTSQHCSRCLNKVSKTLSDRWHQCHVCNLSCDRDYNSAVLIKKLAVGSSQDKKLPSLKDLLG

SEQ ID NO: 55534 - protein, 391 aa, unknown
  TnpB Polypeptide
MKKTYQFRIYPTKNQEVILNRTLSTCRHLYNDSLSERKRESELNELKRSFDVTPWGKPEWMNYYDQANSLSGSKTDFQKEVFSQVLQNVLKRVDRSFKNFFNGFGYPRFQGRNRYNSFTYPQSGFSLKKEKLNLSKIGAIKIILHREIEGKIKTCTIKKDIDHWYVTFSCEIEIPVISVEIKTKTGIDVGLNSLITMSNGTQIEPPEFLRASEKRLSREQIHLSKKKLRSKNRDNQRIVVAKVHRRIRNQRKDFNQKLSTNLVKKYDHIVFEDLQVQNMVQNHHLAKSILDAGWSQLINLTKSKAEYAGKIVEFVNPRNTSQSCSNCGKSVSKDLKVRVHSCPFCGLILDRDHNAAINIKNRSISTVGTTGFQACLSNLNREAMKQEAPLL

SEQ ID NO: 55535 - protein, 334 aa, unknown
  TnpB Polypeptide
LRTVHLQQAARGPHRHPRGGESGDRDETETGDTRVLQAPVPVPRRGGQPRTREREAEPRHRVREVLGFPAFKSRRRSRASYTTNNQHGTIRIEAGKVRLPKVGFVRFTQHRPFEGVIRSATVSMTKTGKFFVSILVEQDDAPWIPAKNKVGIDLGLEHFAVMTNDAMVSEKIDNPRFLRKSEAKVKKAQCALSRKKIGSKNREKAKLLLAKKQEKIANQRKDFLHKLSRRIVDENQVIVVETLKSKDMMRNHQVAKSIADVSWYEFVRQIEYKSNLYGRTLIKADQWFASTQICSSCGEKGQKKAMDIREWTCSCGAHHDRDINASLNLLMLAD

SEQ ID NO: 55536 - protein, 332 aa, unknown
  TnpB Polypeptide
MRRQDNKYYKQVHSQVLQDVLLRLDKSYQAFFKKIMNYPRFKRRERYNSFTYPQYGGFQLKDNKLVLSYIGAIEVKIHRIPIGTLKQCTIIRDVDQWYCCMITDDGIGKFETVPITNPVGVDVGLLNWMTLSDGNKIQNTIDFEAQAKKIKEFQRRLARKKKGSKNREKARVALAKAWRHVRRCRDDFVHKASRMLADEYTMIVFEKLNIKNMVKNHNLAQAIMEATWGKLRLYTAYKVERRGGQVIVVDPNGTSQKCSRCGVVAETKLDLSIRTFECHRCGVVIDRDLNAALNILKLGLEQAHAEAEPLLVRHRISKFQSRKQEAHVLIRG

SEQ ID NO: 55537 - protein, 419 aa, Synechococcales sp.
MSTTRRVTFKLYPTTTQEKMLFEWKNLHCWLFNKALSDRRSSWQKNKQSVNYYDQQKAVKVIRAVYPEFKPLGSHAIQDTLKRVDYAYQRFFKGLAKYPRFKSYRHYSGWTYPCGSGWKALTNGTHGKLKVSNLGEVRMRGQARQWGNPKTCTIFYRKGNWYASITVECEVIRNTGNGLVGLDLGCETAVTCAVHLREGNYQEIKIENPRHLKKAEQKIKQVSKQKRRKRSPNYKQKIKASRRWKKAQKQVSKLLTKVSNQRKDFLHQVSAEIVSSNSLVVTEKLNVKNMTRTSKNKGKRGLNKSILDVSFGFLKDCLKYKTNEAGGSYIEIPTQKIKPSQRCPKCDHLKKKLLSERVHYCENCDYQCGRDFASAQVIAEHIRKGLGTSLSKCGEDASTSTYCGGSRASGLDEASETPT

SEQ ID NO: 55538 - protein, 400 aa, unknown
  TnpB Polypeptide
MKIGYQVISYKFRLYPTKEQEEKLLEVLDRCRFVYNKMLEGLNKQDKPSWLELQNSIPELKEKYPELKEIYSKVLQYESYRLFSNLRGLARLKKNGKKVGRLRFKGKSWFKTFTYNQNGFKIIETGNRHDLLHLSKIGDIKIRMHRKVKEGKIKQVTVKRYSSGKWYAFLYCEQRISNKKEIGKVVGIDMGILYYVTDTDGRKVEHPLYLSKSLKSLRRKQQKLSKKKKGSGNYNKQKIKVTKIHEKIKNQRDDFLHKLSRFYVNNYGFIAVEKLNIKGLIGISYNARNIMDSSWNRFTQFLSYKAERAGKMVIEVSPRGTTQECYKCGEEVKKSLSIRTHRCPYCGLEIDRDYNSSFVVLKRGLKLVGQGLSEFTPAEIEPLPREISACSVVESGSSLQ

SEQ ID NO: 55539 - protein, 405 aa, unknown
  TnpB Polypeptide
MSRYIVRTYKVPVPTELYSLCSELNRLAARIYNKTMSLVKKIKNKKGFWLSPGGAQKYILCWAGTVNIHTHSKQAMVQQYFWALSSYFNAIKTKPDLKPPYKKKRFMSFIWKNTAVKLLPDGKLKLSMGNNQKSIVIQTTLPADTKIRQAKLVYEDEKYYLHLAIEVKNKHKKKQSSKVMSVDLGILRPITCFDGEDVISYHGGILNGLIRYRNKELAKFQQMLSRCKKGSKRYRKLLKAKKKMLRRIKNQMKDILHKITSNFLKICLQKGIGTIVIGDVTNIRERAEGNDKFNQKIHQWCFRKMVEMVTYKAQLLRIEVELVPEEYTSQICPVCGSKNHAVGRNYECKSCGFRYHRDGVGAINILRRYLGKKFQVVAGLAPVRGVRFKPHLCGHGVKNASWKAA

SEQ ID NO: 55540 - protein, 393 aa, unknown
  TnpB Polypeptide
MKKLKKAYKIEIKPTKGQILKIHQTIGVSRFIYNFYIAHNKEVYEKEKKFVGGMDFSKWLNNEYIPSNRDKVWIKEVSSKATKQAIMNGEKAFKKFFDGKAGFPKFKKKKNQDVKAYLPKNNTTDWTIQRHRVKVPTLGWIRLKEFGYIPVNSIVKSGTVSQKADRYYLSILVEDNMKIDNKPHSEGIGIDLGLKNFAVCSNGLTKKNINKTSPIKKVEKKLKREQRKLSRKYESLKIRDKNIKKEGGNATRQNIQKQIIKVQKLHQKLANKRTDYINKIISEVIKQKPSFITLEDLNVSGMMKNRHLAKAVAQQKFYEFRTKLTSKANQNNIEVRVVDRWYPSSKTCSCCGNIKRDLKLSDRVYKCDNCNNSMDRDLNASINLANAKKYKIA

SEQ ID NO: 55541 - protein, 392 aa, Ruminococcus sp.
MLKAYKTEIFPTPEQKQIIHRTIGVCRFIYNFYLAYSKEVYEKEEKFVSGYDFSKWLNNEYLPQNPEFLWMQKVSSKSVKQSIMNADKAFRNFFEHRTGFPRWKKKRNSDVKMYFVRNGKTQPISCERHRIKIPTLDWVRLKEKGYIPINSETHVIKSGTVSMKAGRYYVSVLVEETEPEKPVLNDFGIGIDLGVKEFAVCSDGRFFANINKSVRIRKLEKSLKRQQRKLSRKYESLKKLPNNLKGEATRQNVRKQTLKVQRLHHRLDCIKTDYINKVISELVKTKPMWMTLENLNIRGMMKNTHLSKAIAQQKFFDFRIKLTAKCKEYGIALRLADRFYPSSKLCHQCGCIKSDLKLSDRIYLCSECGYTVDRDFNASLNLRDCQIYQIVS

SEQ ID NO: 55542 - protein, 309 aa, Salmonella sp.
MMLILKAYKFRLEPTPEQSQRLRQLCGCARFVWNLGLAETKRIPGSGEKLPSAFGLNRMLTVWKKMPEHIFLQDAYTDNLQQKLKDLHAAWKRCFDKKLAAKAPVWKRKNEGRDSIRFVNFEKYCRLENRRVKLPSGLGWVKFRQSQRVNGKIKNATISQLAGQWYISFQVEVETAEPNHTSTTIVGLDAGVTKLATLSDGTVYQPVNSFKASQRRLATLQRQLSRKVKFSSNWQKQKRKVQRLHSHIANIRRDYLHKVTSEISKNHAMIVIEDLKVSNMSKSAKGTAEQHGRNVKAKSGLNRSILDQG

SEQ ID NO: 55543 - protein, 417 aa, Streptomyces sp.
VKLVVQVKLLPTPLQAAALEATLHACNAAATWASQVAFEKNARRNFALREHTYTQVKERWGLGAQAAQHVIKKTCDAYAALAANLKAGNLGKPWSKRYRKAAEKPVAFRPESAQPYDDRMLSWQIPDRTVSIWTLSGRMKNVAFTASPEHLARLALYRRGESDLLFRDGMWFLNATCEVREAEPATGVEEFLGIDLGIVNIATTSDGQIMAGRAVNRGRLRERTLRTKLQRKNTPSAKRRLKKRRRKEARRAKDINHKISKRVVAEAERTGRGIALEDLTGIRERVRLRKPQRATHSSWSFAQLGAFIAYKARRAGVPVVFVDPAYTSRTCAECGHLDRANRVSQAWFACRSCGFVDHADRNGSRNIRRRAEELWRRGAQSTAPDPPPRPGRGTGRKPSTTASGARCASPGTSAPGR

SEQ ID NO: 55544 - protein, 422 aa, Escherichia sp.
LTLPKKCGYIVHSKQPHTECKMLIQKAYKYRLYPTDQQAQRLRQLCGCARFVWNYALNETLSIHDAGGKIPSAFDLNKRLTGWKKLPELAFLAECYTDNLQQKLKDLRSAWDRCFDKSLTAEKPVFKKKTKGCDSIRFVNFSKYCGLDYGRVKLPSGLGWVKFRQSRKIEGVIKNCTISQHAGHWYVSFQVELAVTDPIHASTSAIGLDAGITKLATLSDGTVFEPVNSFKKNQDKLARLQRRLARMVKFSANWKKQKAKISRFHSHIANIRRDYLHKTTTTISKNHAMIVIEDLKVSNMSKSAAGTVDQPGRNVAAKSGLNRAILDQGWAEMRRQLEYKQAWRGGDVLAINPAYTSQKCACCGHTSKNNRRTQASFICTACGYTANADVNGARNILTAGFEVMAAGQILPSVRKGRARKAA

SEQ ID NO: 55545 - protein, 421 aa, Halobacterium sp.
  misc_feature (132)..(200): Xaa can be any naturally occurring amino acid
MYMEAHRTVPVKLDVTKEQADLLHETIDEFRWAANYVVDAAWDGEWAETRKSVLHDLTYDELREQTRLHSNHVQSARDRAVDALESVVAKWSKGEYASLPTFTSPFVEYNQRNATFHDDHASLSTVEGRVTXXXXXXXXXXXXXXXXXXXXXXXXXXXXXXXXXXXXXXXXXXXXXXXXXXXXXXXXXXXXXXXXXXXXXGVDLGVENIAVTSTGVFWSADELNHWRQEYVQRRKSLQECGSRWAHENVQAVGRKETGRFEQYLHRVANELVDEAAENGCTVIAFENLTDIRHRMPDARRFHEWAFRRLYDYVSYKTEVRGIQVEQVNPKNTSRRCSSCGFTHGDNRPAQDTFCCQSCGYENHADYNAAKNIGYRLLRNQTGGEGGAPVGVRLNTGMVNANGVKPLPNSARAGVHGEHHGP

SEQ ID NO: 55546 - protein, 413 aa, Chloroflexi sp.
MNRSHVIRLNVTPEQDTYFRKACGVRRHAFNWALARWKEARSKGERVTMRGLRTEYNQIKGEQFPWVYETTKCAPEQAFADLGQAFANYWRMKREGAQPKLKHPRKDGEEAGFPRFKSKKKDRLRFYLTNDKFSVDGHTLHVPKLGDVNMSEELRFQGKIMSATISSRAGWWFVSIAVEVKHEIPTHKGGSVGIDLGIKTLATLSNGEKFENQKHYRRNLARIQGLSKGLSRKVEGSQNWWKNAKKLAKAHYRVACQRQDLLHKMSTKVARAYALIGLEDLNVKGMLANHCLAQAVSDASFFEVKRQLLYKSEQYGGSVQLVDRWFPSSKTCHACGWVKEDLTLADRVWGCEQCGTVHDRDWNAAIMVEIEALRKVPDVPPVASSERTIACGAERSGPAMGETVCCEAGTKVL

SEQ ID NO: 55547 - protein, 369 aa, unknown
  TnpB Polypeptide
MLKGMQFRIYPTKEQQNIIQQTFGCARFVYNKGLALRIEEYNNGNSIGYKETNAMLTTLKHSGEFDFLKSVDSMALQQSLRDLDKAYKNFFSKRASFPKYKSKHNHNKSYRTQNANNNITVVDKYIKLPKLGYVKAKISQPVIGKINNATVKQVSSGKYFVVLNVEVDTPVFPNCGAIIGLDVGIKDFYVDSNGYKCANPKYLAKSAKKLAKEQRKLSCMVKGSSNYNKQRIKVARIYEHITNQRTDFLHKESTKLVRENQIICIEDLSVKNMVRNYKLSKSISDVSWSKFFTMISYKSYFYGTEIVKIPKFYASSQTCSCCGSKHPITKDLGVRKWVCPTCNTTLDRDVNAAINILNKGLEIRLQTVA

SEQ ID NO: 55548 - protein, 410 aa, unknown
  TnpB Polypeptide
MLNITYEYRIYPNTQQAQLMTQWLTTCRKVYNYALAERRDWIKSRKCDVNVCSLNSEYIIPVDTPKPTYYLQKRNLTAARKAIPTIGAVHSQVLQDVMGRLEKAFNALWNSGHGFPRFKKRFRSFTFPQLGKNSVGERTIKLPSIGEVKATRHRPIPDGFEAKQARVIRRPSGWYVQLILAANIDVPDVMAEGHAIGIDVGLNSFVATSDAELIARPRFFVEAQHRLKVLNRAVSRKKKGSKNQQKACQKVARFYVCEAWAKRIRIANRRKDFHRKTAHHLCDQAGMVFAEDLNLKGLARGILGKHCLDAGWGAFLDTLAWVSWKRGVYFSKVPASGTSQECPVCGASVKKDLSIRVHSCPECGYEADRDIASGQVIRNRGLKAVGHIAYACRADLVAEAVKQENLRSNS

SEQ ID NO: 55549 - protein, 533 aa, unknown
  TnpB Polypeptide
MRHKPTPTFILAVPLQVNAKQAARLHAHFECARQLYNALLAEAMRRLRRMKADPAWQEARNIPRSDKLARRQAFTRLRAQYGFSEYGLHEAAKRLRTSWLAEHIESLMAQKLASRAYQAANRACVGEARRVRFRSKGRGLDSVEGKTNTSGLRFHLQEGAEGNQGWLSWKGEQIPALIDWQDEVIHHGLQQRVKYVRLLRHRASSPLAQGADCRGFVYSVQLILEGHPLQKPKNTPGKGAVGLDLGPSTLAIVPRQGPARLLLLAEELAPDARARRRLQRHLERQRRANNPEHYDAQGRIRTRRSGQRHRVWKESQSYQKTRRRLAETERKLAEHRRSLHGHLANQIIRLGDDLRIEKVSYKSWQRRFGRSVGMRAPGRFVDAVKCVVARTRTAQLHEIPTFQTKLSQLCHACGNYTRKPLSQRYHRCPHCGLGQQTPIQRDLYSAWLASVLDPIRLTFPSRGQLGLHWQSMETCLSAALEETREHASAQGFLRRFGIPGVRACRPERFADPHQEPVAFWEASEAVLVAQEPL

SEQ ID NO: 55550 - protein, 377 aa, Burkholderia sp.
MDIKRAYRFRFYPTSEQAAILARTFGCARFVYNRMLRMRIDAWQQYQKSIGYHETSAALTALKKTPEHSWLNEVSSVPLQQALRHLQTAFANFFTKRAKYPNFRRKDGTQSAEYTASAFRWDGKSLKLAKMEAPLAICWSRTIPKGARVTTVTVSKDSAGRYHVSMLCDDVVSAKSASSNRVGIDFGLTDFVVFSTGEKIGAPKAFRKNEAKLAKLQRRLARKQKGSANRRKARLKVARMHARIADCRRDFLHKLSTRVINENQVIAVESLAVTHMLKNRRLSKSISDASWSEFVRQLTYKAGWYGRTLIGIGRWYPSSKRCSDCGHIVASMPLKVRAWVCPICETPHDRDINAARNVLAAGLAVSAHGESVKPLSP

SEQ ID NO: 55551 - protein, 364 aa, unknown
  TnpB Polypeptide
MKLTAQIKLLPSPEQANALRKTLAVANTACNYISDQAWENQTFRQFPLHKLTYRDVRDKFQLSAQVVVRCISKVADAYKIDHKTKRTFRPYGALAFDNRILSYYLERKEVSIWTLEGRQRIPFSAGARQRELLSDQRGESDLCYVKGKFYLFVVCEVDTPKPIDVEGILGVDLGIVNIASDSDGGNFSGADVDRNRRIFEHRRRNLQKKQTRSAKRKLKKLSGKQARFQKHTNHTISKRLVEKAQDTCRAIALEDLGGIRKAPVRRSQRSRLSNWSFYQLRQFISYKAERVGIPLVLVDPRNTSRTCPECACVDKANRVSQRLFSCIQCGYSAPADTVAAVNISARAVVNQPMVMGLAFRGLSA

SEQ ID NO: 55552 - protein, 297 aa, Cyanobacteria sp.
MLLEKEKIGINSRKCSFKFCSLEREDIIPADEPYPSYQRQAKSLTEANKVNTNLKSVNAQLLQQVLKSLDRAFADMNKKKLGFPRFKKKYRRRSSVYPQLGKNVIQHNYINLPQVGSVKFIKSRKILEGFQVKQARVIRKASGYFVLFCLQLDVNVAQPFPSGHSLGIDLGFDKFVATSDGVEDNRPKFLKTLQRKLKLLQRKLKNKKKGSNNRHKLNRKIARLHQHISDTRKDDHFKLAHPLCDGTGMIFAEDIDFRTWQRGMLSKHSADAGFGQFVGILQWVCWKRDVYFAKVDP

SEQ ID NO: 55553 - protein, 378 aa, unknown
  TnpB Polypeptide
MMKTFRQMVNHCIRIGLENNCSTLKRLSSLAYHTLQDYDIMSYYKLTAISQACGRMSQMKRDIKKGRNPKSPFVQKPCLVSCYGFKINGMLLSFPVRNREFANILLNDHLIRILSDQSITPRSFTITPQSLSISIAKDVEPIQTESTIGVDRNLRNITFGNGKEIIQVNTSEMLKIKENYSHVKSTCTRNDHRIRKKVYGKLGKRQADRIRQRIHRMSKSIVNYAKKNKTAIIFEDLKGIRKLYRKGNGQGNKFRRKLNSWSFYELERQTSYKAAWDGVPFYKIDPRCTSTLCPACRGRLQVDRQRRRDLWCGSCRRWRDRDVVAAMNIACKGLHRFCNPQGDAVEAMRGNLEEPAILRVDVSKLVTDWSDECIVQVL

SEQ ID NO: 55554 - protein, 463 aa, Chromatiaceae sp.
MKVTRILRAKRPNKGKVAALREQAQRLGQVRSETWQRFGSMGGVGLADRRIRDAWLREGRTFPVLANAWKETLRDAKGDITAHLEAVKVKARRAIWRHTQDKTEQKRLFTALKGNDWMQDPYLRRVMRKHWVRGHNHTHNQIIVRSDNYTTFQLGGRAWIKIPGLTKGQRIAIPLDTTVAPSGTLRIILTDEDRIEVHYTLDVEAKQDGGERTIGVDKGYSEVLVDSDGEHHSSELGALLSETSDTLKAKYQRRSKLRAIANHTRNPRKRQHIRQFNLGRKTLNRKLDKTHAHIRDIVFQSVHQAVDKAAVIAAEDLTAPMAGKSFGKHVNRRLASWTKGVIAEALDSVSSRRGSAVVLVNPAYTSQMDSRTGCLEGKRKGDRFYCSDGVVLQADQNAARNVLARLFDPDIERFTPFKRVKAILLERTERLRLGLLNQDSSCSPGHTRVLSTESESPNEYFRV

SEQ ID NO: 55555 - protein, 372 aa, Erysipelothrix sp.
MEQYKGYKFRIYPTDQQKQILAQSFGCSRKVFNLTLDQRKTKKAQNLQSLIEEYPYLKEVDITSLEYAQANLYRAIKSKNINEIKFKSKSYSKQSFRIKNRESIKLLNKYQIDISLFDKPLKAKVHINPKGLILSLTFSKKASGNYFLSLLVKENIEPMKKTNKVVGIDLGLENFAILSTGQKIGNRRFNRQMDTKINKELRKLSKRREKAIKDNKPLYQASNYQKQKRKVARLYEKSFNQRKYFLDKLSTLIIKNHDVICIEQLEIKEMISNRQLSRSIADVAWTLFVEKLNYKAKWYGRRIVYVDRWFPSSQICSSCGIRHEKMPLSIREWQCTSCHKIHDRDINASRNILFQGLKQANIKTVDRAGLAW

SEQ ID NO: 55556 - protein, 412 aa, unknown
  TnpB Polypeptide
MPVIVKGEMQVKAIVFYLDSELPSEVKFLLEDFRLAVNNAIRAGLQARITSRNALVKIAYKDFREQHPRMYAKHLVSAFEVAGSVLKNHRKRFRKGVTYRIPYVKRLMMKAENQAYKLDRRSGVIDLPIRAGCHVELKLIVSQYHRKYLDDAALSIGSLTVLPDRAIVAFRKDAPKPFAPESVLSLDTNERSLDGVFVEGDVAKAVKADFPEVAVIQQRHHDRRRRLQKKKAHDRRTSRNLCRREGAREHHRVEYRLHQVANSVLKFAEERKSAIVLEDLKGFKSKRSKELNRRLSLWPRRKLQQIIEYKAQWKGIPVIKVDPRNSSRTCPICRRIQYSRMGAKFKCVCGWHMDRHINASINLLQTAISKGVAGGLRFDPGAFQHDVMMILYEPAMAARSEPNGTSGVVGVT

SEQ ID NO: 55557 - protein, 546 aa, unknown
  TnpB Polypeptide
MFIQSKYAKIFQSKDITRQKYDELYDFAVLIRNHKNIVSRYVNENLLHYLDCTKFQFLKEMRERFKNQIPSSFDVQLYTQVFTCYQNKFEAIQRRLVFEVPILKGFEYYKRGTKKHKKGDLKRVLIEKKQTKLSSCLTYLARYGNEGTIAYIKSNIDKCDEKKRDFYNNIIRCCEKFGFERLYALALSKRKRIINKYTNNPIEFRLLTFSGRCRKKKIIDYNRKFGSVINSYISLSGLNRKSFDIPVSFNKGWHGNMKDYKKKNPDYDYTLTFNEKKHQVNINLCKDGERYIPEPSGKTIGIDVNCKHNLFCLSDETTYDYDRKLVNDFCKISLEIDRLKGKNKEYKVGKRKQQKLVTLKTKMIRSEQQLIANMCKTLQSQGVGHIVMENLDNGFGKCYVKDSDNEDINYNRKVKFLGLSSLKQEVEHIARKYDIAVSTVQASYTSKMCPVCGCIEDGNRPSQETFECVECGHKDNADFNAAKNIRNRVLVTVLRDKLLKQLDSDAFEPRTLSRDKVKEVLLSFRRSLPKVGSECIGSCMTTSEYI

SEQ ID NO: 55558 - protein, 400 aa, unknown
  TnpB Polypeptide
LDGRIFCLQCRKCFRRDATKIYRKSRVGRWRQWVLKAYKYRIYPNSEQRIQIAKTFGCCRFVYNQTLAYRKEIYEKEKKSVSKTDCNNYCNRELKKDYEWLKEIDKFALTNAIYNMDAAYQKFFKEHAGYPKFKSKHDNHKSYTTNFTNGNIAVDFETGKIKLPKLKAVKARLHREYSGQIKLAIVSQVSSGKYYVSILVETEHKELAHTNHNIGIDLGIKDLCITSDGKVYENLKIIKKYEKQLVKLQRQLSHKGKRSKNYYKTKKKIALCHEKIRNIRKDYLHKVSHEIISENQVIVSENLQIKNMVKNHHLAKAISDVSWYELTRQLEYKAKWNGRKYIKIDTFYASSQLCSVCGYQNPDTKDLSVRTWICPKCGAEHDRDINAAKNILTEGLRQIA

SEQ ID NO: 55559 - protein, 149 aa, Oceanobacillus sp.
LTEYENEIKSKEVHQVAGLDFAMDGLFVDSETGKKANYPRFYRQMLEKLAIEQRKLSRKEKGSSNWNKQRIRLAKIGEKVANQRKNFLQHKSKVLVTKFDAIIMEDLNMKGMSQALQFGKSVTDNGWGMFIFFLTVQTKRARETTHQDR

SEQ ID NO: 55560 - protein, 444 aa, Paenibacillus sp.
VYQDAKNLYNTTNFYIRQVFTAFRQNQPLQPLQQQVMDLLQTNIGAMNERLSEKNRSFPFQLPSQESPFVNYRFLDALFKVMAQVDYRTLPMQSSQGVMQVVFQNWKSFFASIKDYRNHPEKYSGKPRIPGYVRSQAKEVVFTNQDCVIKERKYLKLPKTRMQLNIGKLGYTDGQLKQVRVVPRYGQYVVEMVFARRIEEREAEKEHVLAIDLGVDNLATIVTTTGSKPVLLKGKVVKAINQYYNKMKARYTSILRQGKEPHEGVRTSHRLERLHLKRHRKLKDLFHKASYHIIKLAAEQNIGTIVIGHNDGWKQSSDIGRRNNQSYCHIPHQMLVSMIQYKAAEQGIAVILTEEAYTSKASFLEHDPLPRYNQEGTWTFSGKRIHRGLYKSAKGLIHADVNGAANIMRKVFPKASVKEANGIEGLDGTKTINVSTPLVLSILK

SEQ ID NO: 55561 - protein, 372 aa, unknown
  TnpB Polypeptide
MKTYKYPLYDQSHTIRIGNLLDDMWHVHFYFHKWQRQRYKDGLPYANYNAMDTHFKKLKKTTHPHWKLLPSQAVQQELIRIDNAYDRFLKKLGGRPKIKKQHKFKSITYPGPAGWSLKNNRITLTFRKWHPKTRKWQFDRVAYTFHKHRQWHGTISTITIKRESCGRYWVCITTDYTDFRPLPTTGKSVGADFGMKDAYLTLSTGEKIQHPQPLKHSLNKLRSLNKALSRKQKGSNGWWRCVRQIARLYRKISNRRKDFHWQLASKLCKKFDTIVIETLNLDGMKRLWGRKVSDLAFYQFVEILRYKCRKHKRLLKEIDQWTATTKPCSDCGFHNETLTLKDRQWTCPECGCHHDRDINAAVNILRAGIAVT

SEQ ID NO: 55562 - protein, 399 aa, unknown
  TnpB Polypeptide
MELRKITYKLYPSDMQKVALLNCIRLQKDLYNAALQERIDCYQKTGKSISYNDQQASLTQIRADFPEYKVLPVYLSRMTLKRLDNAFRAFFNRVKKGQIPGFPRFKSLKRFTSFEICAGSGWYFDFGDSRIHGKLHINSIGTIKSRGKARTIGTPKTSQVMYKRGKWFLSLTVECEPERKMDSAKAMGMDWGVSHLLTITHEDGSYTQIKNPRYYQEAQTQLLFLSQAVSRKKRGSARWKRACKALSQLKAKIARKRHHDHHQLSHDIAKEYEVVATEKLTVKNMTASAKGTVDEPGKNVAQKSGLNREILDTSPAKLLALIRYKVEETGGRYEEVPTRKVKPSQRCPKCTVVVKKSLGMRQHSCECGCNMPRDAASGLVMLRYSLGTLYDRSETLPSD

SEQ ID NO: 55563 - protein, 366 aa, unknown
  TnpB Polypeptide
VKLTAQVKLVVTAEQAEALKETLRVANAACDTISQWAWNNHSFKQYDLHKATYKTIREIFPLTAQVVVRCNAKVADAYKLDKATKRVFKPTGAIAYDDRILRWQVAKSCVSIWTVKGRMTIPFVCGDRQRSLLATQQGETDLCCLGGVWFLNATCNVEEPPTADMSNGVLGIDMGIVELASDSEGRQYSGASIKAYRRKLRALRAGLQKCGSKSAKRHLKWAALRGSRYTKWLNHNISRQIVQNALLSRKAIAVETLTGIRTRASAFNREMRWQMGNWAFDQLKQFVAYKAKAAGVATIFVDPRNTSRTCSACGYCDKANRKSQSNFLCLECGFQANADENAATNIARKGLEARGSVTNPKVGATV

SEQ ID NO: 55564 - protein, 381 aa, Calidithermus sp.
VTRIEPTTHKKAFKYRLYPTPPQRRDLERTLSLCRQLYNAALQERREAYKKAGQAVGFYEQKRHLPQVRAELPEYKGVHSQVLQNVIERVDLAFKGFFRRVKAGQKAGYPRFKGQGRYDSFTFPQAGTTGVKLQERGKRVLIHGVGSVKLKLHRPLEGRLKTATLKREGDDWYIVFVCETEPNPLPENRAAIGIDLGTNPHFLITSEGELVEAPRYFQKAQAKLATAQRDLARKKRGSRRRKQARRRVAKLHRKIANQRKDFHHKLARRLVNRYGTVVHEDLGLARSRTAKGVQDAGWAAFLQTLAYKAEEAGRRVVGVDPKHTSQDCPVCGHRERRPLWVREYTCPQCDTRQHRDVAAATNILARARTEPAGMGTAWAVP

SEQ ID NO: 55565 - protein, 338 aa, unknown
  TnpB Polypeptide
MKKQEKYAWLKEVNSQALQQAVIHLDKSFLNFFRSNFGFPKFKSKHKSKKSFCFPVVNNLKIDYDANRISIPKFIKLKDKDNRLKCKFSRKVEGTVKSATVSQDKDGRYYISILCEVDMQVPNKKPVLRETSRGIDFGVKTFLTFDDGTKVENPKFLKHSQEKLARHQQDLAKLEKGTTRYKSKQEQITRLHSKIARQRKDFLDKLTSRMCNDSQVDTFCIEDLSIKDMQSENRHAMNRAIGDLAWNMFTGMLTYKAEQRGKNVIKIGRYVPSSKTCSNCGYVKYDLQLSDREWTCPECEHHHDRDINAAKNIKDFALPNMNFNKRVGSTLSNGNHLQ

SEQ ID NO: 55566 - protein, 404 aa, Parachlamydiales sp.
MKQLQAFEYELKYNGEEECSLRKFAGACRFVFNKALAIQIDNYEAGNKYISYVSMAKQLTQWRNSVETPWLSEAPCHSLQHALKDLDRAFKNFFAKRANFPRFKRKAQGGSFRYPDPTQIKLDQNNSRIFLPKLGWLHYRKSREVLGELRNVTIKNRGKKWFISIQTEREITPAQAVTTAIGIDVGINRFATMNDGSYIAPLNSFKKHQSRLRRHQKNLSRKVKFSQNSKKEKDKVQKIHIGIANARKDFLHKITTTISKNHALVCIEDLQVCKMSKSSSGTKEKPGKNVRQKSGLNRNILDQGWGMFRSQLAYKLHWNSGMLLTVPPQNTSRTCPNCKHVSEDNRKTQALFKCVKCKYENHADVVGAMNILERGHRLLACGERVHLDRSRKQEPTEVSQLGFN

SEQ ID NO: 55567 - protein, 371 aa, Exiguobacterium sp.
MSTITAKVQLFVPPPQAAILRATMDAYRSACDWLSGHVFETRDLNQASLNDSHYAELRQRFGLKSQMAQSVMKTVIARYKSAKSNGHAWSRVEFKRPEYDLVWNRDYSLTQDRFSVNTLDGRIKLDYARKGMRQYFNGTWRFGTAKLVHKHEKWFLHIPVTKAFPELDDACVTNIVGVDLGINFLAVTYDSQGETTFYDGRMVKHKRGTFKATREQLQRRQTPSACKRLRQLGSRENRYVTDVNHQVTKALVDRYPRGTLFVLEDLTGIHAATEKVRARNRYVSVSWAFYQFRRMLEYKAALNGQKVIVVDPRHTSQTCPTCGHTEKANRDKKLHTFQCKNCRYRSNDDRVGAMNLHRKGIEHIGTGATGA

SEQ ID NO: 55568 - protein, 392 aa, unknown
  TnpB Polypeptide
VVKKVRTHKIRLCPNNKQYTHLVRACGIKRFVYNWGLAERTTLYEAGEKISGFNLKKRFNALKRSEYPFVVEVSKCVSDNALLDLDKAYNNFFREFKKGNKNTFPKFKKKGMRDSFRLDNDKVRLEDLHIRIPKLGFVRMAEKLRFQGKLMSVTISRTADRWFASISVEFDSCTETQSTESCGIDLGIKHLAVTSDGAYYPNPNNWKRELARLQRLSKALSRKNKGSENRKKAKMKLSRYWMKLTDKRNDTVHKMTSELAIKYKTVCLEDLNVAGMVRNRKLARRIINSMFGEIRRQLEYKTGVFVIDRFYPSTKLCPSCGRKNKLKLNERVYRCKCGYGPVDRDLHAAQNILRAGCPEAKPVEIVSDCACTATVNEAGNTQNLRQARREPL

SEQ ID NO: 55569 - protein, 405 aa, unknown
  TnpB Polypeptide
MLVRSLAFRLKDPLPNDAKYLMEDFRLAVNNAIRLGVHSNVTSKFALSKLAYRDFRKEHPSMYSQHLVSAFEVAGSILKNHRRRLRRGLPSQVPFVRRLFMKAENQAYKLDRGNGILDLPIRAGCHIKLRLVMSEHHRKYLENESYSLGSLTLFPDRVVVTVRKHPPKPYASESLLSLDTNERSLDGVLAKDNQIVAVVRAEFPEVCVIQSIHHERRKKLQKKKSHDRRTAKRLCAREGMREHHRIDYRMHEAANAVLSFAEERRSMIVLEDLKGIKPRGDKKLNRRISIWPRRKLHQIIEYKAAWRGIPVVKVDPRYSSRKCPVCGKIQDSRKGAEFVCGCGWHIDRHINAGINLLQTAASEKAAGGLWFSPGAFQHDVVMVLCGPGRTVRPEPNGTSGMRAVA

SEQ ID NO: 55570 - protein, 205 aa, Okeania sp.
MKLRFNYRVYPNEKQKEKLAQTFGCARVVWNDSLALIKGLEKGEKWPSNGELQKIAITQAKQTEERCWLSDVSNIPLQQSVRDLGTALSSFFKSRKGERKGQRVGFPRFKKRHDNQSARFTRYGFSIRESGTLLLAKIGELKVQWSRPLPSEPSSVTVLRNKVGQYHVSFVVEVDIPFIPAEHEAVGVDLGIKTFAATIYSVSRL

SEQ ID NO: 55571 - protein, 473 aa, unknown
  TnpB Polypeptide
MARRYAAPDGWTLQAFQFALDPTPKQWQTIRRQWGGRRYAYNWAVRTLKADLEAYHATGESREPPSFYGLRWRWNRAKATECVDRETGEAWWPQISKEAFANGIKDAVDAYWRWQQSRAGKLDGRRVGFPRFKRKGRDPDRCTFSTGTLRVEPDRRHVTLPKIGTVRTCENTRRLERLIRLGRARILAATLKRVGERAVVVFRVEIQRPQRGHPDPASTVGVDVGVRWLATVATADGAIERVPNPAPLQRNLVVLRRLSRSISRSQRGSRRCRRKERRRARLQARIAAIRRHELHRLTTRLAKTHGRIVVEGLDAAGMLRQKGLPGARVRRRGLADAALAEVRRQLRYKTTWYGSELVEADRFFPSSKTCHRCGSIQDIGWAEHWRCDGCGARHQRDDNAAINLARYSPGAPHQAGFVGAPPVGSVGAFVKRRAEVRPGFPGHAARKREAHQGTPRSRLRGEPRKGNPVRGAA

SEQ ID NO: 55572 - protein, 313 aa, unknown
  TnpB Polypeptide
MLDTCREVYNSCLHWRKHDYELLGTSLTNQDQQNALPIWKQSHPELCCVHSLVLQNVCRRVDLAYQAYFERLHDYKLCKEQGRLKVVNSVVEKCPGPPRSKGRGCYDSLTYTQSTTFRVGEKSIRFSKIGDIKAVIHRPIPGVMKTATIRARIRNRRHNFHHQEARMIVDRYGVITVEKLNVSNLSKAPAPKQDQETGNYLPNGHAAKAGLNKSILDAGWSSFRMLLKSKAESAGREFYEVDPAYTSQDCARCDYRPPPEERKTLSDRWHACPKCGYSVHRDKNSAVLIDKIGVGLHTVRQRPIEAPPFTAGE

SEQ ID NO: 55573 - protein, 406 aa, Lachnoclostridium sp.
MLIEQVEIHNISYKHQYYQELDHLCFLSKNLYNATLYAVRQHYFQTKEYLNYCQVNKEFTQQNQSDYRALPAKVSKWVQKLVEQDFHSFFSLLKKKQQGEYEKPVRIPKYADKVKGRKKLHYEKGAISFVKEGYVKLSQTGIEIKTGLPKEDIRYVEIVPNANSFFIIIGYQKECTIKAANGRYASIDLGVNNLAAVTSNVIEPFIVNGKPCKSINQYANKKIAKLKSLLPQGKYNSNRINRIYAKRKNKIKDYLHKASTYVVNQLVSNDINTLVLGYNKEWKQDIAMGKRNNQNFVEVPFYLFKEMLLYKCQLHGITLAEQEESYTSQCSFLDQEKISYHKKYEGKRKYRGLYKSKEGKYINADINGSLNIMRKYLEKKVAWNNQIWLNLVEVCSMPNIQVITCV

SEQ ID NO: 55574 - protein, 386 aa, unknown
  TnpB Polypeptide
MRGYRFKLYTKAKERRQLSDMMYLCGKYYNRCIRICRLYYRRTGRNIFVDHKQYALSYYLTETRKRAKARGNGNIRKYDAIPRDTLCNIHKRIRLSYNQFFRNLKQKRRASPPKFQRVREYGTLFFQPGKGAAVLPDDQIRVGKTRYRYFRNQQWTGQVKTMTVTRDACGDFWVSLTVDETRTEQMPNYGRSVGFDFGIKTFLTGSDGSSFEAPQYFRESLKELAKLQKQFAGKERRSNKREAMRLKIARLHRKIRHQREHFQWELSNRLLEKYDIICFETLNLQGMSRSFGRKIGEYALYSFIQKLTYLAEAAGKTIIQIDRMFPSSKLCSCCGFKNTELTLSDREWTCPQCGRKHDRDINAAINIHNEGMALYHNQEKACPKTE

SEQ ID NO: 55575 - protein, 357 aa, unknown
  TnpB Polypeptide
MYWRILRKQGVFLSKYGMEKLCFSKLHAHTSDAVVGNFYGSIKSANARKKVSCTDAKYPRRRKYFFKITWKSAAIKVKHGLLRLSNGKENASLTLNWQWEKPKQVEIGWKKGVGYQLRATYSTQPHFTPIGDKVAGIDQGEVRTATVNDGENTTIYSGRLVRSKVRYRAKMIGSLEAKIVQTNKGSARRKKLVATKRRITKKIDNQISDILHKLSSHLVSTLYNLGVQTVVIGNVRDIRNSIKYGKKANQKLHSWSFGKFRWLVQYKAQKCGMEVKLQDEAYTSQTCPACKKRHKPTGRTYSCQCGFEFDRDGVGAYNIRTKYLGNFGSPVVGLMASPAGVRFVSHLQCRLNTAVSV

SEQ ID NO: 55576 - protein, 319 aa, unknown
  TnpB Polypeptide
LDKKVRYVGWQCRLYPNRLQTRALAQCRESLRELSNALLGASYLKYSETGRHMTFKEFRAFAQDWYHRLPDRSYLPSSAMYRTASDVHTAFRNWYRRAGPEQGLPRFKAEGRAPAIYLSNADTRFDDNRVRLPKVGWMRWRGGELPARRLPGPKRRATRGLVSGRVWRDAGGRWMLSCVFECGPVEPTAPASALAEIHLDGRRIVTKLDGTPLETRLAGPDERLDGERRRLRRLQRRLNRCETGSQRRARLLERFRTVARRIRNRERDRHHKLTTTVVLAADEILVDEVRGEVLRQLKYKAEWHGRRLQVRRGPPEPGR

SEQ ID NO: 55577 - protein, 572 aa, Blastococcus sp.
VVAPPSGVSVGSRLRLTGWEQQLLAAVGAHLSRARATDLAAAQRRERANDRQKMLSARFGLHSRYAGSICVDNDAAVRAAKEQLWAHQRQLQAAVGQLQRRTALPSKAAACGCRKRRCERCGGGYATENERLMKRRRLDVLRGELADVQRRRAEGRYGVCLGGSRLANSRHHLADAGLTEQQWRRAWEERRAWFGCVGNTGKPGGNPCLTLTRDDLDRPGQWFLTVSVPGPVQARFGCASRVRLTHPVPLHHRREELEERLHARRAVRLDIDVTTDRRGRQKVMLRIAWVRRAQPALTLQQARLGGLVGVDLNADHLAAARLDQDGNPIGRPVRIPLQLDGLPATTRDARLRAAITALLDFAATTGAWAIAVEELGFTDDTTREKHGRNRRFRRLLSGFPTLAFRTRLAAMAATAGIAVISVDPRYTSRIGGRDWQRVLAGGPTANSIKTNVTRHEGAAVAIGRRALAHGLTAGPRGPERRSAPHQRRRPDTRPAGRGDGRTSSPAAAVRAPGTPTRPIPRDRAGAEAARRTPVVISAPAPPNSGGRGPGETTRRAGRTPRIGSAAPPASPG

SEQ ID NO: 55578 - protein, 374 aa, unknown
  TnpB Polypeptide
  misc_feature (247)..(351): Xaa can be any naturally occurring amino acid
LNIAYRFRIYPTEEQKILLGKTFGCCRFLYNQMLNDKIREYAKTKKMLKNTLAMYKKEYPFLKEIDSLALANVQLHLEKAYKNFFRDSKIGFPRFKSKHHSKNSYTTNVVNGNILVESKRIRLPKLKWIAMKKHREPAEGLRLKSVTVSMEPSGKYFASLFYEGYSCENQAAEPDYSTAKILGIDYAMQGMAVFSEKVETEEAGFFRKNEKRLAREQRKLSRCVRGSHNYELQKKKVARCHEKIRNXXXXXXXXXXXXXXXXXXXXXXXXXXXXXXXXXXXXXXXXXXXXXXXXXXXXXXXXXXXXXXXXXXXXXXXXXXXXXXXXXXXXXXXXXXXXXXXXXXXXXXXXXCVEIRWTEIVMQQSTYVKRQEGC

SEQ ID NO: 55579 - protein, 408 aa, unknown
  TnpB Polypeptide
MVLVEKHIIKPSHQYYDELDHLCLLSKNLYNSTLYTVRQYYFANKQFLNYQAVNKIYAGCNQTDYRALPAKVAQHTQMLVDRNFKSFFGLLKLKAQGKYNKPIKIPKYLNKKTGRQVVHYAKDALSFKKQGFIQLSKSNIKIKTSLPKESVQFIRLVPKNHYVIIEIGYHVKEPELKSNNNVLAIDIGVNNIASFVTTDGDKYLVNGRQLKYINHNYNKAVADAKSKLKTTHNQNSSHYISQITNKRNNRINDYLHKITTYIVNHAVSKNIGTIVVGYNKEWKQDTNLGKVNNQNFVNIPFYRLIHLLEYKCCLKGIKFQTITESYTSKCSFVDNEEIKKHQTYSGKRISRELFKTKNGLIINADINGAYNILKKYMQKNATWNESLSQTLVKVCSMPSVRKINIRLS

SEQ ID NO: 55580 - protein, 430 aa, unknown
  TnpB Polypeptide
MMNQPLSIKQASMSGNHKLISIAHKIELVPNQQAKAHFRQAFGCARLAYNWGLAKWQEYYKLGIEKSHLDLKKEFNAIKKAQFPFVYEVSKYATQQPFFFLNRAFQKFFDDLEKGKVSYPRFKKKRENFGSYYIGGDQVVIQNEKYLKVPNLGLVKMREKVRFEGKINHLTISQEGNKFFASFSMQITKDEYIRTHPKAKNTQLAVGIDLGLKTFLSLSNGLEVFAPKPLDKLERLIKRRARQLSKKQHAKTKQEALQGVKKSNNYLKATLKLNKLYRKSVNMRQDFSHKLTSCLTSNIQYFSLEDLNVKGMMQNHHLAKAISDVSFYEFKRQLEYKARYHDRIFYQVDRFYPSSKLCSGCGALKQDLTLKDRVYHCDQCGISLDRDYNASLNLLSQLEKHIGQVLPKFTPADLTALQDNFVKNCLVTSK

SEQ ID NO: 55581 - protein, 391 aa, unknown
  TnpB Polypeptide
MYGQRPAGNGGKTQYTTIKVRLEPTAEQAELFEKTFGCCRYIWNRMLADQQRFYDETDTHFIPTPAKYKQEAPFLKEVDNQTLIQEHNKLSQAFRVFFKNPETFGYPNFKRKKDDRDSFTACNHVFESGPTIYLTKTGIRMTKAGIVRARFHRRPQNGWNLKRITVERTRTGKYHCCILFACRVKEPEPVVPRPETTVGLNYSVSHFYAADNGTMADPPRWMKQSREKLVRLQRRLSQMQPGSRNYREAAQKYRLLHEHIANQRLDFVHKESRRIANAWDAVCVRGDDLGEIARKLTCGNALDSGYGMFRECLRYKLERQGKLLIVVDRGVPTARTCSVCGLVREALGPKEAAWTCPRCGASHRREVNGAKNIKAQGLAQYFGSQERRASA

SEQ ID NO: 55582 - protein, 89 aa, Desulfosporosinus sp.
MMKNRHLSKAIAKQKLYDFKSKLQYKCEMQGIELVETDKWFPSSKLCSGCGAIKQDLKLSDRVYKCKCGLAIDRDFNASINLSRYKLVV

SEQ ID NO: 55583 - protein, 365 aa, unknown
  TnpB Polypeptide
MQKGIKFRIYPNREQKNFIHQTLGCCRFIYNRGLAMRKEGYENGEKIGYSQTSAMLTELKKQEEFAFLKEADSIALQQSLRDLDRGFVNFFQKRASYPTFKSKHNRFQSYRTVNQKDNIRIVGRYIKLPKLGFVKIRQSMEVEKINHVIIEHTPAGKYFAVLNVDFEPEPRSNARGTIGIDVGIKAFYSDSNGNTVSNPRYLERSMRKLIREQRRLSRKQKDSHNREKQRIRVAGVYEKVTNQRNDFLQKQSTMLVRENQTICIEDLNVKGMIRNHKLSKSIASVSWAKFFEMLEYKAGWYGNEIHRVPTMYPSSQTCSCCGYRDPRIKNLGIRIWECPKCHGVHDRDTNASINILKKGLQMQSA

SEQ ID NO: 55584 - protein, 356 aa, unknown
  TnpB Polypeptide
MIISPTKNKKDAAFCQYFKTNTADSKCMYNTANFYIRNTMTGLKKVPGGTYTTGNRSAALRITGIQKANEVIGQKNMKKKFAELKLAEVGGMQSAVAAFSIVSHEPFQYPTAKKWFLSYGTLDAIFKFTDNPIYRRMNSQVNQNAIRKAVAAWQGYFESLKAYKKNPAGFTGKPKIPGYKQDEEYIAWFSKQVAKLKEEDGRYYIQFVNNPDRFEIGKASLYGDLKYVKTEVKAMYGKYYILITFDDKIAEVKVPENPKRILGLDPGVNNFLGVANNFGGAPFVMNGRAVKSENQRFNKKRAKLISSVTKGSNSKTSVKYSKQLNILSQRRESFLRDYFYKCACISAGMQKPQMLT

SEQ ID NO: 55585 - protein, 431 aa, Cyanobacteria sp.
VFGCQQVLIHTDKDTQAIIEYICSESNKVFNGAVYYARQIYFKVNRYVTKAELDEEIKSNKHFQAMYSQAAQQTCHSVFESFKSFKALNKLFQQGKLLQKPKPPKYRKGGLSVVSYPKQALKLIDGNIRIPLGNKVKTWWNIDSFTIELPSNLDFKTIRELRILPRNQCFYAEFVYKLSPVETTLKSNNALGVDPGMDNWLTCVSTVGTSFIIDGKHVKSLNRWYNKKVSQIKEGKPQGFWSKKLAHLTEKRNRQMRDAVNKAARRVINRCLENNIGTVVFGWNQGQKQQANMGSKNNQKWVQVPTARLKERISQLCQQYGIRFVETEESYTSKSSFIDGDYLPKYGEKPESWKPSGKRVKRGLYRSALNWYINADCNGASNILRKVATMLGLNLSGVGRVSLTAPQRIFLWSAKKKKFRDAVLTRRGTSA

SEQ ID NO: 55586 - protein, 438 aa, unknown
  TnpB Polypeptide
MQLAERHIIKSTENRFVEIDGLAFKSKNLYNVANYVIRQSFVYGWGYINYNEMNRLMKSHQAYKALPAKVSQQILMILDKNWKSFFEAVKAYNIESARFTGRPKLPKYKDKIKGRNILVYTIQAISSKQLKKGIIKLSGTNILIKTKIKPEQICQVRLVPKCDSYVIEVIYDEPESTIDENQKELVASIDLGLNNLVALTSNQPGFVPLLINGRPLKSINQFYNKRKAQLQSQLKGSRKTSCRIQRLTRCRNQKVDNYLHSSSRSIINLLRAGKIGTLVIGKNVQWKNEINLGKQTNQNFVTVPHARLIEMLEYKAVLVGIRVMVQEESYTSQSSFLNLDPIPVYGSIGALDVTFSGQRIKRGLYKTSSGRLINADVNGSYNIMRKAIPNALCNGIGSCVVQPVVNPLEVKKKGEGLHASHGTVIDDYTFTSYLFTHL

SEQ ID NO: 55587 - protein, 406 aa, unknown
  TnpB Polypeptide
MKMMTVRIEPNSAQRRVIDQMIDANRLVYNGLVTACKLKYSKDGKLPSAFELSGLATKMRHNSPYLAFAHSATLNETAKRVYRACKKTLSNHRCESGVLMVECCQIIVHGPHFPRYRSAGSFNSYTYSSPRDFSVISRKGDGKPRRVLRLGKVPGLLRYYNQGTIIKGRMKTCTIKKKDMGRYSLYYAFIAIDDEPRHFVEPTGGPVGVDIGVSNIAALSDGTVFPNDRIFRKLSKKLARLQRKLAKSLYGSREYMGIQTSINHVYKKIRDHRKNKVETISAYIVNNHDVIGMEKLSVNTLRSISVSRQMTNGYNDASLGNLVKRIMDKASGAGRIVIMVDPKNTSQMCSQCGSMVKKDLKVRVHSCSFCGYTADRDVNAARNILIRALVKINGMDQPSRPPAWGE

SEQ ID NO: 55588 - protein, 344 aa, Marinobacter sp.
MDKRKINYKLYPSQSQSERLLESLRLHQQLYNAALQERIDCYRKTGKSISYNDQQASLTQIRADHPEYKAIPVYITRMTLRRLDKAFKAFFERVKKGQAPGFPRFRSLSRFSSFEMCGGSGWAFIPEANGKHGRLSINGIGRIKARGKARTLGKVKTSQVIHKHGQWFLSVTVECEPVRACKVLTQARAKVARQRHHDHHQLSHDLAKEYTLFATEKLTIRNMTRTAKGTLEKPGKMVKQKSGLNREILDTAPAKLLAMIHYKVEETGGEFVEIPTRKAKPSQRCPACWEVVKKTLSERTHQCDCGCTMPRDAASGLVAIKWALGLGGNSPNAGHSAKPLLSVA

SEQ ID NO: 55589 - protein, 651 aa, unknown
  TnpB Polypeptide
MDGNEKHPTDYFKGIKLSLKSVLKHPDINLPKITNAVIKCNKIVIQTLMFMKLFLLDHYDKHSSLPDINGELINSCMKILCNEKAQGRPPKPEIKALKDNLTSFYKTDFQPLIQNDNLDYTHMNTILDYLTIDILTMYENNIKLHYVEYVERYVNVVWKKAFLIKKIRKMHITKKEKDERINKLCNQLRKIKNDLLNVETTKYKSHISYHNWINKQKQIIIPVKTFKKNLYYDLQCSPFDYFPCMIFIMKQVETENQTISNVFPTRSEIIPKHIRLDTTTLVHLLMTKKQGIKSDYLTKGNLKRNEDKIWDFFFRTEIKSFHKKYYEFHHMIETDGISCSLLLLRKGLIGKRLPMMKKGLNQETYIDELTDYTQLQNKKLVAIDPGLCDLIYCVDNDNKEANTFRYSQDQRRKETKKKKYSKIQLELKQEKIEGNRTIIELETELSKLNKKSLNLTKFKEYIQKKSEINGLLFSFYEKYIFRKLRLQSYRNTQKSEQKMMNRFKKIFGNENEVIVCFGDYEQKNHMKFKEPTKGKGMRTLFRKSGFQTYLVDEFRTSCRCSKCEIGICSKMMVRENPKPFRNGSIMVHGLICCKNGCGYWNRDTNGATNIYKIASNAIHNKERPSYLSRSKTTSTGLDEPVNPKFTQSRKG

SEQ ID NO: 55590 - protein, 755 aa, unknown
  TnpB Polypeptide
MLKKKERRKKKREKKNSKKYPNIYENIIYNKPPITTIKIPLKNIIKDSSQTNNIEVYNIIQEKVNDINIVTTHTYHFLKLMILYYFEMNIEFPKIDEHFIICIMKCITEKVSNRGIKPKDTTVNLNNKIIDFYNNYYRYLIPDGEIRIISTNLEQIFNYEAINILTSIKNNVISQFLNRLNQLINLIFNIKDELKQIKNNCVYTHEYRDIMKNSFMKDCRDIKNDILKKDDKLTSNEVYHNLILTIRSFFPKRKYNKNFNYDIASYPMDYLKGLIIINVNLEKYDKSFHAIPIRKTFYPKNVRFDTSSIIRLMTPNGSKVKMLKNIIQYKEFVWNQTFNMDYKLFKRKLKYYKISGSLVTDGVSASITFIRNDLEDIVENDNILSIENINDYLNIKSNKWKEYEIQRDKHKQEMKESGKKVKNYVDKIDLEKVTYFNTIKKDKYITECKNISKDIKIIAIDPNKENLIYAVDENDKIFKYTNGRRRVESKTLKYTDLRLKFKRENKKFDVSIEEWETILSNHNSKTCDFIKCQNYIKDKLYCFLHLRELYSKLPGNSSKNISDLSIRKLNLNRYMNMKRSEDLMLNRFQEFYSDENELLEPKNTIVAIGDYSSGSYHIKHKNPAMSVRTRKLFKDRGYNVFLVDEYKTSKICNKCNECLHKFIKRPVRKKKEKDKNEFMNQVIKEKEVKNVLAHGVLSCNDKNGCNTIWARDLNASLNILKITKNEILEYGRPEVFSRYKFGSNENSSNHIVSQC

SEQ ID NO: 55591 - protein, 394 aa, Lactobacillus sp.
VLKGIKLRLYPNKNQQDQLEQMFGNDRFVWNQMLAMMNERYQNNKDLPFLGKFKLNYLLKPLKKEYPFLKNSDSSSLQLVNEFLTQSWKNFFQDKSGRIGKPRFHSRKYLKKSYTGKSIIKIAGKRYLKIPKLGYIKTSKTGVLKNIKIKRYTVVLETTGKYYLFLQAEAPEPQKPCLTGKEIGIDVGVADLAILSNGLKYPSFDGSYFEKKAKAWQRKYSRRRHLAKLLVLQDKNRKVLCPRSLESFANWQKAQRMKAVYQAKAANQRKDYLHKLTTHLVKQYDVIVIEDLKTKNLLQNHHLAKAISNASWRTFRQMLEYKCRWYGKRLIAVDPKNTSRICSECGYNSGAKPLEIREWICPKCQTRHDRDINAAVNILHKAKPNGQGLAMVNS

SEQ ID NO: 55592 - protein, 372 aa, Bacillus sp.
VILAKKIRIKPTKEQEHQLWKSVGVARWAYNWTLGKQEENHKNGGKFISDGTIRKELTTLKQTEEYTWLYEVSNNITKQAVKDACNAYKRFFKGISDKPRFKSRKKSKPSFYNDNVKLKVKKNQIWIEKIGWIKTSEQLLMGCKYTNPRVSFDGKYWYVSVGVEQEFSKENLTDASLGIDIGIKELAICSDSERFKNINKTKSVKQAEKRLQRLQRKVSRKYQMNKEGNCFVKTSNIIKIEKKVRHLHRRLSNIRVNHLHQTTNDIVKTKPYRIVMETLNIKGMMKNRHLAKAIAKQGLYEFKRQIQYKCEKYGIEFIEADKWYPSSKMCSCCGSIKKDLRLSDRLYQCDCGLRIDRDLNASINLSRYQLAN

SEQ ID NO: 55593 - protein, 296 aa, Calothrix sp.
MNRELEVKMLVFEVKLEGTKQQYQSLDNAIRTARFVRNACLRYWMDNRNIGRYDLSAYCAVLAADENVPWVAKLNSMARPASAERAWSAIARFFENCKKNKPGKKGYPRFKKEQTHSSVEYKTSGWKLFKDRRHITFSDGFESGTFKLWGTRNLHFYQLKQFKRVRVVRRADGYYAQFCINQERVEKREPTGKTIGLDVGLNHFYTDSEGNTVENPRHLRKSEKSLKRLQRRFSKTKKDSKNRVKFRNKLARKHLKVSRQRKNFAVKTARCVVQSHDLVAYEDLQVGNMIRNRQPF

SEQ ID NO: 55594 - protein, 461 aa, unknown
  TnpB Polypeptide
MRHQPESEIMAIVTQAYRFALDPTPTQRRALASHCGAARVAYNWGLALVKISLDQYQADPSVRVPWTLPELRREWNRAKDQVAPWWIENSKEAYSSGLDGLARALKNWSDSRSGRSKGHRVGFPRFKKKGRSRDTCRFTTGAIKVLADRKHVQLPRIGVLKTHESTRKLARRLEQGSARILAATVSRQADRWFVSFTVEVERSIPVSNGETTVVGVDAGIRHLAMLSTGMAIPNPKALERSLRKLRRLNRELARRKPGSNRRKVTRRKLARVHARAANLRRDGLHKLTTTLATEHGTIVVEHLNLAGMVRNRYLARALSDSGLAELRRQLGYKTTWYGSRLVVADRFYPSSKMCSACGWVKVKLTLAERIFTCEACGLRLDRDLNAACNLAKLAQHVAQSGWETQNASGADRKPQLAGRVATKREPSSQHCNGHETGTVESQGSDTLTVRSSQALTAQAYR

SEQ ID NO: 55595 - protein, 467 aa, unknown
  TnpB Polypeptide
MAKKTGYKKTIGKAKSDSSRQQKTYEYRVYPTKEQEEYIQKLLGLKRLYWNLNTEQKNLDENYKAQTYANTFRQFKPEAMEWLKEVNVVPLNQAFLDIRQSWQVTRTNNRKNKYKYEKQLEDFLAGKRKNAPKEYREKKYSYKSKKNKREGLHFNSCDFRDGKLFLTRKFGLLAGAFGCRFCEGRKRSVTLSCTATGKWFVKIVVEKIPDEKCKNGKTIGIDWNCRDEAFLAMSDGTIVKCPRFLKKKAKMLKHKQKELSRRKYSVFVQKFGRMPDFRNPVDCEEFKALPVSNNYLKTQQEVAKLHEKVAWQRKDWLHKLSRELANNFQYIAFEDIDLQVMAKKRKNSGLGHGKVLADQGFGMFRQFCAYKAEVIKVSPKNTSKTCHNCKHIEPSVVLGVEHWVCPNCGVHHDRDLNAALNIMAESIVGRERAEIKNACGVPRSTAKQEVGRSILSNEITLPNIPHL

SEQ ID NO: 55596 - protein, 451 aa, unknown
  TnpB Polypeptide
MKQIITAKLKLNTTPEQLQALRQTQLAYRDALNAVSCYAFSQGKTSNVTRLHKGMYAELRARYHLPSQLACSVERQVAATYKGLWTKLKKNVEHRRAKITKKRFKGLDKPPKYSSPTVQYTYERDYTFQCDSQVSVGTLSGRTSIPYQGYDKHTALIRAGATIGDAKLWYDRQKKTFYLLVALTIEKPDPIPESFTEVVGVDVGIRYLAVTSTSTGKADFHPGKRTRHKANHYARLRKRLQQKGTRGAKRRLRRIEQRERRLKQQANHSIAKQIVEQHPHALIGLENLTDIRERTKRKKRKRKKNGKGTEPVSPKARKANRVYSQWSFAELHNLISYKAVLAGSLAIKVDADYTSKACPMCGLTSDENRPHKGLRFVCQNPRCGYTLHADLIGARNVTMRTLLVRQDWIRTGHLSIAPDASDNEAKAARRLRYAELRWSLDASLRLLARGD

SEQ ID NO: 55597 - protein, 386 aa, Meiothermus sp.
MTRKAFKYRLYPTQPQHKDLERTLALCRHLYNAALQERREAYRKAGKTVGFYEQKRWLPEIRTELPEYKGVHSQVLQNVIERVDKAFQGFFRRVKAGQKAGYPRFKGQGRYDSFTFPQAGTTGVKLQEGGKRVLLHGIGSVKCKFHRPLEGRLKTATVKREGEHWYIVFSCEVEPQPLPENQDAVGIDLGTNPHFLVTSDGEMVRAPRYFSKAQAQLATAQRNLARKKRGSNRRKQARRRVAKLHRKIANQRKDFHHKTARKLVERYGVIAHEDLNVLGLARSRTAKGVLDAGWAQFLAILAYKAEEAGRRVVGVDPKHTSQDCPVCGHREKRPLWVREFTCPACGASLHRDVAAAINVLARSGRVPDRRWARTEPSGMDTAVAVP

SEQ ID NO: 55598 - protein, 257 aa, unknown
  TnpB Polypeptide
LKFKGKVYLPKVGWVSVNQTPKKRIYKNPRVIFDGQYWYLSLGLEVETKQVELTEEVLGLDIGLKNLVTTSDGTLFENINKTKTVKKLERERKQAQREMARRYIKGSTKQSKNYYRSKYKHARICRKLTNIRENHIHQVSSALVKTKPKAIVLEDLKVQNLLSNHCLAKAIQDASWYKLRTYLTYKAEHQGIEIVLAPSTFPSSQLCSNCHQRFDVNAQKRTWGLDIRNWKCSHCEVEHDRDENAALNLKWYYNHQV

SEQ ID NO: 55599 - protein, 430 aa, unknown
  TnpB Polypeptide
MRQVERHWIKENHELYSICDDLTFKAKNLYNAGLYQIRQSIFERDKCKEDVKPSVRSWVELVSQFRKDKQVDMLALPSKVSTNILKLVGSSISSYYQLLKCFHDKSNLSVTNKPKPPRYLHKTEGRYIVEFTNQTISKKRGDKGELIICPKDLNLHIPTKVENPKCVRIVPKLGAFVIEVIYEVEEAPLKHTGNYAAIDLGVDNLVSVTFSNGVNPLLVKGSKIKSINQGYNRLIAKVKSNLPTNQKTSKHIHRLWRNREMKLQAELHKITSFLSLYFDEMSIEKVFIGKNVGWKQEVALGKKTNQTFVNIPYTAFISQLTYKCKLRGIEVVEQEESYTSKASFVDHDEIPVYGEVEEKPQFSGKRISRGLYKTKQGFLLNADVNGSYNILVKGLATLGKVVDRALVSYHTRSLRICSNVSNLDLISNYM

SEQ ID NO: 55600 - protein, 356 aa, unknown
  TnpB Polypeptide
MRLVYKFYIQHTEQLDNLFRISNNLYNQALYHFRQRLDTDGIWLWYNDMDKLMKQTINLDGQCNYKLLKAQCSQQILRVLDKSIKAYCKSIKDWKVHKDKYKAMPQMPHYRKRGGMFNLYYTNQSCTIKDGVIRLAKTLLVQIPQWKKYGDSIKSFCQVRLIPGSRNIKVEIIYNKETKKAYVDKTKYAAIDLGLDNLATMVTAEGCAIWSGKYIKSYNNHFNKTLSHLQSVKDMQGIKRTTRRINRMYDKRDRYIEDAFHKVSRQIVDTLIQKKIGTLVVDYNTGWKQNTDMGKRNNQKFVQMPFARLAGYLRYKCEMVGIDFVEHEESYTSKCDALALESIDRSMMCGTRMATT

SEQ ID NO: 55601 - protein, 365 aa, unknown
  TnpB Polypeptide
MIKTMSIKTPLNPEDYFLWFNQCADMFNQYVDWAFKVKSYNKNKAHKELYLNFREKFPTIPSALVQCVRDMALETVKRDKFKSKPKKKKNSSLRLNKCLITLKGNSISVIHPSKRIKFNFEYADYFSNYKDAKFRSATLQYKKISHTIVLNLQFEFPDTPLKTEGEIIGIDRGIYNIVTCSNGLQIKGSHIRARQRKDLFNKKNIQSKGTKSSKRKLKKLSGRYARFSANINHCISKQIVSIPNLKTVVFENLKNIGKKRKGKKLNKWLHSWTFYQLQIFTEYKALEKGIEVKYVDPRYTSQKCSACGFTDKNNRHKHKFVCTHCGYACDADLNAAINIKQNYILSLTNKEQAVVNQPNVANSNV

SEQ ID NO: 55602 - protein, 271 aa, unknown
  TnpB Polypeptide
LFLPKLGWLRYRNSRAVLGEVKNVTVSARGCKWFVSIQTEREVEAPRHPSGSVTGVDVGVTTFATCSDGAAYAPISSYRKHQKRLAFLQRRLSRKTKFGSNWKKAKSRIQKLHIAVANSRRDFLHKTSHEISKKHAVVVIEDLAVQNMASSAAGNSEQPGRNVKAKAGLNKASLDQGWGELRRQLEYKQSWRGGSVIVVPAQNTSRTCPACGHVSAQNRRTRGKFKCIACDYQEGADLVAARNILAAGHAVLACDIGQPLALGTVPGFLGT

SEQ ID NO: 55603 - protein, 437 aa, Desulfurobacterium sp.
LEKASKTFQHFKNLIYLCALEYYHNTHDLTPFLSKTFLEKFIKGREKLPFENEKIRNWKKELFLLWSKEIGSDTAKALVGVVGREFKSIVQKWKNGEKASLPKPKKLSSLYSFTLETNPNMVVDKRELNGKRKSNHVVVRIGKNFGVVKFKIPSGINVKHIKVNWSASKEITYLLTYEVPQSSIKPSRDYFLSIDLGVKNLISAVSNKEDLPSFIINGNPLKALNQWINKLSANLQSEGKEIEHKRLWNYRDKRLNQLFGAVSNLITAVCLSFNIGRLILSDSLTEEYQKEGKNGKKFNQTFRHIPLGRLIEKIKQKGKLSGIEVIIEPEPFTSKLFSITGNIEEITGKSLEKITEKDLNKLKITGRRIERGLFKDLILNKVFNADLNGALNTAIKALGEWVREEFLRLPNWIDKLSRAVKLTVFVHEKYSPSPVLG

SEQ ID NO: 55604 - protein, 687 aa, Streptomyces sp.
LVATAPCTAFGGVVEGSGEHVGQALLHERVGFLAKLSRELTSALVAARWDEASLQVLAAGVDGRGEPLPSKGWMALRRLGWQHTAALAEGVYVSDRVRRGAEEYAARTLRLAGHRRALLAAVLATWPADPHRRTGAEWEALRALLPTGVSNAEIRNRTRQVRAYLAEHGKLPAGLCELEEPPEIAAQVLLAAMDRQQVTLQRVDAGLARLRVKLPLCAAPGSGRDWAWHVLDLRLPGTVEADAVLHTPTLRPTRGGRIAVDLPHSRPLSAAPVAGHTVTVGFDWGVNTLLTGTVGRLTGRAGQARVVTDGRPLLFDATAVSAKLHRLRRHREHLAARRDHYRALADGLGSPHLAWGRLLDRAAVLEVEHARVCARIRHLNQALVWSAARWAVDQTLTLGATVIYLEDLATLETRGKRQGNARLSGQVRGTLVEAIRHLAAKAGLAVVTVPARGTSARCPQCLGPLGHHPAPDRLHVRGWAWAHCPGCHLSIDRDHAAARRIVSRGLLAQAHTTTDRTTGARTLRTTVDGTVTAVRRPKKTTRRLRRARRQAAAPPRPAGAKATPGKSRPTPARPSPVSRSQTSRRMPEVRTVPATTPTGAVKRPAGHDTQAPAHTGPVPGHGVPAPDNRPELAPAGRVRLSRGTCRRRTRAAQRTGFHHVHATEVHPLTPRFGPHHGGTRPRRARKA

SEQ ID NO: 55605 - protein, 530 aa, Mycobacterium sp.
LTAIGQFLGSVYRSELAGRVQLGRLDNRAHAGWRAERKRALTALSSSRWAGAITRAVDDQYQLGLRGLAAYVADLRAAVGVLGARCALRPGEVEPVDGNEARRHGRRRRGYRSAGERFTKTRRLAVLRGRLAAAEAALAAGRPPITVGGKRLWRTRNHLDQAQLTEQGWRAAWDARRMFLTADGESGKAGGNETIRVDSEGRLRIKTPAALADEFGSHVVIEAPIGFSHRGDEWAGRVVARRAVRYDINYDPARGRWYLDASWTTGPRSGPELEELRRGRVLGVDLNDGHLAACVLDASGNPVAEPITIQVAIAGLVASRRDGRVRAAITALLDHAQDCGCTAIVVENLNFADARATGRETLGRGQRGKRRRRAIAGIPTRRFRDRLIGMAAQRGIAVIGVDPAYTSRWGNQHWRKPLQQQTSDPATVTAHHGAAAAIGRRGLGMAIRRRPAGPRTRQRTRVGTPPARPDHQPGTTPRRCRSSGSPPRPQRRRGAAVHRTTPTASGQHRSGRTGPLVPSNQERFSLVKES

SEQ ID NO: 55606 - protein, 398 aa, unknown
  TnpB Polypeptide
MRIHKGVKYRLEPSGLQAAKMRAFAGHNRAVWNKALALTKDRLLRKMPIMWYEELNWNMTTFWKKSDEMGWLNDAPSQSLQQTLKQFDRAMRDCFDKKQTNKRMPRFKKKGGKDAFLFPQGFTVEGNRIKLLKLGWVKFRKSRELDGKLKSATVSRNGKHWFVSILCEIDVPEPIHASTSAVGIDRGVAIMASCSDGKAYVGAKAFRKHEQRLAKAGKQLARKVKFSNNWYKQKEKLQIIHSKIANMRRDALHKASTEISKNHAMIVLEKLGTSRMSKSAKGTSEKHGMNVKAKAGLNKSILDAGWAMFAAMLEYKQNWRGGVVEYVPAAYTSQCCSQCGHTAKNNRLSQSTFHCMACGYQAHADFNAAKNILAAGHAVFACGVDAKATTMKQEPLAA

SEQ ID NO: 55607 - protein, 438 aa, Deinococcus sp.
VPNHLISVPTTLRPTTEQARRLSDIVQQANHLHLTLRRWLRLRAAGVVLTLRAALDQVAAGQPLPDVHDRCELQLPAAALDEVRALTVADLPQIWGLLSPATVRAICHSNAKRLENRRTGRAAELLPLRPLNAVPMDASVQPLDEFHILLDGLRTPIVADVWMLPADLMDALLIAADEQTRQARQYVTDTCERVIRGEPSALTALYADASKIGERLLRSATRQIDQTRPHRADYVQLRVVTEPAGGQVHQLVWTVRVPYGHRPLASIDDTIGVDLGVRNLATLADDSSDWHVPRQTTTWDLPAPDPDDSHQLLIHALARRAVFERHRADLELTLQQILSYRRAHLEELDYDGMRDHGRVPWAGEAMQLSGASSLTGWVQMLKDVTGTRVRMVDPAGTSSRCPHCHRPCRRISPFVVTTCPVHGDMDADVVGARMIRKG

SEQ ID NO: 55608 - protein, 523 aa, unknown
  TnpB Polypeptide
MMLLVNLSRGGEPVKYYDTVTRNRFATENGVDADLASTDLAQMVTWMAEAEREVLASQKFHDLAVEVLKGDRPTGSLNSWGRKRLTQYPFPFQKYNMNEILASNIVSVLEAYAVSVGLFQVMSTHTKETKPEKILSHYRDTYPDAPQPTSGMVRAHLIRYHKKSERKASLPGVSAKINLAVCDMKFAPKASRDDNDPLSVVVQVKTPSYGVTKIHLRLPENAERFGTGKVCRPTIRLNNKGQVVFDIAVEHETDERQTKKFVGVDLGKIEPFVATIIDPKGKHRSAPYHTNYKRRLGSLVKKEQQQRDLSRHLYKRANLCERYNRDQHAQVLRTEAKRVSAKATRLKHEISQCIASQVVEIADQNDAHVSLENLSWLDAKGGRWPHAEIQSRIENTAKRYGIKVTKVSAKDTSRTCSRCGGKVSNNSKTRVGVCATCGFGLDRDVSASREIALRATSPSSRSRDRMRSLLRQRREMQSSAATRQSKPVNALGGNQRHTGTSERKTEATLMMVRETLDSRGSPT

SEQ ID NO: 55609 - protein, 453 aa, unknown
  TnpB Polypeptide
MQQIITAKLKLTTTQEQFAALRQTQLAYRDALNAVSCYAFEQGKTSSVTTLHKGMYAELRTRYHLPSQLACSVERQVVATYKGLWTKVKKNVEHRRKKITKKRFKGLDKPPHYSSPTVQYTYERDYTFQCGSWVSVGTLDGRVRLPYQGYDKHTALIQQGATIGDAKLWYDKQKKAFYLLVSLTIDLPDPTSAQLSEVVGVDVGIRYLAVTSTSTGKASFYPGKRIRHKANHYARLRKRLQQKGTRGAKRRLRRIAQRERRLKMQANHIIAKQIVKEHPHALIGLEQLTDIRERTKRRKRKRKKNGKVVERVSAKARKANRVYSQWSFAELHTLIRYKAALSGTLAINVDADYTSKACPMCGRTADENRPRKGLLFVCQNPECRYTLHADLIGARNVTLRTLLVRHDWARTGTLSLCPDASDNEAKAARLRRYAELRWSPDGTSLWLQAGGAI

SEQ ID NO: 55610 - protein, 451 aa, unknown
  TnpB Polypeptide
MVKFVSSYKVKIKNYNKIFEPTIQIYRSALSFVISTIEKEWTSISQIEVKGTYRNNAVERLIHSTKSNVAKYHEFDTQFYKFPSYLRRTVIQDALGIVSSYHSNLENWEENGKKGKAPRLTLKHFKFPSLFRDNMFNRLDDTKAEIKIFYKNDWVWQTVELDKHDVAYIQRHKPDHIFKEAVPTLEKRGRNWYLRFAFEQQVSFDKEVKVITAVDLGITHSATCVAMLPDGTVLGRKFISCPREKDQMETQLNRIKRNQQRGNRRNPHLWMFANNKNRAISEKTAQAIMEFATYYSSDVVVFEYLDTQGKKRSSKKQRLHQWRKQEIIELVNNKAHSIAMRVSRVTAWGTSRLAHDGSGRVLRGKEIDLPYGLCQFSTGKQYNTDLNASYNIGARYYIREILKSLSAKKRLAVEAKVPALVKRSTCTLSHLINLSSVLGGVTALKLQGKAV

SEQ ID NO: 55611 - protein, 412 aa, unknown
  TnpB Polypeptide
LLDSATDQIYNITVLIRKAYKYRLKTNVKHETRLKQFAGCCRFVWNKALALQKGRLDDKESCLSYSKMAALLRQWKAEPETSFLEDAHSQILQQSLMFLDRAIKDAFDKTNPKRFPKFKKKGMHDAFRYPQGFKIVNDAIYLPKIGWMSFYKSRDMEGNPQNITISRKVKHWFVSVQTEMEVAEPVHPSTSAVGIDMGIKRFATLSDGDFYQPLGSFRRLDRKLAREQRKLSRKSKGSQNWYKQKAVVSRLHIRIADTRNDYLHKTSTTISKNHALVVLEDLKVSNMSASARGTIESPGRNVKAKTGLNKAILDQGWYEFRRMLEYKLLWRGGKVVTIAPQYTSQTCPQCGHVCSDNRKTRQIFRCIVCGYMENADRVAAINILAAGHAVSACGELALSGLSVKQEPTRVAA

SEQ ID NO: 55612 - protein, 382 aa, unknown
  TnpB Polypeptide
LIKTYTFKLYRSKRNRRLHDDIYLAGKIYNHCIALHKRYYKIFGKYLSANTLKKHITKLKKTAKFSSWKALNSQAIQDIAERIDRGYQLFFRNLKRKVRTNPPTFKKLVKYKSFTLKQTGYKLYDNTIEIKGVKYKYSKSREISGEVKMITVKRSTTGSIHIFIVCKQPACRTGRDMPSQVLARTGKMVGFDFGLKTFLTASDGCDIVSPLFFDQNSKLIAKLNRELSHKKKGSNNRKKARLRLAKAHERIANLRKDFHFKLASYLCSEYAFIFIEDLNIKAMQRLWGKKISDLSHSKFVQILKSQAVKFGTTVVEIPRFFPSSKTCSNCDYRLEELPLSQRSWVCPNCGVEHDRDFNAATNILRVGASTLGRDTVRLALVS

SEQ ID NO: 55613 - protein, 379 aa, unknown
  TnpB Polypeptide
MKTYKFKLYSNHGNGELHKTIEGHADVWNHCVALQRRYYCIYGKYISKFRLINHISKLKRLPQFAHWNQLPSQSIQDVATRIDKGYKAMFEARAKGKPWGRPRFKPRGKYKSFTLLQSGWELLPSNKIRIGKCVYQYFKSRDVLGTAKRCAIKRDGIGDIYICVLTDYEDGDLNRVMTGKIAGFDFGLKRYLTGHNGHDIESPQFFKRSINAVKRANRNHCRKKKRSRNRERARLDLARQHRKIANQREDFHWKLAHQLTDEYDEIRLEDLNLQGMKSLWGRKVSDLGFADFVKKLVSIAKKKGVKITFIDKWHPTSKTCSVCGAVNEALNLRDRTWQCNDCGTVHDRDRNAAINIFRVGASTHAGEDVSPDSSGNPCG

SEQ ID NO: 55614 - protein, 404 aa, unknown
  TnpB Polypeptide
MRLVEQHCIGKQDPRYGVLDAACFASKNLYNYANYIVRQSFIHEHIYKGYATIYHEVKHSEAYQALPAKVANDVLRLLDKNWKSFFAAMKAWNEDPSQFLGRPALPKYKDKQQGRNILIYDIQALSKRGLKKGLIQPSLLGIEVQTKQTNVAQVRIIPRCGFYMVEVVYEQDPVQASVDPALLAAIDSGVNNLVALTSNKSGFVPRIVNGRPIKSVNQFYNKRKAELQAIMKSDTAFTARMERATMKRTRRIDHYLHTASKRIIDLLVAEGIGTLVLGKTPLWKQDPTMRKKETQHFVQLPHARFSEMLRYKAELVGIQVVFQEESYTSKASFLDNDPIPTYGKVKDEPMFLGKRVKRGLYQSRHGIRFNADVNGSYNILRKAAPNAFGQGSRGCAVHPRRFAV

SEQ ID NO: 55615 - protein, 390 aa, Streptomyces sp.
LWNLVHDWWTMLPKDKRTLGAADEAIRQGRKDLPWLGVLPAQAAQAVLKTYFQAWRNCWDGRAQAPAFKGRFRSRMTVDIPQGRDLQIVRLNRRWGRMRVPKIGHVRFRWTKGLPVGERADKGNRVTGARLVKEADGWHVVFRVQSEVPEPAPHAGPTVGIDRGIAKPLALSDGTFRDHGPWLTRGEAERLRRLEKTKDRRCRARKPGERNSRRLTRTYGQIAQLRATAKRRVVDWQHKTTTDIAETFSRIGLEDLAITHMVKSVRGTVEAPGRNVRQKAGLNRAISGEAWGRTVTMLEYKTADRGGIVVKVPAPNTSRRCSACGVIVLGSRETQARFVCKNPGCGFEGNADTNAGRNIDHAAGQAVSGRGDLGGTRSAKRQPPTRPHTA

SEQ ID NO: 55616 - protein, 407 aa, unknown
  TnpB Polypeptide
MQYKSYKIRLEPNNKQETLFNKHAGVARHAYNVGLAYSNDYYELNKKTPSAIDLHKWLVATIKKDNPWYYEVSKCAPQKALIDLEAAFKNFYRLQKKNSYKLKDKKGRLQGLPKFKKKGVRDKFYLEGKVRIENNKIKLPRIGWVKLSENISATAIKNCTVSRVANEWFVSFKTEYTPTTTPKKFKSVGVDLGVKTLATLSNGETFQNLTPYKKAKSKLRKQQKEVSRRFVRGAKNQSNNYKKSVLKLAKTHAKVANVRKDSLHKLTTYLSKNFETVVIEDLKPKNMAKNHNLASAILDGGFFEFKRQLLYKKQWYGGSIIIANTFFPSSKLCSCCGNKKEKLKLSEREYTCYNCAVTLDRDLNASVNLNNLAVSFTATAFGDESTGSFELQLVDELGIKHQMFTFV

SEQ ID NO: 55617 - protein, 474 aa, Ardenticatenales sp.
MAHTIKTHRTAIEARPGLLNWYETTTTLYNQVVAFYVSLYEAHPGLLNLNQQEALRQAERLTHRTRTNPSPLWPLEEAISADIPAMLRRAAINAARGAFQSFHSHYQRWQKNKTNFEAKGKRFHHRPPVPPRTFNFNLPFYQGMFKERTVTSIMVRLYSGTSWQWVKLRLTGEPLPAEWNPGSPIIVRRRGRLRLHTPLEKQFPTPPKALAQVAADPQLRVCSVDLNLGDAVAVCTILQADGTEVVTRFIRGGKNLHARRRRLLGKVARKRRQSGILTEGEADNIKLWQKIRAIDEYEAHRVSQRIVEFAQAHRATILVFEHLGNLKPQKGRYSQRSNEKRAYWLKGKIVKYARYKAWEQGILTSRVNPRNTSRDCSDCGASPVARYAAGEAPLAYRPGGPLYLCPACLKRGNADHNAALNIGFRFFQRAFRQLSESLHAKASGVPVVNPIALQQIAVWQDRRSGSALPSFSLA

SEQ ID NO: 55618 - protein, 323 aa, unknown
  TnpB Polypeptide
MYDQLGKLPFLKTDWPPVSDVHSQVLQNVGVRVDLAFKAFFRRCKAGENPGFPRYKGEGRYDSLTYPQATGFALKGRYLRLGKVGLVKVRQHRELEGNSKTCTVRRSATGKWYATIVCDVEAKALPESTEAVGIDVGLEKFATLSSGQQIANPRFFRQEEHELAKAQRKLSLADKGTPERAKARKIVARVHERIRFKRHDFAHQLARRLVNHYGLISVEDLTINGMVHNHCLSKSIHDAAWSQFRQCLFYKAEEAGRTMVAVNPAYTSQDCSQCGHRHRKTLSERVHVCPCCSVVMDRDENAARNILRLGLQSQAPSQEAAAL

SEQ ID NO: 55619 - protein, 423 aa, Bifidobacterium sp.
MLEAVKVALDPTPAQERLMLSHAGAARFAFNAALAHVKDQLERGEAPDWNLYALRRWWNANKARLAPWWAENSKEAYNTGLSGLADALCNFTRSRKGQRKGRRVGFPTFRSRDRTTPRFAYTTGSFGLILDDPKALRLPRIGRVHTFENVMKRVGDGRVLRMTVSRRAGRWYASLTVERADPPASIPPEGAPIGVDLGVKELATISDGTVVHNPRPLERNLGRLAKAQRSLSRKKRGSNRYAKARVTVARTYARVANLRADAMHKLTTKLADGHSDVCIEDLNVQGMTRNHKLARAIEDAAFAEFRRMLTYKCARSGARLHVVDRFYPSSKTCSACGMVKAKLSLKERTYACEACGLTIDRDLNAAKNILDAVSATGSLNARGADVRPAGPRTGGRTAMKREPSVRASGVRLGAGVGNDAMHD

SEQ ID NO: 55620 - protein, 375 aa, unknown
  TnpB Polypeptide
MSRIVVPVKLVADRKATDDLVATLRACNAAANHVSGVAWERGIFRNFSLRAVTYGDIRSTFGLGAQAAQHTIKKVADAYNSGKPEYRRSRHRAFRWQSSQPFDARNLSFDVANRTVSIWTVNGRAKAVPFACADWQAGLLTRHPIGETDLLYRNGALYLYATVDVDDPPMNEHPVGFIGVDLGIVNIATMSDGTNFSGSAVNRVRHRNRRLRGKLQQKGTRSAKRLLAKRSGREARFAKDVNHCISKKIVAEAERTGHGIALEDLEGIRDRVRSRKPQRATLHSWSFHQLGSFIDYKSTRAGVPVVYVDPAYTSQGCSGCGHISKKNRPNRATFLCTSCGLSLPADWNAAINITMRGEEGWVVSHATERNTELAA

SEQ ID NO: 55621 - protein, 313 aa, unknown
  TnpB Polypeptide
MEHSHTTTDLHPANANVVELEPSEDSTFDYWLTISTLEFRKQLLIPVKLAAYHRKALKGKAINTSVTLNKRDDGWWVTLSYDKVIPVHTTPSAPVIGVDVGIANFLTTSEGKHYGTFHGKLRERQKRDREKRRRKAKLRACLKKKGVKKLPSTSSKSGQRLARHVRQEINRAVNQCFKEHEGCQFAYEQLSVATMKFKARAMNAYLYASNLAHLPKQLAWNAAKRGVAAIRVKSAYTSQACNVCYYVDRANRPNQQTFCCVVCGYSTHADLNAAINIERRLGDAELQACKDRKAIKALLMQRHEAWKKQNGWP

SEQ ID NO: 55622 - protein, 379 aa, Sphaerospermopsis sp.
MAFSNFKTIGEVLTTFQVIYTEDNFISEIAFNITDYFREDLELMMRDAVVDNSEFAICENLIYPVLKEVWKIYRQHFILWSHQSLNYDEKLSGFPEYILAKRSPLGKVVFDKPYFILVEAKQDNFEAGWAQCLAEMIAAQRLNGEYQIIIWGIVGLDLGLNYFIADSKGNVEESPKFYRKSEKQLSRANRKKSKKFSRERKKAKQRQSNNYHKARNRYARKHLRVSRQRKEYCKRLAYSVIQSNDLVAYEDLNVKGMVKNRHLAKSISDAGWSTFRQWLEYFGHKYGKVTIAVPPHNTSQNCSNCGQKVQKSLSTRTHVCHHCGFVEDRDINASINILKLGLSTVGHTGTYATGDLPSWAIGVNLSSNGESVNVESALL

SEQ ID NO: 55623 - protein, 395 aa, unknown
  TnpB Polypeptide
MHKAFKYRIYPNKAQQVLLQSTFGCCRFVYNKTLDIKKTAYETDKTRLSKFDLIKKVTSLKDEFEWLKDVPATCLQQAVDNMDKAYQNFFKAGNGYPKFKSKHRSRKSCKFPATFCNVLQNIDHIKLSKIGKVKYKKDREFVSTLRHIVVIQENDGKYYASCLVETGVETPKLQPVEASTTVGIDLGLKDFIVTSDGRKIPNPRFYAIIDRRIARLQKHESRKTKGSKRRARIRLKINKLYVKKRNLIKNYIYHVAKTLLRESQTLIMEDLNIGGMVKNHNLAKSIQNICWGELRRVLEYKSKWLGHNLIFIDRWAPSTKTCNCCGFHNSTLTLSDRSWTCPGCGTHHDRDVNAAVNIKRIGLATLLPAVSGFDGRREVGYDFDEASICTPENCT

SEQ ID NO: 55624 - protein, 354 aa, Actinobacteria sp.
MTANVFDMKKMVKRAYKYRFYPALEQVAELSWTFGCVRKVWNLALEARTTAWHQRHEHVSYLQSSAMLTQWKHSDDLGYLNEVSSVPLQQALRHLQSAYARFWQKQARYPRYKSRKKSRSAAYTRSAFRYRDGQLHLAKMTAPLAVVWSRPLPDGAEPSTVTVSRDPAGRWFVSLLCQCAVEPHPASATVVGIDAGITSLVTLSTGDKIANPRHEPRDRDRLARAQRRLARTRKGSANRDKARLKVARVHARTLVPLVQDLLGVRAPGIEPAARRPRVGMRALRYPARPGHQRRSQHQSRRAGGACLRSRHKTRAGAIPVGQPAVKQEPRRVTAGIPVLQLQAGEKSIRSTYRP

SEQ ID NO: 55625 - protein, 373 aa, unknown
  TnpB Polypeptide
MNNNIQKTIKCKIHNLTNIKEQILTDEYNEYQNICEEVSETINNDCLPERPFKMFKNEKRHKSFVNGAIKTIKNKRQFENLKTQPVYLKNDSFDIIKNKNKISKHWLKLPTKRKWGGIYLPIIIPQKYEDSLINKICDSKIIKKKNEWFLLLTIKKEIKSKTSYSNILAIDLGERVMATVCGSFDNQRPTFYGRDVRGIRRHYAWLRKRLGNKKALKTIKKIGDTEQRKVNDTLHKISRQIVDKAKETNSIIVLGNLKGIRESAKGKGKRFSRIVHSMPHYKLSEYIKYKAGWEGIMTIKVNERGTSHTCSHCGSKGKRPYQGLFICNSCGYQVNADYNGAKNIAQRGLESISSLDGVRLTEPITLGAWQHGH

SEQ ID NO: 55626 - protein, 387 aa, unknown
  TnpB Polypeptide
MLKGIKIRIYPDKEQEKLLLSYCKDYHNMKNFLVAKFKDNLPNVGNNNIIGYKDRDLLQEYESTYNCKTELLMRSVRGAIVDYVSGVTRFYQKLSSRSPKFHKYDPNKQSFYIVDGRYLVKDYSIRMPIRIELAQKYKSTISRKIPIDKKYVTKENLTYIKNIRFHYQKGKWYVSGCYDVPDVTINQNKEFLGLDWGIKNFMTTSESTLINYPKEIVREYYRIRKLSHYLDKKVRNSNNYKKLKKKFDKAYKRMNGLKRNFIHQETTKLARQYHIVIEDISFQDISKDKQGKKRKFIRRMSVLAPKYMFEEQLEWKCKKFGSHFIKVNPRNTSKTCSVCGQIHDMKLNDRMMICSCGNKMDRDINAAINIKNAGMNKILAEGICCTR

SEQ ID NO: 55627 - protein, 373 aa, unknown
  TnpB Polypeptide
VVIQVEYAYRFRIYPSRQQETLILRTFGCVRYVYNYYLNQRVQAYKSTGKSPTRFEQDKDLTNLKKHDDTAWLREVDKCALQNSLKHLDNAYQNFFRGVRSGTPVGFPRFKSKRNRHQSYQTNSNIKVFDNCVQLPKLGKVKCRISKEVKGRILSATISRSPSGKYFVSLCCTDVEIDPLPSTGAAIGLDMGIKSFAVTSDGIEYPNHKHLSKSEKKLARLQRQLSRKTKGSNRWEKTRLQVARLHEHVANQRRDMLHKLSTDLVRQNDIICIEDLAPKNMVKNRKLSKSISDASWGEFRRQLEYKAAWYGKQVVTIDRFYPSSQLCSVCGAQWHGTKDLAVREWICPACGIVHDRDINAAENILNEGLRLVV

SEQ ID NO: 55628 - protein, 255 aa, Moorea sp.
MIVLEFKAIGKQKQYLAIEEAIRTAKFVRNSCIRYWMDNKGVGKLDLNKYCTVLAKQFPFANELNSMARQASAERAWSSIARFYENCKKKVPGKKGFPRFKKHFHSVEYKTSGWKLCSDKKSIIFSDKKGIGKLKIKGTWNLWRFDKKLIKRVRIVRRSDGYYVQFCIQIDINESVPATGTTIGLDVGLKDFYTDSNSNTVPNPRFYRKGEKRLKFYQRRVDRKKKGSANRKKAINKLGRTHLKISRQRVGEACA

SEQ ID NO: 55629 - protein, 308 aa, Enterobacter sp.
MIKKKAFKFLLEPSKSQISDVLVFAGACRFVYNKGLALLSENYNNGKPFLNYNKLAPLLVEWKNDNKLEWLKLCPSQCLQQSLRDLDRAFQNFFSGRSQYPRFKKKGRSDSFRVPCQRVRLDQEKGLVSLPKLGWVKYRKSRAITGDLKNVTVSRKFDKWYISFNTEEVVSNPVHPSVDKTRILLNDGYVTLCTGGDLSVKKFTSLVDEKKIKRLNKELSRKVKNSNNWLKNKKKIDKIRLKSGSFRLDAIHKITTTICKKHAVVEVVNVKNFVSDKNNIATSMRYELVRQLLYKQEWLGGKIIHLDA

SEQ ID NO: 55630 - protein, 384 aa, Escherichia sp.
  misc_feature (305)..(383): Xaa can be any naturally occurring amino acid
VKRLQAFKFQLRPGGQQEREMRRFAGACRFVFNRALARQNENHEAGNKYIPYGKMASWLVEWKNATETQWLKDSPSQPLQQSLKDLERAYKNFFQKRAAFPRFKKRGQNDAFRYPQGVKLDQENSRIFLPKLGWMRYRNSRQVTGVVKNVTVSQSCGKWYISIQTENEVSTPVHPSASMVGLDAGVAKLATLSDGTVFEPVNSFQKNQKKLARLQRQLSRKVKFSNNWQKQKRKIQRLHSCIANIRRDYLHKVTTTVSKNHAMIVIEDLKVSNMSKSAAGTVSQPGRNVRAKSGLNRSILDQGWXXXXXXXXXXXXXXXXXXXXXXXXXXXXXXXXXXXXXXXXXXXXXXXXXXXXXXXXXXXXXXXXXXXXXXXXXXXXXXXV

SEQ ID NO: 55631 - protein, 370 aa, Crocosphaera sp.
MRQSFFNTGKVLTNSKLYHAVSSSDAYKLMPSTKIACSLIRQVCQVWKGYFQAHEDWNINPHKYLGEPKIPKYKDKLKGRYSLIYKGSEAIYKKSLSKGICHLSQSNIKLKMYKAKKPVQARIVPKKDSYLVEIVYEVEEPLNQKPSNNIAGIDLGVDNLIALSCNVQGVKPLLINGKPLKSINRLYNKTRSRIQSKIGENKSSKRLNGITLKRNNQVDDYLHKASSIVVNYLKANQITTLVVGKNDNWKQKVKIGKRNNQNFVQIPHSRLIEMLDYKCQLAGINMVTVNEAYTSKCSALDLEPICKHNKYLGRRIKRGLFRTANKKVINSDINGSLNIIRMYSPETFTVEEIASCGVQPLKVNPLERVK

SEQ ID NO: 55632 - protein, 372 aa, Streptomyces sp.
MHDGAPPGRDLDAAYRNFFDGLKGKRPRMGAPRFKSRKDNRQGVRFTANARWKITPGGDLSLPKIGDVRVKWSRGLPSVPSTVTVIKDAAGRYFASFVVETEPVTSAESDRAVGIDLGLGHFAVLSDGTKIDAPRFLRRAEKKLKRAQQALSRKAKGSNNRNKARIKVARAHAQVADARREFHHQLSTRLIRDNQAVAVEDLAVKGLARTRLAKSVHDAGWSAFVTMLAYKAAKFGRGFHRIGRFEPTSQVCSRCGVKDGPKPLHIRVWECRACGAVLDRDINAAVNVAKAAGLAVSACRAQVRPVLVPAQRGEAGTHRDGQPTVAGIPDLRPGSGSQSTSLRYRSATSARTSAPSRAHRSGLKISTSIGPV

SEQ ID NO: 55633 - protein, 417 aa, unknown
  TnpB Polypeptide
MYLTLKQQVKHLTKEEYNILRELCRTAKNLTNQAIYNIRQYYFQEKKYLRYESNYHELKSCENYKLIDSNMAQQILKDVDSMFKSFFALIRLAKQGKYSFKHIRLPNYLPKNDYSCLIIGQIRVRRDGILSIPYSNEFKKKCGTRVRVKIPKVLGDKKIKEIRIIPKFSARFFEIQYTYEIQEEDIKLDTNNALAIDLGVNNLCTCVTNAGKSFIMDGRKLKSINQFFNKRISKLQSIKDKQNIKRQTKQQYLISNKRKNRVDDYINKACQYIINYCLSNDIGTLVVGYNQSFQNKTKLGKRNNQIFTQLPFGKIREKLEYLCKRYNINYILQEESYTSKASFFDNDELPVYNADNSQEYKFSGKRVRRGLYQTKDGYCFNADCNGALNILRKSRVVDLTILCCRGEVDTPKRIRVS

SEQ ID NO: 55634 - protein, 366 aa, unknown
  TnpB Polypeptide
LNKSFKVRIYPTKEQQVLLEKTFGANRFVYNYFLNLKSKLYEFYKISLSYNNSSKVLTELKKQKTWLKEVDSVSLQQTLRDLDNAYQNFFNSRGRYPNFKKKQDKNSYRTNGSTLRVDNSFITIPRVGLLRYKDTYKLEDSNILKIYNVTISRTSSGKYYASISSEVDIKYFEKTNQNVGIDLGLKDFAILSNGEKIDNPRILKHLEVKYRKLAKSLSIKVKGSANYQKAKLKLARFHEKVVNIRKDFLHKLSTNLVKTYDIICIENLNISGLLKNHKLSKSFQDVSFSEFIRMLEYKVKWYGKTISKVDRFYPSSQLCSNCGYKNSDVKNLNIREWTCPNCGVHHDRDINSAINILNEGLRLLGI

SEQ ID NO: 55635 - protein, 520 aa, unknown
  TnpB Polypeptide
MARKSPSKNVFVLTLPLQCEAWQRDRLDTIFQVGNDIKNNLIAYERKQYQNLISRKDWRANQAALSAAYEAEDAGRIKALCKRRNEMLTNAGFEQFQFEKQINKYRKHYRGKNGKGFLIPAHVAQKIAASVWGGYQKLLYGSGQQVRFSKWSEFSTITAKTNSAGIRYADGFVFFQGMQLHVLFDEKDPYGYQQEATSRAIRYCGIHRRWYAGGWKYFVQLTLDGLPPLKTRPDTGELLHPMGEGRVGHDIGTQTIASVGCNAVLLTELADKVRGIDAELWKLNRAMDRSRRATNPEMFNTGGSIVPKDKLPAECLNQRGGREWVKSKRYIALENQRRELYRRQREMRIQQHNELANLLLSFGSEHYIEEMRFRALAKQAKETKFNSKGRPVRKKRFGKSIFNKAPALFVKTIKRKVLNAGGSFQRVDTFSVKASQFNHLTETYTKKSLGKRWNTMPDGTKVQRDLYSAFLIQNVDASLKQVDVERCNQSYDSFRALHDIEIRRLSYLLTPNSMGVQHSA

SEQ ID NO: 55636 - protein, 405 aa, unknown
  TnpB Polypeptide
MSSITYKQPFKPDSLVFEMAKESGEIYTKAMNLNKKEHKSIPEINKIMQEYCKENTKYLQSQSSQASYQSFIINLKSYFKALKAFKKDPRKFSGKPRSPHKNKFMYKLTFKKSAIRRKDNELWLSTKKPNEPIKVKWAKHLPMPSWIIINYDRFEGWSINLVLEKEYKTLNLNPDNVMGIDLGVKRVATTFDTVTQETITYNGKELMSLIRLRNKIDGKVKSKKSTFKRNSRKYKGISRSKRKITRRIKNKEKDIVEKFSKEIVDNAINKNIGRIVIGDNSSTHQNTNTGKSNQKINQGVEQKLSKAVQRKFNRVGGTALAVPEPYTSRTCPHCGHIKPNSPMGRIYTCKKCGFVFDRDGVGSINITKENSENVSFDRRWWLDVVGGLTPPKGVRYSPGLSLDQS

SEQ ID NO: 55637 - protein, 407 aa, unknown
  TnpB Polypeptide
MGDFRILVNECLREMLATRVTSRMAVSRHARTRALETRVTGTIGLAAADVARSLASGHRRRLHQGIRCRVPFVRTPFVRVPAQSFHFDLDTGRLRISLRRGEWTSIVVPLSNHHRRVLIDPSHRVTQVHIGLRSVIFVYAKKVPKPYPPTSLVALDTNESSLDGVQVDPESANFVRLVFPELRELQFRHMGRRRYLGKKKAHDRRLSRWLLGQEGRRERNRIHSRLHALTRTLIDRLVATHSALALEDLSHLPRPRRKGMRGRKPALRSRSFRRRLSSWPRAELHRQLAYKAQDRGVPIRWVNPYLSSRTCPKCGEISERRRRVGTRFDCAKCGWSLDRQLNAGLNLGMTVLRTTAGLGGLRLDPDALPKDVVRPLYGSDECRPARVERTGREGKYFQDSPRGKSLE

SEQ ID NO: 55638 - protein, 436 aa, Nocardia sp.
LSDLSSNRSNGDPMLTGRKYMLQLTPEQAEFAETVGAICRSVWNTALQQRREYRRRGAWINYNEQAGQLADAKTEHEWLKGAPSHVLQQTIMDLDRACREHGTFRVRWRSARRWLPSFRFPDPKQITVERLGKRWGRVKLPKFGWIRLRWSRGVGGAVRSATMSWDGVGWYISFLVEDGRTTRDRHASTTAVGVDRGVRVAVAVSDATMWDREFCTPGEVARYRRLQQKLARQQKSSANRCKTIIAMRTIRRRERNRRADFCAWTANQLATRHSLVAIEDLRTRNMTASAKGTIEHPGIRVRQKAGLNRSILDKGWHAFERALMSVSRYTGTRVVKVPAAYTSQRCSACGSVDPGSRESQAVFRCTTCGHSEHADVNAAKNILADGLSVSACGDLAVGRSMKQEPGGNPRGTTTQPRPRQVGIPQLQPWERTSRTS

SEQ ID NO: 55639 - protein, 393 aa, unknown
  TnpB Polypeptide
MNAMIIAFKTQLFPNNKHRTYFQKACGVSRFAWNWGLDAWHKQYKIWEASDKTDKSLRPSGLMLKKQLNAVKKAEFPWMYEVTKYAAQQPFINLQRAWSDFFNKKTMNGRLVGKPKFKKKGKCVDSFYVGGDQVSVKGKYIKVPNLGWVRMAEPVKYGGKINSMTISRVADKWFVSFSIDVDVSFIPSKSQARCGVDLGISSLATLSSGDVRYWKTPKPLQNSLRKLARMQRRLAKKTKQSNSYKRLVKRIGRLHKRIADIRRNCLHQLTSYLIKNFAEVTIENLNVKGMLANGKLARHIADVGMYEFRRQMEYKSQWYATVLNIADRWFPSSKLCSDCGSKNTELTLSDRVYACTCGNNKCRDYNASINLEYYTERSSGIYAAGDDGSAPTV

SEQ ID NO: 55640 - protein, 427 aa, unknown
  TnpB Polypeptide
MYYAYKYRLNPSNVHREELDRHRDICRQLYNHALYRFNQIPEDAGTLNQRVRSIRDEIPSLKDWWDGLSDVYSTVLQTAVMRIEQNVKSLGGLKENGYGVGQLKWKPPREFRSFTYSQSGFKLDKKGGQTVLSLSKLADIPLRLHRPIPDNATLKQVTVKKEPTGEWFATFGVELDREPPELPENPEQCVGIDVGILTYAHDTDGTAVGSLDLSDERERLEREQRKLSRKQHGSKNWEKQRRKVAECHADLRRKRRDFLHKLSTYYAREYDLVAVEDLNVTGMMESPSNSRNTASAAWRTFLSLLEYKCEREGAHFVAVNPRGTTKECASCGVSTQKPLWVREHSCPACGFEADRDANAAIGCANLSSRIAARTCPQVVIGFGTRRASTSRSSATVVGIFSTFSLMTSSTSAFSPLRTKSDASVYRI

SEQ ID NO: 55641 - protein, 485 aa, Escherichia sp.
  misc_feature (69)..(69): Xaa can be any naturally occurring amino acid
  misc_feature (146)..(146): Xaa can be any naturally occurring amino acid
  misc_feature (195)..(195): Xaa can be any naturally occurring amino acid
  misc_feature (201)..(201): Xaa can be any naturally occurring amino acid
  misc_feature (215)..(215): Xaa can be any naturally occurring amino acid
  misc_feature (217)..(217): Xaa can be any naturally occurring amino acid
  misc_feature (220)..(220): Xaa can be any naturally occurring amino acid
  misc_feature (249)..(249): Xaa can be any naturally occurring amino acid
  misc_feature (266)..(266): Xaa can be any naturally occurring amino acid
  misc_feature (283)..(283): Xaa can be any naturally occurring amino acid
  misc_feature (348)..(348): Xaa can be any naturally occurring amino acid
  misc_feature (398)..(398): Xaa can be any naturally occurring amino acid
VKRLQAFKFQLRPSGQQECEMRRFAGACRFVFNRALALQNENHEAGNKYIPYGKMASWLVEWKNATETXEMRRFAGACRFVFNRALALQNENHEAGNKYIPYGKMASWLVEWKNATETQWLKDAPSQPLQQSLKDLERAYKNFFQXRAAFPRFKKRGQNDAFRYPQGVKLDQENSRIFLPKLGWMRYRNSRQVTXVVKNVXVSQSCGKWYISIQXEXEVXTPVHPSASMVGLDAGVAKLATLSDGTVFXPVNSFQKNQKTLARLQXQLSRKVKFSNNWQKQKXKIQRLHSRIANIRRDYLHKVTTTVSKNHAMIVIEDLKVSNMSKSAAGTVSQPGRNVRAKSGLNRXYLHKVTTTVSKNHAMIVIEDLKVSNMSKSAAGTVSQPGRNVRAKSGLNRXILDQGWYEMRRQLEYKQLWRGGQVLAAPPAYTSQRCACCGHTAKENRLSQSQFRCQVCGYTANADVNGARNILAVGHAVLACGEMVQ

SEQ ID NO: 55642 - protein, 291 aa, unknown
  TnpB Polypeptide
MSSFIWKRHIRIFFGIPRLDFQDSSQNIIPEIAIQRMWAMESKKIRLPKLKWIAMKKHREPAESLQLKSVTVSMEASGKYFASLLYEGYSCENQAAEPDYSTAKILGIDYAMQGMAVFSEKIEMEEAGFFRKNEKRLAREQRKLSRCVRGSHNYELQKKKVARCHEKIRNQRRDHLHKLSRKIADSYDAVAVEDIDMKAMGQCLHFGKSVQDNGYGLFREMLDYKLVWQGKKMVKVDRFFPSSKKCCKCGRIKKELRLSERVYHCECGNEMDRDRNAAINIREEARRMLTA

SEQ ID NO: 55643 - protein, 574 aa, Mycolicibacterium sp.
VRTGKRRQWRGVKPVAAPTGVAIETRLRTTCEDDRVLDAVADHLGALRRADLAAVSRPEPVDPALDADERRRVRRDRLNARKKQLTGQSSARWASAIIAGNDDQYRLARDAQYRHVVGLRAAIATIEARAVQPTADTLTVSQRKSRRKATGAKGYATQAERFQKLRRAQHLRAELAATERDRAAARVRVVEGGKRLATTRHHLDTAELTQAQWRSRWDAARWRIKANGSTDEPFGNLTITVTPAGQVSLRLPKPLEHWANAPRGRYVLSGVAVFSHRSEQWVQRITGGNSISYTLTRRAGRAGVYLTGSWAIPALPHWVGRDDIAAGGDVYAAGPVVGVDLNDGHLAVRRLDAHGNPIGAPGRIDIDLSGCSSRRDAQVRHAITQLLRYTRRHGINTIAVEDLNFADARATGRETMGRGKNGKRFRRTVSGIPTAVFRNRLAAMAAHAGIELLAVNPAYSSIWGGQHWQHPYPHVTRHQAAATVIGRRAQGFTARRRKGVTPQRPEDRSVRATNQTRPNSPTAITGSRHERGTRGTTSRRPTSTRTRLPRRATVTRHWPRTANFTRNGEKDVHG

SEQ ID NO: 55644 - protein, 504 aa, unknown
  TnpB Polypeptide
MHTVQLLLKASKYERHEIDRRFHALAHLHNVCVKHARKCMIRLQHDKRYAELRQLYNELVKKEKMSKEEKSQKKKLAKQLAACRTEQGLSKASLEHYLKVCGKQFSKLLSSQQVQAEADRVWCGVERCLFGNGKELHFKKLMDFDTIGGKSNKNGARFDLDAMYVNWLGLSLKCYLPKSENSLSYVWESLKGKISYCNIKRLMFSSGWRYYAEIVVSGAAPTRVSIGTSTMGIDPGVSTIAGVSEDACVLEELAPNAIQYEKKIQKISQRMDRSRRISNPNKYNEDGTINRSNRDPWKYSKNYVKMCRLLKSLYRKKHAYIVDSHRELCNKLITIARYFPVEKMHFQALQKKAKETRRQEKKTEVKQKDGTVKVIQKYKRKKRFGRSINRRAPARFLLELKRKAEAVGGVYAEVDTKEFKASQYNHVTDAYEKIPLSQREKEIGNRKVQRDLYSAFLIRNADLDFKHPDREKCEYEFEYFANLQDQLILKMKESGLSMRQCFGF

SEQ ID NO: 55645 - protein, 383 aa, unknown
  TnpB Polypeptide
MIKSCKIKLLPNQKQEQLLWEHVNTSRFVWNWGLAFEEGLFKNGEKHLSGYSLKKELVKLKQQEDFKWLNKVSSQTLSGIVLDLDIAYKRFFEKKCNKPKFKKKFKAKSKFPIRYDRMYFKNNCVNIEKIGKIKYQTDYALPQGIKCRFSNPRIKYENNKWILSFGIEFEKQEQELTNNSMGIDLGIKDLATISFGDKKIVFKNINKTKKVKKLKSKLKHLQRKVSRKYHTNNKKKVFDKNWHKSNSILKTEKQIKDIYGRLSNIRKNYTHHCTTELVKLYPCRIVMEDLNIIGMMKNKHLSKAILEQTLYEFKRQIKYKCEWNGIEFVQAGRFYPSSKTCSECGHIKKDLKLSDRIYKCNCCGFEIDRDYNASINLMNYSIV

SEQ ID NO: 55646 - protein, 305 aa, Coprococcus sp.
MQKGIKFRIYPNKEQQNIIHQTLGCCRLIYNKGLAMRNEAYEKGDKVGYSQTSAMLTGLKKSDDFAFLKVVDSIALQQSLRDLDRGFVNFFQKRASHPTFKSKHNRHQSYRTINQGDNIRIAGKYLKLPKLGYVKARQSMEIGKIHNVTIEHTPTGKYFAVLNVEFEPQPMPNKGGMIGIDVGIKEFYSDSNGNVVSNPKYLEKSMRKLMREQRKLSRKEKGSGNRNKQRVKVALVHEKITNQRKDFLQKQSTMLIRENQTICIEDLKVKNMMRNHKLAQHIGSVSWSKFFDMLIYKLFGMEMML

SEQ ID NO: 55647 - protein, 128 aa, Okeania sp.
MEVGCDANWGELVRQLEYKAEWYGRTLIKIDRYFPSSKRYSNCGHVVEKLPLNIREWDCPKCASHHDRDINASINILAVGLAVSRGAVRLATYCGATVRPEGSKSRRAGAILAQLLCQEAIESPYQRC

SEQ ID NO: 55648 - protein, 370 aa, Clostridium sp.
MKNQGGKRMLKAYKYRMYPNREQKLYFAKTFGCTRFIYNKMLADRIKSYEENKDLDIKQSKYPTPAQYKKEFEWLKEVDSLALANAQLNLDKAYKNFFRDKSIGFPKFKSKKSNYHSYTTNNQKGTIYIENSRIKIPKLKTMIKIKQHRQFNGLIKSCTISQIPSGKYYISILVDTENIQLPKIDKKVGIDVGLKEFAITSDGEFFGNPKWLRKSEKRLKKLQKNLSRKKKGSNNRRKARLKVAKLYEKIVNQRKDFLHKLSIKLIRENQSIVIEDLKVKNMQQNHKLAKAISEASWSEFRRILEYKSKWHGREIIVAPSNYASSQLCSECGYKNKEVKNLALREWICPNCGTHHDRDINASKNLLKLAI

SEQ ID NO: 55649 - protein, 389 aa, unknown
  TnpB Polypeptide
MEKTYKYRLYPSNKQINIFNNILNNCRYLYNSMLEYEKYIYEKDIRFANKIELNNLLPDIKIINPNLKSVHSQILQNVNDKVIKSFNGFFNRINNGNKAGYPRFKNINRYNSFTYPQSGFKFLNNKKLKLSKIGIVNINLHRIIKGNIKTLTIIRTSTNKWFACFSVHIDINPPKRESNKIIGLDLGLDKFAVLSDNSVIENPRFLKKSLERLRLKSRQLSKKEKGSSNRLKSRFKLAKLHEKVYNQRLDFLHKTTLKFVNEYNCIALEDLNPSSMKNKYLQFSINDVSWDRFRQLLTYKAEYAGCKLDFVNPKNTSKECSKCGNIQDMPLSKRTYNCSCGLSISRDFNSSLNILHHSLFHRHMAGTAIKACEEVSVETSVKQEATCLS

SEQ ID NO: 55650 - protein, 386 aa, unknown
  TnpB Polypeptide
MFQRAYNVRLYPNKKQEVLLCKTFGCCRKVYNCMLEARKKSYEETGTQCRSNPTDFYAEFPFLKEVDAQALTSEKINLQTAFKNFFDRKDDGVGFPQFKAKHRDKESYTSYTTNYNIRVEGRKLRLPKVGFVSFRNYEDIDWSAREIKHVTVTRSRAGKYYASILVEEAVPKALSSSETEIGIDLGLKEFCVTSDGEAVANPRFLKESGSRIADLQRAFSKKQKGSKRREALRLRIAREHEKVANRRKDFLDKLSTRLLRENQTVAVEDLDVREVAEGDHAKSEHDTAWRMFLNKLQYKAEWYGRTIVRVGRWFPSSQLCHRCNYRNMLTKDLNVRSWTCPQCGTSHDRDVNAAINILTEGKRLIAAGTAVKGAGNNDTQREAHRL

SEQ ID NO: 55651 - protein, 610 aa, unknown
  TnpB Polypeptide
VFFIGLWQETIYDGSFGVKHDNKIPNEPFLYDMSKHCWTLKDRYESQFSAAFYPILLSDTKRAEIIRRAEEIRLVRNEISEVFFSDMIGFQDMSKFDAFNFFNPTFNTRLSSHYLLKAIEDVWRAYQLRFDAIRKKIEFVKVEELVPSFYKINVNGHKKGDLKSIEVHTKKTELTKVLTWLARYGKDETVYWLESVIPTVQESKQKFYRTILGKIRKFGFDRLMRLALSRRTAVFAEYEKRGKITFESLTFSGRSRIKRPIVDARRNETGKFDYFIEISWDWYDQGYRGDNKNTLCMPFKYNKAYHRSLNRYCNGADTSYTMVIRGKDIHVVLARDGYRYKNDDEITEENTIGIDVNSKHNMFALSTGEFIPNDDTLIADLESELLKIDQKQKNYNNKFKEGEYHDAFKISKKDKARIESITLKLNESNKRTIVLLCQAFAVKGIKHIAMENLNGFQGSRLHADDSKGFNLGRLHRRTGLSSLKDEFIHIAPHYGLSVSLVQPEYTSKMCGHCGCIDDRNRQTQEKFCCVDCGHSENADIHSAKNIKFRLTSTVLRGNLLERARDSGYRYFQPKSLFMWQVRKCLEKCRCDGLFKRAIGNHERLAISTFE

SEQ ID NO: 55652 - protein, 224 aa, unknown
  TnpB Polypeptide
MEVEQAENAPGDKHATVDLGEIHLAAVTTNTGKAMIVTGRGIRSLKRQRTMQVRTITKKQSKCKKYSRRWKKLQRAKNKLSRRAERRIRNQRHQATRKVINFCIKRKVGTLFIGNPHGVRNHDRGRHQNQRMALWEYGRDIDYLTHKSKQAHIVCFTGSERGTSSQCPVCGHKHKPSNRRWNCKQCDFKGHRDLVGSVNMHKLAFGEQVKFPRSFTYLRPSSLG

SEQ ID NO: 55653 - protein, 398 aa, unknown
  TnpB Polypeptide
MLVYEMKLKGTESQYRRLDVAIRTGRFVRNSVIRAWLDGQVKSRNDAYKHCKVLSDNPEFPWVARLNSMARQAHAERAWASIERFYRNCRQKTPGKKRCDLAASQAARGSAPRKGFPKFKKYQVRASVEYKTSGWKLSEDRRYLTFSDKFEAGTFKLWGSRNLHFYQLQQIKRVRVIRRHDGYYAQFLIDYEREEKKELTGKQTGLDVGLNYFYTDCSGNQADNPRFLRKDERQLKKLQRRLSRTKKGSQNRKKARNRLGRAHLKVSRRRNDWVCKLAQHVIQSNDLVAIENLRIRNLVKNQHLAKSINDAAWYKFREWLEYFGRIYGVPVIAVEPANTSQNCSNCGEKVAKTLSTRTHKCPHCGYVADRDHNAAQNILKTALKQLATRNGTEMDLTD

SEQ ID NO: 55654 - protein, 569 aa, unknown
  TnpB Polypeptide
MTKRKSATAQKTAPKARGRRKSSDDAALSLRATRLTSTRGIANEGKLNEVLRVFDRACALKNAMSAFCHANLQALFVDAYAFQTHYKTFHSSDLNAWERQTLFQDLIKFYQTSLKRRFQSMALGVQTKMVIERYVRNTRTARAGDVKHFRIERRATPLTSALKYLLHVEDFARFDPNGIKNEAVRDNLARLKAGPHWTRLTALAAAKRARLIGKVKLIHFSTGSHRRHPKESDSRITFDATNGKYQHFYRFRIGTGAARRYIHLPLLFNARRCTPAMLRQDAVHVCYVRRGKFMAGMTYEAPVLSFKPEDQWLGLDANTKHNLFAASDGRAWSYDRLEVGRLIALLEKTLAGGTQTMSYRQKARWAKLCRQNEGRIQRLISELLDTFEAEGITDLCLEDLDVRNDMTFLEHQGLKVKYSRLLRLLRLSNLKTWMMRQAEKRGIRVHLTNPAYTSQECPHCHHADRANRTTQETFSCTNCGLTAPADTVAAYNTMERVRGVLGSRLHAHDAYGRATPKPMRRDVLKSLVINQPVSALTGLGGFTELSTPSMMTSRLSSRKNKPGQAGLSH

SEQ ID NO: 55655 - protein, 402 aa, Streptomyces sp.
VIRAYKFLLRPTVRQAVALGEMLRDHCSLYNGALQERRDAWRHASKTTVRYGEQSAQLKEIRAFDPERQGRWSFSSQQATLRRLDKAFAAFFRRVKTGQTPGHPRFKGVEHFDTVASPRDGDGCRWDSTPHDRHTRVRLQGVGHVRVHRHRAVQGRVKTISVKREGNRWYIVLSCGDVPAEPLPPTGAMAGIDMGVTHFLTTSDGAHVANPRFLGAMAAELADAQRHLATFPKRTRQRTKKHRAAARRVAKLHAKIRRQRLDFHHKAALTLVRGHDAIAHEHLNTAGMTRVPRPRPDPATPGAFLPNGSAAKAGLNRSILDAGWAQFLRILANKAESADRLLVPADARNTSRTCLACGHVAKENRATQAKFECVTCGFTANADHVGATNVLNRAGPALCDVA

SEQ ID NO: 55656 - protein, 378 aa, unknown
  TnpB Polypeptide
MTNKAIKYRLYPTDDQCAMFAKTFGCCRKVYNLMLEDKIESYKATGKFMAVTPAKYKTDYPFLKEVDSLALANVQLNLQSAFKSCFDKSRKKQNRFPRFKSFKHSRRAYTTNNQHGTVALTDNSIRLPKIGYVKAVIHRKPDSEWTLKSATISQESDGRYYASVLFEFDKPEITYVADKTNAIGLDYASDGLYVDSNGNTGTNHKYYRESHKKLAKAQKRLSRMKGSKKNEDKSSNYMKQLHKVNRIHRHIANQRLDNLHKLSTEIANQYDVVCAETLDMKAMSNKGFGNGKATMDNGYGMFLEMLAYKLSDRNKYLIKVDRWYPSSQICHCCGTLHPEMKDLTNRTMKCECGLTISRDQNAAINILHEGLRILSESN

SEQ ID NO: 55657 - protein, 297 aa, Lactobacillus sp.
VLKGIKLRLYPNQTQQDQLWQMFGNDRFVWNKMLVMMNERYQNNKELPFLSKFKLNYLLKPLKKEYPFLKNSDSSSLQVEAKPAEQFRQTGKQIGIDVGVADLATLSNGLKYLSFDGSYYEKKTVNWQKKYSRRRYLAQMLCLQDKQRKTLSPRSLDSFSNWKKAQRTKAVCQAKVAAQRKDYLHKLTTHLVKQYDVIVIEDLKVKNLQKNHHLAKSIANASWIMFRQMMEYKCQWYDKKLIAVDPKNTSRICSKCGYNSGEKPLDIREWSCPNCQTHHDRDINAAVNILNKAKPAL

SEQ ID NO: 55658 - protein, 373 aa, unknown
  TnpB Polypeptide
MLEYRIYPTKKQNTRLQETLDECRWLYNHLLQKRKETYEQTGTNLRLYQQHATFPILKAERPSLSTVHSQVLQNVAVHLDLAFKAFFRRVKAGEKPGYPRFRGKGRYDSLTFPQSGFKLDEQGKLYVSGIGHLKIVLHRPLTGTIKILTIRRSATSKWYACFSVEYEPERLPAHPSQVGIDVGLKTFATLSDATDIENPRFFRKEEKALGKVQRKHSKLAKGTPERRKHRKAVARVHERIAFKRENFTHQESRKIVNAYGFIAIEDLQVNRMVHQHGLAKSIHDASWSRFFAQVSYKAEEAGRIFVKVNPAYTSQTCSQCGHRQPMPLDLRIFACPCCHVHLDRDLNATRNIKALGLQSVGLSLEAPGLSRGE

SEQ ID NO: 55659 - protein, 525 aa, Calothrix sp.
VIKVLKAVKVRLYPTSEQEIALAKSFGCARWYWNYALNACIQHYEQTGKSLKLSVYKAYLPQLKVEHPWLKEDCYSAVLQCVAINLNKAYSNFFEGRAKFPKFKSKHHKQSIQYPQNVKVVGESLEIPKIGVVKAVLHRHIEGKVKTVTISKTPTDKYFASVLCEVEGESNQPTGDKTLGIDLGLKDFAIVHDGEEVTKHSNPKHLKRHEKNLARKQKKFARKVKGSNSRNKYRKLVAKVHERVSNSRQDFLHKLSRKLVDESQIIVVENLNVKGMVRNRKLSKSISDAGWGMFVNFLDYKLKAKDGQLVEIGRFFPSSKTCSCCGHVLDELTLDIREWDCPSCQTHHDRDGNAALNIRNQGVRILKNGGGNPVIAMPRRSKTNKPKGGKASVNEAGSLHALRQVSVGSSRTGPGTQAIALAERGFQVMGTDLSEAAIRQAAAKANQKGLQISFQQDDILNSHLEKSFDLILDRGCFHVLPPHSYDTYVQTVANLLQPKRYLLLKCFSQEETREQGPYRFTPEEI

SEQ ID NO: 55660 - protein, 390 aa, Calothrix sp.
VLKAVKVRLYPTSEQEIALAKSFGCARWYWNYALNACIQHYEQTGKSLKLSVYKAYLPQLKVEHPWLKEDCYSAVLQCVAINLNKAYSNFFEGRAKFPKFKSKHHKQSIQYPQNVKVVGESLEIPKIGVVKAVLHRHIEGKVKTVTISKTPTDKYFASVLCEVEGESNQPTGDKTLGIDLGLKDFAIVHDGEEVTKHSNPKHLKRHEKNLARKQKKFARKVKGSNSRNKYRKLVAKVHERVSNSRQDFLHKLSRKLVDESQIIVVENLNVKGMVRNRKLSKSISDAGWGMFVNFLDYKLKAKDGQLVEIGRFFPSSKTCSCCGHVLDELTLDIREWDCPSCQTHHDRDGNAALNIRNQGVRILKNGGGNPVIAMPRRSKTNKPKGGKASV

SEQ ID NO: 55661 - protein, 319 aa, Holophagaceae sp.
VEILKAFRVRLVLNEAQNDLAYRVAGSCRFLKNLALEQRSLVYRNSRRSVGFNAQCLDLTQLKKDLPWLNEAPSQVLQQALKDMGQAFQNFFDGFAEHPTFHKKGQRDSFRFPQGFEVVGKQARIYLPKFGWVAYRQGRGKAIRPFQGEIRSITMSREGDSWFASILCKQEAPEPRPIHGFAVGVDLGVKVPLALSTGEVLDIQGMTANEQVNLAKSQRVLARMVKFSKNWVKQKRKIAKLHQTVAHRRRDGINKATTYLAKNHRLVVVEDLRLKNMTKAPAAKPDPEQEGSFLPNGAAAKAGLNRVILDKALGEVLRQ

SEQ ID NO: 55662 - protein, 229 aa, Bacillus sp.
MNQDSSFRQAYEAREKILMDEAAKFAHARNEGKNERAGMKILGVDLGLKVPAVAITDDDKVRFFGNGRQNKYRKRKFRSVRKKLGKDKKVNAIRRFDDKEQRWMQDKDHKISREIIDFAIANHISYIRLEQLTNIRQTARTSRKNEKNLHAWSFYRLSRFIAYKATLVGIQVEYVNPAYTSQSCPKCAEKNKAQDRKYKCPCGFGTHRDIVGAMNIRYATVIDGNSQSA

SEQ ID NO: 55663 - protein, 323 aa, unknown
  TnpB Polypeptide
VILVNKAYRYRLYPTTEQKSIFAKTFGCARFIYNKMLGDRLDYYMKTGKKLNNTPAQYKDEFPWLREIDSLALANAQLNLNKAYNNFWNNRKHLGKPHFKSKKTGHFSYSTNNQKGSVRFEGNKVKLPKVSWVKLCLHRPLMENSTIKTVTISRTPSGKFYISILVEYENQILPIIPKKFLGLDFAMHGLYVASDEEDADYPKFLRKAEKKLAKAQRKLSKCKKDSKNREKQRKRVAVLHEHIANQRRDFLHKKAKFLADRYDAIGIENISVKAMAKRKKGKHFSFGKSVSDNGWSKFVNILKYKLAWQGKQLIKVDKWYPSS

SEQ ID NO: 55664 - protein, 440 aa, unknown
  TnpB Polypeptide
MAKPKKSIGVQQIVLNPNAETKALLEYLCQQAGKLYNNAVYFARQTFFKTGKLLTGKFDLAFEPTVAKSRVAKSLPSTPMQQTLMSVAETFKSYRELRNLYFKGGLEVKPKPPGYLKGSKLFKVAYPNSGGQKPVFINGQLRFSLGLTVKRWFGISEFFLPMPSNLDFNKIKEFTILPKNGAFYLELSYELPLQKQNFNQSIALSVDFGTADNLAACVDTLGNSFLIDSRSLKAMNQLWNKKVATRKEGKPEGYWDNWLDFVTRKRNHQMRDGVNKAAKLIINHCLKFGIGTLVVGWNEGFKLNANMGRLNNQKFVQIPLAKVRDRLQQLCSLHSIKFVVTEEAYTSQASFLDGDSLPQHGEKPEGWKASGKRIKRGLYRTAKGWLVSADLQASANILSKVASNLGIDLGLLGRRCLTTAARIRLWVLPKYTLSAESQCL

SEQ ID NO: 55665 - protein, 343 aa, unknown
  TnpB Polypeptide
MYLTIKVPIKASKEEKQILQAYSKCFRDEVERIASRYQTLKQVVFIPYKWISSSIAFHSKTQVLHYAKILYEEQKLDHKAIYHNSFSSMAKSLEISKNHITFHFGQHFKVSQLRLSMMLHKQQSERLLQGELVKADVKEIHNDFFAYLLISIPQTIHNTMQNTDRKMGVDIGMRCPAVCYTCDGVIRFIGNGREIRFHTRQINKRASEFIKRTKGSRKQIKHRLNDYKRYIDHCLSHDIVDFAVEQKIQVIYLERLYHLQHKFSKHEQVCWSYSRLQQYISYKAALAGIQIRYVNPRLTSKRCPSCGKINNVKGRSYRCRCGFHHHRDVVGAMNILHAPEILI

SEQ ID NO: 55666 - protein, 396 aa, unknown
  TnpB Polypeptide
VLKGVRIRIYPNKNQKHLISNTFGCCRLVYNKGLAMRKDAYEISKETIGYNETSSMLTALKKEDEFAFLKTVDSVALQQSLRDLDKAYQNFFRTKAGYPKFRSKKDPHNSYRTQNISNSICVTLDGKHIRLPKLGYVKAKVSHDLSYAKINNATVEYTPSNKYFVVLNVDIPVCNKVNAGGLVGIDLGIKDFYTDSNGYKCKNRKWISNSTKKLIKQQRKLSKMIESHIISYKVIGNRRFPIYDRPLSECKNIQKQRIKVARIHEHIANQRNDFLQKESTRLVSENQVIGLEDLAVRNMVRNNKLAKSISDVSWSKFVAMLEYKAPVYGTEIIKVPRYFASSQLCSCCGFQNSAVKNLEIRNWTCPKCKTNHDRDVNASKNILNKALEIRNQKIVV

SEQ ID NO: 55667 - protein, 329 aa, unknown
  TnpB Polypeptide
LKRLEERGQLSPHIKRVLPPRYMKDRSTRKLRAESIYVRNDGYKQQEDVLTLSKKLRIPFKSGDMWVGKQGRLELHYDRLRGKWYGHIPVKVKWPRKGEPHQSARVRASIDLGICNLATCVVEGGDRAYVYSGRAVLSDWRYWTKRIASYESTLKKTSQRDSSKQLSRLYRTRKRRLNHAIKTMLRDLYERLETHGVTDLIVGNLKHIRDNANHGKVGNQKLHNFWPFAQVRQRIQELGEEYNIHVRFKSERGTSKRCSICGKKHKNGRVKRGLYKCPDTDVRLNADVNGADNILYGLRRKVAADSGSRPMALPLLLKWNRQEWQVSAA

SEQ ID NO: 55668 - protein, 387 aa, unknown
  TnpB Polypeptide
MKYVRSSKCHYSKWLTSDKQSAIKELLEETHRVVSWAIDKHHLSIAHCGMEKKHLLLAHSLHECESWLTERAKKNCFAEAFSLVSGTKASADELKKEYTKPTHNPHRIMLSSTNATVNLDPRLKGFDVLVELNCFDSRVRVRQIAIPLKRNDVFNGWFEKGKLASSVILNDKYIQFSFEVVCEKKQIGTAVGFDPGAKILLTSDSGEKYGTDIWRLLEKLKRKKRCSRAWYACREEILEYIDKSCKEIPFEAIKYLVLEDNRKIKNKMKIRRKGKRLSKRNRSVLTGWAIGRIDHRCKLLSEENGVSFRRVPAWNNSRTCPDCGCCEEANRVSQEVFVCRKCGHIWHADVVGATNTLARFALGPYGAECKPEFMERHSGYYQLRATG

SEQ ID NO: 55669 - protein, 396 aa, Rhodococcus sp.
VSWSAYGLRKDWNHAKDEVAPWWGKNSKEAYSSGLANLATALANWSSSRSGKRKGPKVHFPRFKNKRTRLSCRFTTGAFGLVGADRRHVKLPRIGLVRTHESTRKLARRIEAGTARIRSATVTFRSGRWFVSFSVDVVRSDPAPTLSESVVGVDLGIKSLAVLSTGEVVQNPKHLEHALKKLRRLGRQASRRHGPDRRSGQQPSNRWRQTQARIARLHAYVANARQNGLHKLSTTLVCANTVVVVEDLNVAGMMRNRRLARHIAGAGMGEFRRQLKYKADRSGVRVHVADRWYPSSKTCSACGVVKAKLRLSERIFTCASCGIRIDRDLNAARNLAALVEASSPSCGATENEPDGNPCQTRTARATGTATGRPPREWRGSTSTPRGVDSGHVLHDS

SEQ ID NO: 55670 - protein, 355 aa, Streptomyces sp.
MLTDWKRTEEHGFLAEVSSVPLQQSLRHLQSAYSAFFDKRARHPRFKTKKRSKASAEYTRSAFRLHHGELILAKMREPLAIVWSRPLPAGAEPSTVTVSQDRAGRWFVSLLVEDDIAAVPAVTSAVGIDAGLTSLVTLSTGEKITNPRHERNDRARLTRAQRDLSRKQQGSKNHEKARVHVARVLARITDRRRDFLHKLTTRLVHENQVIVIEDLNVRDLLGNHTLARAISDASWAELRSMLEYKCSWYGRELIAVDRFFPSSKTCSACGLIREKLPLNVREWTCEGCGARHDRDVNAAETLLAAGLAVSACGAGVRPQRSSSGRAVGSEAGIVMARAVASPPPGTPRGGVEVNR

SEQ ID NO: 55671 - protein, 390 aa, Syntrophomonadaceae sp.
VIRTFKYRLYPHARQSKKLNYLLDLSRNVYNAALEQRRDIYEETGAGLAYTQQSKHFGEMRRDDPDGLGLLNFSCMQHTLRKLDKAFRAFFRRVKVGETPGYPRFKGRNRFHSFEFTYGDGCKLRFDDQERALLYVQNVGEIKIKYHRPIPSDAKMKHVVIKRSVGKWYVCFQIELSDIGLIERETSEMGIDVGLHSLLAFSDGELVDNPRWLRSSLSELRRKQRRLARRKKGSHRRRKAALQVAKQHEHIANQRRDFWHKVTRELAETHTLMAIEDLTLSFMTHNHHIALSAHDAGLGLFRQLLESKAEEAGSQVVAVNPAHTSQRCSGCGKIVRKDLSIRTHHCPHCDLVLDRDVNAAVNILHLARTGPSGRNVGGSNAERVPRSSPL

SEQ ID NO: 55672 - protein, 260 aa, Euryarchaeota sp.
LDLRLPHSCPGQDYPCRSEGDAEDVRAGGGDRSRHKRRFVGRSRGFRGGHGPDGHTVRERSANPANSLSTTKEARDEKVSRPEGHASPVESGRRRERNRVRQRLHRISKRLVQFAENRKAAIVLEELTLHGAGGRSRRMNRRLSSWPRREIHRQIEYKAALAGVPVIKVNPAWTSKTCPVCGARRRDRVGKVFVCLMCDWEMDRQINAGMNILKTALASNEALARAVRFQPGALRHDVVSPLYDLFRRGMGAREEPSGVE

SEQ ID NO: 55673 - protein, 533 aa, unknown
  TnpB Polypeptide
VITISAKFKDRALEPVLARYAELFARLERLLFVALYVKAEPVAAAKRRFVAEHQITARQFNAVHNQLQARVEAWRAARERNVATTRNQIEKCALALTKLQRSVARHQKQRRLALLTARLRRLKTELAAKIPAICFGSRALFREQFDLEANGHASHAAWREQWRAKRAAGFFVLGSADETCGNQSCQYRDDQLHLRLPGALGGGTVAIPVAFAYRQADLLAALTPKVQEVQRGPRKGAAVERGDAVSYRFLRRDDRWYVYASFATATAPVVTDPQSGCVGVDLNPWGLAVTRIDRSGNLADHFDVPWQIEDRDQDQVRAAIGDAVRVVARYALAHGVPVAIERLDFAEAKKQGRGAAGNRMLSAFAYAAFAAIMQGRCAREGIGLLPVNPAFTSVIGRGKFAEGYGLSVHRAAAAVIARRALNFGEKLRTRSAGTARVLPARNRTRHVWHNWRLWAKARQPRRRSSTQPKGSRGLQPPTGRSARFDPVSPNGRSGRADPVMPSQGATSNCGATPQASRESCSRGVIDHVWLPTV

SEQ ID NO: 55674 - protein, 393 aa, unknown
  TnpB Polypeptide
MQTAYKFRLYPTKEQEQKLQWTLNKCRYIYNFLLNELNQQKIIDKVQLQEMIVDLKRIEPELQDVHSKVLQYENYRLFSNLRALSQTKKKGRKAGSLRFKGKNWFKTFSYNQSGFAIMQNHTRYDKLWLSKIGEIPFIMHRNIEGKIKQITVKHYPSGKWYASIIAETKDEIPKVINQKKVGIDLGTMNYAYDSDGNHFDNPKHLDKFLEKLQKKQRRLSKKKKGSKNRQKQKIRVARIHEKIADQRNDFLHKLSHYYTNNYGYIAVENLKVRNMIRNHHLAKSISDASWSRFIQMLCYKAERAGCTVVKVEPRETTQKCSNCGKKVHKELWNRIHNCSCGLEIDRDYNSAMNILKRALLSERQESTPVEIEPLLSNEQVWSKKQEAPCNSWE

SEQ ID NO: 55675 - protein, 543 aa, Bacillus sp.
MAKAKTPSFIIDVELKGRNRDFLMIESELEVNRVIYNTSLGEYLKREKQMKRTKRYKKLVRITRAIKSHLAKNSNKEKMKYYQNEQKNLSEEFKKLREEFGLTEYSMHEYIKEVRNHFNGKTNSIIAQKTATRAWNTIKKKLFGKAKKVVFVKRGEMDSFEGKNNNTGWRFKEGKVISNDRVFALNVKEKDMYLKEAFHLLNSKHTFQYKNKDGENVTDYYRVKYVRILKRIVRGIVRYYAQLVCSGYPPVKRDRKTGQVKYPFGKGPVGIDIGTSSIAVSGTTRVLLKNLAENLKKVNHVQREIRLYNRKLDRSKRATNPLNFDEAGRVRKGKKRWEFSKNYKKLKAQLKELYRKLALYRKFSHQYEANRMVMLGDTFYIEEMNFKALQKRTKKTEVSEKTGKYKKKKRFGKTISRRSPAAFVSILSKKVIALGGTFIKVKTSSFKASQYDHKADKCKKKELKERWHIFNDGTKVQRDLYSAFLLMNSDLLGLKSDRISCLNTFEQFLKYHKEEINKIENENEVILNSGIKLKLKKTEECAA

SEQ ID NO: 55676 - protein, 391 aa, Bacillus sp.
MIVNKAYKFRIYPNKKQIELINKTIGCVRFTFNFFLGKQKVKDAYWYIVEEMVQNGQLLANNWKGKYLNKYETVKAIPELKKQYSFLKEVDSIALQKSVENLADSFERYYKKQNKYPRFKSKRNPVQSYTTKHTNGNIAIEGNYIKLPKLGLVPFAKSREVEGKILNATIRRNPSGKYFISIGAEVEVLELPNTNSVIGVDVGLKDFAILSDGTIFSNPKFFRTLEEKLAKLQRIMSRRTVGGSNWYKAKRKVACIHEKITNSRNDYLHKISTDIVKNHDIIGMEDLSVSNMLKNHNLAKAIGEVSWSVFKTMIEYKAKWYGKQVMTVAKNFPSSQLCSCCGYQNKDVKNLGLREWECPKCHTHHNRDINAGINLKNEALRLLTVGATGIA

SEQ ID NO: 55677 - protein, 286 aa, unknown
  TnpB Polypeptide
MIKVFKFRLYPTTTQAIQLNQHIGSCRFVYNWALDQKIKTYEQTGKSISRFDLNKLIPVLKTSNEWLGEVNSQSLQGMTKQVESAFTRFFREKNGFPKFKSKKNPIQSFPVPQHYSVNFENNTVKLPKIGEIKAVLHRKFDGELKTATVSRTCKGNYYISILVEDGKELPAKQHFSESTTIGIDVGITDFAIFSTGKKIENPKYLKNSLQRLRVLQKRVSRKQKGSKNRAKARQRLAVLHDKITNQRNDFQSKLSFRLVSENQAVALETLNVKGMQKKSLFSSVYK

SEQ ID NO: 55678 - protein, 389 aa, Ardenticatenales sp.
MQVRKTFKFKLYRTKKNRYLARALGLAAEIWNHCIALHRRYYRLTGRYLSAHDLKVHLTRLKKRPRYAHWSLLGSQAIQDVVERIDRAYRLFFKLRKAGRRASPPGFKKRHKYRSFTLKQAGWQLLGGNRIRIGQHIYKFAKSREIIGTIKTVTIKRDAVGDWWLFFSVEQEVVLPKGVTTGQMAGFDFGLKQFLTPSEEDPIDSPLFFKQGQKQIAKLNRELARKRPGSTHREQARRRLAAAHRTIADQRRAWFFELAHDLTDQYDYLFFETLNLKGMQKLWGRKVSDLAFGEFLDILRHVAQGKGKVVHQIDRFFPSTKRCGQCKTDNPYLTLADRYWRCPVCGTPHDRERNAAQNIFREGASSLGLGGVRPSHDGSLCLSPESTGF

SEQ ID NO: 55679 - protein, 554 aa, unknown
  TnpB Polypeptide
MDFIPAKNKTEAAVCQYFKTNTTDFKCMYNTANFYIRNTMTGLKKSPEERTHLETEVLHYVFTGIQKANEDIGPKQMARILRDRRSAKAGGMQCAVRAYKLTLQEPFRYPTREKWFLSYGVLDAIFKFTDNPVYKRMNSHVNQNAIRKVVSAWTGYFELQKKYREDPLHNDKPKIPGYLKNTESTAWFSSQTAKLQEEDGKYWLRFVNLKERVCIGSTSLYEGMKYVKTEIKPVYGYYRILVTFDDRVKEKEPPESPKRILGLDPGMGNFLAVANNFGGVPFVIRGGAIKSANQRFNKKRAALISSLTKGKDSTKSVKNSEQLRTLSRKRENFLRDYFYKCAWYICRYAQAAGVEVIVMGHNKGQKHGISLLDSTNQNFVSIPFTKFITALTSVAAKCGIAVVLTEESYTSQSSLLDMDEIPVYSKGNTGGYTFSGRRVKRGLYRSGDGILINADINGAGNIIRKEYPDAFAGLKDLSYLYTTTMSIGYKDLYKEAKAPKKRPCRFHKEGRSSRVRYRERKELRTYYRKFWGDTKYIWKPEEKTGQEGSEDKAV

SEQ ID NO: 55680 - protein, 388 aa, Clostridiales sp.
VDFLIHVCLNEWDHLSAINGNLLQQQYVERLCHETAKNQDPKYRSFDKKFYKFPSYLRRGAIHEGIGKVSSYKSGLTNWESVDTKTRGKKPSYPRVGYGYPCMYKTVMYEQTDRYEARMKVFLRNTWDWITVELRRSDMDYIYRHCKTRKQCAPTLQKRGEEWFLDFPFEEKVTLTNTDVSNQKIVAVDLGINTAATVSVMRSDGTILGRYFCKLPKETDHLTHSINRIKKAQQHGNRNIPRLWAKAKGVNDDIAVKTASFLIDIAVLHNADVIVFEHLDRRGRKRGSKKQKLHMWRSQYVQSMVEHKAHRLGMRISRICAWGTSRLAFDGSGSVLRGKETDLGSYSVCRFQSGKVYTTFISWWCPQSEHESFIRIFNNRGKLYDKFI

SEQ ID NO: 55681 - protein, 177 aa, Clostridiales sp.
VYHIRRKKIQKSKDDKKYEKKLRKLQRQLAHKEKRSNNYYKKKKQIALCHEKITNTRKDYLHKISHEMISENQVIVSENLQIKKMVKNHHLAKSITDVSWYELTRQLEYKAEWNKRKYIKIDTFYASSQICSACGYQNTETKNLSVREWTCPACGVKHDRDMNAAKNILAEGLRKIA

SEQ ID NO: 55682 - protein, 402 aa, Microcoleus sp.
MKTSYQYRLYPSTKQKLSLNQGLRVCRYWYNRMLGERLDWWEYNRSAVNSCPLICHLRELKERPNYYNQKNQLPAIKKDLVLVKWSGELLDFSDIYSTILQDVCKRVDKAFERYIKGDKKGKRSGKPRFKSESRYRTMVFDGAKNEWLKFCTVNGRWLYLRLPKIGLVDVYIATSEGESIPSLKPLRKNLDKLGKLQTKRNAKKKGSRRRRKLAKREARFHQRIARSRQDFQYKSAHKLVRTGKKVFFCEDLNLKGLTKRNAPKQDDDGKYLPNGQSAKSGLNKSWLDAAFGQFFSTLSYIAEKAGAVVVEKNPAYTSQILCYRDEFVFIDCSIREYWDEQLQIWVDRDINAAINLKRVGLDVFPTLKCRKGNPVVVSSATNSTLKEVLTALFKASVAHAVR

SEQ ID NO: 55683 - protein, 404 aa, Microcoleus sp.
MKQVLTIVVKLQPSPEQVAFLEATLQAFADACNYVNENTNPKLTNKIAIQSLVYQTIKKKFNLVANMAVRACARVAANRKVAKQKGKPVKRFAPSSMDCDKDLFRFREQDWTVSLATVHGRERIELKSGNYQRGKLKGRNPTSAQLCKHRDGQFYLHIQIKDEAPDSSVKDLVIGIDLGRRDIAVTSEGKKWDGLHIQSVRDKFYKVRASLQKKASKGTRTTRRRCREILKRLSGRERRYQQWLNHNISKSVVRRAVEYSASIAIEDLTGIRERTNEQPRSKTERRRSNSWAFYQLRMFIEYKAIGAGVRVVPIPPAYTSQMCHNCLHIHPVKGKSYRSGKTFKCGHCGWHGDADFNGANNIALVGLSINQPGGTGLSCKLSRTIEYVQRSTERSRRSLSLFDD

SEQ ID NO: 55684 - protein, 347 aa, Microcoleus sp.
MVMDMAPSWVSQTPYNPRQLAVFQAFEAHKAARKSGGDAQFRSVREPVKSIRFQKDNWKKGAFYPTQTKGLSFKASEPIIDKMHHEPALVLDRGRWFICYAIDAPKPEPLDSQLAIALDPGVRTFLTGFDGSEVWEVGKYDIGRIYRLASHLDRLMSRIGLSKGRQFKHLRYRLRKAAQKIRIKIRNLVDELHKKAANYLCTKYKIIFLPTFEVKNMIKRGKRRLSTKTARKLVTWSHYRFKISLKHQAAKYGCVVVDVTEEYTSKTCSKCGHVHTKLGGNKRFVCPSCGHTIGRDINGAFNILLKALRDTSTSGVIASFQIVPYSETSGAIPDFSGLNVSDNTCKG

SEQ ID NO: 55685 - protein, 389 aa, unknown
  TnpB Polypeptide
MPQQILTIVCQLNPTAEQIVKLDQVLQSFAEACRYINRTICPSMTNKNRIQKEVYRAVRQQFGLTANLTVRACARVAANRKVGKVKEFRATSVDYDARIFDYREKDQSVSLSTLDGRERIPLVVGDYQIEKLKGKKPTSATLCKRKDGKFYLHIQVKEEVAEPQTGKGVLGVDLGRTDIAHTSEGDHWGGEQLNRRRDHYSKLRAVLQQKASRGTRSSRRRCRGLVKRLSGRERRFQLWVNHCISKAIVSRAKATNSAIALEDLTGIRERIHRQPRSKTERRRSNSWAFYQLRQFLEYKAIRAGVRVWVVPAAYTSQTCHKCLHIHPDPAQSYRNGKHFRCGHCGWEGDADFNGANVIALLGAAVNQPGGSGLFCSLAEHNRLRATEIP

SEQ ID NO: 55686 - protein, 371 aa, unknown
  TnpB Polypeptide
MQRTIAIKLDTTPNQDAALARLAAAFAHGCTIAAGIAAEHRCTNRVQLHHRAYYPVREQTRLGAQMACNAMRAVASAYKTLKSNKQLPAHGPFSAIEFRRDGAVHFDKRTYAIQGEQFSLYTLDGRIHVPMRTGRFQREYLDRGTPREAKLVHKKGAWYFHLVLALEPGPARGTGVLAIDLGENNIAATHTGRVFGGGQLRDDRDRFLALRRRLQRNGSASAKQRLREASGRERRHMTHVNHEVSRAIVAEALACGAGVIAMERLTHIRQRIRSGKRVRTRLHRWAWAQLQRFVEYKAEAEGLVVAFVNPAYSSRTCAHCGQLAKRQRDTLSCTCGNRAHADVNAASNLAWLAGTAVSARGAVSRPDVAVA

SEQ ID NO: 55687 - protein, 326 aa, Okeania sp.
LKARYKYRIYPNQIQITKLNQLFGCCRYVWNQSLAHCNQLYASGEKKPSYINLTKQFITQAKRELLWLKEVASTPLQQSLKDLDQAYKNFFNRCTGKRKGIKVKPPKFKKCKSKQTARFVGANYKVGQDKIYLPKVGKIKIVWSRKLPKEPTSLTIIRDSANRYFASFVVETNSESLPKTDNSIGIDLGISTFATLSNEEKILAPKPLKNNLKKLGKFQRKFAKTQPGSKRRERRRLKIAKLHAKVKDIRTDFLHKLSTDLIRKYDVIVLEDLNTSGMVKNRKLAKAISDLGWRQFRTLTEAKCEKYGREFRVIDRWEPTSQKCSC

SEQ ID NO: 55688 - protein, 619 aa, unknown
  TnpB Polypeptide
MLLETDCDLDELRLIDQKRIESLALENDVPAYVTTVRLLEDVEENTSLKLDRVLRAFGRQVALFTGLFSSREWRRHCDGNGYRTLRDRLVGPVSEYLKAHPQNTKTAGDKSPDTSKVDSFEVEIPGKEPGKPVRIRIFGLPARLWKLALQQAGITVANDWRLAQQRAKERIEKTDWFRKLNEAERHYVYLLLFKLNDDFFDLMDGRTPTFKWHSTFNMKKVRHASGLCVAVRRAVRAEKTQTIRHAERRSVWFDCSCYTVKTEKGKQIVELMTLEKGKRAKIVLRGKKKISGTIKLVKTSTSWTLHTLAKPKLKLLPQTIKEQNGKLVCVAMDMGFTEVYTLDDGSQYGEGFGKAIREEAELLARALEKRSRLLALANNTQDKKKRRHILTCNLGSKKIDRAIARHKLKIRNIVNRALNRIFEEHPAHAYIVEELGRRFELQGFTKATNRALSSWIRGFIEERLCFKAAIHGMKIVKVPSAYGSQRCPYCGCVHSDSRKGDRFKCVDCGREAHADKVACLNLLCRVRDCSFKARMPKEAVLALELKEYRAQCDRRGTEPVKYVPRQSRRPTKTKKSQQLSSLCKPNSASVCTRHAMLINKAERTSKTNHGNTCKTIWNI

SEQ ID NO: 55689 - protein, 209 aa, unknown
  TnpB Polypeptide
VEYRRTAVIKLDVPQDADASLRETVGQFKHCANTASEWCWHGSDDGYHVTSKAKAERALYDQLRDETNLTVNLVQKGVRRAVEAVKSGVARLKRGERTSQPYFSADSAVYDKRSATFYRDHVSLSTVNGRVKCDYTLPDDPDRHPRTYLEDEDYEFRMANLQRRDGEWFLHASMRKVEADDPEPDTEHRTVLGVDLGVNNIAVASTGTF

SEQ ID NO: 55690 - protein, 408 aa, Thermus sp.
MPLLTLKAQIHATPEVEAVLKEAMRSATKVYNGLLWHLREAYKGTGKVDLSRKNLNRILKELPRAKDYYSMSVQLTREEVREAYKAFFALRKEGKTNHQAPGFRRKGYLSPLRYVQSGYKVEGDRVTVSLGTGRKDGIRQVSFRITHRPGVRYERVRQLSIVYDKFSGRLEARLTVEVRANPRPGEGRVALDLGETILMAAAFDDGGALLYSGRGLKAVRRYWQKVRANLKRGSRRWREVAHRERAQVNDLLRQAASHFLRECVSRGVGEVVVGDLSGLREGLDYGEVLNQRLHAWPYRKLVEVLKYKGALMGIKVHEVEERKTSLTCHACGKASPSNRKHRGLYTCSCGWKAQADVNGALNIYERAFQVSPVKGSSGRVARPVVRSFRLGWHGVHEPKRKGSLLRAS

SEQ ID NO: 55691 - protein, 403 aa, Snowella sp.
MKVRYRYRVYPTDPQKIALSQLFGCVRVVYNDALAYCLQQYQNGGKKPKESELQKMFITQAKRSENRYWLADASNIPLQQSVRDLGQAYQNFFDSCSGKRKGKKLAPPKFKKRSANQSARFRVGGFKVHPDNVYLAKIGKLEIEWSRPLPPDPSSVTAIKDASGRYFLSFVVEINPEKLPDNGQSVGIDLGIIDFATLSTGEKIKSPKPLKKHLKKLKRLQRKLSRKQKGSKRREVARKRVAKLHAKIKDTRTDFLHKLSTKIIRENQTIVLEDLAVSNMVKNRKLSRAISDLGWRSFRTMLEAKAEMYGRDFRVISRWEPTSQKCSCCEFKGGKKELKIREWTCLNCNTIHDRDINAAINIKVAGGLSETKNGHGGRRKSSLLVASDEVSTRLLSIQLSLFG

SEQ ID NO: 55692 - protein, 384 aa, unknown
  TnpB Polypeptide
MEDFRLAVNNAIRFGVQTGATSRNALSKLAYKDFRKEHPNMYAQHLVSAFEVAGSILKNHRRRLRKGLPAQVPFVRRLFMKVENQAYRLDRGNGILDLPIRAGCRIKLTLVMSEYHRKYLDNESYSLGSLTLLPDRVVVTIRKHAPKPYAPVSVLSLDTNERSLDGVLAKEDMIVAVVRAEFPDVSIIQSVHHERRRKLQKKKSHDRRTARKLCAREGVREHHRVDYRMHEVANAVLSFAEERRSMIVLEDLGEIRPQMCKRMNRRISMWPRRKLHQIIEYKAAWQGIPVMKVDPRYSSRKCPVCGRIQDSRKGTEFVCGCGWHMDRHINASINLLQTAASEKAAGGLWFSPGAFQHDVVMVLCGPGKAVRPEPNGTSGMRAMT

SEQ ID NO: 55693 - protein, 505 aa, unknown
  TnpB Polypeptide
MIVKRVLLIRLSSKYRSKVRSFVYDLAQFQNLLRIFILEWDKKTYDIFRLFNPSLLYSLLADRVYSNKSEWQRKELEEVKEIIEKNEELKGWIEKLKEQKKRVGQADVCAQVIIQEVRNLKSWARILKEYKANSEKFRGRPGLPKPRKLRGLTRFTVVVPYVRVGRKLWLKLRNGEKPLEVLLPEGFDFKVKEVRLVYDMDWIEAQVVYEKEISVCSVGVYQAGIDIGLDNLFSIVSDNPELRSFIVSGKEIKSYNRWFNKKRAEIQSHMDRILNMIKEEKDEEKRKVLEKHYLRLKMYLWNLYKARDRKLNSWIHQITRRLADLLYETGHRVVYVGKNAIDKDGINLGKRINEQYVGIPHRRFIDVLKYKCEELGMEVVEVDERYTSKASPISDDIVSIQSKKKNGEEVEFSGKRVSRGLYKDLKLNKVFNADLVGAVNIMKAGAKLRRLLFDLKTLFVKLCNPVKFKLWDFIFNLKSNPKSLLINIGIGASKPSFRQEALAPM

SEQ ID NO: 55694 - protein, 452 aa, unknown
  TnpB Polypeptide
MIQRVERHIIRKSDKNWQACHKLCSLSRKLGNCAVYLLRHRHFEKQLVFSRKELDVALKLQYVSDYRAMPSAASAQRQGQVVAKQFKAFTKATSEYYKHPEKFRGKPELPGYKRKYRTFYVGRNGYQIQNYQLIITGGEAIGFSPMRVLCCQQQAFNAKANEAVVGDLRIVPMGNTFIVELTYRVRREEKDLSKCVSLDSNEALFCDLGIDNFATFVSTKPGVRPFLIKGKVLKSLNQNYNKQVAELRSKGHRAHIRTKGVKRYWRLHDLLHKASRLVINYCLAYDVGHIVIGVNQEWKQEVNLGKRNNQNFVMLPHGKFVEMIRYKAEDYGIRVTVREESYTSKASALDFDEMPTFDKKESGAKPVFSGRRIKRGLYRSAKGQLINADINAAANIGRKELGDEWLKKLLELDGGVLVDTPAVVRNLHTSKNIRQWLELGTRSQETAHVSGR

SEQ ID NO: 55695 - protein, 542 aa, Actinosporangium sp.
LRVTAEEAEVLRLVGEHLGRHQRADLAERVRIGKVKKKDTGRAGRKKALTAVSSSRWAGAMTRVSEDQYQLSMRCLFDERGSLCRAIAVISRRLRVPCGQRAGRVSGYATQAERFQKQRRMASLTARLVLVEERIEAGRPAIVVGGRRLAKVRVHLETAQLTEAQWRQRWDAERLFLTADGETGAPHGNYTIAVHPDTGELSLVLPEPLRHLANAPRGRYRFGCMVRFSHRQGEWLDRVTANRAVRYDITYDPERGRWYIDASWSTDTTQMPRPQEFAARAERTLGVDLNADHLAAYVLDAHGNPVGEPITIPLDLTGPASQRDGHLRAAITQLIAAARGQGCAGIVIENLGFADSRATGRETMGRGARGKTFRRTVAGIPTARFRERLRGMAFHAGLVVIAVDPAYTSIWGERYWKSPLQQQATTTAIVTRHHSAAVTIGRRGLGHRARRRPGVTATRQRMSARRATGQTVTIPRLRGTVRPPRTAGASSMDGKTRLCQGDQLALFSGPQDRSGGHRAISSDCAKSADNGRFAQERYPPVG

SEQ ID NO: 55696 - protein, 389 aa, unknown
  TnpB Polypeptide
VLAFKAVQQHYVPDNSILGLLEHFRQMINDCVRIGVTEDLTSLKALSLRAYSLLTGFDAMSYYKLCAISAATGILRNYRKAKRKNPQTKEPYARKLRLTTCYGIKIRDGSLLLPFRPRELIRIPLTPHVQATIKRRTVRSVTLTRDRLSLSIARQAVEIKPRGFIGIERNLDNVTLADTDGSIVKHDLAEATRAKAVYCDVRSHMRRNDVRIRHEVSRKYGCKQREKVKQILHHASKMIVQQAKEQQFGLVMERLTNIRRTYRRGNQQGRWYRGRMNSWSYGELQRQIEYKARWNGIPVIYVNPYGTSAKCSTCGHRMKPEENRTLKCSSCRCTVDRDVNAARNILARGVRFAPIALPTEAMVQEPIACGNPESRWERVNKLKPHEPTS

SEQ ID NO: 55697 - protein, 284 aa, Okeania sp.
MKSIRTKLKLNNKQKTLMAQHAGYSRWCYNWGLSLWNAAYSAGYKPNIRKLREVFTNHTKPLYPWMKNLSSRVYQYAFPSECFANINLGEAFKRFFQGLGKHPRFKKKGKSDSFTIDNCGKPIELNGWNHKLPFIGMVKTYEPIEATTKKITISRQAGSWYLSCSYEFTPTSTPKTTEVVGVDLGVKTLATLSTGVVFPGAKSYNKFESKLSKLQYLNRNKKIGSANWKAAQLKQAKLHTKVANIRKDVLHKLTTYLAKNHSVVAIEDLNVSGMLANHKLAKII

SEQ ID NO: 55698 - protein, 430 aa, Campylobacter sp.
MSANNNELISISHKVELKPNNKAKTHFKKAFGCARLAYNWGLAKWQEYYKQGIKKSHLELKKEFNAIKKEQFPFTYEVSKYATQQPFLNLNLAFQKFFRDLKQGKVSYPKFKKKRDNFGSYYIGGDQAIIKDEKYLKVPNLGLVKMKEKLRFNGKINSFTISQSADKFFVSFSMQISKDEYLKTHNKAKNNNLALGIDVGLKSFLSLSNGLEIKAPKPLAKLNRLMIKRARQLSKKQHAKTKQEALQGIKKSSNYLKASIKLNKLHRKIKNIRSDFLHKLTSSLTANVKYFCLEDLNVKGMMSNHRLAKSISDVSFYEFKRQLEYKSSYNDKEIYQVDRFYPSSKLCSNCGTIKENLTLKDRVYICDECGISIDRDYNASLNLLSQLQQKIGKVLAEFTPADLTALLNDLAINRIATSKVEAGIQQKSYL

SEQ ID NO: 55699 - protein, 399 aa, Marinospirillum sp.
MTVIIYSMIKATKVRIYPTPEQAEFLNRQFGAVRFAYNKALHIISSQYKRHGTKLNAKRDMKPLLVVAKKSRKYHWLKDFDSIALQQACINLDKAFQSFFDPKLASRYPRFKRKHGRQSSYHCMSVDCGDDWIKVPKLKQPIKARMHRKVDGKLKSITLSRTVTGEYYASLLHDDGQEAPAPIHDLDASLVFGLDMGLTHLAIDSSGDKTPNPRFLKKASANLRRKQKALSRCKKGSKGRAKARLKLAKAHQRLANARADFQHKLSRMIIDENQAVIVETLKVKNLLKNKKLSRHIADASWSGLIQKLEYKAKEQGKHLIKIDQWFASSKTCSCCGHKLEELSLKVRDWQCPACLVEHDRDINAAINIRAQGILKLKAAGLSVSANGGKRQSGHAPVAA

SEQ ID NO: 55700 - protein, 379 aa, unknown
  TnpB Polypeptide
MMRTASIKLEVTPAQSDALGALRSAYAGACNLLVPVVQEQRVWNRVALHQLAYTSLRERSPLGSQMCCNAIYSVCQAYRAQKERGCISPEAAIPLIHFKDGSVHYDKRTYTLKPDGTLSLYTLAGRITVAMRPGRHQRRILQGGIPREAELIRRNRKWFFNLVVESIDTPARASGPVLGVDIGELNLAATSTGRLFGGEALRHRRDQHQALRRRLQSNGSQSARQKLRQVSGKEARRVRNLNHEVSKAIIGEAQRIGASRIVLEDLTHIRERIRAGKHVRSRLHRWPFRQLQDFVEYKASALGIEVVYVDPAYTSQDCSACGERGKRRRHRFECGHCGLRAHSDLNASRNLARIGETAVSPRAAVNTPDVGCLPRQVAP

SEQ ID NO: 55701 - protein, 383 aa, unknown
  TnpB Polypeptide
MNPVVTTVKVKLLPSVEQRKILLQTMQQFNECCNYISKDCFYNSWYSRKKLHEQVYYDARNTFPELTSQMVIRAIGKVLDAYKTNPDELSQFNFYGAMVYDPRIATFQGLDSVKLTTTQGRLHVALDIPDNIKETLRNQKRAGEFDLLYNKSTDTFYIAFAVEHPSVEQLQVSGVLGIDVGIISIAYDSNGKKYSGAKINNLRKRYQKLRSKLQSKKTYSARKLIKKIGSREAKMCTDINHCISKEIVNTALRHSLAIALEDLTGMSKNREKKSKTANKAQRKRLGTWGFYQLRQFIEYKATKLGNPVVLVNPKYTSQTCSKCGHVSKENRKNQWKFVCKQCGFAANADYNASLVIQERGYSQLAVRDTTFLEITSPFLKTIS

SEQ ID NO: 55702 - protein, 410 aa, unknown
  TnpB Polypeptide
MEQTIRKAFKFRLNTTSEQSQKMIEFAGMNRFVWNKALSMNLSRLENKQSMLWYNELAFWLKLWKSSEEYGFLKQCHSQPLQQTLKNLEKAFKDGFDKKQPLKRIPRFKKKGTSDSFRYPQGVKVDQACNKVFLPKIGWVKYRNSRQVIGDVKNMTISRKGKHWYVSIQTEYEADIKRHKSTSMVGIDMGITRFVTLSDGSYVEPLNSFRKLSKKLAFEQRKLSKKVRFSANWKKQKQRISKIHETIAYARHDFLHKTSTQISKSHAMIVVEDLKVKNMSKSAKGNAEQPGKNVKAKSGLNKSILDQGWGMFVSLLQYKQAWSGGDVLRVNPQYTSQTCLSCSNVSKDNRKSQSKFECTECGFKANADLVGALNVLERGHRLLACGVETLVSSVKQEPVGSSNTNLLLTA

SEQ ID NO: 55703 - protein, 388 aa, unknown
  TnpB Polypeptide
MIIQKGFKYRIYPNSIQQGLLAIQFGHSRFIYNYFLQVKQDFYKETKKSLNYYDTASLLVELKKEKKWLKQAGSQVLQHSLKNLDIAYNNFFKKKTRFPKFKSKYNKQSIKYPQHYKIENNKTYLPKVGWVKTKFHRLVEGTLKSVTVSKTKSGNYYASFLCELEILSYPNKLTAIGIDVGIKDFATLSTGEKINNPKYYKKSEKKLAKLQRNLARKKKGSINRNNARGEVARIHEHISNQRKDFLHKLSHKLTKKYGLICLEDLNVKGMVKNRKLSKAISDVGWSMFKTFLKYKATWYGSDIKEVDRFFPSSKTCNVCGSINKNLVLSDRTWTCSKCKTILDRDINASINILNECTAGTAGSQACGEDVRPTFIYKLRQTSMKQEAQ

SEQ ID NO: 55704 - protein, 425 aa, unknown
  TnpB Polypeptide
MFSTLKYYNTHSVLFAQLGLTILSRAAIDAAAFKSKNLYNATLYEIRQAFIHQGIYLNYSEMDKRMQSHEAYRALPTKVSQQILRLLDKNWTSFFEALEAYKEDSSKFTGRPKLPKYKRKTEGRNILVYTLQALRGGQSKKGIRGRIRPSGLPIEVKTRQKNINQVRIVPRHGYYVVEVIYRKDPVQAQVDPSFCIAIDLGVTNLAAITANREGFVPRLVNGRTLKARNQWYNKRIKELQLCLPKAERERVTKQMQHITNKRNRQVDHYLHAASKAIIDLMVKEGAGTLIIGKNPLWKQEVNNGRRNNQNFVNIPHARFIDMLTYKAEFVGIQVELQEESYTSKASFLDLDPIPTYRSDDETEYPFSGKRMGRRNRLYRTKDGRKICADVNGSYNILRKRRPDAFSEAKGVAAYVVQPLRLAITV

SEQ ID NO: 55705 - protein, 360 aa, unknown
  TnpB Polypeptide
MSYVTPKQAAKVLGVHVSSLRRWESQGKLKTIRTPGGQRRYDLEEVEKAACLPKPVVTVCYARVSTHSQRDDLERQTEFLRSKFPDAELLSDIGSGLNFRRRKFLAILDRILTVPMPTECIYGTELVYQRGKWFACIPVRVEEISTSNSGVIALDPGNRAFLTGYDGENVLEIGQGDIGRINRLCSHLDNLLSRAALSPSKRQRHKMRKAANRIRERISCLVKDLHNKVTSLLVRNYKLIFLPTYETSQMVVKSARKLNRKSVRNMLTWSHAKFASHLEQMARRHGVLVIRCNESYTSKTCTNCGHIHSSLGGSKIFNCRACGIRIKRDVNGARNIMLRALQATAFIITGDAVLTLNAAV

SEQ ID NO: 55706 - protein, 385 aa, Spirochaetales sp.
VELCPTDEQAEKIRKTIGTCRFVYNFYLAKNKDEYEKTGRFMSGFEFKKWLNNEYLKNNPDMMWIKDVSTMSVSQSVANADTAFKRFFSGTSRYPKFKKKSNSDVKMYFVRHGANSYIKCERHRIKIPTLGWIRLKEKGYIPTNHNTHIIKSGAVSYKAGRYYVSVLVEEMQPMKEKLNDFGIGIDLGLKEFAVLSNEIVYENINKTPKIKKIEKKLKREQRALSRMYESYKKRKTMDEGCTKFNYEKQKLKVQKLYQRLNNIRDDYINKCISEIVKTKPSYITIEDLNVSGMMKNKFLSKAVKEQNFYEFRKKLTDKCKELSIELRVVDRFYPSSKTCHNCGCIKHDLRLSDRVYKCPECGFSIDRDLNAALNLRDAKAYKIIL

SEQ ID NO: 55707 - protein, 236 aa, Bacillus sp.
MEVNEMMINKAYKFRIYPNQAQAILINKTIGCSRFVFNHFLSLWDYTYKETRKGLTYGTCSAKLPAMKKEFVWLKEVDSIAIQSSVRNLADAYTRFFKKQNSAPCFKSKKNNVQSYTTKQTNENIAVVGNKIKLPKLGLVRFAKSREVEGRIVNATVRRNPSGRYFVSLLVETEVQELPKTHSYIGIDVGLKDFAILSDGTLYKNPKFFRLLEDKLAKAQRVLSRRMKESSRWNKQ

SEQ ID NO: 55708 - protein, 410 aa, unknown
  TnpB Polypeptide
MITTTYKFRLYPTKDQQEQLWRWSRALNDLYNHFLSLQKQQVTKRLPVLRRFDTHNLIPKLKHEIEHLNDVYSDARQACSDRVATCMILWQRGHIKFPKFRSGYQFFNITYTVFNKSCKLTGSYFTGGKLTPIKVKIHREIQGMIKTATIHCDERGKWWVLLTSIQPTIQLQKFNMDRTVGIDLGCNHLLATSDGYTIQSPKFLKKISDAISDIQTRIDIYHKPTGSKKDGTYHMSRKCKHLKKTIRGLYGKRNRMMKNFLHTRSRRIVDHYDVVVVENLRVKEMKEQSKQQGSPSAKSVNRVLSQNAVSMFKDMLHYKSKKYIEVNPAYTSKTCATCGQACDTLTLADRTYRCTSCGSEIDRDINAAVNIRNLGILQILHLVGDTRVTITDVRDQLQMCNNLYPCQAIV

SEQ ID NO: 55709 - protein, 396 aa, unknown
  TnpB Polypeptide
MLRAHKIKLQPTHAQVVHFARACGVARHAYNWALAQWKQQYEAGGKPSEMSLRKQYNAIKPTEFPWSLEVTKNAPQQAIKNLGTAFQNFFRRVKQGGKPGYPAFKKKGVRDSFRADNGPQKTGENAVAVSGKSVKLAKVGSVRMREELRFDGQVLSATVSRMADGWYVTLLVETTDCLSGPLDRGTVGVDLGIKEFATLSNGEVVPALKPHRAAHQRLVRLSRSLSRKKKGSSNRAKAKAKLAKLHQRIANIRVDALHKLTTRLATEFDTIGIEDLNVRGMLANRHLARSIADAAFAEFRRQLEYKSVMTGAKVVVIDRFFPSSKTCSVCGTIHDMKLSDRIMVCDCGNVLDRDLNAALNIRNKAASSAVSACGEEGSGYSTIVTKPASVKQEVEV

SEQ ID NO: 55710 - protein, 284 aa, Bacillus sp.
MWNNIYKETGKGFTYHSCSAELTQLKKKNDTICLQEVDSIALQSTLKHLAGAFSRFFKKQKDPPRFKSKRNKIQSYTTKETNGNIAVIGNRIKLPKIGFVKFAKSREVTGRILSATIRRNSSGTYFGSLLVETEVKELKELPKTGSSVEIDMGLKDFAILSTGHTYINPTFFRTLEEKLAEAQRILSRRKKGSSNWNKQRIKVARIHEHIANARKDYLDKISTEIIKNHDVIGMEDLQGSNMLKNGKLAKAISKASWSQFCNMLEYKTNWYGKQVVIVSKTLGR

SEQ ID NO: 55711 - protein, 431 aa, Acinetobacter sp.
MKILQQYKFRLLPNEEQEILLNQAIGSARFVWNKILAESFELFSKEEYIRYEVLEKHLLPLKKNPDFAFLGDTFSASLQQKIRDLAKAWAKFFDPKEHTQLKQKKRKPKKPKFFKLADGSEIQLRPLMPRFKKKSSGDQSFRIPFQGCKIDNNRVSLPKKIGWIKFKKSQEILGTITSITIKKLCGHWYISFCTNRTVEKPVHPSKTAIGVDLGIKKLITTSEGEVISPKNSFKQNQIKIAKLQRKLAKKVKFSENWKKLNHKIQKLHHHIANIRHDYLHKVTTTFSKNHAMIVVEDLEVANMSRSASGTQEQKGKNVKAKSGLNKAILDQGWSMLVNMLEYKQQWSGGLLVKVNAQYTSQTCSQCGHVAKENRQTQEKFECVECGFVANADFNAACNILAVGHTVLSVEGGCGKGRPAIQKTSEIRKEVA

SEQ ID NO: 55712 - protein, 476 aa, unknown
  TnpB Polypeptide
MNEKSKQRKKKERPTAGEPYPVTRAVTHIRLVEVNPGKLAALDRLAPVYLALCQQYVTLFCTTESPNKLRDPLYQTPLSARWHRVAIMQAAGIARSWRSNRTTAYQQYQDDLEQYQKQQADGQLPAKAKEPQWREWNVPTLREPCIQANVNVVKLEESRDSTYEYWLSISTLEKGQPIQVPVKLAAYHKEALTDPKTHQVKKLNSSAQLNKRDGVWWLTLSYDEEVTIHTPETSPVVGIDVGIANFVTTSTGKHYGSFHKDLRARHKRDRAKRRRKAKLRACLKKKGVKKLPSTSSRTGQKLIGHTRQEINRAVNQCFTDPEHEGIQFAYEQLSVASMRFKARAQNAYLRASNLGYIPQQILWNSQKRGVRATPVISAYSSQECSVCHYTDRKNRLDQRTFRCQVCGLEAHADHNASVNISRRVGDRQLRACLDRTAIKAVLMKRHEAWKQQQGIGNIRPVKRRKRGKSSVAASST

SEQ ID NO: 55713 - protein, 435 aa, Acidobacteria sp.
MDQIAIQKAARGKVVNLAASKASTINFMLRDQRRLWNWIHDLNSARYRESGEFLFYHESTALLTQQRRSGMFADGSAVAQQQCLRSYERALKDSFPNSKNRRGFPKPRKRTSQCSLRFPAAGIGTVRQGETLTHIKVPKIGLVRVRNLNVPTNSKINSYCLKREADGYWLSVQYAIAVDPPVNSNPSVVGIDAGLSVMASLSDGAQIEALKPLRKARKKLRRAQRIYARKRRGSVNRRRQAQRVARVHARVRNARRNAQHQLSRCLVDEHGLIAIETLSLSGLKRLKHQGFAWSDIGIGELYRQLRYKAQWAGGEIYEHPRFARSTGCCPDCGLVGPKLDLRVRHWACTQCGAQHDRDVAAAQWLELCAHTARTKVGAACSEPVEAQPRPKRGKSGSAPRPIAAMRPESSRHPVHGGPPANEPSDTVCTAHMSTG

SEQ ID NO: 55714 - protein, 534 aa, unknown
  TnpB Polypeptide
MSTSAAPRQVLRTAHIALRVTHRQTNRCYGLLRSAGDVWAGLLDTNRQRQQQGERPLTGYQALCRQLTSAEPFGELSVVGARSVLRRYADAWFQAAKRRKAGQQDAGFPRRKRALVPVRFYNGTFTIQGRRVRLPVAKGQSELWVRLARPLPYPPEQVRAVTLLADGGRLWLAVTAAIPVQQHDLDPDRVAGVDLGIIHPYAVVTETAGLLISGRALRAESYLQLEDQKARHAKAAKRAPKRGQCGSRRWKRHRARLRSAETRHSRRVQQAQHEAAKQVVAFAVQHRVGTLVIGDPKGITGHDAGRVQNLRLRRWRRTHLLQALRDKAEQAGMVVRLVDERGTSSTCPACRQRVSKPKGREFHCPHCGFQGHRDLVGARNIAAKAGGGSTSTGLPVLVEHRRAGIVPARRDRRRHLHDQRRRRFCLASGHPDEPACSPWCRSPDTGLQPGPARIKQRCRTGQTLPEGAQMLVRVAVVDGAYMDVNSESLACSAALPGGQSPEMPATGPASAPPRNGGPRPPPGGAGPQGRAPGR

SEQ ID NO: 55715 - protein, 416 aa, Ignisphaera sp.
VSELTRTVVVPSVKLTERKLAVFKELEELYRQILIELVNYGFRNSIDSFTRLKRDKYRELRGKFLQLPSHYVHTACQDASTRIKSFNKLKRKGLAKSERPEVNRVSIWLDDHLWKRIGYTTILIYTHRGWIPVELVPHKLCWRYINNGWALRTQPKIKINYRRKRLLVYFVFAKAVNVDENGAEHVISVDVNEDNVAVKVLDKVCILETGIRRITIGYARYREVVQSVKGNGYVCRAIRGREGKRKKDIRLKIANIVSNTAEKLNAVVVLENLPEQCPRNMIRDVRDPALRHRIYQAGFRGIVRAIEEKCLERGVFVAKVDPRNTSSKCPFCESKLMRGNAPRQLKCPKCRFRAGRDVIAVLNLEKKYLTLKGCVPFTPMPIDPTPEVAVLPMKGWVRRKSLDETLKNPEMKGMTI

SEQ ID NO: 55716 - protein, 414 aa, Ignisphaera sp.
MNLSMRVLATAKIEAVAPEGGESILLQFIKLYRDAVQCIVDGIWLLDDTPSEEKLHKMFYSELRRLGFRAHHVSEIYKRGKEVVEGAKRNRGSKPVLKKLTARIHPLDYRVDFSSKVLRIAVLNDKWVELRLKWYKYLDKYLDGSWRPGEILISYRNNKIFVYITFHRGVEPIDFRAVMGIDINFNNITYTVIDLSGNLVSIGVIPFKGLERALHLKKLSEDLQRRCPNSWRFIKWVRRVRGRWLNKAKNILMDSAHRLSKRLVYIAREYRALIVFEDLDRLKENSKHCYKLSWEKSLWCYKRLQMFTEYKAAFHGIKTVYVNPFKTSRKSPNGKKLSFINYRYAILGNVITSRDVIASWNIALRGLKKLKRMRGSRVLLSPDNPRNEAMKTRPNAGNPGARKIYPQIFTTIRK

SEQ ID NO: 55717 - protein, 438 aa, unknown
  TnpB Polypeptide
VLPRARAFKYELHVTDQLEPVLWQHAGAARFAFNQCHRWFTDGLAAYRAEIEAGVAEPDVEVPWSSFSLINRINAWKNGKAHDSPVADDGTRGLPWRGELLSQDVFECAANDYGAAVKNWRESRTGKRRGRRVGFPRPKRKFKSTPSFRLRNRNKPTQVTQAIRADGNRHVRVPGLGNLRIKGSAKQLRRAMEQGRFHPYSATISYGHGKWWISIAGQAAEMHPATRSRKPRVQGRHGMDVGVAKLAVVANEHGDITHNFPATKSLAKALRRLRRANKDLARATRDSKTWHERKRRLQRIHGQVHFARQDALHKLTTQLATELAHLAVEDLHAAGMMRSKLARHLSDAALGELGRQLEYKASWYGLELVQADRWYASSKTCSVCGVKNEQFGREPVFWCADAACGHRQDRDENAAVNLARWTAPVENQEETLPLTAAA

SEQ ID NO: 55718 - protein, 386 aa, Epulopiscium sp.
MSVIYNKKIEITFKKNDVCILDNQSKICNWLYNYLLEVCIKDYMDNNDSLKLLDGRNLRNYATSLKKEYPFLKTVYSAPLKECAYRIKRAYIKSFTSSAGLPNFRSWKKKWFSLVFDEPFKGWEVKDDGNIISVSLGKIPDLPVEDGKRNPSVLGKLKVPMILEPDERYKLFSLVKKDNKFYGIFTIEKQLPLIHSSTSKWIVLNLETQDFFISLDYKGDILKFKQINLVKYWDNQIYNIKAKRDDCKTKYKKYTTSGAKFTIHSSRWNKLNDALNTAKNTKQSQLKGILFQISLYLYKHYDLIVVTDYTSNVKPVGYFRRILKWTSEKQQKHFIINSHPKENSVDIEGTRHITRLAGYCVDELYSSNKTLVGEASFKEGLHFKEI

SEQ ID NO: 55719 - protein, 258 aa, Enterococcus sp.
MGIKVNRNYFYVSKVGWVKMAETLRFNGKLMNVTISQSKTEKYFATFLVDTENFQKDPVTESIGLDLGLTHFCITSAGEKIGNERFYRSLEKRLVVEQRKLSRRLEVAKKHNRKLEECKNYQKQRVKVARIHEKIFNQRNDFLHKLSSRITDENQIICIEDLHVTGMVRNHKLAKSIADVSWSEFVRQLTYKCEWKGRTLVKIDRFYPSSQICSSCGHNDGKKELDIREWTCSNCGTNHDRDINASINIRTEGLSGIA

SEQ ID NO: 55720 - protein, 190 aa, unknown
  TnpB Polypeptide
MGINVLGSVIIDDGTWLLYKGVRAKEDYFYLQNRIGEAQSLSSKMMNIEEYEAYYELNRERRRLFKKLARRLLHLYRNFASHLLRELHERGVSIIYLGYPFNIAQQRGNKFTVNLWSYRELMNIIELKAQEYGMRVFEVIEYNTSKYCAYHGVEVERGPRGVVNCPLGHKLHSDLNGALNILKKATGIVV

SEQ ID NO: 55721 - protein, 542 aa, Thermus sp.
MKSPGRAILPHRRPSVISEAASRGSSRKRKKEKAFTGVHALLVFPSGEDHKATLDLMRRFSAALRYAYNRLLEGQPREELKRQDSPLCAFFGLNTRHADDAILKAQALLDSARERGEDPRKVVFGGRKLFETLKRKHLSGKPLKRLKREWGEKRQGLLYSRGDKTKGGNLNLRLEAEDGALWLRVNLGNGRYAWALVKTSHPNLSALVERVYASLPYNVELTLREGKVYATFTWEEEPAPLAATKENGVLALDVNSDPYHLALALVSPDGNLRRHLTLSLEEVDRAPNRGAKELLLWKIAHEVVSLALEHGVAIATERLRHLPKGRRGDGSGRAFRRKAHRFAYASLLRKVHSLARKQGVQVVEVNPQDTSTIGMLKYAPQLSLSKDVAAAYVIGRRALGFKEKLPKGYGKLLGDGAFLAHARDFYRTRAEELRIQKRNERDRSRRNRLSRELKRAHGALSLLSSLQGSSGSQREVTDGRNSPGVNPWRVLRVGTFLPLLGREVPRDLSPLKPILHGSWEGWKGGLGPHPGGGPECTNVYFG

SEQ ID NO: 55722 - protein, 408 aa, Moorea sp.
VLVMEFKAVLNESQKVAINEAIRTARFVRNKVLRYWMDNRGVGKKELYRYNTQLRDEFKFVKDLNSHACQASVENVERAIKRFYDNCKKKIPGKKGYPRFKKHSRSVEYKQSGWKLSPDKKSIKFTDNKGIGKVKLKGTWDLWRFDQKLIKRVRIIQRADGYYVQFCVKVDNHVREAWPTALELESTGYTVGLDVGLKEFYTDSDGYSEPNPRFYRKGEKRLKFHQRRVSRKKKGSANRKKAINRLGRTHLKISRRREEHAKRLARCVIWSNDLVAYEDLRVKNLVKNHCLAKSINDAGWYQFREWLEYFGRKFGRITVAVNPAYTSQNCSDCGQEVKKSLSTRTHVCKCGCRLDRDHNAAINILRRALSTVGHTGTFLNAWGEGTSTLLGSDLEGQVTSLNQESPSF

SEQ ID NO: 55723 - protein, 428 aa, Bifidobacterium sp.
MLEAVKVALDPTPTQERLLSAHAGAARFAFNAGLAHVKQALEAEEKPGWSLYALRRWWNANKNTLAVDGSGVPWWPENSKESYNSGLEALSNALSNWSKSRRGRRVGFPRFRSKDRTTPRFAYTTGSYGLVPDDPKALRLPRIGRVHCMENVEKRVGGARVLRMTVSRRAGHWYAALTVERADDAPLIPPKGGTVGVDLGVRTLAVLSDGTMIANPHALGMSERRLKHAQKALSRKTKGSNRRRRARERVARLHAHVADQRRDLLDKLTTWLTDTYSDICIEGLNVSGMVGNHRLAKAIEDASFAELRRRLEYKTARTGARLHVIDRWYPSSKRCSNCGRVKAKLSLSERVYHCDGCGLEIDRDLNAAINIKVAGSAPETLNAHGADVRPGIPRDAGRTAVKCEPSSHENGMSLGADTRKSVLQAKTN

SEQ ID NO: 55724 - protein, 385 aa, Lentzea sp.
VKIVVQVKLVPDAVQASALAETLSTANDAVNWVSGVGFAHHGHRMSVRDLRTLCYHELKARGLGAQAAQHVIKRVADACTTLRANIRNGNLGGPRSKRRVKAESKPVRFRPDAAHTFDDRCLSWQIDAGTVSIWTVRGRLKNLRFIGSAGQLKTLREHRHGESDLVCRDGLWFLIATCDIPEPDLIEPTDWIGVDRGIVNLATTSDGDNHSGRRLGRYRRWHTRKRAELQARRTCSAARRLKRRARKEARHARHVNHRIAGEIVAVAQRTGRGVALEELGGIRDRVTVARHQRATHSSWPFHQLGDFITYKARRAGVPVLVVDARYTSQTCPRCGHVSRSNRSTRDHFRCCRCGLAGPADVVAAVNVRNRARRAWVFVSMPAPVP

SEQ ID NO: 55725 - protein, 375 aa, unknown
  TnpB Polypeptide
MKQVIVVKLEPSQEQYQSLLKTVEAFNRGCQYAADVAYEKRLANKIALQPFVYGTLRSEYGLSSQMAIRAIAKAVEAYKRDRRIHVRFDEHGAMVYDPRILSFKGLTQVSLMCLRPDGAGTSGRELVPMRYGAYQAARLDRARGQADLILREGTFYLYATVDLPSAPPCEPTDVLGVDLGIAQLAVDSDGEAHTGEGVRQCRRKHSRLRAGLQKAGTKSAKKHLRRLRRRESRYQRDINHVISRHLVQKALLGQKALAIENLSGIRERTQATVRKTQRYERLSWAFAQLRGFIAYKCEAAGIPLIIIDPRNTSRTCLACGHCAKENRRNQSEFLCVECGFQANADFVGSVNIRRKGLEARAELSGGLWSQANACA

SEQ ID NO: 55726 - protein, 433 aa, unknown
  TnpB Polypeptide
MQRLQAFKYELMPIGEQQRDMRCFAGSCRVVYNEALALQAARYERGDKRLGYAGLCKELTAWRNGAPLPSGRVASWLAESPVHPLQQTLKDLERAYANFFARRADFPRFKKKGQGDSFRYPDPKQIKLDQANSRIFLPRLGWLRYRNSRDVPGELRNVTVSCSAGKWFISIQTAREVDTPLPTATTAVGIDVGIARFATLSDRTFYEPRNSFRKHEERLRKAQRAMSRKKKFSCNWRKAKARVQKIHVRIGNVRRDYLHQTSAAIGQNHALVFVEDLKVRNMSRSAAGTVDAPGRNVRAKSNLNRAILDQGWSEFRRQLGYKLEWNGGWLVTVPPHNTSRICPGCGHTAAENRPTQALFRCVKCGFEDNADLVGAINIRSRGMQMLRDQGQDTGEASPGCASTARIACEVSGAVRPPAAGTHRSDYVDHHVAP

SEQ ID NO: 55727 - protein, 394 aa, unknown
  TnpB Polypeptide
MRLRYQFRFYPTDEQALELARVFGAVRYVYNWALQLRSDAYRDGKEIGYHESSAALTALKHREDHAWLNDISSVPLQQSLRHLHTAYSNFYDRKAKYPEFRKKHGDQVADYASTAFSWDAANRNLTIAKIGSLDIRWSRSFKSEPKTVTISKDRSGRYFVTLTLDEAINPFPKSGINAGLDLGINRLATLSTGERIANPKRTSKFVIKLARAQRALARKQKGSVRHENARLRVAKIQAKIGDTKLDYLHKTTTDLVRRFDVICIEDLNVNGMVKNHNLANAMGGAGFCVLSRMLEYKCEWYGKELVRVNHRFPAGKTCSTCGHIGKSLPLNLSEWTCSECGTRHDRDKNVAINILAVGLTDNKNARGGKHQTRESSTLKGSTRRSVNQLSKHGA

SEQ ID NO: 55728 - protein, 407 aa, unknown
  TnpB Polypeptide
MIYKSYKIRLEPNNKKLSALRGHAGVNRHAYNQGLNYCNELRKKGEKTPSAIDLHKWLVANIKKEFSWYYDYSKCSPQQALRDLETAYKNFHRLQKKSGYSLKDKKGRLQGLPNFKKKGIKDSFYLEGAIKIENKKIKLPKIGWINLSEFVEVSQVKNCVISRVSNDWFIAFKTEYNPIKTEKKYKSVGVDLGIKTLAVLSNGEEFINVKPYGKAKSKLRKQQKEVSRRFIKGAKNQSSNYKKSILKLSKTHKKVADVRKDNIHKLTTYLAKNFEVVSIEDLKPKNMSKNHNLASAILDGGFFEFKRQLLYKKEWYGGSVFVANTFFPSSKTCNVCGNINKELKLSQRTWTCKNGHKLNRDLNASINLEKLAMSSIVSAFGDKSSVGVNPIQLVDELGKKHQMFTFV

SEQ ID NO: 55729 - protein, 376 aa, unknown
  TnpB Polypeptide
MLKSFKYRLFPTKKQITIMLQTLDECRWLYNYFLEQRRKSWEENKQSLNYYTQIKTIPNLKKERPILLNIYSQVLQNVAMRVDLAFKAFFRRVKAKNGKAGYPRFKGKHRYDSFTYPQTGFEITNNGLKLSKIGDIKIKLHRPINGKIKTCTIKKSSTGKWYACFSVECKPNPLPKNEKAVGIDVGLESFATFSNGEKIENPHFFKTDQKALAKAQRKLSKQKKGTPEREKVRKVVARIHERISNRRHNLIHQISRKIVNRFGIICIEKLNIKGIQKGNFRSINRGIADVAWGQFARVLASKAEEAGRKFIAVDPRNTSQRCSQCGVIVKKDLSTRWHDCPICGCHLHRDDNASKNILALGLQGLGIQSLKALQRE

SEQ ID NO: 55730 - protein, 409 aa, Moorea sp.
MGILPVTIFRQVGCPPDSYKCGVKYPEIDKALKMSPHYKGMAAQSAQQTLKTVGEAIKSYNQLVGLYYKGEVHRPRFPRYRKSGGFASVTFPRQALTYKGGLFYPSVSKESKPELLTQITLTPPGFVDPDWVKEVTIRPCYGQLWIDWVIDDGKEPAEVNPKLDYSQAMGIDHGGDNWLTCVSTLGRSFIIDGRKLKAMNQGYSRLVAKHKTGKPEKYWDSTLDRIQLKRNNQMRDAVNKAARFIINRCLKDGIGNLVIGWNKGQKTRSNMGKKGHQKFVTIPTGKLIERLKQLCLEYGIKLTVTEESYTSKASFLDGDSLPTYGEKPSGWLPSGKRVRRGLYMTASGKLINADANGAANILRKVTTQPFDLAKVARGSLTVPHRYDLFNNLSRSYRYKGGAGRVHPPA

SEQ ID NO: 55731 - protein, 473 aa, Pseudoclavibacter sp.
VSQIVRILGVKVTGSVFLGLNEDGEHRWSADPWRVAGWMADGWRTRFNQHRSRRHKYVYGHGDQACCDPLGRVLVPIGSRVSDLSDKDARERYPHLAAMPAYVLQSTERIEKQEWFAAAKRRATNHGKGRKPGRMPRFQSRKHGDSRFVCWFNGGRNATYQQTGRRAGLVIIRGQNPSAAPDGTRRWSLQIRVRHTQQVREYTSVAVNLTRREVAFTSPVAARDHQRSGRSVGIDVGVANTVATSAGSMHSLPDLSNHAADVVRHQKRMAKSRVVARREGRDFHTSARYRAHREAAAKAAAAAANVRIDWAHKLATALVNEHDLIGLEDLRLSNLTRKGKNKRSLNRLMLNAGLGRLRSFVEYKGAAAGIPVVAVNPRNTSRRCRACRHVAAENRESQAIFRCKACGHRAHADTNAAGNILDAAREAVASGAWTTASSTGSAAKTKQAQAGRARAMNRKPAAPWGRPLTAHQR

SEQ ID NO: 55732 - protein, 384 aa, unknown
  TnpB Polypeptide
VQAFKAVWQLYEPSNEILSLLEEFRKMVNDCIRIGLAENVTSLFALTKKSYHQLARYDVPTKYRLTAVSKATGILKTYRNTLRKQPEAKKPYASKLMLTNCYRLQIADGKLRLPLGNKRYAFIPLTCRTQAVISGHTVKSVTLTACTLSIAFSKETAVMDVTGLIGIDRNLNNVTFADTEGKVERHDLTRATEVKEDCRQVKRGFTRNDYRIQKQLYSKYGRIQRNRVNWILHNTSANIIKQAKKKRYGIVMENLKGIRKLYRRGNGQGKDYRARLNSWSFYELQRQIEYKAKWEGIPVIYVHPSKTSSVCAVCGSKIVECTERQVFCPKCKRAMDRDENAALNIVRAGLRFSLKGMAGEAVKGNPEKAILRADTTQLAQHLTS

SEQ ID NO: 55733 - protein, 391 aa, unknown
  TnpB Polypeptide
MTPFDNVLAVKVAKQNYIPTPEILSLLEEFRKMVNDCIWIGLAENTTSLFALTKKSYHQLARYDVPTCYRLTAMSKATGILRNYRKTLRKHPDAKKPYASKIMLTDCYAFKIIEEKLRLPTKSRCYEYIPLNSYVLRAISGYAVRSVTLTASTVSMAFSKETAVTEPTGLIGIDRNLDNVTTADTNGKIKRYDLSKATRIKAIYRVVTSHFRRNDVRIRQRIFSKYGRKQCNRVNVILHNVSKHIVADVERQGFGIAMENLKGIRKLYRRGNGQGSEYRSRLNSWSFYEIQRQINYKAMWEGIPVVYVNPQKTSSTCAICGSSITECTERKVYCHKCNRTVDRDENAALNIVKRGVRFAPDGLARNEAVKGNPKEAILRAEASKLTQLTKS

SEQ ID NO: 55734 - protein, 230 aa, unknown
  TnpB Polypeptide
VLGFDAGLSEAGYDSEGRCIAKNLGKMSAAISDRRMLKDQRRQPLIAKVKLLKASSDPEDRAKARRIEHNNLHNKKETKKRAAEREQLINYIRRDFKKKLFVKPKQPVKTLVIENLGPMGGQKFGKRMNQRLSAWDRGDIVTALEELCSLYGVELVKVNPAYTSRKCSRCGHIEKANRQGDKFKCKKCGLEEHADVNAAKNILASYLSSTSIPLSASPEDVLEIEKANQI

SEQ ID NO: 55735 - protein, 380 aa, unknown
  TnpB Polypeptide
MKSCVTIKLKISRNKPLFDTMEQYSKAVSYIANKGFETKTYRRYDLHHLCYYEARKLFGLPSQFVINANRVASQTLKSIRTNKGSKPVFKKHLPLAFDKRTFTFSKENVRLTTINSRINVPIQVPDYYTQYLNWSYQTALLVLDKKSRMFLHITFSKEIRIKNSNNAKLGVDVGINHIAVTSNKQFFRGNKIKNYRLKFKRLRTKLQSKGTRSATKLLKKIGCREKRFKAYWNHVISKQIVKNCNAGTIILENLKGIRKTRKGKRFNFWLHGWSFCQLQQFITYKAKRNGIKVVKVSPYLTSQKCSSCEKLGSRSKGFFTCNHCGYSLNSDLNASMNLAKHHSKADGALAHVTAPHIQSDDVKGKVSATATELMDKSPHP

SEQ ID NO: 55736 - protein, 359 aa, unknown
  TnpB Polypeptide
MQHKIDCLQRKIASLHDDLRYHICFGTKKLYHDTRICGQDRKNAVRKVRYHRIQISGRSDSKNGNWVFSYDPVLQKLKYRSLNDWAHTIVFPGVRFPYGQDKISVFLAERRGAVAWEICDMGNAWQVTCIIEDTPEHIKNDHFGTGCVAFDMNYDNIAMAELDASGNLLHHKILRFDLENKTSGQVEQLLSRALEDVFRYAANKRKPVVMENIRFLQRKKFYDWNTKRTRRISMFACNQMALLAASKSNKYCIEVVQVNPAYTSKTGLLKYKKRYGLSTHEAAAFVIGRRGMGFTDKVPDSWKRHLKPEHRTKPRYEQWKTLYAVLTKMNYRDLNQLLYPELQPALNFMQPINYSHSDY

SEQ ID NO: 55737 - protein, 406 aa, Lactobacillus sp.
MTVLGRTLKLRLYPNTIQAQQLLAMSHEYQRLANLTSQWVFDHDFPLSPLKINHGLYQIFRQTSPLNSQMIQSVFRTVVARYRTVLAQMKQHPYHYQDENGKWVQMPKDLTWLFKPIHFSRPQADLVRNSNYSFVNDSTKISLTTLGKRTKMSFTIKGFEQYFQNGWKLGTARLVHSQGKWALHIGITKEVADFAVEQQAQIVGIDRGLRFLATTYDRQGKTLFFSGQKILLKRKKFLENRRRLQSKGTKSAKKKLKQLAQRENRWMADVNHQVSKTLVAAYGPHTLFVLEDLTNITFNTDDLPKSLRNSHRSWSFFQLESFLIYKAQAMQSTVVKVSPTYTSQRCPKCGLIERANRHHETHEYHCRQCQYRSNDDRLGAMNIALLGQKWLSGVRNPKIKKITTTG

SEQ ID NO: 55738 - protein, 441 aa, unknown
  TnpB Polypeptide
VAARAEGQVRFLSFLYSNCLDNRVFSWYDLNHTMSVQCTHKIRLQPNNQQANHLRQACGVARFAYNWGLGEWQRQYEAGEKPSPYALKKQFNSIKREQFDFVTKCAAEQAFTDLGKAFGNFFRNVKAGRPPGYPRFKRRGIRDSFYVDNIQLKLKNKRVRIPKLGWVKMAEPLRLQGKITSAVISCTAGRWFCSIQVEIDIPDVKAVGPTVGVDVGIKRLAVTSDGRVFQNPRALRTAEKRTRLLQKAVSRKPKGSRNRAKAIQRLQRHHYHIACIRADAIHKATTAITKGVGRIVLEDLNIAGMMRNRRLAKALQDASLSELHRQITYKAEQLGIEIIWADRFYPSSKTCSGCGSVKAVLTLGERQYRCEACGLKIDRDLNAALNLKQLAAGSAVTACCLGSSGVSMVRHETTDWAGISHEKISVRRKEQGTIVWVAMGT

SEQ ID NO: 55739 - protein, 522 aa, Catabacter sp.
MVIKTVVLKLHNLSGAKKAVIDDAISRYNRALTYLFGHTRENVGPIASEMKSGSGFLTRRITALLKKEVMDELNQFGVQPFKDALKLDYAMTMVGWLSLRKTQKTARYPHGALDEEAFQERFTELVGEFDERKICRKEFEAQLGRLYSSLHMQKPILFGRYAKNRDYCLLYDEESGRFYAKIYLMSVKDKARRGGIARGDTKLRYVYAGNEPLETDNRQERYLVVPLSFGKRQHEILLQGLKNPKMFKTARLSCKEGEYYLSVNVACEYPQTIRSETYLGITRGLSCAVCYAVTDRDGTLVAEGRIPKGKSFRSKNGMHALANGLVGIAQQYKSTVITYKLGSIGDRLTSGEEHAQLTSGEFNKLVAVVLYKTEAAGLEKPVLVSPRGIFYTCPRCGRNSFRNRFFGGRMICLKCGFSDTLEHIGPRNAARRLIQYGSAALVFYATQGKDDILIENKMLEVKYHAKASREAVEHFYDYVEQLACDMREGRLPLAKRDSKKISYQKRFMQVKDARREVVIIDR

SEQ ID NO: 55740 - protein, 293 aa, Bacillus sp.
MKKAYLIEIKPTNEQITKIHQTIGVCRYVYNLYLSKNKEIYESEGKLLSGYEFSKWLNNIHTKECDQWIKEISSKAVKQAIMNGDKAFKRFFKGLSKFPRYKKKKNEDVKCYFPKNNKTDWIVERHRVKIPTIGWMRLKEYGYISKDAVVKSGTIAKRAGKYFVSVLCELEETKAKPTLHSTGVGIDLGVKDFAVRSDGKIHKNINKTGKVKKIEKRLKREQRSLSRKFENLKKRGEHSVTNKRANIDKNILRVQKLHAKLANIRLAYVKSVVNGVVKTKPTFITVEDLNVKV

SEQ ID NO: 55741 - protein, 465 aa, unknown
  TnpB Polypeptide
MYIAKKLKWRKTIMTTYTLELKLNIKKYSDQRYLENYFREVAKISNTVRRFAIRQITLLKRDKTYTDLLKQYVALEKGPEKEALSKQLSVIVKSYGLTQYDLQKSATKLRNHLKYVHSAVYQKISDSVWKGVEKVLYSTGKQIHYKKWDEFLSFEGKKNTTGIIYKDGKVYINASPKRQNRGLILDVILPGNQNTDHWYYETSALNDRTKYCRIVRKKFSTGWRYYVQLVQEGTPPLRHAVGTGRIGIDIGTSTVAAVSDTKCHLTELGEGIEVQDKKIRKMQRKLERSRRTSNPDNYNANLLLEEGNKVYVEDMNFKGLQKRSKKTEKNKKGKYKRKKRFGKSIGTRAPSQFLTILKRKLGYTGGTYHEVNTRTFKASQYDHTSDTYRKKKLSRRHNTINGEWIQRDLYSAFLIMNSDDTLEHADRDKCLQNYPQFKTMHNKCITEILRSGKHIPFSFGLKRAA

SEQ ID NO: 55742 - protein, 276 aa, Pleurocapsa sp.
LTAGYATVVTLQGRQRLEFCVPKFWAEVATWRSTSADLCVDCQGQLWLHVVMRKEVAEVPPTGDVIGVDLGITHPATDSNGKHYGDPYWTTVECHRKSHVSRLQSKGTKSARRRLKKLSGTRNRLRSDCDHVISRQIVNALNSGDTVVFEDLVNIRGRGKLGKQMRERLHTWSFDRLQFYVGYKSLERGITVDFVDPRFTSQKCCKCGHIDRGNRVTQSGFTCLSCGHTDNADVNAAMNIRDDFVRSRAAFNQPIVGSGAATLPLTDKPATLVVGN

SEQ ID NO: 55743 - protein, 375 aa, unknown
  TnpB Polypeptide
MKMYRFRLYPSKRQEKQMNTHLWRAKNLWNDLLEHSKNIYGNFDKFPTKSTLAAMTKDSGLYSQVAQDIGFRVEKGIWRYVKLRKAGDKKAGFPRFKSIDRIKSLSYPQAGFSLGRKLKVTPFGEIAIVQHRQIQGTVKTLSLKKDSSGKWFACFAVEETPIIRAPNGKPQVGIDFGLKTLATLSDGTIIKNPRHLKKHAENLAWLQRCLSKKKKGSKNRGKAKREVAIAYEKVANSRADFLHKTTTTLVNSYSLIALEKLASQEMAEQNFGRSINDAGWGMFANMLAYKAESAGCKVVFVNPKNTTQECSNCHEIVKKDLTERMHNCPFCNLSIDRDLNAAQNILIRATAGHAGSNACGDETTVSSLKQEARTF

SEQ ID NO: 55744 - protein, 472 aa, unknown
  TnpB Polypeptide
LILKILFWFLNYYFLESKKTKILCLLGVLTFLSRMGYYLDVSSMLMTKAERIKNTLRETKERRRTQRVFVYQLKLQNLSNRKVALLERAFLEAKWLYNWLMSDISRLDMPVYKVKGVEAKVGDHYEQRELAVLGSQIKRAISNRIKDSLRALGRLKKNGRKVGALKHKSFVNSIPLEQYGTTYKLDFERNKVRIQLLGSFRVLGLHQIPKDAEIANAVLVRKPSGYYLHVTCYRFKDRCVSVNKIGDAVGVDFGVSSKLTLSNGIKIDFEVRESSRLKRLQKKFSRKQKGSKNRERVRFLLNKEYEKLNRRRRDAQNKVLAFLKHYGKVVFQDDCVKGWSSLWGGAVHSSGIGGLKSRLRHSLETPILVGRTVITTRECFACGLRHDLSLLDRVIACECGWNCDRDVNAALVILRKGLGLSLDQAVGLGRSELTPLERETAARILGSNPDIRVSFLEEGGSLSPRGQEEIGG

SEQ ID NO: 55745 - protein, 360 aa, Okeania sp.
MKSIRTKLKLNNKQKTLMAQHAGYSRWCYNWGLNLWNAAYKDGYKPNIRKLRETFTNHTKPLYPWMKNLSSKVYQYAFINLGEAFENFFQGLSKYPIFKKKGRSDSFTIDNSGRPIELNGWNHKLPVIGCVKTYEPIEATTQKITISRQAGDWYLSCSYEFTPTPTPKKTEVVGVDLGVKTLATLSTGEVFEGAKSYKKFENKLSRLQYLNRNKKIGSANWKKAQLKIAALHRRVANIRKDTLHKLTTYLAKNHGTVVIEDLNVRGMLANHKLAKLIADQGFYEFRRQLRYKCQWYGSELVVVDRFFPSSKTCSNCGHVQDMPLNQRTYDCPECGLSIDRDLNASINLRNAVGSIVNACG

SEQ ID NO: 55746 - protein, 457 aa, Calothrix sp.
MTFRLYPNEKTELILRYHRKLHKDLFNAAVNNRFTQYQKFNHCVDYFEQQNSLPAFKEVWIEYKELASHALQATLKRVDFAFERWLKGLGKRPKFKSIRHYSGWTYPDKAGFKVESNGENGYLNLSKIGHIQMRGQAKYWGKATTCTIVYRNGKWYASITVDVLDQVFKPDILPTGAVGIDLGCKSALSITDGVNHQQIDAQSFLRNAEHKIKKASKQKRRKRAPNRNKKIKASRRFKKTHSKVSKILRKVANQRQNWVHQVAAEIVSSNSFVATEKLEVKNMTRKAKKAQTCRGDTLCGKVCKRGKRKKQKAGLNKSILDVGFGMVRSTIKYKVEQNGGVFVEVPTKKVKPSQTCPKCGHQHKKTLDVRIHECSVCGYVQDRDIAAAEVMLYWAKGILPESGTGFVGAESPSSTSRTRKTAGSMKQLGAKKRQKSQSNFAKNGLEDVETSSSSEAS

SEQ ID NO: 55747 - protein, 353 aa, unknown
  TnpB Polypeptide
MKTLKLRIKDKHSKVLEQLASEVNFVWNYVNDLSFRHLKGKGEFLSAYDIAKYTKGTSKECNLHSQTIQAVTEELVIRRKQFKKSKLKWRVSNRKSAKKSLGWIPFKKVAVKYTDGYIQYGKHQFKLWDSYGIGSYKVKSGSFVEDSRGHWYVCLTVEDHTKSVQSKGTTAIGIDLGLKDLATCSDGYVVTNPKHYRKYEQKLGIAQRAKDKKRVRALHTKIKNCRKDHLHKESSKLVKRHAMIVVGNLSAAKLVKTKMAKSVLDSGFSAFKTMLRYKCESAKVLFEEVSERFTTQICSSCGEITASSPKGRIDLRIRVWECECGAVNDRDCNAAKNILALGHKRLAVGIPVL

SEQ ID NO: 55748 - protein, 399 aa, unknown
  TnpB Polypeptide
MAYESIKTKSLRIYPTKEQKIILKQWFGVSRKIYNETINKLNKHDGQKSWMSEKTFQNHNSETWQQDWCKKVPFQIRGNSIKEAYTNFYSNCKKSKKKGKPFEMKFKSRKNLKQTVTIPAESLKKDGVYPRILGFLDIKERNKYYDIIKNNPCDSKLTYDHGNYYIIVNYKVLINPNNNHIENQDVVAIDPGVRNFATIYSLEGVCGYIGRKSFQKIYKLSLLQDKIISLKSKINKISYRRKLNRIYQRRKSLIDELHWKTIQFLIQNFDYIIFPHYETQDLVQKMVSDKKKKKFMSQSVRSMLSFNNYLFKQRLKQKCKEYGNVYIEVSEAYTSKTHPVTGELMNIGNKETFKYNKLIMSRDINGARNIMLRTLRDASVTIGSDCYDLPTIKVVGANI

SEQ ID NO: 55749 - protein, 210 aa, Caldalkalibacillus sp.
LQKAFTNFFSYEHQPVPKEIENVVGLDFSMNTLYVDSEGKSANYPQYYRQALEKLARAQRVLSRRRKGSNRWHKQRLTVAKLHEKIANQRQDFLHQAARQLANRYDAVVIEDLNMKGMAQALHFGQSVHDNGWGMFTSFLQYKLAEQGKKLIKIDKWFPSSKTCSCCGRVNVSLSLSERLFRCACGFVSDRDINAAINIKKEGLKQLGTA

SEQ ID NO: 55750 - protein, 364 aa, unknown
  TnpB Polypeptide
VKTYKFKLYSSKRNKKLHRQINIAGSIYNHCIALHRRYYRLFKKNLRAFSLSKHLTKLKKITKYSHWNLVGSQAIQDISERISRAYALFFRNLKHNIKTAPPCFKKIRKYKSFTLKQAGYKYTSQDNSIIIQKQKYRFFKSREIEGKICTVTVKRDSLGDIYIYFVCKQDENTVLARTGKSVGFDFGLKTFLTASDRQDIESPLFFKRNSSAIAKANRRFARKKQGSANKKRMKNDLCRLYKKTANQRNDFHWKLANKLCGEYAVICMEDLNLKSMQKLYGRKISDLGFAEFLQKLEYVAHQTGTTIIKVDRFFPSSQLCSCCGQQNHQMKDLRIRKWQCSCGAMHQRDRNAAINILNEGLKYL

SEQ ID NO: 55751 - protein, 368 aa, unknown
  TnpB Polypeptide
LKTYCFKLYRAKRNKKLYSLINIAGNIYNHCIALHKRYYRLFGKSLNANALQKHLTKLKKLNKYYFWKLLGSQAIQDIAQHIDKGYKLFFCNQKHNIRSAPPSFKKVKKYKSFTLKQAGYKLLGDNLISISGQEYKFHKSREIEGTIKTITIKRDTIGDLYIYFVCEQEENQVIARTGKSVGYDFGLKTFLKASDDMDEESPLFFKQNTCRIQKASCKLSRKKKNSNNRKRAKLELARLHKKVANCRKDYHFKLAKKLCENYATICIEDLNIKVMQRNWGRKISDLGHSQFVNILRHQSGKLGSTVVEIPRFYPSSKTCSNCGYIIDKLPLKIREWTCQNCGEKHDRDKNAATNILRVGTSTLLGETS

SEQ ID NO: 55752 - protein, 394 aa, Nonomuraea sp.
VRRSFRFLLRPTARQAAALPACLEDHRMLYHAALEHRRTAYARAGVSVRYGKQPAELKHIRADDPDGQARWSFSSQQATLRRLDRAFRAFFDRVRAGRTPGFPRFKGRGRFDTVEWPKDGDGCRSDSQPGHPTVAYVRLQGVGHVRVHRHRTVKGRVRTIAVKREGNRWFVVLSCDDVPAEPLPATGAVAGIDMGVASLVTTSDGGRVANARHLAATAGRLADAQRDLARRKRGSQRRRKAVTRAAALHAKVRRQRLDGAHKAALALVRTYDVIVHEDLRIANMTRSASGTMEAPGRNVAAESGLNRSILDAGWGMFLTILAHKAESAGRTLIAVNPTGTSRTCARCGHSAKENRVTQAAFACTACGHAAHADVNAAINILRAGLALRRAAEAA

SEQ ID NO: 55753 - protein, 438 aa, unknown
  TnpB Polypeptide
MGVMKINKAYQFRLEPTVEQAVVLNNLVGSARFVWNQILAASFEMFAKNEYINATSLVNKIMDLKNNPDFSFLKSQSNAVSLQQKIRDLASAWSRFFDPKVHARYKENKKKPKKPKSFKLLDGTELQLRPLMPQWKRKIDRRDSMRLVQFDKYCRVEGNRVKLPNGVGFVKFRKSQDIIGTIKNVTISKKLGHWYVSFGCERELDQNPIHPSKSAIGIDLGVTKLITTSDGQHIKPKNSFKANQIKLAALQCQLSRKVLFSQNWKKQKNKIQKLHHHIANIRHDYLHKITTTISKNHAMIACEDLKVTNMSKSASGTLENRGRNVKAKSGLNKSILDQGWGMMIDMLEYKQHWQGGELIKVNPRYTSQTCFECKHIAKENRQTQAKFECVKCGHKANADMNAAKNILAAGHAVLSVEGGCGKGRPLKQKTCDLREKVA

SEQ ID NO: 55754 - protein, 428 aa, Nocardiopsis sp.
MSRFRLYPKPAQEKVMLDHCAQARHAWNLAWQVNTVYRKGGSRLGRPPRFAGLCQMLTEVRRADTTGMGAEEADYFGWVASGNADIQQQALKDFDQALANFLGRSHRYPKRRKKFRNEGFRVIGTGRVPAFTPAGEPVLNAKGKQVHARTVVVHKLNKKWAQAKIPGCGWVKFRNTRPRLPDAKSFRVTYRHGQWHVAFVTIPDPTPAPGDGSVVGIDRGVTITAALSDGRILNCPGLSTKELAQRRKHERRAARASKGSPRRRAEYTKANRYRRKEADRRKDWCEKTSTMLARSFDTIRFEDLKIKNMTRSAKGTAEEPGRRVAQKTGLNRAILAQGWGLLRTRTGHKASGRVQDVPARNTSVRCSDCDWIDKNSRKSQASFVCSNCGFSCNADLNASLNVAAGQGASPGSKTCAGGTPPRKGIECP

SEQ ID NO: 55755 - protein, 450 aa, Nocardiopsis sp.
VCRPGGGSVPAHLENHPGDTIGDARLLFVSRFRLYPTSTQEQQMLEHCAHARYVWNLALEVTNTYRKGRARVEKPPRFAALCRMLTQARQTDTAHLDAETAAEFAWVVSGNVVIQQQALKDFDQAISNFLGGSHGYPTWRKKYRNEGFRVIGTGRVPAYTATGEPVLNAKGKQVMHRKALVQKLNRKWGQVKVPGCGWVKFRLTRRELPDAKSFRVTFRDGLWHVAFVTLPDPVPGPGDGSIVGIDRGVAITAALSDGRTLNCPQPSTKERARRRKHERRAARAPKSSPARKAEHAKVARLKAREAARRKDWVEKTSTMLARTFDTIRFEDLKITNMTASAKGTVAEPGSRVRQKSGLNRAILAQGWGMLRTRTGHKAPGRVQDVPARNTSLRCSDCQWIDKNSRQNQARCATRSRSVEVGGRSRDNSLPASDPSGRSSPPGASLVTTGC

SEQ ID NO: 55756 - protein, 428 aa, unknown
  TnpB Polypeptide
MAGAPAAGAGRDGLPTRPAPQRPGTAAARRRNRRAPRRSRPPGSLSLPSPPFLAPNTSRAGRYSVTGLIRRYAGALTLPRGMAPIFRWGLTPVLVRAAGFLVAAKPNALPRAEPVVGIDLGLKHFAVLSDGRKIPSPRFLRRAEKKLRRAQRALSRTEKGSRNRDKATVKAARTHAQVADSSAAKQEPIRSHAGKQRARRESPPFKAEWKSKGDPAGHDRRAVGHLAVQPERGGRNRAHGEAAHLVDGDAGDVAGPRLELDRSLVGRHELAEQGVLVDLDLDAQVSGGEGQGADRRGLGPHAAGLVDQRVKGEPGQFRVDVMPGERVPARFGEFGRYFLLSAQRLLQHGQQLLIVPDVRHHTVLPSCRPRRCGPRRPAAWAARAARAGCPAHRAAGHSRRPARENGAAGPGSVPAAARCSRCAPTTWR

SEQ ID NO: 55757 - protein, 522 aa, Lachnospiraceae sp.
MVLQQEAAVAVRIVRLAFLLAVHMFDFSFTSIWQSSIIIVYLNGFLKEHPFMYLADTTVLSRDKYPEIFEQMEKDLRLSKNLYNAALFRIRQVFTGWDKEERTENEEEVFREVRTMQAAYPKVKVRRVLSYRALDAVMRANRNPDFFAGLPMQTAQRVLKEAVTVFRAWLSSLKEYRSAPERYTGKPCMPKYLKGDRHTFYITNQDAVLYPVYRKMGAAGRQGTDGMAPGKYDGMDLKLPRIRERLHLRHIAPDSILKEVQVKPYYGKLLLVLVLETEDLPVNGEKPYLAGIDFGTDNIAAIVSTDHVSRIYKGGAVLSANRYFQKKKAEAVGIITKGKKRKTADSARLRRLSLHHDCFMKDMMHKVSTDIVRYCVEHGVGTIVMGVNRGWKQESGMGKVNNQSFTGIPHDRLKKMIMYKAAREGIRIIEQEESYTSKADITAMDPMPVYGREDGKAQFSGSRKKRGLYACSAGYTINADCNGAANILRKAVPGAWEGTEDFRFLSDPETAGFKYLQRGRTA

SEQ ID NO: 55758 - protein, 278 aa, Microbispora sp.
VLVTEVLKLAPSAEQARSLLATMRACNAAANRAAEVAFALHTANKMTVQKLIYTDLRHEFGLSAQMAIRAIAKACEAYKRDKTIKPTFRDLGAVAYDQRILSWKGRDQISLLTMSGRVIIPVVYPGRWSVTAGVTRRGQADLMYREGVFYLAVVIQVPEPPREDEPDEWLGVDLGIVNLATDSEGKVHCGKGVRAVRRRNARLRARLQAKGTKSAKRLLKKRRRKEARFARDVNHRISKHLVGKAKDTRSGIALEDLEGIRDRVTVTKAQRADLHSWS

SEQ ID NO: 55759 - protein, 351 aa, Microbispora sp.
VILSQPTTVTFSNVLVTEVLKLAPSAEQARSLLATMRACNAAANRAAEVAFALHTANKMTVQKLIYTDLRHEFGLSAQMAIRAIAKACEAYKRDKTIKPTFRDLGAVAYDQRILSWKGRDQISLLTMSGRVIIPVVYPGRWSVTAGVTRRGQADLMYREGVFYLAVVIQVPEPPREDEPDEWLGVDLGIVNLATDSEGKVHCGKGVRAVRRRNARLRARLQAKGTKSAKRLLKKRRRKEARFARDVNHRISKHLVGKAKDTRSGIALEDLEGIRDRVTVTKAQRADLHSWSDQHRPQGCRRPAVRGLTRARHARRGAASSTPQGREADSVEVSSRGSIRSSLTAGPSRSIR

SEQ ID NO: 55760 - protein, 377 aa, unknown
  TnpB Polypeptide
MRAYKFRLYPSKKQEEMLKHHLWIKKGLWNNLLQKTKEKYEKEQKFLTINEMAELVKGTELYSQTAQSVFRDLDKSLKAKIRAKKKGQKWGFPRFKSFDGVKSIHYPQSGFSLGEKLKVSSFGEIPIVRHRVIKGKIKTLTLKRESSGKWFAIFCVEEEPQTPKMNKGPSIGLDLGLNKLATLSDGKIIENPHQFKKFEDKLAQVQRILSRRRKGSHNRFKSKKKVALVHETIANIRSDYLHKSANWLLSHYSKIVMEDLRIREMSEDGHGKGIHDASWGLFTNMLCYKAESAGSEIVFVNPKDTSKECSGCHSLTEKSLWERTHVCPACGLILDRDINAAINILTRATAGMAGSNACGDGIAIPSLKQEAHAFRRG

SEQ ID NO: 55761 - protein, 371 aa, Viridibacillus sp.
MILTNRIRLRPTPEQESALWKSTGTARWVYNWSLARQEENHKKGNKFISDNDLRKEITQIKKQDDFIWLGKVSNNVAKQAVKDACDAYKKFFKGLADKPRFKSRKKSKPSFYNDNLKLKSKPNKLVLIEKIGWVKTSEQLSIDIKYMNPRVGFDGKYWYLTVGIEQEVVKPELTDVVVGIDLGVKDLAICSDGKVFKNINKTQAVRKTEKQLRRLQRRASRKYEMNKEGNRFVKTSNLIKIEKQIRHLHRRLTSIRDNYIHQTTNTIVKTKPCKVVMEDLNVSGMMKNRHLSKAIQKQKWYEFIRQMKYKCEKNGIEFMQVSRFYPSSKMCSNCGDIKSDLKLSDRLYSCECGLEIDRDLNATLNLANYKN

SEQ ID NO: 55762 - protein, 421 aa, unknown
  TnpB Polypeptide
MSNKAYQFRLYPTPYQQNELENIFGCCRFLWNQELNEHQTIYHQFKPLGGIPKGYKYKTEKEYKQIFPFLKNADSKALQSVTANLWDAYERFFQNIKDRKKGITKRKVGLPHFKSKRNEQSYTTYNINENIKIDFEQKKIKVPKIDSWIRYKDNRQFLSPIRHITIRKTTYGQYFVSILVEESIVDPIKQIDENQIEAFDMSAKEFLVSESTHLINPHFYRKQETKLKRLHRRVSRKKKGSSNRYKARKRLAKKYQQIGNQKKDWMQKITRKLTDQHDAIILEDLNIQGMQKFNSGLSKSVTLDFSWYQFVTTLKYKMTWAGKHVMQVDRFFPSSQLCSVCGQKNNALTLDQREWDCPLCHTHHHRDENASKNLKKEGMRLLRSQGIVVTTVGTTGSHAWGDDVRPRSLEAVVGDPRIAHL

SEQ ID NO: 55763 - protein, 433 aa, unknown
  TnpB Polypeptide
LEAVKVALDPSPVQERRLLSHAGAARFAYNAGLVHVKEAIDAGENIGWSPYSLRKWWNSVKDELAVGGDGETWWQENSKESYSYGLESLAKGLSNWSKSRKGDRKGRKVGFPKFKSKNKATPRFAYTTGCFGLVKGDQKALRLPRIGRVHCVEDVTKRVGDGRVLRMTISQYAGRWYASLTVERDDKPVMKPPKGGAVGVDLGVKTLATLSDGTVIENPRYLKKSEGKLKRAQQALSRKVKGSNRRAKARAKVARLHAHVANQRLDAMHKLTTRLAETFSDISIEDLHVAGMVKNRHLAKSIMDAAFGEFRRQLEYKTARTGARLHVVDRWYRSSKTCSECGRVKAKLSLSERTYRCDSCGLVLDRDLNAAINIHVAGSAPETLNAHGATVRRGSLSGCGTRVAVKCEPSVRHSGAVSLGAGDRKGALQATTR

SEQ ID NO: 55764 - protein, 434 aa, unknown
  TnpB Polypeptide
VNCKYSYAWLSEGGRGMLLSHRTSVNIRPEYSNIIGHMCYAASKLWNVCNYERRRYKELELEKYPDWYYQKKAHKGDLWYRQLPSQTAQETCKQLDKAWKSFYVLKKTGGIKDPNPPRFKQDNIPITYMQMGIRHEKGSDQLRLSLSKDLKSYMEEAYGIHEKFLYLENKIFRNMDHIKQLRIYPPEDGKCDLIVVYEVKEPEPISLNGHYLSIDLGIHNLMTCYDSGNGRTFILGRKYLSLERYFHKEISRVQSIWYAQQSGNGIKYPRSSKHIKRIYRKKQDAVKDYLHKVTRWLAEYCRKEGISSVIIGDIRNIRKGKEIGHKANQKFHGLPYNKLYIMLEYKLKLYGIPLIKQEESYTSQCSPFSPEVSKRYAEASNRKERGMYITDGVRYNADAVGAFNILRKYLSVSGKQKELSVTGLKNPEIIKVAV

SEQ ID NO: 55765 - protein, 414 aa, unknown
  TnpB Polypeptide
MQFNTDFHSVLKSAKLWRPDRVQNFIDLQTDSWFNINENYTDSDKHFELDGNPDNIINVIRSRKILLYPTNTQRKKLLSWMESYRLVYNKTIDYAQENKVKSWKMARNAIKKIIPNSWKTNDIPIHTLDNAIHDVYKALKTLITQKKFSWQNYKKFPLRYKKIGNPRKIVKLEAQSFSKKTRNTIGNGIGKIKCSEDFIKIKKDSIIQYNCHTKEFYLFMPFVRQTQGCTGHATCSLDPGLRTFLTGYVTGRNNHIVNICENPMKKVEKKIELLDKLKENKVWRKYHKTQKKLNNIIDDMHWKACNYLCSNYKTIVIGMMSTKSIVRGNKLTPNQKKLAYILSHYTFRMRLKSKCEEFGVRFIETEESYTSKTCSECGNKKEDLGSNKIYNCVECNNIFDRDVNGARNILIKVM

SEQ ID NO: 55766 - protein, 440 aa, Helicobacter sp.
MKVNKGFKFRLYPTKEQQTKLQHSFFVYNQAYNICLNLQQEQYEKNKDLPTKQRKWQKSSELDSAIKHHLKARNLSFSSVVAQQSRMNAERALRDAFKVKNRGFPKFKNSKFAKQSFTWNNQGFSIKDFNERFKMFNLMKMPLKMRMHRDLPLNAKIKQIVVSCSHQKYFVSFSIEYEKELNTIKEPRNCVGVDLNIYDIALSVDLKEYEKLTDLEQYQKDMKELGLKVDENINLKRLIPTYSKLHSFKKYSKEFKRLQRKQSRRVLKSKQNKIKLGGNFYKTQKKLNKAFDKSSYQKLDRYHKITSELSKQFELIVVEDLQIKNMTKRAKLKNVKQKSGLNKSILNTSFYQIISFLDYKQQHNGKLLVKAPPQYTSKTCHSCGQINHELKLNHREYLCQNCGYIEHRDINAASNILSKGLSLLGLGNSLADFKEQSLSY

SEQ ID NO: 55767 - protein, 422 aa, Cyanobacteria sp.
VVSLTYEYKAVPTPEQVQIIEHTLTVCRKVWNFALRERKDWINSRKCQINACSIISEYIIPADAPRPTYAQQCQTLTAAKKECPELKTVNAQVLQQVLRKLETAVLDMGRKGMGFPRFKNRYRMRSFVYPQLGKSQFLRGNQIKLPQLGWLEYVKSREIPDGFALKQARIVRKASGYFVMLTLECNVNVPDTIPDGHPIGIDLGLDKFVATSDGDVIDRPRFLSSLHRKLKLLQRQLKHKKKGSNNRHKLNRKIARLHQRISDTRKDWQFKLAHKLCDGVGMIFVENIDFRLWAKGLFGKHTLEAGFGQFLSILKFVCWKRGVYFAKVDKNYTSQVCPQCDAHTGKKDLKDRVHSCPECGYITDRDVAAAQIVRNRGLSGVGRILDNKQIACGDDLTGTGNRLVKSLRSRKKGEEACLKTAS

SEQ ID NO: 55768 - protein, 205 aa, unknown
  TnpB Polypeptide
LSHVWGNAVVAVEDLSWVVNTMQNGRWNRGAFVQWLTHYVSQNGGWVVAVNSSNTSQLCHVCGSKVTHPTHEVSVCATHGVMDRDVNAAANIAARAVPKVEKARRTRAKNRKLRPQAALRTPPARDSLKYPGRDRTKSAPTPRRKNHRRTAREVILPVCPARAQTYCLEARVLADQDTHVTLETNVAVLKQDTGATCEHKLRSPI

SEQ ID NO: 55769 - protein, 436 aa, Actinomadura sp.
LTGPPEPGRAWTRTRRHVPTSFTSRHGEVESSVFVRRAYKCRAYPDPGQAAVLNRTFGCARKVWNEVLDWRTRRYRIDRTRTGYAESDRYLTQLKKAEGLAYLNEVSSVPLQQTLRHQSTAFANFFAGRARYPRYKSRKGRQSAIYTRSAFRFRDGELYLAKTLQPLKFVWSWDDVDPTPLNPTTVTVSRDADGMWHVSFAVDTDLPEPLEAGGEHVGIDLGIKDFAVTSDGERLANPRHLAAKQRNLARYERRKARKQRDSANRKKAARKVAAAHGKVRRARQDFLHKASTELVRRYDLIVVEDLNVSGMTRNHTLAQHVGDCGWSTFRAMLAYKTLQWGRRLVVIDRWFPSSKTCSACGHLLARLSLSTRHWTCRACGTRHDRDVNAAKNILAEGLSVSACGADVRRTGASRTRSATKQEPLRSDPGRASGGRP

SEQ ID NO: 55770 - protein, 432 aa, Thermococcus sp.
MKRSVTLKLQPSKVQEKALSELVLTSSKVWNRVNYLRIQGFFEGKPIDFLRTEKIVYEEFKSEIGSATVQQICRKNTEAWRSFFSLLRNKRSGELPGWLKPKPPNYIKDGGLIVLRNDQYGIEENKLILKGLGKFKRLEVQFKGRIHLKGKQGRLEITFDPVRRKWYAHISYTVEERRYGQEGVKLPREPLGSLSAGIDLGVNNLMAVYVENGESFLVNGRPLKSIAFYWQKRIADYQSKINKSGAKKSKKLSRMHQKAKLQAKHYINTAVRQTGERLYHLGVSRIVVGYPKSIARNSDRGKKQNYLLSHVWRFNSVIKRLKEASEEYGIQVLVVNEAFTSKTCPVCGKPHEGARFVRGLFKCPETGLVFNADLVGAFNILKKVVKTITPNLSGLYAQRRGNWPKTRPEGSKTRFNLGLNETPQTSLPMARG

SEQ ID NO: 55771 - protein, 712 aa, Streptomyces sp.
VSRKLPLGEGETARTACARGLLRAGVVEKTGEMLSATVLAQRVGWAADLVSGMAAELLAGHWNATDVDRLASGEDAGGQKLPSNAWMALRRLGWTAAPAGGVRVNDRIVRMAQEQAGRTLRSAKWRADLTAGVRTTWPAEPGKRTPEEWDAVREAIPDGEHLPSSVIRSRTRQITAFAAENGRLPADVFELEAPPGAARMLLLSACDGQQATLERGEDDPQRALLRLQLPTRPDPRTYRDWTWVACPITLPPTIPPGAVLHLPTLRLVGGKVRADLAYTHAVPKPRRIGHSVALGVDWGLNTLLSAGPARLHDDGHITALGHGAQFRAAGTLAKQHRLRRLSEHLHSKADHIERLIDADEQHELSGRHEVLRDEIRFVSARRSNLNDALAWAAARWTVDQAITAHATVIYLEDLRSMEAGGMGRTTNTRLSQTVRGQIADRIRHLAAEVGIAVVTVPPRNTSKHCPQCLTPLRHRKAPDRPTVTGWKWAVCPDRAGCGWQGDRDHGAWQRIAARGLTHQTKTVTDRATGQTAIRTVVDKLETQAVITETAETSRADRSKTGPTRRRATHPAPRRRGAPSPTGPSGPAGQRPEGHAPTGRRTLPRAAHRHQGVTTISTPSPGLRPGGRPSGRHRPRGAALGAGFHLHAHATSPRWAEPTQTLCLTWDQADQRRSASRATLASAGPGAPLWAKGRAAVHSRGRSPSSAPAPPGL

SEQ ID NO: 55772 - protein, 510 aa, unknown
  TnpB Polypeptide
MWFVKVFRGGGDMESVKRAIAVELERPPPKLSAIEEQYRRIVEEVAAYVAERGRLEGERYKELYRRFRELYPLPARLIQQAINQGVEIGKSFFALKRDGRVHKPRPEVRRVSIRFAKDSWSYRKTAASAAPVKIAVSLPGGRREIRIKPHRRFWLYWWKTLRGETELASTLMLKRRRGRWYAVFVFDVAPKREPPAGVVAFDVNENLVAVARVSLLPTADAVAQWNRPYLDPAVYSIKTDFGRLAKRYEAVRGRKLEELKRKYPFAGRDDEKKVQNVADTREFRRFARRLRERRRKEGRVRQIVRETTKSPAVIITEELGKSPQEKMIGVEKKKIKKRELRHRITQTPFRKILRAVEDKARETGSVVFYVSSFRNSRVCPIHFVLLKNGGGWHTLHCPHGHAVDRDTAAVLNMLWKTTPTEWVKGVWWDVKKVRKRLKKGRGLVPKEAVRRRNPLVPRLVAYAVWASLRSLKASPQWPAVLARAAPMTPAQGADEGGTRAPPRGAGTPAL

SEQ ID NO: 55773 - protein, 232 aa, Okeania sp.
MKSIRTKLKLNNKQKTLMAQHAGYGRWCYNWGLSLWNAAYKDGYKPNARRLREVFTNHTKPLYPWMKNLSSRVYQYAFRNLGDAFKRFFQGLGKRPRFKKKGKHDSFTIDNCGKPIELNGWNHKLPFIGMVKTYEPIEATAKKITISRQAGDWYLSLAFEFTPTSTPKTTEVVGVDLGVKTLATLSTGVVFPGAKSYNKFESKLSKLQYLNRNKKVGSANWQKAQLKIARLH

SEQ ID NO: 55774 - protein, 394 aa, unknown
  TnpB Polypeptide
VATHRKVYRFRMRPKKDQARALNRMAGARRFVWNWALARWKETYAATGQSISLAQLSAELTALKGKPETAWLAECDSQALQQVLKDLHRAFVNFFERRARYPRFKSRKRDRGRFRIPQRVKIADGEVYVPKIGWVRIRQSREVDGVTKSATFSREADGHWYVSLTVEFEMPAVAIPQPDPAKVIGIDLGLIDFVTTSDPAEKPIPAPKFYRKAAKKIRRAQKAVSRRQKGSKRREKARKRLARAHQKAGRQRNDFIHKISTDLVGRYDAIFIEDLNVKGLARTKLAKSFSDAAMGELRRQLEYKCLWNRKTLIAIDRFFPSSKMCNRCGALNDGLTLSDREWECDCGARHKRDFLAACNIRDEGVRMLAVGQTESPKRSGRRCKTQAIGLSSVI

SEQ ID NO: 55775 - protein, 382 aa, Comamonadaceae sp.
VKDRHAAWLSGLAREVNTVWNYCNDLQGRVFERERKLLSGFDFWPYLRGSTRGECALQLPVQAVQETAEQYAKSRRQHRKVKLAWRKSGGARRSLGWVPFKVRTIRYAHGQVYFAGRWLSVWDSWGLQAYELRAGRFSEDARGRWYLNVTVEVKRPAQHQPAEAGAIGIDLGLKELAAMSDGSKVAAERFYRELEPALAVAQRAGNRRRAKAIHAKIADRRKDFLHKLTTKLARRHGVVCVGDVNAKALARGPHAKSVLDASWSAMRTMLRYKCADAGAWFVEVPEAGTSRMCCACGAMCGPQGVEGLAVRQWSCTVCATTHDRDINAARNILARGLAILEQQFAAAGEARVDEAAVNEIGRHHAGSVGVGHGPPVVGIPVL

SEQ ID NO: 55776 - protein, 145 aa, unknown
  TnpB Polypeptide
MSGREERFIRDVDHCAVKRLAGTPGIGVMAFEDLAYIRRQARKGTKTGRRRRNMLNQWPFSQLQEFTAYKAAAKGIQVVMVDPAYTSQRCNACGYVDKRNRDRARFDCLRCGHSDDADHNAALNIRDRAIQSLGQTQGQGAVNHP

SEQ ID NO: 55777 - protein, 477 aa, unknown
  TnpB Polypeptide
MADAVEIVDKSDAIVNEIAKLTERIYVKENKAMNDLCHKQTAVYNQALWYLRQEFFNLGDDWKIVTNKNGEEKQVSAGFLTFYDLNDKSMLKWKQCYRDAIPLCAANTIQRVCDSWKSYWKALKAYSKNQIDFTGKPKMPGYISKNDKSPVYFTYVQFSIKDKLIHFPRNTNFGDIKIPRLNDQNYKQLPIVKQIRIIPCKMGGYWVECVHDVSIEPADVNEENVMGIDLGMNNIATIVDNLGNQPIMFSGNEAKTINHWYNIEIAKLKKNFARSNPRLAELQRKRETGLSPDEWHELKSLLQNTKQMNVITEKRNRRINKIFHDISKRIIDIAVERKIGTIVVGHNEGQKQNLDKGRRFNQNFGQLPIFKLIQKLRYKAELHGINIVEITEEFTSKASCIDGDDLPDRRTVKKKENGHSDIEFSGKRTKRGLYISKNGTQIHADVNGAYNILRKGCPEALGLNGMGARLYPKQETI

SEQ ID NO: 55778 - protein, 401 aa, Trichocoleus sp.
MLVLEYKVKAKSSQYKAIDEAIRTVQFVRNKCLRHWMDSSKDAKINRFALNKYSTQLRNEFPFVKDLNSMAVQAAAERGWLAISRFYDSCKSKKPGKKGFPKFQKNNRSVEYKTSGWSLNPTKRRVTITDKKGIGTLRLLGKWDIHEYPVKSIKRVRLVRRADGYYCQFAIDVECIDIQPRTGQEIGLDVGLESFYTDSNGHQEPNPKFLRKAESDIKHAQRRIYKKVKGSSGRRKASAKYSRKHLRVNRQRNEHAKRLARNVCKSNDLVAYEDLRVANMLKNHCLAKSIADASWYQFRQWIEHFAAKFGRLAVAVAPQYTSQECSRCKVIVKKSLSTRTHVCSCGLILQRDWNAAINILLQAKSTVGQTGSNASGVGTATLFGATLAEQVLTLNEESHVL

SEQ ID NO: 55779 - protein, 374 aa, Escherichia sp.
  misc_feature (49)..(69): Xaa can be any naturally occurring amino acid
  misc_feature (339)..(364): Xaa can be any naturally occurring amino acid
MHQENTMLPRRISVSLFIDQSIIWPVKRLQAFKFQLRPGGQQEREMRRXXXXXXXXXXXXXXXXXXXXXLERAYKNFFQKRAAFPRFKKRGQNDAFRYPQGVKLDQENSRIFLPKLGWMRYRNSRQVTGVVKNVTVSQSCGKWYISIQTESEVSTPVHPSASMIGLDAGVAKLATLSDGTVFEPVNSFQKNQKTLARLQRQLSRKVKFSNNWQKQKRKIQRLHSCIANIRRDYLHKVTTTVSKNHAMIVIEDLKVSNMSKSAAGTVSLPGRNVRAKSGLNRSILDQGWYEIRRQLAYKQLWRGGQVLAVPPAYTSQRCVCCGHTAKENRLSQSKFRCQXXXXXXXXXXXXXXXXXXXXXXXXXXLSYDTHLTSL

SEQ ID NO: 55780 - protein, 327 aa, Symploca sp.
VLVLEYKAVVKPNQVKAIDEAIRTTQFVRNKVLRYWMDNHGIGKKELYQYNTQLRAQFWFVKHLNSHACQASVENVERAIHRFFDNCKKKKPGKKGYPRFKKNCRSVEYKQSGWKLHSSKRRLNFIDKKGIGEVKLLGKWDIHTYPVELIKRVQRKIYKKKKGSSGRRKARSVYARKHLKVTRQRNEHAKRLARNLCLANAKVVLEDLNISGLVRNHKLAKSISDASWYNFRQWLEYFGDKFGREIIAVAPHYTSQECSNCGIKVQKSLSTRTHSCPHCGYIEQRDVNAAIVILSRATTEGHSGSNANGDVSSTSVGRKTCRGKKRR

SEQ ID NO: 55781 - protein, 452 aa, Bacillus sp.
MKMMKTLRHKITNHTTIFHRTLDIFNEALTFIMNVLDKEFADIDTFEVKTIVPAVEKLIHITKSNPHPKYKEFDSHFYKFPSYFRRSAIASAFGKVKSYRSNLKNWKKEKDIALSEGKTFKKKPPRLQLEHKEFPVFYQGNMFEKTSDSTARIKVFHQNDWVWVDIQFKQQDQYKRGVWNWKENNPQLVKVGKKFFLHISYESKATLSTTNIQDQKICAVDLGINNSAVCSVMDAKGTVLARKFINQPIEKDRLYTITNKLRKVQSVSGNITASNFWRRINGLQKHIVHHTSHEIVKFAKEHRCDVIVFEYLDQMKIPKGFWGAKKLRFKLRYWRKKGIQNKVEEMAHYLDMRMSKVNARNTSALAFDGSGKVERNPKKALATFRTGKVYHADLSATYNIGARYFIRGIQKSTSEKKWLALQAKVPELSKRTEQTLSSFISLNDALETLKVS

SEQ ID NO: 55782 - protein, 313 aa, Geobacillus sp.
  misc_feature (268)..(268): Xaa can be any naturally occurring amino acid
VKSQKKNQKTKKFRTLWCCFNNQNVKVEKKGAFYTVSFPTLEKRIGVPVVTRPYQEAWLNRLLNGTAKQGAAKLYKKRKKWYLAIAITFDVEPRHETKVMGVDLGLRYIAVASVGTKSLFFKGNECAFIRRRYAALRRTLGKAKKLHMIRKIGRKESRWMKDVNHKISRQIVNFALANGVGVIRMEDLTGIRKRAASPKEAGRSLHSWAFHQLQMMIAYKAEMAGIRVEWVNPTYTSQTCKCGYREKANRNGIRFRCQKCGYTLHADXTCKCGYREKANRNGIRFRCQKCGYTLHADLNGAINIAKAISGFAA

SEQ ID NO: 55783 - protein, 397 aa, Planomonospora sp.
MPRYRLSPTPAQEAALAEHCAHARFVWNLAVEQHAHWKPGRKNAPGFAEQCRQLTEARAESAWLRAGSIVVQQQALKDFAQAMANVFGGTHRRPTWRRRGRSEGFRIVALKPDQVRRLSRHVGEVKVPKVGWVRFRWSRAVPDGVKSYRITRDGAGRWHVAFTAVPQPIPAPGTGEAVGVDRGVAVAAALSTGELLTAPGLRDGEKTRLLRLQRKLARARRGSHRRAKTKAAIARLKARETDRRKDWVEKTSTDLARRFDVIAVEDLKIRNLTRSARGTIDAPGVGVRQKAGLNRSILASGWGRLVTRLEHKAPGRIVKVDPRYTSQTCNACGHRAAESRESQSRFRCVACGHRADADVNAACNIRDTAVGRTVAARGGSGSPGPANREPQLELLSV

SEQ ID NO: 55784 - protein, 375 aa, unknown
  TnpB Polypeptide
MQLSETIKLYMTKEQKNLIVMAMNGYISTVNSLVSVATNGTSISKYTTADVDAALPSALTNQCIRDARSIVNKYNKDCRKVSAKNKKLAKQKSAVTIKEPAIPVLKRPCCYINNQNFKIKDNYIDFPVLIDGKSKRISVRTSMTDRQKMIFANAKLGTMRIVCKGNKIVAQVVYEAAELQYSDDGNVMGVDLGIKCPAVSYCSDGSVKFYGNGRRNKYMRRHYKYLRKKLQKAKKPAAVIKINNKEQRIMKDIDHKLSHDIVATAAAHNVSVIKMEQLQNIRSTTRTSRKNNHSLHTWPFYRLAQYIEYKAKLAGIQVEYVNPAYTSQRCPICGNIHHANDRNYICKCGFHTHRDLLGARNICNSTEYVGNRHTA

SEQ ID NO: 55785 - protein, 377 aa, unknown
  TnpB Polypeptide
MIKTNRAIVYRLYPNKKQAELFQKTFGCTRFVYNQMLSVQEERYKNNESHLSKFDMNLYCNHNLKTKYTWLKEVDKFALTNAIYHLEDGYQRMFKHLGKHPKYKNKHRAKKSYTTNFTNNNIEVGENYIKLPKVGKVKAKISLDTECLHIKSATITQNRDETYQVSILFEIIEEEPVQIIPAEGNTTGLDYKSDGLYVSDTGVVANMPHYYRQSAKNLAKQQGKLRNKIIGSKNYYKQQKKVAKIHRHIANQRKDYLHKQSTAIAKQYAYVCVESLNMRVMSNKGFGNGKATLDNGYGMFLDMLAYKLQERGGSLIKVDKWFPSSQICNCCGFQNPILKDLTIRYWNCPNCGITNIDRDVNAAKNIKQEGLRLLGVA

SEQ ID NO: 55786 - protein, 383 aa, Staphylococcus sp.
VALMERLKAYKFRIYPTTTQEVFFAKSFGCVRKVYNLMLDERIKAYQQYKSDTSKQTKLPTPAKYKKDYPFLKEVDSLALANAQQHLDKAYQNFFRDKSVGFPKFKSKKHPIQSYTTNNQKGTISLIGNQYIKLPKLKSVVKIKLHRKIKGDIRSATISKHASGKYYVALLCKEDIQPMSKTNQSIGIDLGISDFAICSDGQKIDNHQFTRKMAKKLAREQRKLSRRLLLAKQRKVDVSEAKNYQKQKQKVARLHEKVKNQRNDFLNKLSTNIIKNHDVICIEDLNTKGMMRNRKLAKSISDVSWSNFVRQLEYKAEWYGRTVIKIDRWFPSSQICSECGYHDGKKSLNIREWTCSNCHAHHDRDINASQNILIEGLRLQKQA

SEQ ID NO: 55787 - protein, 433 aa, unknown
  TnpB Polypeptide
LKETCNKSLKLRIFPSREQEELIVKTFGCCRLVYNSYLKERIDFFENVISKIPKEDKDLRLKAYKSFKYSNLKEKYKFLDEVSAQALCQSRVNLEKAFLNFFKSANGIYKGKYNFPKFKSKKNNSLSYREGQPSKTALCWFHRLVKIPKLGKVKFSHDSLPKWYSSKAKLCNITLERKPSGKYYAVLLFEIEKPEYKVSGRKPVIGLDFSPTNLYVNSEGETGKDFGFVAVKQANSKKLAKFQRALARKKPSSKNREKAKTKLARFEEQIVFKRKEFIEKETLRLVKSYDKIVIENLDLKSMAKFLPNAKNLVDTSWATFVSRLEQKGKDYNCEIIKADRFFPSSQLCSKCGFQNKALKLSQRVWTCSNCKSKLDRDLNAAINLKNYILSERQEFRPAKDCKQSNAGSQCELKSAETGICAGDCQEEGARPLV

SEQ ID NO: 55788 - protein, 179 aa, Clostridioides sp.
  misc_feature (70)..(177): Xaa can be any naturally occurring amino acid
MLLYLKSQVVDIEAFENTNNQIGLDLGIKEFCISSCGEFIENPKYLKKSLNKLAKLQRELSRKTIGSLNXXXXXXXXXXXXXXXXXXXXXXXXXXXXXXXXXXXXXXXXXXXXXXXXXXXXXXXXXXXXXXXXXXXXXXXXXXXXXXXXXXXXXXXXXXXXXXXXXXXXXXXXXXXXSR

SEQ ID NO: 55789 - protein, 366 aa, Clostridiales sp.
MQKGYTARLYPSKEQLNILNKAFGATRFVYNYFLAERIRSYKEDGVSLTYNKTANMLTTLKRNKDHLWLLETDSMALQEALRNLDRAYQNFFKKNARFPRFHSKHGKQSFRTRNQSNGIRIANNTIKIPKVGFVKFKGLKDLEGRILNATVSMSATGKYYISLCVEQKDVVLPNDGCMVGIDVGLKEFYTDSNGKVVENHKYYRKHEKKLIREQRSLSRKKKGSKNRNKQRAHLARAHEKVANIRKDFLHKQSAMLASENQVVCVEDLNIKGMLKNHHLAKSISDVSWSEFFRQLEYKTKEHGGVLVRVPTFYPSSQTCSCCGYQNPLVKNLAIREWFCPKCGSHHDRDQNAAINILNKGLELLED

SEQ ID NO: 55790 - protein, 372 aa, Clostridiales sp.
MEYSYKFRIYPNIAQEQQIHRTFGCCRFVWNHYLAQRIEAYRETEKSPTRFIQDKDLTSLKKQEETIWLREVDATALQSSLRDLDTAYQNFFRRVKKGEKPGYPKFKSKHDHRQSYKSKCVGTNIKVLDKAVQLPKLGLMKCRVSKAVKGRILSATVSQSPSGKYFVSICCTDVEISPMPSTGAVAGIDMGLKAFAITSDGVEYPNHKYLAKSQKKLAKLQRQLSRKSKGSNRWEKARLQVARLHEHITNQRHDMLHKLSTDLVRDYDLIAIEDLAPKNMVRNHRLAKSIYDAGWGEFRRQLQYKASWYGKEVVTVDRFFPSSQLCSSCGYRNANTKDLSVREWTCPQCGAQHDRDINAAKNILNEGLRLLA

SEQ ID NO: 55791 - protein, 421 aa, unknown
  TnpB Polypeptide
MNCLTARLSYAVRLWCKLIEENDIRTRSQLENIRLQHRVQEETGLSAGFVQQAGNKALWMWSAYREQHALRKRMLSKVKRDSKWYEKLLNREPKLPCTSKYSLIKKQPVRFDRRTGRIERTKLKLTSYVAHISTLAKGETIDVPLNPCEYHRQLLEKGIVRDFELIWDRDRKRWMVHVTVLFQSVPQPVAEFMGVDLGVRRAASTVLMRPGEKPHDHKIFRNGKLKLQRLNDHISHLQRLGKHEALKKQRNKRRNVSEHYDWLLANELAESCRNVLVVFGSPDYIRYNNYRGNNKRYLRKLLQSWSFRRQTQYAQTKLDEHGIPSLVLNEWGTSNRCHRCRGKVERSYKGSWQRVKCVACGLEYDGDFGGAANTAQRGMSVLGVKSPADLTVLNGAGAPVERAQTRDDSAEKVDEPRSPAL

SEQ ID NO: 55792 - protein, 368 aa, Clostridium sp.
  misc_feature (187)..(280): Xaa can be any naturally occurring amino acid
MQLTETVKLYPNKYQTELIKATMSEYISTVNKLVFDAINGRAITKITTADVNAILPSALCNQCIRDAKSIIRKYNKALRNSNTKVRLPVLKKMCCYINNQNFRISDDCIRFPVIINGKSKRISVKKKMSERQKSIFSSSKLGTMRIVVKGHDLVAQIVYDAKEDAASSNNNVMGVDLGIKCPAVSYXXXXXXXXXXXXXXXXXXXXXXXXXXXXXXXXXXXXXXXXXXXXXXXXXXXXXXXXXXXXXXXXXXXXXXXXXXXXXXXXXXXXXXXXXXXXXXSRKNNHSLHTWSFYRLAQFIEYKAKLAGIKVEYVDPAYTSQICPICGSVHHANDRNYTCRCGFHTHRDLLGAINICNSTEYIGNRYTA

SEQ ID NO: 55793 - protein, 365 aa, Arundinibacter sp.
MEVIQTYKYKLKPTTQQANLLDNWIGTCRFVYNLALDCKIQSYQKGVRLSKYDLMKQLPGLKEVEWIQSVPSQSLQNVIERLDVAYQKFFSGGGFPKWAKRGEYNSILFKSVSQTATGFVLPKVGQLKVFKDRMPTGKLKTAIIIKESNGYFMCVTFGIESKNLYPTDENQVVGIDMGIAHFLTDSKGCYVENPKYTKKYQARLRVKNRSLARKKKGSGRFKKTKSELSRLHSKIANVRKDFSHKVSLKYVKENTLIVCEDLKVRNMIKFGNLSKSIADVSWSGFFDKLSYKSKLYEKRFVQVNPKFTSQKCNSCGHIAKENRLNQANFHCVSCGHQQNADFNAAKNILGEGIALNRQREAIACA

SEQ ID NO: 55794 - protein, 342 aa, unknown
  TnpB Polypeptide
MKIVSSYGIEIKKQHMFDTTIKIYREAVSFLINCLNNEWPYIQAIDKAKARFNFAEKLVHTTKNNAAKYDFDAKFYKFPSYLRRAAIQAALGSISSYHSNYKNWETNGKVGKEPKLQCDRFCFPAFYKTIMYEESNKPNQCYLKLYKNSDWVWVSIKMRATDVKYISKYWSHCEKSAPTLEKKYGKYFLRFAFVEKVELSETEIQDRRICAVDLGLNTDAVCSIMTADGTVLARKFINFPSEKDHLYHVLNRIKRKQKEHGSNSAAAMWRYAKALNNDIAKKVAAAITEFAVLYSVDVIVFEHLSFTGKKHGGSKAQRLTMWDTEGAPLRYPDFAYLCLGHK

SEQ ID NO: 55795 - protein, 331 aa, unknown
  TnpB Polypeptide
VKLADQNFRAFFAAIKSFSKHPKKFTGRPKLPKYKDSKRGRTVVIYEKGALSKREFKKTGLIHLSQTDIKIRTQIKDFNLIQQVRIVPKSNYFNIEVIYTKPVKELIVNDNYASIDLGVNNLAAVTFNDGKNPFLINGRPLKSINQYFNKTKASIQSVLERKNNKKWSKKLSRLQNKRDNKIKDYMHKASRLVVNQLVSKNVSTLIIGRNKLWKQEITMNKSNSQNFNTIPFYTFITMLKYKCELEGITLLETEESYTSKCSFFDNEPVKKQSEYKGKRVKRGVFKTSTKRIVNANINGSYNIMKKAISKYFLIEMDEIEGFAVTPKFLKI

SEQ ID NO: 55796 - protein, 389 aa, unknown
  TnpB Polypeptide
MKTINKAYKFRIYPTNNQRLKLSKTFGCVRFLWNQEVNLFNEKKDSKSYKELKVEYPWLSEVSASSLQQKEMDFKDFKNQFFSKTRKKKLGRPRFHSRRDKQSYRLPNQKFYLIENKIQLEKIGKIKIVLDRIIPEDAKFLSVTVSKNRTNQYFVSISVEQQVLSKEKTNKSIGIDVGLKNFLTTSNGDVIDNPKYFSENQAKIGKLQRHLSRKRGSRKGEIKSSRWLKLNQRINMLHLKVFNCRNNFLHNVSTSLVNNYDVICIEDLNTSGLLKNHRLAKSIQDVSWSQFFSILKYKCDWYGKDLVMVNRFYPSSKTCFSCGNIKENLKLEDRTYTCNCGYVCDRDLNAAKNILAFGVTEAQRMSSSATDKDQSRSNYVETSTLIGIE

SEQ ID NO: 55797 - protein, 604 aa, unknown
  TnpB Polypeptide
VGSGSALGAGGRPAGVGLVGRRVVVVAGGAVSAPCQDHAGCDAGASRADTHALGHHRRVALVPTVTLAGSGLGVHAGLRPTHRRRYAHALRRAVVLAAVPPRLWPAPQVFALRDREPVGVAGSLGLRDAHTMALGAFVGSQAMNDELELSRRALQTENARRRAKLEKAQTQMDICYCVRVLVNKAFKFRIYPTPEQEKILSQQFGASRFVYNYFLRQRIDYYAAHHGEKKRGLNYHDTAKMLTELKRLPEYAWLNEANSQALQAALRNLDTAYRNFFEQRAEFPKFKSKRNKQSFHVPQHFTLDSEQGRLTIPKLAPLKVIVHRPLEGEMKSVTVSRTSAGRYFAALLCEVEIKPKPKKRGRVIGLDLGLKSFAVMSDGEKIDPPQHFRKAETKLARLQRQLSRKQKGSQGRDKARVKVARQHEKIANQRADFLHKLSRRLVDESQALYVESLNVKGLMSNHHLAKSISDSGWSEFVRQLEYKSAWYGSRFGQIDRFFPSSKRHAACGYIYQDLQLSEREWTCPECGTLVDRDENAAQNILTFARASAAARPAVARRANDRAGTGGQLSDSQRRAGTALTHTPVETRVRHAGQRNRKPPASAGR

SEQ ID NO: 55798 - protein, 400 aa, Ectothiorhodospira sp.
MLIAHRIALDPNNAQASYFARACGVARFAYNWALAEWQRQYEAWKADNSRPKPSQAALRRQLNTIKREQFPWMLEVTKCAPQMAIIQLGEAFKNFFAGRAKYPKFRKKGVHDRFTLTNDQFSIDGCRIRIPNLGWVRMRESLRFRGKIMSATISRMADRWFVSIAVDTQDDSHLPKAENQGAVGVDLGVSALATLSTGEVINGPKPHKALLSRLQRLSRSLSRKQKGSANRKKAKAKLARLHARIANIRSDALHKLTTSLTRRFHTIGIEDLNVRGMMKNRNLARSIADMGFFEFRRQLEYKAAMRGGQIKVADRFYASSKTCSACGHKLAELPLAVREWACPSCGAVHDRDLNAAINLKSMAVSSTVSACGEEGAGRARKRAVKPASVKQEAIGRLSQT

SEQ ID NO: 55799 - protein, 339 aa, Methanomassiliicoccus sp.
MLLTFNVRHGSDLSGELVNARMVAEHALRTGSRTSKDVRDIGLKSAIANQVLRKYSNGFNIRTVHRVQLTVPGQGVKVDEDRRELYISCLKLRLDISRLPDFDKVNQVELDEKYAHVTVTINEPPVREVDQWAGVDLNSTGHIAVVGYPTTGKVQKYGREAPHIRRKYGKMRRHLCIHGHPRVAKKKLKRKENKKVKDINHKISRAIVNKAAQQACGIKMERLSDIRTTARQSRSPRPSLNSWSFYQLQFMIEYKAKLLGVPVAYVDPAYTSQQCSRCGEIGARSGKDFTCSCGHVVHADVNASLNIALRPSFEEGDGLLHQDRDWCKGRIDTPQEAPA

SEQ ID NO: 55800 - protein, 430 aa, unknown
  TnpB Polypeptide
MNINKAYRYELKPNNKQISLLIKHCGVARFAWNWGLAKHRTEYETTGKSSNAMKQHKELVILKKTEFPWMYEVSKCVVQLPLQDLAKAYVNFYRGRKNNKDIGYPKFKKKGEHDSFKVNGGKNSLRVEGIGARLPRIGLIRTKEPTSKLKGRILNATVSREADRWFVSLCVEQEIAKPTPIQGDIVGIDLGINSFATIWDSKQTQKVEAPKPLAQNMKKIKRLHRQQDKKQKGSNNQKKATIRLSRCYHRIRNTRKDFLAKLTSSLAKTKPVIIIEDLAVSNMVRNHRLARSINDVGWGEFRRMLEYKTEWYGSKLVVIGRFEPTSKMCHVCGVINKDLSLSQRTWICPNCGTVLDRDENAAINIRNLGLSILATESSSGSNACGEGVRLPSLEATLVEAGSKHTPMGNKTYGTVDSFLAIFDIDIILKV

SEQ ID NO: 55801 - protein, 394 aa, unknown
  TnpB Polypeptide
MSRYRLAPTATQAAVLRDHCAHARFVWNLAVEQQSHWRPGRKSAPSYLEQCRQLTQARAGYDWLRHGSQMVQQQALRDFAQAMANFFADTHRRPTWRKAERDEGFRIVAVKPGHVRRLSRKTGEAWIPKAGWVRFHWSRAIPAGVKSYRVTLDRAGRWHIAFAAIPLPIAPPSTGSVVGVDRGVAVSAALSTGEMLTVPRLSPAQRRRLCRLQRRLARARRGSKRRARVKLAIAKLRVRDADARKDWVEKISTDLARRFDIIRVEDLSISRMTRSGRGSIARPGQHVRAKTGLNREILRSGWGLLVRRLEDKAAGRVEKICPAFTSQRCSACGHIAAGSRESQALFRCVACGYACNADVNAARNIAAGHAATARGGDGITRPLNREPQLLLQLA

SEQ ID NO: 55802 - protein, 299 aa, unknown
  TnpB Polypeptide
VINQRVRQVRRSRLTSLKDWWDELNDRPATVAQVLSCVSKKHQSPGRRKKGHNVGSLNWKAPKDFRSFTYIFLASSSIVRTANPYCRCRNLRIFLSSNTAKFPPDTVKEITVKKEPTGEWFASFTVGDKETPKKPTNPDRCIGIDVGILKYAHDTDGTAVESLDLSDDRERLERAQRDLSRKEHGSANWERQRQVVAERHADLKRKRRDFLHKLSNYYATEYDLVAVEGLDAKELIEFPGNSRNRTGAAWGTFQQMLEYKCEREGTHFVEVDPRNTTKECASCGVKTDKPTWVREHSCP

SEQ ID NO: 55803 - protein, 408 aa, unknown
  TnpB Polypeptide
MQKAYRYRFYPTTEQESLLRRTMGCARLVYNKALAARTDAWYERQERIDFVKTSSMLTSWKKQEDLDFLNEVSSVPLQQGLRNLQKAFTNFWAGRAKYPNFKKKHSGGSAEFTKAAFRWRDGQVFLAKCTEALPIRWSRDLPEGCEPSTITIKLEASGRWFASLLVDTDIAQLPKSDKQIGLDVGITSLIATSNGDKIANPKHFKQLRKKLKRVQKSLSRKQKGSSNRHKARLKVAKVHAQITDARKDFLHKLTTRLVRENQTIVVEDLAIKNMVKNHKLGVAGHPQRALAISDASWGELIRQLAYKCEWYGRELIKIDRWFPSSKRCGNCGHIVDKLPGGRVPRPALNIREWECPKCKETHDRDLNAARNILAAGLAVSVCGANIRPDRESSEGQLRKTRKGKKQKT

SEQ ID NO: 55804 - protein, 272 aa, unknown
  TnpB Polypeptide
VRIVPKGNCFIIEIVYNESKIVEAGRFCRLLDTSRKAGIDLGINNLIALATDQPGVRPVLINGKALKSINAWYNKRVAKLRSQGKYAHIRAVTNKRNRRIKDLLHRASSKVIAYCRENNIGTLVIGYNKHWKQEVNIGRVNNQKFVGIPHAILISQIQYKCQALGITTVIQEESYTSKASALDNDFMPVYGNNPENVVPLFSGKRIRRGLYQSKHGIINADINGALNILRKATGEALGLACKGCVSNPIMMDLMPHKSVVIRRENTAHQIAA

SEQ ID NO: 55805 - protein, 459 aa, Mycobacterium sp.
MARFEVPEGWMVQAFKFTLDPTEDQARSLARHFGARRKAYNWTVAAVKRDIQAWRETGVEAEKPSLRVLRKRWNTVKDGVCVNAETNTVWWPECSKEAYADGIDGAVDAYWNWQQSRAGTRPGKRVGFPRFKKKGRDQDRVSFTTGAIRIEPDRRHLTLPVIGTVRTHENTRRIERLIAKGRARVLAITVRRNGTRLDASVRVLVQRPQQPGVANPSSRVGVDVGVRRLATVADADGMVIERVENPRPLDAALKELRHVSRARSRCTKGSRQYRERTTELSRVHRRVNDVRTHHLHVLTTRLAKTHGRIVVEGLDAAGMLRQKGLPGARARRRGLSDAALGTPRRLLSYKTSWYGSQLVVADRWFPSSKTCHACGHGQDIGWAEHWQCEACSASHQRDDNASINLARYEEPISVVGPVGAAVKRGADRKTGPRPAGGREARKGRSRNAAEQPRDGVQVA

SEQ ID NO: 55806 - protein, 412 aa, unknown
  TnpB Polypeptide
MKVLCAFKTELDLNDHQRTACIKHAGAARWAYNWGLARKQEAFEAGLKTPTAIDLHRELNVLKHTEISWMYEVSKTAPQEALRNLDRAFDHFFRRVKLKKQGKLKVKVGFPKFKSKKNGIGNFQLWGAIHVHKKSIQLPRLGVLRLKESGYLPVEGARILNATISERAGRWFVSIQCEVEMPDPVRSEKPICGVDLGIARMATGSDGKVFENPKALKSNLGKIIRLQRSISRRMKGSANRKKAVQQLAKAHQKVANIRKDSIHQVTSQLSKTKSVVVLEDLNVSGMVKNHHLAQAISDVGFYEFRRQLMYKSKWYGCEVILADRFFPSSKFCSRCGYKLDKLDLKVREWDCPSCGTHHDRDLNAAYNLESLAPTTASSAGSNACEEDIRPVVIQADLDEAGTELQSARCRFV

SEQ ID NO: 55807 - protein, 412 aa, unknown; identical to SEQ ID NO: 55806
  TnpB Polypeptide

SEQ ID NO: 55808 - protein, 288 aa, unknown
  TnpB Polypeptide
MKLTLQIKLLPIEEQALSLLNTIRTCNIVCNRISDIAWEKKEFNQYRLHHLVYHQTRDSSNLSAQIVVRCISKVINAYKAGKKKKRVFKPLGAITYDSRVLSYKGNTASVWSIDGRLRIGFVCHNPRYLPHVKGEADLVYRKGKFFLFQTVEIPEENIKDVEEFIGVDFGVNNIATLSDGIQYNSKQLDKVRNRYSRTRQSLQSKGTSGGRKCLKRLKGREARFATVTNHAIAKQVVEKAKSLNMGIALEDLTGIRERTKVRKVQGRCRLDSVEFQVDDKILFIWKLI

SEQ ID NO: 55809 - protein, 411 aa, unknown
  TnpB Polypeptide
MNRAVKIRIYPNKEQRVQIEQTIGCSRFIYNQMLADKISYYQKEKKMLRNTPAGYKKEYPWLKEVDSLALANAQLHLESAFRKFFREPACGFPRYKSKKHARNSYTTNALNGNILLQDTHLKLPKMSVIRIKLHRQIPSDWKLKSVTVSREPSGKYFASLLFCCENQTVEKRPAERFLGIDFAMQGMCVFSTGERAGYPMFYRKAEKKLAREQRKLSHCEKGSRNVYTMSSDTIEKITKLDAYTNMDHCVYSVLATSIKGYDVTYGNTTLSVTRKTVKKDTSKTTATPTAAATESGTAVNNATDSSVKNIWTLNGKKISDDDERDFLSPYSLAYLLEYSGKADNKVKPKSSKPVLTIVYHENNRDVTVRYLPYDGINFYRVEKNGMDYFLVDKLSVDDIIKKFKGIEKLAK

SEQ ID NO: 55810 - protein, 396 aa, Desertifilum sp.
MEQVLTLSCKLQPTPEQALKIQALLKAFADACNWVNQSVKPSVTSKIAIQSQVYQDIRARFGLSANQAVRVCARVGTNRKTAKLKQKPVKAFRPTSADYDARIFAFREQDLTVSLTLLEGREHIKLDIGNYQRGRLKGRKPTSAQLCKHRDGSYHIHIQLTDEAPEPIKADRVIGVDFGRREIAKTSTGMGWDGKQLNQVRERFSRVRASLQKKASRKRDATRTKGTRSSRRRCRQVLQRLSGRERRFQQWLNHTISAAIIREAKHLNAIVAIEDLTGIRDRTNQQPRNKTERRRSNSWAFYQLRQFLSYKGIKEGVEIVVVPPAYTSQTCNRCNRIGRRSEKVFRCGHCGWHGDADFNGALNIAALGLSVTQPRGSGLFCCLEQAVSGLPKAPLL

SEQ ID NO: 55811 - protein, 370 aa, Geobacillus sp.
MHKAYRFRLYPTRTQAKLLNETIGCCRFVYNHFLAEWKETYETTGKGLGYNECSKRLTVLKKTLPWLKTSDSTALQNALQQLAEAFDRFFEGTANAPRFKSKKHPNQSYTAQCNYPKNGRPTIEVDGHRLKLPKLGWVKFAKNREVEGRILSATIRRNRVGKYFVSILVETDIPPLPQTDKKVGVDLGLKQIVVLSTGETIEHPRYWRRYEEKLAYWQRVMARRKPGGSNWEKARLKVAKLHEKIANCRNDFLHKLSTRLIRENQVVCVEDLRVRNMQKNRKLAKSISDSAWGSFLRMLEYKATWYGRTVVRVASTFPSSQLCSCCGHRHVEVKSLGIREWVCPACGAEHDRDHNAARNILNEGLRLLSL

SEQ ID NO: 55812 - protein, 418 aa, unknown
  TnpB Polypeptide
MIKRVECHRLKPSSSFYAVARTFCHLSKNLYNHGNYLIRQKFIEEGNWLRYTEVNRLLRADTEYPDYREMPTVQSAQQTLRLLDRNWTSFFAAIKDWKSRPEKYKGRPRLPKYKSKDGYFPLVLTNQDCRLMDGFICFPRAFQGFTVKAIFASRPNAVFKQARFIPHGDEIKLELVYDLPEVAEKAGNGKYAAIDIGIDNLAALAWSTGEHPVLLKGTPLKSVNQYYNKQLAKHRSICELMNGRRSSKRIARLTAKRHRKVEDYLHKASRKVIDLCAEQDVSVLVIGKNKGWKQEVNLGRKVNQSFVQLPFARFIQMLQYKAEAIGMKVVLTEESYTSGTSFLDGEAPTKDRYDKSRRVHRGLFQANDGRKINADINGAYQIMRKVFPNVNADGIEGVALRPTVVALSMSDRRSSSCA

SEQ ID NO: 55813 - protein, 420 aa, Spirulina sp.
MILTHEYRIYPSTEQIVLMERWLELLRRHWNYALGQRLDWLNRTRELINACSIVSEPIGDIPEPVNYYSQQAALKETKALFPEYKGIYAEVQQGNLRRLDKAWQRWRKPDETGKRAGRPRFKKVGKLRSFIFPRVNCPKAGVHIQGERIRFSRIGEMQIRLHRPFPEGFIPKTCTVIKKADGWYAGITLKDASVPELLPVTEIKTAVGVDVGLKEFAVTSTGETFPIQQFYRRAQQQLARAQRKLSRKQKRSRNYLKQLNRVQRLHQRIERQRKDHHYQVAHTLVQRFDLIALEDLNIRGLAKTKLAKSILDAGWGGFMTILEAVAVKRGLHVVKVSPHGTSQDCSGCGAKVPKTLSVRTHQCPHCGLEMDRDENAAINILNRALCEVGIILPACGGFDSSRPVKQEAQVTVGVQLSLFA

SEQ ID NO: 55814 - protein, 372 aa, unknown
  TnpB Polypeptide
VEKAFQYRIYPNKKQKELIQKTFGCTRFVYNYYLNKRKEMYENDKTTFTFNMCSKDLTKLKKELEWLKEPDKDSLQKTLKDLDMAYQKFFKEHTGYPKFKSKKNRYKSYRTSYTKTSAGGNIMFINKRIKLPKLGLVKTRDKKIPQGRILNATISQEPNGHYYCSLCCTDVDFSQYQKTNQNIGIDLGLVDFAIMSDGKKIENPQFYEKSEQKLARLQRELSRKTIGGSNWNKVRIKVANLQKHVANQRKDFLQKLTTEIVKAYDVISIEDLDVKSMKETNSTIRNKRVGDVSWSEFRRMLIYKSQWYGRTLSVVDRYFPSSQICHCCGHRDGKKAEDIREWVCPECNSELDRDVNAAINILNEGLRQLNFK

SEQ ID NO: 55815 - protein, 419 aa, unknown
  TnpB Polypeptide
MYADTGRRYRAYPTPGQAERLTSWGHSRRAVWNLALEQRRFAWRQRGRTIWSAEQCRHLTDARADLPWVADLPAQSAQQVLRQLDRAYHNWWNPEHPAQPPTFRKRSGGLSVPFPGQAVQVRKHTRRWAEVRLPKLGWVRFRLSRPLGGMVRNATIAKDALGWHVSFGLATATKPAPPNCLPGCGVDFGVACSAFVSDEREPRLMPSTLTAGQRRRLLGLERRKARQITWAKKHNGGRYSNRLGRTISQIAKLRARQARRRQDFTHKLTTDLAKNHGWVAIEDLRVKGMTKSARGTRESPSRNVRAKAGLNRAVLDNAPYERQRQLAYKASRFGSELRLVRPAFTSQICSACGVRDPKSRPGCGRVFMCTACGHVEHADLNAARNIHDLAAGQAVLSTRSHLRAARPSSRMRGPLGSVD

SEQ ID NO: 55816 - protein, 390 aa, unknown
  TnpB Polypeptide
MLLTRKIRIKIRKQDAQKLEEQSNLCRQLYNYALRQRISAYKEDKKSLTVWEQKKELPKLKKEHPEYARVYNKYLSSTLFRLDRAFKAFFQRCNDDKRKGFPRFRGKYYWFTLTCPSMYCRRISNRILQLPQKIIVKTTEDIPENFGDINIVKSGEKWFITFTYEVKEKEKPLNDDIIACDLGLRNLVSAVSTQGRIIERQHLKPSKKELRRLDNLRSKRDKCKKSSNRWVYLTNRLRDENREWQNRVNDRLHKVSTYLTKMTERNLVIGRLRPSSMNSSNRWLNRFVHGEWRISRFREMLIYKCRREGKDFFEINEVNTTKTCCVCGTLRSMRLSDRTYRCRTCGNVMPRDINSAFNLLKRFLPGLGHISSNGYGVLARARNLNTFNYV

SEQ ID NO: 55817 - protein, 321 aa, Aigarchaeota sp.
IVEVVLGVPFSYDANKEVRKLLEDFRDMVNFCIEYAVKRKITSYAKLRKGVYGDWKRRWDYSTHFCHSACKIALAILKNHRRKRRDGKPKARKLFMQLDPQLYKFYGDKIRISVKPREFLYIDLKYGEYQRKFIDAWIEGKLKAGEITMNETKIVIPFKKDVDLSNPKDWIAIDVNESNVTAVSSNPHILKIETDLRTIHTTYFNIIRNVQRLRKFKPKTAKRLLKKYSGKRKRKARDECHKIAKRIVDFAEKHKMGIIMENLKWIRQRINYGRMLNRRLHSWNFRRLQFYIEYKAKLSGLPIVYVNPKGTSSLCPICVES

SEQ ID NO: 55818 - protein, 407 aa, Aigarchaeota sp.
LKKDVQVTVVGKLFKPNPGKVLALNKTLEEYFKLVKWYLDFNSKSKKFLHANGYEKAKRLFNLNTALIQTARDKAVEVLKSFDKCKNEDSNLKLKKISIRFDNRCYNFSKTANVLTPYWLTLSLNKGKRISLPIIFGERQKQRIEEAFKGEWKFATVEMVKHNEEWYAYFVLTKTVELQDEHETIIAIDRGEHNLAVAVAISKNNPEKPMKGKFWRGEEIKRTRGLYGHIRRKLQEKKLLKKVKELRGKEKRKINQQLHIIANQIIVYAKQFLKPIIVMENLNGIRRNFKKAKKLNNRFHSLPFRKLQTIIEYKANLEGIEVKYLTKKETKNTSKTCHRCGHVAQVKGREFRCPRCGLIYNRDLNACVNIAHALMRGMGWRSREPREPADGEIGVKPTLNAGSSLLQ

SEQ ID NO: 55819 - protein, 184 aa, Okeania sp.
NKLHKKLRLAGKSLSRKTKGSNNYQKARLKLARIHAKIKDSRLDYTHKLTTQLIRENQTVVVEDLAVKNMVKNHKLARAISDANWSELVRQLEYKAEWYGRELIKIDRYFPSSKRCSNCGYVVEKLPLNIREWDCPECGSHHDRDINASINILAAGLAVSVCGATVRPEESKSRLCWCIETESP

SEQ ID NO: 55820 - protein, 355 aa, Halomonas sp.
MKQTKTLKVRVKDKHVDQLNRMARNVNFVWNYLNELSSRAIRERGLFLSAYDMHPYTKGAGTDLGLHSQTLQEVAREYTTRRKQFKKSRLAWRKSGGVRRSLGWIPVNTGAAKWKNGQVFHNGTYFKVWDSYGLGQYTFRSGSFNEDARGRWYFNVVVEVNIPPNQAQGEVGIDLGLKDTATCSDGQKLEAGRFYRDLEAKLAAAQRAGNKRRVKAIHARIKNRRKDANHKFSRQLISQYGTIVVGNVSASKLTKTRMAKSVLDAGWYQLKTMLEYKCDHAGTVFKEVNEAYTTQTCSNCGALPRERPKGIAGLGIRDWICSECGASHDRDVNAARNILSLGAGRCPQAVGIPRL

SEQ ID NO: 55821 - protein, 287 aa, unknown
  TnpB Polypeptide
MEIDFAGKLRWYGKQGRLEIHYDETRNAWYASIPVEVGVEITKKGKESKYIIYGKRKNIRVELPKGNKVASIDLGINNLASVVLNDGTWFLYKGVRTKEDYFYLENKISQVQSLADKTKNIGEYEAYDELLKEKKRLFKKLMRRLLHLYRNFAFHLMKKLHELGVSTIYLGYPFNIAQDKGNKFTVNMWSYRKLMMAIELKAQEYGIKVYEVIEYNTSKYCAYHNVEVKRNPRGVISCPLKHKLHSDLNGALNILKKATGKVLSTIKKPLSFIVDHNRVAPVKGCNP

SEQ ID NO: 55822 - protein, 441 aa, unknown
  TnpB Polypeptide
MRKKKKNLKENIINHHNDLWIPSNDLEFEDIKTNSWFDIKYYKSNHTTFENNLKIKGEKIKTKIYCKKIKLDLSTEQKEIINRWLNACSIMYNETIDFIKQNKQEGFDYKKIRTYHLKEKRNEIIEKSKVLIIERNTSIPTHIIDCAIKSACSKFKSAITNYKNGHIKHFRIRKLKHSRPNKVMEIEPCYFNLIKNDKVSLCYKILGDIKYFYNNQEIKLSKINHACNLQYDSKLKEYNLFVPELNYDVSNIKKKEVISIDPGIRTFMSCITENEVIKFGTETNQRIKKELKKIDYIKTIKCKKKIKKKIENRSNKKINHLVNELHWKVIRYLTINYKIILIGNLSTKGIVKNDKSNINKMTKRLSYALSFYRFRQRLEYKSNQENVSLKVIDEAYTSKTCSNCGSYKENLGSSKTYNCNNCNMIIDRDINGSRGIYMVSH

SEQ ID NO: 55823 - protein, 376 aa, unknown
  TnpB Polypeptide
MKKIKLKLNSIQIKTLQTWNYHHRYTYNKTISLLNEDNERPLYKGVKPENSNTYYSKLELRNLIVPKSSCSHIKWILETPKAIRESAVFEAYKNLQSAISNLKNGHIKYFNLRYKSKKLLKWSIGIPKESIKVYQNGDLGIYEERTTNFRLRTTEKIKEINNDCTIHFNGLNYYICVPELVEMKKNKECNWVCSLDPGIRKFQTIYSPDNDSYITIGEKASGVLYVNLLKLDKLLSKRNSKNVLKIKKLRLRIQHLQDELHYKTINFLCKNYKNIYIPKLTKENDIIKCSNRKISSKTVRNMTVLGHCKFIEKLKTKAEEFTNVKIHIITEEYTSQKCLACNTFTKTKKEMFICKDCNFTLDRDILGSTNILLKNW

SEQ ID NO: 55824 - protein, 428 aa, unknown
  TnpB Polypeptide
MLIMRAYKTELDLNKVQRTACLRHAGAARWAYNWGLARKLEAYRNGEKVPTAIDLHRELNVLKKGELSWMYEVSKCAPQEALRNLDQAYANFFRRAKAKKAGKKVQAGFPKFKSKKNGVGGFRLTGAIHIYEDAIQLPRLGRLRLKEHGYLPVEGVHIFGASVSERAGHWFVSVQVEKEVPNPIASYRPVVGVDLGILALATFSDGTRIENPRALKSSLRRLKQMQRVVSRRQKGSANRGKAVRQLARAHLRIANVRKNALHQVTSLLAKTKSAVVLEDLNVRGMVKNHHLAQAIMDVGFYEFRRQMTYKGQWYGCQVILADPYFPSSKRCSQCGHIQATLELGTRVYICEHCGLMVDRDLNAAINLEQLTTGSSPERYACGERCATSRTIVFLVQPGETRKEVFGSTAYPESKDNGGLEHAVKAVIY

SEQ ID NO: 55825 - protein, 428 aa, unknown; identical to SEQ ID NO: 55824
  TnpB Polypeptide

SEQ ID NO: 55826 - protein, 418 aa, unknown
  TnpB Polypeptide
VADDYVRRTAITRLEVTDEQRDLLEETISQWKRGCQLATDMAWGKCNTKSDVQPLAYDDVREYTDLGSQHAILATHQAAQAITGCLERRSKGKKVSKPTFTAPTVKYDTRTMSLFDDDTVSLSTTESRVRCDLALPNADNGYQRQYLNSDEWSVTESTLTARDGDYFLHIGFRRLKNDIERNTAEDGTVLGVDLGFENLVATSTAFFFSGRELTHNLREFEKVRGGLQQAGTRSAHRTLEQSSVRELRYVRDVLHRASNAIIDEALRYECDVIAFEDLTDIRNRTGGSWGHKWAFRTLYEQVAYKAEAVGVSVKQVGSAYTSKRCAECGFTADENRPTRNDFLCVKCESGANADYNAAKNIGMRYVRRGQQSSRRTGNSQLALKSGTVTPSGGFTAHPEGFDAESMDKPHPPRATPSG

SEQ ID NO: 55827 - protein, 388 aa, Microcystis sp.
MKARYQYQIYPTDQQKRLLSQLFGCVRVVWNNTLAYCQELYQQGEKKPKYTELSKRLTQIKKTEEKKWLTEVSSIPLQQYLRDLETAYSNFLRFTDNGFTVNQHHVTLAKIGDLKVVWSRPLPSKPSSVTVIKDAADRYFLSFVVEIRPETLPDNGQTVGIDLGIATFATFSTGEKINAPKPLKKRLKRLRKAQKNLSRKQKGSKRREKARKRGAKIHAKIKDTRADFLHKLSPKIVRENQRIILEDLNTSGMVKNRKLSRAISDLGWRSFRDMLSAKSDKYGRDFRIITSWEPTSQRCSCCGNIGGKKALNIREWECLFCGTFHDRDVNAAINIKVAGGQSETSKNGRVGQRKTSVKEAVSCEASTGPKIIQLSLFDLPVITVRPRR

SEQ ID NO: 55828 - protein, 295 aa, Spirulina sp.
MIVLEFKARVKPAQAAAINEAIRTAQFVRNKAVRYWMDNRGVGKYDLSKLCKDLAGEFPFAKKLNSMARQASAERAWSAISRFYDNCKKGVKPAGFPKFKKHSRSVEYKTSGWKLLEPKRINFTDGFGIGELRLIGTYDLARYDESLIKRVRLVRRANGYYVQFCIQVNVQVQSEPSQKSVGLDLGLRYFIAASDGSVVEAPQFYRQAEQGLNRANRQKSRKYRKGAKPQSRNYHKARNRYARKHLRVSRQRNEWAKSIAYCVIQSNDLVAYVDAKRRAEGRLECERVGSQSASG

SEQ ID NO: 55829 - protein, 383 aa, unknown
  TnpB Polypeptide
MARRGNKAIRATVSMKIALSEPLLVLVNNYVKALRFTLFWLKENVPNPEEKGVLGKVHEELYEKLREEYNLLSKVAEDCYREALATYKGWYNNPKKGRFPRVYKPTVWLTPKASYNVDFEKMNVRITSVGELPILGYPRNLKDYLSWRMREARLVIKGDKAFLKVVFEKPRKEKVEPKESIAVDINMAEVVVGKDDTHYVRIPTRLYEVHHWKSLAENLQRKYPRRWRENKRILHRIRSFHLKARRIMEDFARKVGKWVVEIAEDFGANVIKLESLKNLIKNVDKLPKEFRDKLYLMQYRRIQYWISWQARKHGMIVKLVNPSYSSVSCPKCGKRMVEVSRRWFRCKCGYENDRDVIAIVNLNRRGSLTLSTAPQMRDVRANR

SEQ ID NO: 55830 - protein, 402 aa, unknown
  TnpB Polypeptide
MLTYKTKLIFESQKVKDFWKEQMCFVRDCYNFVSKIAFEEKIPLNIKLYHARLYRAEREAFPALPAQMCIKVYKQVLANYRTARENNVELVKPLEMKRPSIGLDKRLYSRMTRESFCLSNGDGNRRSEVKFVLYPKFNEMAAKYRMCDPILQYDERTDTFYACIPFLAIETTPCPEEYLGVDLGIKRIATLSDGTAITDKAYLARRRRIRHNKRIFQRHKSHSHSARRKLKRLRRKEFNYSKEFCHKVANEILSHHGSVIVMEDLSKIKQTTSKTKEGFKKKRHNNMMSQVPFSHLKQILTYKAPLLGKRVETVSPQYTSQIDCRTKSKEGCIRKGCRLYTADGKVFDADWNAAINIANRKHPTPFGLPLDGTLNFVGRHRQQVDSRKGQPDLQAAMSSAWR

SEQ ID NO: 55831 - protein, 387 aa, unknown
  TnpB Polypeptide
MKVYKFKAYDRAKDGVQDRLITRFGFVRNYAVRMMEGYYKFYRKTLSAFELSNHIAKKKKRNCRTAKMVEGLPSQAVQECIGRVYKGLRNFFSYCKRKKVGKTVDRVRPPKMRKASHNKSYTLLQAGYKINGNHVVLQGRRYGFHKSQEIKGKVKRLTIKRDRCGDIWFIVLTDWNDVQEIPMTGKAAGFDFGLKTFLTRHDGIKVEMPLFFKRNMNELAKAQKRMAKKVKGSHNRHKARLAVARLYRRIENLRNDWQWKLANEIVKEFDIICIEDLNLEGMKRLWGRKVSDYGFADFVAKLEYLAEKNGKEVRKVDRWLASSQTCHKCGHKNPDTKNLQVREWVCPNCGARHDRDVNAAINILTAGTSADWRGSSKTRNSMEELVA

SEQ ID NO: 55832 - protein, 367 aa, unknown
  TnpB Polypeptide
VKLTLQIKILPDNKQADLLIKTIKEANSACNTISNIAWNKKCFQQFRLHKECYYEIKSAFNLSSQMIVRVISKVSDAYKLDRKTRRVFNEFGAISYDNRILTFKPNNIVSIWSIGGRLKIPFICHNTNYIPFIKGEADLVYKNGKFYLFQTVDIPDEYIDDVEEFIGVDFGQTDVATLSDGVSYNSESIKKIRKKYSKVRASVQAKGTRSSRKLLKRLSGRERRFVSISNHTIAKQIVEKAKSEKKGIAIEDLSNIRNTAKPKSKNQKTELNRWAFNQLRRFLTYKAKKSGVRLIVVPPAYTSKMCSDCLHIGKRNAKRFKCENCGNIADADVNAAKNIATWGCIINQPEKQSIMYCDMRHNCCLKP

SEQ ID NO: 55833 - protein, 394 aa, Clostridium sp.
LLKAYKTEIFPTEQQKQKISQSIGICRWLYNSYLAKNKELYRQFKDGLIDKKQSKMSANDFDKYINNEIKTLDEYEWINSCGSKARKKAICNAEAAYSRFFKGLSGFPKFKKKKNQDVKIYFPKNNKTDWKIERHKINIPTLKWVRLKEFGYIPTNSKVVSGTVSRKADRYFVSVVCEINWNMPSGQYINGVGIDLGLKDFAICSNDITKKNINKTKTVKKIEKKLKREQRKLSRKYESLKVRNKSIEKGKATRQNIQKQIVKVQKLHQRLDNIRTDYINKTVNEIVKQKPSYITIEDLAISNMMKNKHLAKAVAQQKFYEFRIKLEHKCKLFGVELRIVDRFYPSSKLCSCCGNIKKDLKLSDRVYRCECGNVVDRDFQASINLKNAKIYKVA

SEQ ID NO: 55834 - protein, 362 aa, Clostridium sp.
MLKAYKYRLYPNEKQKQYFAKTFGCTRFIYNKMLADRIKSYKENKDLDIKKVKYSTPAQYKKEFEWLKEVDSLALANAQINLNKAYKNFFEDKSIGFPKFKSKKSNYRNYTTNNQKGTIFIENGHIKVPKLKTMIRIKQHRQLNGLIKSCTISQVPSGKYYISILVDTENIQLPKTNKKIGVDVGLKEFAICSNGYRQPNPKHLRKSEKRLKKLQKDLSRKQKVSNNRKKARLKVANLHEKIANQRADFLHKLSIKLIRENQSIVIEDLQVKNMQQNHKLAKVISEASWSEFRRMLEYKAEWYGREIIIAPSNYASSQLCSECGYKNPEVKNLALREWICPQCGTQHDRDLNASKNLLKLAI

SEQ ID NO: 55835 - protein, 545 aa, unknown
  TnpB Polypeptide
MITVRKLKITVDEEDLKLRNAQYLSLNRVERHFISKNHELFTLIDDLSFKSKNLYNLANYYIRQTYIITSKLKKGEEINSEQLVLLTWINSKVDAFNTYKKNNLRKRQKKAEAALKNKSLSDESKEKNTKIVAKEYKTFSYFGIEHKYLGYDFLEFIMKDTDAYNALMAQVSQQILRLIDNNWHSFFEAVKDYKINPAKYKGMPKLPKYKHKTKGRFNILFTNQGVVQMKGYIKMPKCLKQYKLNSKMQGKLQQVRIKPVFGQYLLEVVYRKNFKVKNSEELQSKRICSIDLGIDNFATIVNNIGLEPIIIKGNSIKSANQYYNKRKAELQSKLEFITINSKEGPKKVQSSTSTRINRFTLKRNNIIDDFMHKASRFIVNYCIKNNIDTLVVGKNKSWKQKCNLGKTNNQNFVQIPFNSFIEKLRYKCQEVGIKFIVLEESYTSRSSFIDNDELPVYGEGADYSFSGKRIYRGLYRTRGGHLINADINAAYNILRKYDNIFSYTKNIKLTPRKLDLIKAKTVEDKIYANYCRELKEKMHKAKRVV

SEQ ID NO: 55836 - protein, 230 aa, Mycobacterium sp.
MTRPSPLPAVAREAGVDLGIARLAAIATTDGVRSEVANPKHLGRKLRKLARLEREKSRRQKGSNNRDKSRRKIAVAHGKVARARRDYHHKQALALVRDNQVIHVEDLNIAGMVKNRRLARAISDAGWGQFVRIIGEKADRYGRTVHTVSRWLASSKTCSGCGHRLAELPLQVRTWTCPACRAVHDRDHNAAKNILAAGRAERLNACGAPVSPPTTREARGDETGSTPTAA

SEQ ID NO: 55837 - protein, 374 aa, unknown
  TnpB Polypeptide
MALKAYKYRFYPTDDQRQLLARTFGCVRYVWNWALATRSAAYKDQKESLNYNDLSGALSILKKDPQTEWLSEVSAVPLQQTLRHQEQAFRNFFEKRAGYPQFKKRHNRQSATYVSTAFSWKEGQLKLAKMNQPLDIRWSRSFEGTPTTVIVTKDPADRYFISFRVEEAVEEKPMTPHRVGMDLGLTDLVVLSTGEKVGHPQFFRKDQARLAKAQRRLAKKRRGSMNRAKARKKVARIHARIADKRQDFLHKLTSRIIDENQVVCAESLRVKNMVKNRHLAKSILDAGWSELVRQLAYKAEWYGRTFVQIDPFFPSTKTCQHCNHVVDTLPLHIRTWTCPGCAAVHDRDVNAANTVLAAGLAVSACGEAVSPLRA

SEQ ID NO: 55838 - protein, 419 aa, unknown
  TnpB Polypeptide
MRRNKNVTENPIPTITRTHKIRIYPNQHNQEVFQRYYDYQRSVWNRAIEERNAQYKIYKEMKATGLFTQKELNKNYFPHANNLRKKMKKFDWEYNFYCRVREVQFDNLCQAWDNFFNPNMPNHKKPKYKKKKDVETHKTLSLRNGRIKGKWLLLPKSQKAKPEYRFTKIKMAQELRFNGKITSDFSVSVKNNKWYVTITVEMPLEEKSALYKQSTGIDVNVGSIDYLKKDTQTKEYDKFYLLPNSLLRQYDKIKFYSRVISKKRNKNPYYIHSKSYYKTITKLNNSYTKAYNIQEANLNNIVKYFFDNYNRIVIEDLDVNSMKMNKRLCKSLHRNAFGRFKQKMIKKAEEYNVEFILADRYFPSTQTCSECGHVKTGDEKLFLWGDKYGNDHNTYVCYHCGTIQDRTENAILNLVHYGK

SEQ ID NO: 55839 - protein, 376 aa, Marininema sp.
VHKAYKFRLYPTKEQIILINKSIGCSRFTFNYFLAKWNETYDQTGKGLTYGSCSTQLTALKKEIDWLREVDSTSLQNTLKHLADSFARFFKKQNDRPRFKSKRNRVQSYTSQCNYSKKGKPTVEVVANRIKLPKLGWVRFAKSREVAGRILSATIRRNPSGKFVVSVLCEISECPVVPVAKGKAVGIDLGLKDFAILTDGTKVKPSRYFRQYEKKLAHAQRIMSRRTKGGSNWHKARINVARIHEKISHARHDFLHKLSSKLIRENQTICIEDLSVKNMVKNHKLAKSITDASWSEFVTMLTYKATWYGRNVVKVGKQFPSSQLCSSCGYRNKDVKNLNLRAWICPTCEAHHDRDINASKNILQEGLRVLAVGQTV

SEQ ID NO: 55840 - protein, 410 aa, Staphylococcus sp.
MKYETRVEQHQITTQDNRYKEADNLCFLSKNLYNATLYAVRQYYFKNKKYLRYYDVNKQFTHSNNTDYRALPAKVSKCTQRLVDKNFKSFFNLRRKGYFARIPKYLDTENGKQIVHYEKKAISFVKRKGYIHLSKTNIFIKTNLTKEEVQFVRIIPKGNHIVFEIGYNKLIEEKKKDNGRYASIDLGINNLMTVSSNVFTPFIINGKPIKSMNVYYNKLLARNKKLLWKLNRQKSSHRLCSIHRKRMNKVKDYFHKSTHYVVNQLVSNQVNTLVIGYNKGWKQDTTMRKSSKQTFIQIPFYTLIQILTYKCKEKGINVILQEESYTSKSSFLDLDEIPIWDSKKNIVTFSGKRVKRGLYMSKEGKLINADLNGSLNILRKYLEKQEAWNEKLFSNLVEVCSKPLLIRVSL

SEQ ID NO: 55841 - protein, 392 aa, unknown
  TnpB Polypeptide
LLKSYKTEINPTLEQKQIINNTIGVCRYVYNFYLAHNQEIYKTEKRFVSGTDFSKWLNNEFIPNNLEFQWIKEVSSKSVKQSIMNAERAFKNFFKGKSHFPKFKKKNKSDVKMYFVKTDSKTTIRCERHRIKIPTLGWIKLKEKGYIPTNPNTHIIKSGAVSYKAGRYYVSVLVEESGQKRPTLNDFGMGIDLGVKDFAICSNGKVYKNINKNSQIKKLEKKIRREQRSLSRKYEGYKKFNNNLKGVAARQNIQKQKLKVQKLYQRLDNIRTDYINKVISELVKTKPMWITIEDLNVSGMMKNRHLSKAIAHQKFFEFRTKLTTKCKERGIELRIVSRFYPSSKTCHCCGNIKTDLKLSDRTYHCDECGYTEDRDYNASLNLRDCQTYNIAQ

SEQ ID NO: 55842 - protein, 458 aa, Acholeplasmatales sp.
MEKQFTLETRLSLGDDAKAYLTEYMTFYNEISRQMWQIVKKANFKERYTRSDFNTYVCNRYNVLKRTANSIYNELIGKKNSLLELMKTEFNNKKIKYEVLIGRKEKLVEKINKLKAKVKQNLATDKELIRYRKYKHKYYFLCNRINKLKQSIDKILADIKNKNVSIGFGTKKAFKAQYNLEANKYSSHAKWKNEYVKKRDKIIFYLGSKDETNGNQLAQINYNAFDDTFTLKLRKEKKYSSDSKYLEIPNIKINYMKKELIDIINNQINKTNLLPLSYRIIRKNKKWYLQIIITTIISDYYTRKEYGVIGLDYNDGFITLCETNETGNLVKSTNYNLKYHGCGNKALNEILNVINDIVSYARSVGKDISIEDLDFKKTKSKSLKGSNKKYNKMIHSLDYKRYKFRLENKCHKMQVSLNMVNPYNTSKIGYEKYAQIRKMTKHQAASFVIARRHQGYID

SEQ ID NO: 55843 - protein, 261 aa, Nonomuraea sp.
MSSPQQAAAVEATLDAANRAANLVAALAFQHHCFRNFDLRKHAYDRIKAEFGLAVQAAQHVIKKVCDAYRTLHANLAAGHLGKPGSSRRAAIEARPISFRPPAAQPYDDRCLSWQHDARTVSIWTTAGRLKGVTFTGSARQLALLAAHRRGESDLVCRAKSIVTEAERTGRGIALEDLQGIRERVRLRKPQRVTLHSWSFHQFGAFIADKAVRAGVAVILVDAACTSQQCSHCGHADKRNRPDPKPSTARSCKLGRSRPRS

SEQ ID NO: 55844 - protein, 418 aa, unknown
  TnpB Polypeptide
MIEKNFILTDKIEFIPDKDLEGELNFNLRAAGYVFNKTLEYSIYRENLVKEFNIGKLYKVNRSYTQEIVKNLKKQKPFLKKADSTCIQASTDRLIKAYEGYYSRRTGFPQFKSLKKNPVRSITLRNNEYMTKDGFKGSIRWEKNKLRLNKLGYIEVKYKRVIDGKIKEATLLKENGKWFVCIVYEMEKIHSQEHFHDPGLYVGIDVGLTDFLTFSNGKTVPKPDLKRINGRIQYYQQKLSRQKEGGSNWKKTLRKLHKWINKKNNVVNDYYHRISYNIVKHCQFIAMETLNIRGMIKSNLSRSIHEIGWRKLIEMIKYKARWYGCDFVQIDQWFPSSKKCNVCGEINHDLGRGESEWECPHCHTVLQRDVNAAKNILDEGLRVAGSTMLCLVDFMPVGQDKFIYSYEWKCFDETICMA

SEQ ID NO: 55845 - protein, 437 aa, Nocardiopsis sp.
MLSGRRYRLALTDEQAEQCQKFGDVCRAVWNAALDQRRQYVDRFTRGRRGPFCGYHLQTSELAEAKAEAPWLKEAPSHVLQQTLKDLDRACRDRGAFKVRWRAKHRWSPSFRFPAGNRIRVQKLNRRWSRAKLPKLGWVRFRSSRPVGGAIRSATLSRKGTRWFVSFLVEDGLLTPEHHPGTPVGVDRGVAVAATTSTGQFHDREFARPGEKARHLKLQKKLSRQKKGSKNRARTLKAMGAVSTRAVDRRGDFCAQLARQLTTRHNVVVLEELRTTNMTASARGSVDAPGKYVRQKAGLNRAILDKGWHRLEMALRNAARKSGTRIVLVNPAYTSQTCYPCRVVDADSRKSQAEFVCTACGHTDHADVNAAKNVCRAAGHAVPACGDFGVARSVKQEPPGTREEVPAQPALELAGNPRAHEVQGGSQPQHLGSWRHA

SEQ ID NO: 55846 - protein, 403 aa, Clostridium sp.
MKVNRVEKHNITRASPFWSSCDEMCFKSKNLYNYANYIMRQSFISDRKIYKVNELDKMINKSEPYKELGSQSAQRLLRLLDKNWKSFFVSVKDYTKNPSKYLGKPNLPKYKDKNGRYICELKNIQFRIENGYLVFSLTRLKSYSGLIKTNIKDKVLGIRVIPNGSIYVLEIVYEKEIQEPKEFNNRILGIDLGVNNLATCVNNVGIKPIIINGRPIKSINQYYNKKKAYLQSDLKKRHKKDWSNKLDRLQRKRDNKIDYYLHCVSKSIVNYCEGLDITQVVIGLNKTWKQESKLNNKINQNFISIPYDKLINMIKYKANEKGINVITNEESYTSGTSFLDNEEPIKENYNKSRRIKRGLFKSNNGKLINSDVNGAYNIIKKVIPNAFADGIEGVDLHPIRVNV

SEQ ID NO: 55847 - protein, 388 aa, Clostridium sp.
MIKTLKIQLKPNNKQKTKMFQFAGAKRFAYNWALAKEQENYKNCGKFISDNDLRKDFTQLKKQEEYKWLYSISNNVTKQAVKDACISYKRFFKGQAKFPKFKSKKFDRPSFYVDNVKIKFSETHVKLENIAISKKKNKAKLNWIRLCEKNKIPMSCKYINPHVVYDGENWFICVGIEFEGCIDKPNNDGIGIDLGIKDLAICSDKHTYKNINKSSKIKKLEKKRRRLQRQISRKYLINKEGSSYVKTSNIIKSEKKFLKLNHRLTNIRDNYLHQVTSEMIKRKPNFITIEDLNVRGMMKNKHLSKAIQQQKFYEFRRQLEYKCKWNNIELRIVDRFYPSSKLCHECGCIKKDLKLSDRVYICEECGNVIDRDYQASLNLRDCITYNIA

SEQ ID NO: 55848 - protein, 381 aa, unknown
  TnpB Polypeptide
MIKSIKIRLEPNNKQNTKLFKFASTSRFIYNWTLDKQQKNYKAGNKFISDCELRKELTILKKTDEMAWLKEISCDIPKQAVKDACNAYKRFFKGLCKYPKFKSKKKSKPSFYQDTAKIQIFKNHIHLSNIGKIKISESNRLPIGNSIKKEILVSNPRITFNGLHWYISLGVEFDDHLEVNINGDTLGIDVGIKNLAILSNGIVIKNINKSNKVKKIIKRKLKLQKKIAKKYIKNKKGVCYVKTANIVKLEIKVKKLSKKITNIKLDHLHKATTMIMKTKFSKIVVESLNISGMMKNHKLAKALQEQSLSEFKRQLEYKCKWNNIEFIQADRWFPSSKTCSKCGYKKPKLSLSERIFKCESCGFELDRDLNAAINLKNYTVS

SEQ ID NO: 55849 - protein, 403 aa, Moorea sp.
MIILEFKAYGNKTQYQAIDKAIRTVQFIRNSCLRLWMDNKGLSKYDLNKYCKTLAKNFPFANELNSTARQAAAERAWSSIARFFENCKKKVPGKKGFPKFQKHCRSVEYKQSGWKLSPEKKSINFSDKKGIGKLKLKGTWDLWRFDKKLIKRIRIVKRADGYYVQFCISVDVKEQLNPADATVGLDVGLKEFYTDSRGKTEPNPRFYRAGEKKLKLYQRQVSRKKKGSSNRKKAINRLGRQHLKISRQRQEHAKRLARCVIRSNDLVAYEDLRVNNLVKNHCLAKSINDAGWYQFRRWLEHFGKKFCRITVAVNPAYTSQNCSECGEVVKKSLSTRTHICKCGCELDRDHNAAVNILNRALGTVGHIGTLVTDQNACGELASTLPDSGLVEQADSLKQESPRL

SEQ ID NO: 55850 - protein, 244 aa, Streptosporangium sp.
LPGPSAASAWSTTRRWRSAAAPTRGKAGGFPTARFKSRKRSRLSAEYTRSAFSWRDGHLTLAKTSAPLDIVRSRPLPEGAEPSTVTVSKDPAGRWFVSILCEDTVRPLEPTEGAVGIDAGITSLLTLSRPIPGVTDAAGKVANPRHERADRARLARSQRALARAIGDASWRQLRAMLEYKARWYGRELVVVDRWFPSSKLCSACGVIAQAMPLEVRAWVCACGAAHDRDVNAAKNVLAAGLAER

SEQ ID NO: 55851 - protein, 377 aa, unknown
  TnpB Polypeptide
MRRTFKYRLYRSRRDKHLIEQIEVAASIWNHSVALTRRYYRIYGKYPGANRLMKHIPRLRRRNPYWQKLGSQAVQDVIQRLDRAYRRFFSDPKAGRPRFKRQDRYTSFTLKQAGWNYLGGNRIRIGKHTYKFVLSRPIQGEIKTVTIKRDRAGRLWICFSVVTAEEQPKTPAPHEAVMRPVGLDFGLKCFLTLSDGTEIRAPEFFRRGLQEVRKAHRALSRKQRGSNNYHRARVCLAKVYDRISNQRRDWFFKTAHALCERYDFIALEDLNIEGMKRRWGRKVSDLGFAEFVSILEHVAQKRGVRASKVDRFFPSSRRCSCCGWVKKDLSLADRKWTCERCGTVHDRDKNAAINICREGASSLGVGDVRPPGAAVAA

SEQ ID NO: 55852 - protein, 392 aa, unknown
  TnpB Polypeptide
MKAYKTEIYPTEEQIKLIHRTCGNVRYIYNQFIQYNFERLKKKEPIISGYDYSKMINHDSNTPSWLKSVSSKALKQAIMNAHHAFQAYLKGKKGKPRFKKKSKNNSFYLIETIKVERHRIFLPTLKWVRLKEYGYIPKDISSVTVSVKNGRYYISCLSKTETDERIATSGEGLGIDFGLKDQFITKGQVIPSINKSKKVRRLEKKLRQKQRSLSRRYESNIANKVYYKSGAKKGQLKSFEWIRPLHECKNLQKQQLVVNRLHERLTRIRTDYNRKGIQSILKRKPSFIVIEDLNVKGLMKNKHLSKAISQAQWYASRVFLQQQCEKMGIELRLAPRFYPSSKLCSHCGYKNVDLKLKDRSWECPDCHAIHDRDENAAINLERCTDYTVLTAV

SEQ ID NO: 55853 - protein, 393 aa, unknown
  TnpB Polypeptide
MRAYKTEIHPTKDQIELIHKTFGCTRYIYNQYVYENLENLASGKDFISAFSYSKRVNNDPNTPFWLKEVPSKAVKQALIYAERAFKGYFSKRKGKPKFKKKGINDSFYLIGTLKVERHRIFVPVLKWIRLKEFGYIPEKISSVTISMKNGRYYISCLCKEDKDERIALSKESMGIDFGLKDQFITEDKLIPSINRTLRIRKLEQRLRREQKKLSRKYEINMTDKVYYQSGVKKGQLKSFRWEKPLSECRNIQKQKKKVAKIHERLTRIRTDYNRKALLSLVLERKPSSITIENLSIRNLMKNRHLSAAIMRAQWYQSRLYLENLCNRLGIELRVVDRFYPSSKLCSTCGFKYKDLKLKERFWTCSNCGSEHNRDRNAAINLGRCKTYTVLTTV

SEQ ID NO: 55854 - protein, 371 aa, unknown
  TnpB Polypeptide
MMKYNKAYKFRIYPNEEQKVLLAKTFGCVRLVYNYYLDMRIKAYEDNKQSLSYNDCAKDLISFKKEKDYLKEVDSIALQQSLRHLDTAYKNFFRDKKIGFPKFKSKKNHHLSYSTVCVNRNIKLEEGYLFLPKLKAVKIKQHRPIPTKYKLKSVTVSKTPTDRYYAAILYEYEAEINTVEPIKTIGLDFSMDKLFVSSEGTTADYPRYYRQSLKKLAKEQRILSRRQKGSNRYYQQKKKIAKIHEKIANQRKDFLHKQSREIANLYDVICVEDLNMQDMSQVFNFGKSVADNGWGMFNAFLSYKLADQGKQFVKIDKWYPSSKTCHVCGDIYKELQLSERTWTCPKCNTMHNRDENASVNIKNKGLEMLSA

SEQ ID NO: 55855 - protein, 385 aa, unknown
  TnpB Polypeptide
MFKAFRYRLYPSRTQERLLSQTLETCRRWYNTCLDERKTAWETEKRSIGKYAQLRKVKGLKDTNPYAAPIHSHILQVVVQDLDKAFNAFFRRVQAGETPGYPRFKSRDRFHGFGLKEYGNGFKLDGRRLKVSGVGRIPVRWHRPIEGAVKTVRLLHKAGQWYAAFGCEVGASPLPPTGDEVGIDVGVHHLAALSNGQAVENPQWYQAEQARLRVLQRRVSRRKLGGSNRRKAVAVLQRQHEHIANRRSDFLKKLAHDLVVRYDRIALEDLQVGNMVRNRHLAKSILDAGWSYLKQHLAHKAEGAGRVVYLVAAAYTSKTCSHCGTVFENLSLADRWVSCSCGLSLDRDVNAALNILHRAGQARWGETWPVLATACVPQEATPLSR

SEQ ID NO: 55856 - protein, 403 aa, Escherichia sp.
  misc_feature (267)..(323): Xaa can be any naturally occurring amino acid
VKRLQAFKFQLRPGGQQEREMRRFAGACRFVFNRALALQNENHEAGNKYIPYGKMASWLVEWKNATETQWLKDAPSQPLQQSLKDLERAYKNFFRKRAAFPRFKKRGQNDAFRYPQGVKLDQENSRIFLPKLGWMRYRNSRQVTGVVKNVTASQSCGKWYISIQTENEVSTPVHPSALMVGLDAGVAKLATLSDGTVFGPVNSFQKNQKTLARLQRQLSRKVKFSNNWQKQKRKIQRLHSCIANIRRDYLHKVTTTVSKNHAMIVIXXXXXXXXXXXXXXXXXXXXXXXXXXXXXXXXXXXXXXXXXXXXXXXXXXXXXXXXXLAVPPAYTSQRCACCGHTAKENRLSQSKFRCQACGYTANADVNGARNILAAGHAVLACGEMVQSGRPLKQEPTEMIQATA

SEQ ID NO: 55857 - protein, 406 aa, Rhizobium sp.
MKISRGYRFKLDPTDAQAEVFARNVGVCRVVYNLALEQRRDHYRQFRRATGYGISFASQCRELTELRAEVEWIADGSLTAQQQALRDLAAAYSNFFSGRAEYPTFRRKGVNESFRFQGREVTFRRLNKSWGLAKLPKIGEVRFRWTRDIPGKLKNATISLDPLGWHISFATEREEAVARHEGPVVGIDRGVVEAVAYSDGTFADFPKARIKGLNKKARRAALALSRCKKGSNRRKVAKARVAALRAKEARVRKHFNHVETARLARRFGVVFIEALKTRNMTASAKGTVEEPGVNVRQKAGLNRSILGIGWFQFHTFLTYKIAATGGEVRLVTAANTSTDCSCCGMREKTNRKSQAVYECAGCGSAMNADTNAAINILQAGTRPARRERVAAPAKRKSHLVASSLAA

SEQ ID NO: 55858 - protein, 397 aa, Rhizobium sp.
MTNRAHKYRIYADAATEEFFARCCGVVRLVYNIALEQRSSFWRQFRRAEGKNISYPSQARELTAIRAEVAWMAECPIDAQQQALRDLNQAFQNFFAGRAGYPKPRRKFVNDAFRIPSSRVGPIEVLNRKWARVRLPKIGDVKFRYTRPIRGEVGNVTVAREANGWHVVFSCALDHETPANDNPAVGIDRGIVNNVALSTGEMYSMPDGSALVERHKEWQRVASRRKSRSKRQAKARRHAARIAAKAARKRLHWQHVATTRIARRFGTAVIEDLRIRNMSASAKGTVEDPGKNVAQKSGLNRSILAAAWFRFELLLSYKLDFLGGNVVKVDPRHTSVTCRECGSRDKGNRENQAKFLCLSCGHEDHADVNAARNILEAGTRPATRAEKSVPRELERAA

SEQ ID NO: 55859 - protein, 327 aa, unknown
  TnpB Polypeptide
MNAIKTLLDEAYCINTYRSCYATLVPKRIRGKYRIYLHLTIEGRAMPKFDQYGNPRHKYGKGMIGADIGTQTVAYTSDTEVGLKNLSERGNSIQKTERLERLYLRAMDRSRRATNPQNYNSNGTIRKGKKTWTYSNHYKKLKMKYYELCRINATNRHLAINEDVNHLRSLGDTFITEPKNAAKLMKRSKNTTVNSKGKANKKKQFGKSIKNRCPGGFQSAVERKFNTTGGTYIEVPNDYKASQYDHTADDYIKKKLSDRIYKLSDGTPVQQDWYSSFLLYCYDYKTKNIDKDKCILQFKTCYNKELKLIKWIKTNNIKVLNSGIKVA

SEQ ID NO: 55860 - protein, 418 aa, unknown
  TnpB Polypeptide
MRLSFKFKPKFTDKQLEIVKELSWHTTKLYNIVNYEVRNNEDIKPVYTQLEKQFKSNWHNDFLHSHNRQQALKQLAQDWKSYFASIKDYKKNPSKYKGQPRPPKFKNMDRNPNEIIFTNLATRVRDRDNHLLLSLAKTIKSEYNVKSLKFELPLAVQSIIDLETIQQVRVKQDKLSKEWYLLIIYKVEEVKENNNSNIMSIDLGLDNLATLTFKDNSESYIMNGKAIKSKNSYFNKEIAKLQSIRMKQLGTSKVKDTKQIRGLRLKKRNYVKDYLHKVSRKIIDLAIQQGVSTIIIGDLKNIKQGNSLKYFVQIPIQRLVELIEYKAELEGIKVVKINESYTSGCSSIDLEKLNKSNYDKSRRIARGLFKTGNKLINADVNGSLNIMRKYLKDKCIPKMLKQIRDNGLVASPKRIRIS

SEQ ID NO: 55861 - protein, 384 aa, Bacterium sp.
VVIVRTYKYKLYNSKKNKYIHQQINIAGLIYNHCIALHRRYYKIYGKHLNQYQLMKHIAKMRKLPKYSHWKEVGSQTIQDIIQRTEKAYQLFFRNLKHGIKASPPGFKKVKKYKSITLKQSGWNLLEDNKIKIGKRIYKYSKSREVEGDIKTVTIKRDLLGALWLCFSVKQEVYIPDRQGNISVGYDFGLKKFLVGSDGTSYEAPLYYKQYQDKLAQAQRNLSRKKKGSNNRKKAIKDVARTHQKIVNLRQDYFFKLSHELTDKYDHIFLEDLNLKGMQKMWGKKVSDLSHGSFVNILQYVALIKGKEVGLIDRYYPSSKTCHVCKAVNSELKLSDRLWKCACGIEHDRDENAAINGTRFRKVEWLGASRGFGVDNRDYRGYLV

SEQ ID NO: 55862 - protein, 367 aa, unknown
  TnpB Polypeptide
MVELKTYKYKLYNRDALKYLDEILVVAGCIYNHCIALHRKYYALYHTSLNKNALQKHLTKLKKHHPEWNKVPSQAIQDITDRIDRAYRLFFSNLKHGVKTNPPHFQKANKYHSFTTKQYGYKFHDNNKVRIGAKEFAYWNSRKFDGKIKTLTVKRKGNGYYIYVVVEQESKIENIAKSGKIVGFDFSLKNFLVSSDGSDCSMPKLLQRNLKSLRNLSRKYSKSKGKRGSLRSLQKLHEKVTNQRADLHWKLARKLCHDYDVMVFETLDLASMDKRFKKSINDFGFNAFLSILEYVAHRTGKTVMYADKYYPSSQLCSECGYKNAALKDIGIREWVCPNCGAHHDRDFNAALNLQKVGASAFSQCCSN

SEQ ID NO: 55863 - protein, 412 aa, unknown
  TnpB Polypeptide
MYRTFKRQLINLSEEDKQYLFDNMWYRHQLYNLGIECILDYRKENPKLPSSTLLYHMMKEKISDKYNKNYYAEGIESVVRVDISRAIRNTYNNYKKYDDISEQFRFHRFNKYYRSFGFSARSYISYGKMSSRVKSMTNNSITIRFRKGIIKTFYHNELSWNNKNHPYEFDMYDVKEIHFLYDHGKFYIILMCEVNFKNPYRYRDDRMNLAGIDLGERNPAMIYDGKEYIKVKFPDKKIKNIQNRINVMNIALSGKVYGSNNYYKLKNKIDKLYRKQVNIRKDWRHQNSYKITNLFKTIVVDEFHNYIITKDSKENINSKGKRIINRVMEGRGISYFIETLKDMSNKYRCGYYLAEPNTTRTCSKCGFINDPIPLSQEYLVCDNCGKKIHRDKNAAKNCYNQHKRYYHINVYI

SEQ ID NO: 55864 - protein, 374 aa, Okeania sp.
MRIAYQYKLRPTKEQAEKINKTLDMLRCQYNYMLAERFDWWEQNRCPINSCPLICHLPALKDQPTRFSQQKSLTQLKVDRPWYKEIHSQVLQEVLKRVELAFDRWLKGDINGKRLGKPRFKGKGQYKTFTYPQFKQHHFVNNKVKLSKIGDVKVIVHRPIPDGFTIKTVSVTRKSNGFFVTFSLEDKSLPEIKPDIKRGEMVGIDVGLIDFFVTSDNESIAAPKYLRKSVSVCGSMTIGKLCVSKRKLKSAQRKVSRRKKGSKRRQKAIKQLAKKHRKIADTRKDFHFKTANNLLSKYDIIAVEKLNIKGMVKSRLAKSVHDAGWGNFKTILTNKAEKAGQLIVEVKPHGTSNECSNCGHKVKKTWAAKTASMS

SEQ ID NO: 55865 - protein, 334 aa, Okeania sp.
VREKVNLSNLLNLRVESQSKLLGLQREGLKLVNIKSRSAKIGKLKIVWSRELPTPPSSVTVIKDSAHRYFLSFVVEIQPEILPKTDNSVGIDLGIKTFATFSDGTKVDAPKPLKKRIKKLRKLSKSLSHKTKGSKRYEKARVRVAKFHAKLKDTRTDFLHKLSTKIIRENQTVVLEDLNVSGMVKNRKLSRAISDLGWRTFRTFLEGKAEKYGRDFRVISRWEPTSQVCSNCGFKGGKLDLQVREWECLNCGAKHDRDKNAAINILVAGGQSETLNGRGGKCKTTAKAAAANVSDSYAKQNVNPPRSYGSVGIPVPNSRGGCQLRHCFLFFYCI

SEQ ID NO: 55866 - protein, 543 aa, unknown
  TnpB Polypeptide
VGITESELMSQLPPFSMLKEEVPSKKASLTNQKMKKKWLANSKDLSLTLDQDLTKIDVDIEPFWNSLSTAIHYTLWQPHQIELPEPVSPSLNGLSQPKVSEANYQVGESNFWKTQIIPSNLIQQRLSLSLPASSTPTTDQCAQDVITSKKIRIYPENEPLWFVSLNLSRRAYNLSIEFMRKGRKPSSEFRTQICDWCQIECEENETAYNSNLVLAAYRKACDTRTAVIKKRIKGEKAEMSFMSRNAPRQYFVVPKFSSKKQIFPRILGGCAWTEDVPNEAVGKTVIVTYTNGQWFASVKSNQSVKPTKNEALSIVALDPGVRTFQTAFSEIEAVSYGDGFVNNRLVPLMLELDRLLSARDKLHREDKSKQWVKDRLKNLNRRIYKVRARQQNLVDDLHRRVAYDLVSNHDVILLPTFETQQMVKKSTETRKRFLRRKTVRGMLGLAHYKFKQTLKWMAKKYGKTVRDANESYTSKTLWDGSILKCLGGKASILFQGKRVNRDIHGARNILIRFLTKVIDGLSPQGTCSLNITKAGFCGFGVLK

SEQ ID NO: 55867 - protein, 483 aa, Bacillus sp.
  misc_feature (16)..(16): Xaa can be any naturally occurring amino acid
  misc_feature (240)..(240): Xaa can be any naturally occurring amino acid
MLQLDGTLLVDILCHXAYKETGKGLTYGTCSAKLPAMKKELVWLKEVDSIAIQSSVRNLADAYTRFFKKQNSAPRFKSKKNNVQSYTTKKTNENIAVVGNKIKLPKLGLVRFAKSREVEGRIVNATVRRNPSGRYFVSLLVETEVQELPKTSSYIGIDVGLKDFAILSDGTHYENPKFFRSLEDKLAKAQRVLSRRMKGSSRWNKQRVKVARIHEYISNARKDYLDKISTEIIKNHDVIXRFFKKQNSAPRFKSKKNNVQSYTTKQTNENIAVVGNKIKLPKLGLVRFAKSREVEGRIVNATVRRNPSGRYLVSLLVETEVQELPKTHSYIGIDVGLKDFAILSDGTHYENPKFFRSLEDKLAKAQRVLSRRMKGSSRWNKQRVKVSKIHEYISNTRKDYLDKISTEIIKNHDVIGIEDLQVSNMLKNHTLAKAISEVSWSQFRSMLEYKAKWYGKQVIVVSKRGSAEIRVKIGHRLELTSIT

SEQ ID NO: 55868 - protein, 361 aa, unknown
  TnpB Polypeptide
MLLNRAIKMRIYPNDEQRHMIDVTLSHCRYIYNKMLERNNVIYKRRNEHLNYYAMQNLLPEMKDYLPWLKEADSQALKYACRQLNNAFEKFFHKTGGYPRFHSKRGKHSYTTTSVSSIHIEPHRIKLPCLGWICTSDKRIPNGKLCYATISHDTDGRYYVSICYEKEVPDVEVIKPSVEKTIGLDYKSDGLFMDSNGHIEDIPHFYREAQRKRTKLQRRLSKKQGARKGERKSMNFMKQLRKVNRQSMHIANQRRDYLHKLSTEIANRYDAVCVEDLDMKAMSNKGFGNGKTTMDNGYGMFQNMLSYKLKERGKQLIKVDKWYPSSQICHCCGHRQPMPLKIRVYQCPECGMVCDRDLNAA

SEQ ID NO: 55869 - protein, 291 aa, Oscillatoria sp.
VGDNNQAVSQIAFKKGRERPSLTDIYLPAKVSKISEIIIVTKLGLYIRKLVGANRADPKITQGGNCAAIDIGLNNLATLANFLASLRPQIFDGRALKPVNQYANQRNAELRAKLPEGVKISKKRLWLWENQNRKMAWLIPQTSSAIVKERVKNSVSQLAIRYSPEWKDEIGIGTASPHKLVSVPHHKFAGQLQDKCAVKGIEVLLAERGRTCKCSSCDREPVQKQENGLGVRSQRGLFRSGAGGLINAGVNAAYNRGSKVFGNGKSPSSDRGSGSCASKGKTLQTGKSGQK

SEQ ID NO: 55870 - protein, 641 aa, Oscillatoria sp.
  misc_feature (389)..(422): Xaa can be any naturally occurring amino acid
MSNPKKRRKYLECTSSPCAGGRKMGGLKPSELHPDSAATTWNPMLPNLAGTGEKSLPAPELAVEPGSPTSTGFSQPSAPSTRKPKCSCGAARLTSRKSVAGSTSSEKSCKPYWNKFCQEMSDWLSLATKTGWREEALTCFDGSASKTGASSWFSTKQVSVGTAKWLRISSPSSTVTASRKQATASGFTDSESTKLRSRKIRIYPSSELNKTWRKWLAACRYCYNQAIALQRSGKHLGKLKLRNEIMQGDLPQWVKETPCHIRQNAVFDAHFAFGASRDAKFRSCRNTSQAIKFNDSNFSQGTWYPRLTKGLSFTSAEPIPSTCDQGTHLIFSKGRWFAVFPKPAQISPTEADGIIALDPGVRTFLTGFDGRKFLEFGNGDIGRITRLCXXXXXXXXXXXXXXXXXXXXXXXXXXXXXXXXXXDGIIALDPGVRTFLTGFDGRKFLEFGNGDIGRITRLCQHLDDLASRISKEPNKKRRRSMRRAAHRMRVKIRDLIDEAHKQIAHYLTRNYRLIFLPTFETSDMVARARRKIKSKTARAMLTWAHYRFKRTLKHQAELTGTTIVDVTEEYTSKTCTRCGHVHTRLGGSKVFHCPSCGFTLSRDWNGAFGIFLKALRDNASITFIGDSAIVTLSGNAWNKVA

SEQ ID NO: 55871 - protein, 233 aa, Oscillatoria sp.
MAYREYSLICSQEVQPLQSENQGRVVALAPGVRTFITFFSESSCVPIGNDANLQIQKLCFKLDRLVSKISQALSAQKWRLRKAAGRIRCKVQYLVKELHYKTAKFLVEHFDVILLPSFESSQMVSKSRRKIKSKTVRQMLALSHDTFKKHLEWKAWETGKILLSDINEAYTSKTVSPTGEIVKIGGARVIKSKIDGRVMDRDLNGARGIFLRALVDTLWLRARLPAYVFGSNS

SEQ ID NO: 55872 - protein, 391 aa, unknown
  TnpB Polypeptide
VQEPVQSTQKAPLRTWRFKVRTECYPWLNRAAVEVNQVWNWANSTSYKAARPFAGVGEFLSGFELCNLSAGASEYFEHIGADSLQRVCIEYATRRAQFRKAKLRWRVSSGPRRSLGWVPFKAANLRRRGRYVRFCGKTIRFFESKRFVEIRKWGCGCFAQDAVGDWYLCVPVVVEDVTPAPIHVDVGIDLGLKDTAVTSDAERLSAGAFYRDLELRIGQAQRRAHKAHAKRLHRKAARCRRNALHKFSRGIVRTYQNIYIGDVSSLKLAKTRMAKSVLDCGWGLLKAQLQYKGRWAGRSVRIVNESHTSRTCSSCGSITGPTGVDGLRVRSWMCQECGVTHDRDVNAARNILALGRLLPAVSGNEPSHRSTPSSRASRPRKTGKAASGAVA

SEQ ID NO: 55873 - protein, 344 aa, unknown
  TnpB Polypeptide
MLQRTIHAKLVLDRQGKREAIEREYQAWQRELRGSSEELYSATKQQAERFKRRVKKQNHRGLKTREYPLILRHDCVKLQRQNESVFHWWIRIPAYPKSIWAPIQLPYKQEPLLKHELRECKLLHGEDGEWYVNITVQKQARLKRKYATVLPIDMGVRKLATTIEDGKPNFYGKQVRTIRGHHYRLRRSVGKPSIIKKWKHAEQVSVKHEVHAITRRIVEHAKRMNALIVVGDLEGIRGQDRGRRFNRRLSSQPFYLFKQLLTYKANWDGIRVLTVSEAYTSQMCHRCGVRGERVAGRFSCPTCGLVCDADVNGAWNIAKRAHGLLIHETGGLLAVPRTLAVCEP

SEQ ID NO: 55874 - protein, 415 aa, unknown
  TnpB Polypeptide
MFSILAIVNAGMLVKGVIFRLESDLPSEAKFLLEDFRLAVNNAVRAGLQARVTSRNALCRLAYKDFRQEHPKMYAKHLVSAFEVAGSVLKNHRRCVRKGVTCRIPYVKRLMMKAENQAYKLDRKLGVIDLPIRAGCHIELRLIVSQYHREYLDDITLSLGSLTVLPDRVIVTFRKDAPKPFVPESALSLDTNERSLDGMFVVNDIANTVKAEFPDIAIIQQRHHDRRRRLQKKKAHDRRTSRNLCRREGAREHHRIDYRLHQVADSVLKFAEERKSAIVLEDLKGFKSKRSKELNRRLSMWPRRKLHQIIEYKAQWKGVPVIKVDPRNSSRTCPICGRIQYSRMGAEFKCECGWHMDRHINASINLLQTAISNGMAGGLRFNPGAFQHDVMMILYEPAMAARSEPNGTSGIVVVT

SEQ ID NO: 55875 - protein, 406 aa, Actinomadura sp.
VTARQGYRIELAPSPAQAARLGRHAGLSRVVENFCLEKVRAALAQREAEQSYGIAAGELTAVPWSAPALERLWRAEHAARYPWFTAEGLSSRVPKEACRVRAAGFKNFFDSRAGSRKGARVGFPDWRRRKHGSRFRYDADRARPAHHRAVHLPGIGKVRTREDMTWLTGRITDGTARVIGATVKEQAGRWWVSFQIEIDRAQVNQARQVPQGAAACGIDVGVKTFATIVDQDGTVTELHAPKPLKAALRRLRRANRDLSRKAKGSANRAKAARRVAKVHLDVAHQRADFLHKTTTTLARTKRAIAVETLNVTGMTRNRRLSRAICDLGFGEFYRQLAYKADWYGAQVWAADQWFPSSRLCGTCGTVNAALTLADRTWQCACGTTHDRDVNAAHNLLTAMQQGEQAA

SEQ ID NO: 55876 - protein, 377 aa, Helicobacter sp.
MIIQDKNKGVILLNAVKFRIYPNAQQKELISKYFGCSRVVYNYFLDYRQKRYAKGIKETYFTMQKVLTQIKRQEKYHYLNECNSQSLQMALRQLVSAYDNFFSKRARYPKFKSKKNAKQSFAIPQNIEIKTETQTIALPKFKEGIKAKIHRDLPKDSVIKQAFISCIADQYFCSLSYETKEPIPKPTIIKKAIGLDMGLRTLIVTSDKIEYPHIRFYQKLEKKLTKAQRRLSKKIKGSNNRKKQAKKVARLHLACKNTREDYLHKISDEITNQYDLIGVETLNVKGLMRIYHSKSLANASWGKFLTMLEYKAQRKGKTLLSIDRFFPSSQLCSYCGVNTGKKHEGDHQIHLPSLQNHTPQRLQCERQYQKLRFRHVR

SEQ ID NO: 55877 - protein, 402 aa, Escherichia sp.
VKRLQAFKFQLRPGGQQEREMRRFAGACRFVFNRALARQNENHEVGNKYIPYGKMASWLVEWKNATETQWLKDAPSQPLQQSLKDLERAYKNFFQNRAAFPRFKKRGQNDAFRYPQGVKLDQENSRIFLPKLGWMRYRNSRQVTGVVKNVTVSQSCGKWYISIQTESEVSTPVHPSASMVGLDAGVAKLATLSDGTVFEPVNSFQKNQKTLARLQRQLSRRVKFSNNWQKQKRKIQRLHSRIANIRRDYLHKVTTTVSKNHAMIVIEDLKVSNMSKSAAGTVSQPGRNVRAKSGLNRSILDQGWYEMRRQLEYKQLWRGGQVLAVPPAYTSQRCACCGHTAKENRLSQSKFRCQVCGYTANADVNGARNILAAGHAVLACGEMVQSGRSLKQEPTEMIQATA

SEQ ID NO: 55878 - protein, 405 aa, unknown
  TnpB Polypeptide
MFNSIKLRLYPSKEQEIYINKLLGSCRFIYNQCLNKKITEFKELKINHNLSSLQKFLHNDLLKDINYRWLQEHNTKVLSSSILNLIDSYSNFFKGYGFPKFKSKNDKQSCRFPLQAISKKQDFSKSKITLTKQLKDLKFKTSDKYINYLIKNQSNIRSATLSKNKSNEFYLSILIDGDLLKILNEPKNKIVGIDLGIKDFVITSKGQKFENLKLIRNNQKKLSSLQKQHSRKKKGSKNKEKARKRLARFHQRLTNIKENYLHKIVNTLLNENQVICMEDLNVKGMMKNHNLARSIQELSLSRFEIILKYKSNWYDRQVINIDRFYPSSKTCSDCGYINHDLKLSDREWVCPDCGIIHDRDNNAAINIEQEGLKIFKNIIPICDGKLTPLESRHKTLNELGKSIND

SEQ ID NO: 55879 - protein, 412 aa, unknown
  TnpB Polypeptide
VTIIQQVEKHIIKKSHPHYSMFCEYTHLAKNLYNHANFLVRNEFVNTGKWLRYQDLDKILRQDVDYPDYKNIPEAQSAQQTLRLLDRNWKSFFNSVKDWSRNKDKYIGKPNLPKYKPKDGRIVFILTNQRVKQKDDLLHFPKSFQGFTVKPRCIHLSNFKKINQVRIVPSNQIFCVEIVYSISVNDVLLPDNGHYMSIDLGLDNLATIVTNTGLNPVIVNGKGLKSNNQYYNKKRAYYQSIAKLMNDKFYTNRLYRLTQKRNFKIEDSLHKISKFIVTSALSNDIHTIVIGNNKDWKRDVSLGKRVNQSFVNIPHQKLIEKIIYKARNAGINVILTEESYTSGTSFLDEEFPKKDFYNKKRRTHRGLFLSNQGISINADVNAAYQIMKKVFPNVFADGIEGVVLHPVRVNIV

SEQ ID NO: 55880 - protein, 403 aa, unknown
  TnpB Polypeptide
MLSFMILIMRGIGLIETIKVQLRPNNKQLTKLFQYAGCSRFAYNWTLAREKENYKQGNKFLSDNELRKEFTQLKKQENYKWLNKISNNVTKQAIKDACNSYKRFFKGKSKHPKFKSKKNSKQSFYQDNVKIQFTDTHVKVEGFAVSKKKNKQKLNWIKLCEKGRIPTNCKYMNPRITYDGLHWYISVSIKVDDNTDIPTNEGVGIDLGLKDLAVCSDGNTYKNVNKINKVKKIEKQKRRLQRSISRKYNMNKEGVRYKKTSNIVKREKELLKVTKRLTNIRHNHLNQITSEIVKRKPSFICIEDLNVSGMMKNKHLSEAIQQQGFYEFRRQIEYKAKWNNIPVIIADRFFPSSKLCSCCGEIKKDLKLSDRIYQCDCGNIIDRDYQASLNLKRYGENVLKQNL

SEQ ID NO: 55881 - protein, 488 aa, unknown
  TnpB Polypeptide
MANSNRKKTRKLHEAKQAKKAEDTKKEKSVRKAKADIEKPIKYTVTAEQLDDGTFKFNGGKSVFNITMQKNKALEPYGKCIHNYGVLLELIPGDKQTAINQQIGNARVVHNDYLSKRIDYYKESKETLTVSKYKKDYLPALKEEKEYLKDTDKFVYENACRNVDDAYSRFFKGLSGFPKYASKTKPNGNSFTTNFTNNNIELKMVDGIPHVKLPKIGYVRFILPKGKTLADIQPHGVSIKAATVSREPNGSYRISLRMESVIDKPVFPTVINAREIISIDLGLKEFGVFGNLEESIPVPNPRWIQVHAKRLRRFQQSLSRKQYDHKTHAGSKNWEKARTKVAKEQRKIADQRRDFHHKLSRAITDNCVAFICEDLAVKNMMQNRHLSKSIASVGWSQFLTMVQYKMERDGKHFRKISRWYPSSQTCGCCGYKNTDVKDLSIRKWICPKCGTWHDRDVNAQQNIYKLGVKMLQDEGIKIIDGRENRVQF

SEQ ID NO: 55882 - protein, 386 aa, unknown
  TnpB Polypeptide
VRKSYKFRIYPNRRQERRLIQTLHGLRLLYNAALEQRRLAWRYNKKNLTVYEQINELPELRRAFPEYREIYAQVLQDVLKRVDNAFKLFFRRLKNRNGKAGYPRYKNESRYDSFTYPQAYNGSVKFQGNRVWLSKIGSIRIKMHRQIQGNVKTVTVKHEGNHWYVIVSCDNIPKILLPPSNKKVGIDLGLINYATLSDGTTIENPRHLKRSLTKLKDAQRQLSKKTKGTSAYRKVKERVAKIHRKITNQRRDFLHKLSRKLINEYGTIVIENLEVKRLLQLKNGCRKQTKALHREINAAGWSMFVSFLLYKAEEAGRRIIQVDPAGTTRTCSRCGYMYPDHLPLSQRVFKCPKCGLKIDRDYNAAINILHKGLGQSLAAIELQKSA

SEQ ID NO: 55883 - protein, 409 aa, Halobacteriales sp.
MEVVRNIQLKLDVPEDAHSVLDETFEQFRQAAQHVAGAGWNDDPTKITDTKNTLHEQTYSEVREQTSLQASLVQSARNLAADALGNCKDRILEDGKKASKPEFRGSVVAYNGRTITYNDDHVTLATVDDRVSAEFVTPNDEDGTPFAEYWTDNWEKKEATLHKRDGTYYLHVAVEKEVEPADSTDEQPENGVVLGVDLNVDGYLAVTSTGAFFGNSDYLNHRRDEYERRRGNLQQTGTRSAHLTIRSIGSRFARWSADYLHRVSKAIVREAVENDCRAIAFENLKHIRERISNAPKFQQWAFRELQRHVEYKAEEYGIDVDDVAPAYTSQRCSHGECGFTHEDNRDGDEFECLKCGKELHADYNAARNIGWRLVQHWLKSGAGRATSQLALKSGTLNANGDYTPSALRG

SEQ ID NO: 55884 - protein, 430 aa, Natronolimnobius sp.
MAWEVTRTVRVRLDVPDDPKSDLHATNDKFQYCANRTADWAWRYPDEDCVTSKSEAEAAIYDDLREETDYLHANLVQKAIKRATDDIGNCVDRLADGENTSKPEYDTFSIVYDKRAGTYYRDKVSLATVNGRVECEYDLPDDPDGTPHGEYLLNDDYSFSTSTVHYDSEADEFYLHAAMERELDVARPEKAEHSNVLGVDCNVDDHIAVTSTGAFVGNADYLNHQRREFEKRRASLQQTGTRSAHLTFQRIGQRFGRWSEDYLHRCSKEIVAEAKRHGCTHIAFEDLEQIRERISDDKKFQQWAFRELQEQTEHKAELAGIVVETVEPSYTSQQCSKCGCTLEENRDGQHFKCLDCSYSANADYNGAKNIARKLTLKLQRGQKSPAGGAFCQYALKLGTMTVNATEVASDTYVSAERESTDKPTASAVGS

SEQ ID NO: 55885 - protein, 421 aa, Ignisphaera sp.
VRMYSIPIRDERVEELVTWYTKMLQKAVDIVWENIAWGYRFPQLSRRRGKISVKVGCKVKVPRIPVDRKFKKMLRNTLLTECSYANHWIDAVIRTAYSIIASWRKRYLSGEARRVKPRIKRRFARCKITLMKIDYERKAVRITLKSGEYLEVSWSGKWFSRRVEGCMVGEVILKDDRVLIPFKKTEVYSVERVVAWDSNELSIDGYSPGVGFIKVDLRYLQSLKTVYEKKKATAQSIGKKELFEKYAKRERNREKDFINKLVNQITTLLPNAIHVVENLEKEDMVARGRTNKERRKRNARTPWETIHRKLSEKALVVKVSPHNTSRTCPRCGCVVKTRVGRVFKCPRCGLEMDRQKLASINIYLKYTKMWGFPHSCELELDEGELWVGVTLNGWRPMTWAPMKGAPRTMKPRVDIKQHQPT

SEQ ID NO: 55886 - protein, 358 aa, unknown
  TnpB Polypeptide
MKDKISNQEWKDLRTRQLYSRGDKSKKGNLNMRITVDDCGQGWLEIANPLGRTNGKTKSPRIKVPIIIPYHFYHQITNVVMGKQIDVNPKGKPIIEHQKYSVEIIRKQNEFYVNITFDETEIGRVLDFKETPQSDVIAGIDVNPDRIAVSLCTKQGNFKGSKIFYLHNLNTFSTNKRATIIGQIVQQIKTWLLENNVGGIVLEDLKFQQSHDTDKYSNRNFHQFTYKKMLNSLIRMSLRNGFSVKTVNPAYTSVIGKLKYSKNFGISVHEAAAFAIARRGLELQEQLPQEIILLLKNQITTKLRILVASMEESKKNTQKVYKKWLQTIQTWKEYHNWKLWSILHKTVYMSNQQFVFKI

SEQ ID NO: 55887 - protein, 566 aa, unknown
  TnpB Polypeptide
LLITSSINNVTEKSDDNLPEKEKKPDFKIEGCFSVRVKQTKAKKALMHCIKYDANHAKNMVLILRSQLYESQKTSASMRDIYHAFINDRLLRDTVYGRKGGKGADKVKLIREFFKDNALFQQLCTFSQRQLDAKTFHSVLGSVSASYEQFFTNIKSYTANPTAYAMKFGNTGAPRPPRAKKLVTVSQASIALDREKWSLQDRIVDKQTKETRPYVRIKCAHRKAIFVPINWHEFPIPSGKCLRSLNVNISNDAVYLNFTYGQEATQSGGKKETAKSIQNRPKWAAADVGMINVLSLLVDDKDTPSLLICGKAFTNYNKQFNRHKARLDKDIAAQATKFKTIKRKNDEIVIAIKHSPLGESIKRTRTHLIECRNRYFDTEFNKISRRITDYLLQAGVTDLALSKNLSFLKTSEEKSKLNSQTRQSFYHLPFGRLLNLIEQKCQLVGIQIHFINEAYSSKVSCFSADVRQANALRLEKGQSLSTNDCKGSRVKRGLYKDSGSGLRFHADINGAINHIKIANADYEPFHLLHHKKKLCNPIRIKSDFSFCRLTPATRESKQYHCSEIAA

SEQ ID NO: 55888 - protein, 281 aa, unknown
  TnpB Polypeptide
MQIISSYGVELRKQNIPIRQTLEIYRSAVSYLIGIYVQVWEKLAEIPDAKRRFNAAEHLVHTTKKNHACFDFDIRFPKMPSYLRRSAIQHALGTVSSYKTRLDLWEKTDGKSGKPKLVYENHAMPVFYRDVMYREGAEGKDEAYLKLYDGHDWKWSCVRLDHTDMEYLRKCWSGKKASAPTLEKRHQKYFLRFSYKEEVTLTKTPVKEQIICSVDLGINTDAVCTIMRADGTVLGRRFIDHPVKKTGCTHTGTDPQIPEGTWLCADTGKMGIYETSEHRTG

SEQ ID NO: 55889 - protein, 380 aa, unknown
  TnpB Polypeptide
MDRTLRLPLNPTTEQAQSLLETMRQFTQSFNFVCVMGWRLREGNAYTLHKLTYRDSKALCPELVSDLHVQARQKAAEAVKSAMSLSKKARKVNCPASRLCPPRYNCNSFSVDWQKGVANLATVKGRQKVAFSVPAYALSLIGNKTATADLMYRKGRFTLHVVLKLADVAFTDNGTALGVDLGVCRPAVTSDGRFHGKRGWREVSKRRFRLKRKLQSNGSKSARRHLRSLAGREMRFRRDCDHVLSKRVLSGILPGTVVVIENLTNIRVRVKATRGDAKRRLHSWSFAQLARFLTYKAEVCGCRVVGVDPRHTSQRCNRCGFTYRGNRKSQSEFCCRSCGHKHNADLNAAKNIKDKFLVGWVSDPSGGPLPNGLLSQSLLA

SEQ ID NO: 55890 - protein, 425 aa, Symploca sp.
VIIAYQYKLLPTYLQRCRINKWLDMLRHQYNYLLADRFDWWEMNRTPINSCPLTCSVASPREQPEYYGQKRSLVQLKQEREWYKDIHAHVLQDMVKRVDCAFTRFIKGDVNGKRTGKPRFKGKNRYRTFAFPSVKADCIQGNKITFPKLGDIKFIKHRPIPECFTVKRALVTKKADGFYVTLTLEDKSVPNKPTIDIKPTETNSIGIDAGLEYFVACSDGMMVKPPKFFRQSEEKLANLQAKREERKKGSTGRRKLNNRIARLHQKIARQRKQWHFELAGQLLDRAKVIFVENLKVSNMTRRNKAKQNDDGQFVPNGQSAKSGLNKSFADAGIAGFLNEVLPYKAEKAGRLVVKVNPAGTSQHCAMCLNRVPKELSDRWHNCTCGASMPRDLNSGILIKKVGLGVRLTIKCESGKSRRRSQRYTA

SEQ ID NO: 55891 - protein, 352 aa, unknown
  TnpB Polypeptide
MKLTKTLKVRVKDKHAHQLDRMAKSVNFVWNFINELSDRSIKECGVFLSGYDMDKYTKGANKELGLHSQTLQEVSKEYTTRRKQFKKSKLNWRKSGGTRRSLGWIPIKTGASKWKNGQVFHNGTHFNIWDSYGLSQYKFRSASFNEDSRGRWYFNVVVSIEEEKSAGTKSVGIDLGCKESATDSNGDGVKGREYRKLEEKLGVAQRANNKARVKAIHATIKNRRKDALHKYSRKLVNENAAIFVGNVSSTGLVKTKMAKSVLDAGWSSLKTMLEYKSAHAGIVFEEVNESYTTQTCSCCGCISSNSPKGRAGLRIREWTCNECGSVHDRDVNAAKNILAAGHCRLAVGIPVL

SEQ ID NO: 55892 - protein, 382 aa, Shigella sp.
MRRFAGACRFVFNRALARQNENHEAGNKYIPYGKMASWLVEWKNATETQWLKDSPSQPLQQSLKDLERAYKNFFRKRAAFPRFKKRGQNDVFRYPQGVKLDQENSRIFLPKLGWMRYRNSRQVTGVVKNVTVSQSCGKWYISIQTESEVSTPVHPSASMVGLDAGVAKLATLSDGTVFEPVNSFQKNQKKLARLQRQLSRKVKFSNNWQKQKRKIQRLHSCIANIRRDYLHKVTTAVSKNHAMIVIEDLKVSNMSKSAAGTVSQPGRNVRAKSGLNRSILDQGWYEMRRQLEYKQLWRGGQVLAVPPAYTSQRCACCGHTAKENRLSQSKFRCQVCGYTVNADVNGARNILAAGHAVLACGEMVQSGRPLKQEPTEMIQATA

SEQ ID NO: 55893 - protein, 443 aa, unknown
  TnpB Polypeptide
MRCYSLYSVKIKHYNHILKETISLYRKATDFFLQVCLKEWDVLSTKTAHQKLLYMEQLCHQTKKNPTVKYTTFDQKFYKFPSYLRRAAITEAIGKVSSYKSNLENWDNENPATRGKKPSLPKAGLIYPCLYRGNMYLQTEEYTAKIKVYVRNTWDWIDIQLRKSDVDYIAHHCSNRKQCAPTLQKRGHQWFLDFPFEESIVLNDTSVYEQSILAVDLGLNSSATIAVMKADGTVLGRYFLRLTKEYDSLTHAVNRIKKAQQYGNRKTPRLWAKANGINTHIATRTATFIMDIAAQYNVNAIVFEHLDTSGKRKGSKKQKLHLWKSQYVQTIVTDKAHRLGMRVSHICAWGTSKFAFDGSGITLRGMNANLSSYSVCQFQNGKIYNCDLNAAYNIGARYYIREILKSLPAKVRLVIEAKVPQLAKRSTCTLSSLFSLNAELILS

SEQ ID NO: 55894 - protein, 502 aa, unknown
  TnpB Polypeptide
MPSFVLELEVSYSGNLLKEHKPGANLKNLGTKHALDTKMNVAVAIRNTCKKETLRRLHILQHDWEYQLLMEEYRTYKKDEDVLEKVGQKLNVVKRRIGFSEYDLHKYVLYSKHQYSDILSADECQKLATQAFKAVEEILYGKSKKVNFLPRTSDSSVEGKSHKSTLKYIGDACIQFGKGNQYPLIIKKNDVYAIESLKHQVKYVRLVRRTIRGKQRYFAQLIMDGIPPKTKNLHYGRKNSRVGLDEGVSTIAVVSKKKVMLRELAPNTAMDEKKLRQLNRAMERSRRATNPGNYNSDGTVKKGKKVWKKSNRYKKLEAKRKELYRRSAWNRHTSHHALANEIVNLGLDIRVEEMTISGLAKKAKKTAVNKKNGRNRSKKRYGKTIMSRAPAALIAAINQKLSYVGEEIKKINTFTVKASQYDHVSNTCNKKPLNQRWHTLPDGTKIQRDLYSGFLVCYTNDELDRVDRKACIRNFKQFKELHEQEIAHLKELDNPGLRWYIA

SEQ ID NO: 55895 - protein, 373 aa, unknown
  TnpB Polypeptide
MQQNKKLKARLRMINQRLESSRCKLQKVEARIDDHLPSVCFGSKQLFKKQNTVYKNQHEDWKRAMYKGRNPGMTISGRKDATQGNFLFKYDVKTKDLTYRTTKGEILVLKNVTFPYGQELVEQAVLAAANERNAVAWRLEVHGSRVLVKCMVEITNSQKNYDFSEGCVAFDTNVDHLAYAELDGHGNLLHHHTIPFTLRGLSTEQREQVLSKALEEIFQYAQKAAKPIVMERLEDIKQKPMYQHKKLNEILSSFAYTKVTMLAESKSSKYSIGLVKVNPAFTSQIGKFKYMRHYGISVHEAAAFVIGRRGLGYQDKLPKPMRHLIPDGKKNRHHWSHWSYLMAQLKTYAPGVFYKPIDYAVIPTIKELKQQLN

SEQ ID NO: 55896 - protein, 437 aa, unknown
  TnpB Polypeptide
MKIMSTYKAKIRESHKAFEDTITKYRQALDFLTTVVLNEWDDIEKIEGQFGKKAFVDNLIHKTKSNLSPKYDFDDVFKKFPSGLRSAAISKAIGKVSSYKSNYKNWLNDPQGKPPSIPKIGYEYPALYKGGSYKQSTTYTAKIKVWIRNTWDWMEVKLRKSDVDYIQRHCTTRKHLVPTLRRRGKNWYLDFAFEENVKLQDKPVKERIILGVDLGVNNACVCSAMKSDGTVIGRKFLSLSKEKDSLNHKLNKIKKAQQHGARKMPRLWARAKGINNDIAIKTAQYIMDVAFLYHADVIVFEHLDVRGKKHGSKKQKLHHWKANTVQRIVADKAHRIGMRISRVCAWNTSALAFDGSGKVERDKTNYSMCTFPNGKRYHCDLSASYNIAARYFIREILREMPAKARLGIEAKVPQCTKRITCTLSTLLSLNAELAAIS

SEQ ID NO: 55897 - protein, 376 aa, unknown
  TnpB Polypeptide
MEQMKAYKFRIYPSEIQKQLIEKSFGCSRFIYNNMLALQIKTYEEQGKSYSKYDLVKMIPLLKKEYEWLKEVDSTCLQATIDDLDSAYQNFFREIKKGNNQGFPKFKTKRNPKRSFESKCVNNNITIKDNLIKLPKLKWIRAKISQVVEGKILNATVSKTPTGKYFVSLCCKVDIEQLSKVDSNVGIDLGLKEFAICSNGDVFDNPKWLRKANYRLKLEQRKLSKMQKFSNNWNKQRIKIAKIHERITNQRKDYLHKISTKLIKENQIICLEDLKVSNMMKNHKLAGAISEVSWYEFRRMLEYKANWYGRTISVIDKTYPSSQLCNVCGYRNKDVKNLALRKWTCPECGEEHDRDVNASKNILKEGLRLVSLEQAY

SEQ ID NO: 55898 - protein, 413 aa, unknown
  TnpB Polypeptide
MVDSQNWIKKNKGFKYLLLPTDSQVEYLCKAFGCKRKMYNEYVSKMIDKLEEDGFENGKITYSKLNLPSPAKIKKEFPFMKEVDSLVFCNAEISFKNAVTKYNDNAYKKQYIKSALKKQKTIGRKLTFRDLKGLPSFKSKKDGFDSFTTNNQNTASGETIKVEGNYIKIPKLKTPIKFIKHRELPPDGVIKNITISKDSKGKFYISINVEYYVLDNKVNTNKDKVVGLDYSQSDFYYSSDDKIANYPKYYKKLEERLIKEQRKLSSKKYNSNNWLRQKKVVNRLQTKIANQRKDWLHKESYRLAENYDAVIVEDLDLRNLAQCLSLGKNLHDNGFGMFRTFLQYKLEDRGKQLIKIDKWFASSKTCSSCGTKHEELKLKDRIFECKKCKLTINRDYNASLNIRNEGLKILGLV

SEQ ID NO: 55899 - protein, 251 aa, Streptomyces sp.
MSGNRSPLTSFSLASKSVQPGIDVGITVPLALSDGTTYGHGEWLTEPEQARLLRLEQRAARRKKHRKPGERTSRRLHRTYDQIADLRAKAKRRAVDWQHKTTTAIATKYGTVVVEALTITNMVKSAKGTLEQPGKNVAQKSGLNRSISRQAWGRTVTMLTYKTARRGGILRKVPAPGTSQRCSACGFTTPGSREDQAVFVCKNPDCGWSGNVDHNASMNVLHLYRMGLALVPAAGRAVVRRARRVKPATAR

SEQ ID NO: 55900 - protein, 472 aa, unknown
  TnpB Polypeptide
MAEQKTATKATSQPKPMTIHTCYVVDIKSQLVTEKGEVTGSRRVDESLMRATRKVCLDALKFCAELFLKEWENLKGLQSLEMKSRCEVLIHTTKDSIAKYPEFDEKFPYMPSYTRRAIVADALGIVRSYKSNHKNWEALSPAERGAEPKMGFPTIYELTFYKQERRLNFSEGVMELKLYDGTKWDWYAFRINKSESEYIAKMSKTRKLLSPVVEKVKEKYRVRFCFEEKRQLVQNECPLKYRILVVDLGINAPASWSVLTADGTVHARGVIHLGRDEDRLNRRINRKRMYQQAGKKSKNIYRAITSANQQLSIDTAKAIMDTAVAYDVDCIVFEYLDFTGKKKGRKYRERIHMWRANDVQSRVELQAHRMGMRISRVCAWGTSKYAFDGSGTTNRRSVYHYEHGNKKYNYSVCKFQNGKIYNCDLNASYNIGARFFFREYEKLDGCPKLPPVPMRTLDTLLTLLYSSDEKAA

SEQ ID NO: 55901 - protein, 513 aa, Streptomyces sp.
MSSERAPKLRNVVTQQAYKYALEPTPRQQCAFSSHAGAARFAYNWGIARVADSLDAYAEQKAAGIDEPDVKFPGHFDLCKMWTAWKNTAEWTDRHTGQTTTGVPWVASNFVGTYQAALRDAAGAWQRFFRARKTGARAGRPRFKKRGRARDSFQLHGDGLRIVDAKHVNLPKIGTVKTFEATRKLARRLAKGSVPCPTCRATGKITDSASGKVKKCSDCKAAGSRPAARIVRGTVARDSAGRWYLALTVELVREVRTAPTPRQLAGGPVGVDFGVRQVATLSTGQLVDNPRHLESHLRRVKTAQQALSRCPPGSRRRAKAQQRLGRLHARVRHLRENSLQQATSALIHQHSVIAVEGWDVQQTAQHASPKNLPKQIRRNRNRALLDTGIGAARWQLQSKGAWYGTTVVVTDRHAPTGRQCSACGTVKATPIPPTQDEYRCPACGTSLDRRTNTARVLAAVAAQHHDAPSGGESKNARGENTRPTAPRRNGQFSAKREPRSRPPGRGQTGTPGT

SEQ ID NO: 55902 - protein, 427 aa, unknown
  TnpB Polypeptide
MSMFIFPPERSCITFIINNLMNHKNKYYIEIIESLLLFYMNIFQIFEYIRYVLYICDMKLTLKIKLLPTGDQYQALLETIKEANAACNLISEIAWQNKVFNQFKLHHLCYNDIRDKFKLSAQIVVRCISKVADAYKLDRKKRRVFNELGSISYDSRVLSYHENVASIWTVNKRQKVAFVCHNTNYLPYIKGEADLVFKRGKFYLFQTVEVPEEDVEDVEEFIGCDFGITDIACTSDGKKYSSQFLNQYREKRMKIRGSIQSKGTRGRTRECKRGCARLLKRLKGKERTTATIINHTISKRIVNEAKTRGVGIAIEDLTNIRSNSKRGNKTFKRELNSWSFSQLRSFIEYKAKRDGVPLIVVPPAYTSKTCSKCHHIGTRNNKSFKCKHCGNDMDADINAAINIALLGAAINQPEKSGMWCANLHISA

SEQ ID NO: 55903 - protein, 641 aa, unknown
  TnpB Polypeptide
MKVKKKKNKNENNFKDFRNIQKSAYKTYKIPLKTILLNSHTIQPLINNLVFEMNNLVIHTYQFIRLYLLNHYTKNVSLPIINESFILHCIKILGTRDNRGKKGKNTELLKILDTFYKTEYQPLLNHEKTNLVNTTFLLPSLATHIYTSLFNNIKEHFVKHFLRFINKTTNEITEDKATLFLFKNNLLSLEETDIMFDEWKKDHFKNILPENIKKSIHYDIKVNPFNYLKGMLYMNCILEKMENKLFQPLPLRNNIIPKHIVLNTASIMSLFCPEKDKDGNKIKKRDLLSNLKEYQNGVWNEFLNMKNKIFKNKHYQFYNQIETDGISCCLLFIRKDLKDKKWGSKVPVLEEEEFHRIEDLSKEQLDSLKDRNIVGCDPGKHFLVYMMDKNNNKLKYTASQRKKESYGKRNQRILLEEKKKHKIIDKETELSIKNSKSVDYNKFKEYIVEKDKLNKECIEFYKKEVWRKMKFRQYSYGNKSIDIFLNKIKETFGENLLIGYGNWSRSSQMKYTMSTMNKGLRKLIHKKYDTVTINECYTSQKCHECKNVLKHYKNKEGKEIYRLFTCSNCMSCGNKNIVFRTRDKNSAINILNLTEKWISDQTRPIEFQLPKHRLFTCGKKKSGLRRTIGVKEHPLKSKYAC

SEQ ID NO: 55904 - protein, 377 aa, Calorimonas sp.
VENFIIESQGEKKMMICQHFLIELTKEQEEKLFYTLYLCRKLYNYSLDQRIKHYKEKGKGLTYREQQNMLPQYKKEHPEYKMVQSQILQDVLRRLDRAYKNFFEKRAKYPKFKDKYHYTSITLPQCEEKRNFGKKGYVYIKNIGYIRIIAHREFDPSKVKAVNIKYHAGKWYINLSVEIEEEKKVTIGEKAIGIDKGINAIAATSDGELYSNPKWLQKAEKNLKRLQRQLSRKKKGSNNREKQKRRLAKLHEKVANQRKDYLHKISYNIVKNNDIICIEDLQVKNMMKNHKLAKSIANVGWGTLDTFLEYKAERSGKIFIKVNPAYTTQRCSRCGKIVEKDLSVRVHKCECGLEIDRDINAAINILHEGLRQLGIAA

SEQ ID NO: 55905 - protein, 528 aa, unknown
  TnpB Polypeptide
MFVSVQFKLEFENKENKEKVLSLMRLQSSVVRFIYNRLKEGKTKTEAYQLVKEKFNKEKFNLPAWYVSSAAVKANSLPRDKTVVFGGKVLFEKFCKNHLQGKAREKLKKEWKEKRQGNLISVGSKHETHKGNLCMRFEQKEENLYLRITTGEREFIYAKVKREPSNSKDKWNTFLAMLWEAWKSKNYFPYTVELKLRDGEIYGSVSFEVPTPEVWLTKEYGVIAIDTNASPLHLALAEVSLDGNLLSYQTISLHELIGLSKNRKDYEEWLLAHKVVQIAKEKGKAIAVEDLKKVNRGYRRDGKAKLRKRLHHWNFKGLLSKIERTARLSGIEVIKVNPAFTSVIGALKYAPQLGIDKDIAGAYVIFKEEVPENYLKRISDKEYLEYAIHCYEEREKELTQRIKKETNQYKRNAINSELKQVEKAKEMLLKRLKSLQELAKSSCEGACGNSRFRKGTSGWNPKQEEVVKATSYGIWQVLKVAFALPILGKLFTRDFSSLKPILVEGKWNRRAIRLVPSGFGGTALGNTG

SEQ ID NO: 55906 - protein, 398 aa, unknown
  TnpB Polypeptide
MFLCKKIKLEVSQKDAEALEFMQGKCRALYNWWVLRLRQGEKWPGWKKAKETLQESKQYDPELCQVYGKLLHEVYFRLDKAMKAFWRRVKNGEKPGFPRVRPRHCFFTLCYPAMYLKIEGNMLILPTGGKGKNKRYPNVQAHLTEEPPANFREVAISRDARGNYSASFTYEEQEQPPQAGKVVAFDLGIKTLATGVNEQGRFYHIGGFKGNRWYNRQLDKIRSKRDRCKKGSRRYIHLSKVYRRVSEKKRNKQQDCLHKASHLIAHRLVESTVVIGELSQRQMVIKAHAERNKHLNRAVYNDWGLYRFVQMLLYKCVLSGKELVLLDERDTSKTCSQCGHTCAMPLWKRTYRCRNCGLIMDRDDNSARNILMRFLARPGPHTGDPVRCADVFTATEMV

SEQ ID NO: 55907 - protein, 435 aa, Psychrobacter sp.
MKINKAYKFRLEPNAEQQIILNNLVGSARFVWNQILAISFEMFAKNEFINATNLVNKIMDLKNNPDFDFLRTHANAVSLQQKIRDLSSAWSRFFDSKTHTRLKENKKKPRRPRFFKLVDGTEIQLRPLMPRFKRKSDGRDSIRLVQFDKYCRIEGNRVKLPNGVGFVKFKKSQDIIGTIKNVTISKKSGHWYVSFGTERALSENPTHPSKSAIGIDLGITKLITTSDGQYIKPKNSFKANQIKLAKLQRQLSKKVKFSENWKRQSRKIQKLHHHIANIRHDYLHKITTTISKNHAMIACEDLKVANMSRSASGTMEKRGRHVKAKSALNKSILDQGWSMMVNMLEYKQQWQGGLLIKVNPRYTSQTCFECKHIARENRRTQANFECVECRYVTNADFNAARNILAAGHAVLSAEGGCVKGRPLKQKTCDLREKVT

SEQ ID NO: 55908 - protein, 223 aa, Psychrobacter sp.
MSATISKRGGKWFVSVAVEIQKAVIPTKKTGKSVGVDLGITDLLVLSDGTKIKAPKPLQANLKKLRTLNKALSRTKKGSKNREKAKTKLSRLHYKIRCIRQDSLHQITTSLVNEFDVIAIEDLNVKGMVKNRRLSRAISDLGFFEFKRQLIYKATEQGKVVKSVGPFYPSSKTCSNCNHILGKDELTLKMREWLCPNCQVSHDRDLNASINILNNATVILTAA

SEQ ID NO: 55909 - protein, 485 aa, Moorea sp.
MPKKVGVTKRISTQIVPVVEMTESVELELSSTMKKLGIVRSESYNKLGSISHWGLDWKKAYPEVRSFRTPESLGLPSKLMEWTVSDVAKAITAQQAACTEAVIKKIYRRFSGKDNHKKRKELCKQLKTLAFLDNSLLHRLVRKEFQRGHSWVKNQIVYQQGGYSCKQISRNTYQLELAGLMRGKRNKIIVRSNRKIKGQIRLGHNQVLQRFEVHFLVDHGTVEVPAERRSIGVDKGYTEAFYDSDGQAHGKGLGKESTNKSDRICAKNRNRGKLWALHQKLEELNPAKSARILKNNLGRKTENKRYRQNQSELTAIIGAASRSIFNSESLKVFAEDLTQPIRNKRQSKAMSRKLNTWMKGQMRDSLQKWANWTGSIVTEVQPSYTSQIDSVTGTLLGLRSGDNFTRFNGVVLQADHNAAKNILDRGTDFEITRYMNKTEVQAVLLRRTARFLEGMGLSLVDAVELGWLDRKHTKTKAFKQLLIGI

SEQ ID NO: 55910 - protein, 397 aa, Caldanaerobius sp.
MEIKRVIVFQLSHCNIEHRIILGHLTYAASKLWNVANYAIQNREVLVNQLEKCLKDNFWYKNLHSQSAQAVLQKLQIAWKNFFDGYTKKPKYQPKNRHIPVKWKKDGFKIMKNKIRLSLSSQTKKYLKEKYSIESNYLWIDLPKNLLLNTVQEVEIVPKILYGHTTYFVHIIYKKEIPEIKLERDKLMGIDFGVKNLASIVIEENTETFIIDGSYLISRLRLLSKEKAKIQSVISKQGYKTSQKFHNLIIKENNFIKDYIHKVSRHIVELAKEKGVSKIVIGGMSDGITNMDIGHKNNEKLHKIPFGRLFDMIKYKAKEYGIEVEKVDEAYTSQTCSVCGIVKKNNRIYRGLYVCSKCGAVMNADINGAINILKRVAPNPVLDRSRGFGSPKRIRVA

SEQ ID NO: 55911 - protein, 399 aa, Streptomyces sp.
VDGSNDRLFTVGVVKLVVQVRLMPNAVQAPVLERTLHTVNACANQVSAGSYASYGLKGSVKDLRSMAYSELKARGLGAQATQHVIKRVVDAYTTLRANLRAGNLGLETSKRRRKAESKPIAFRPDAAHTFDDRCLSWNHDAQTVSIWTLDGRMKNLRFVCSPGALKQLAEYRRGESDLIHRDGMWFLIATLDLPEPEVYEPKGWIGVDRGINNLATTSDGDNYSGRRLDRYRRWQARKKAELQAKKTRSAKQLLKKRARRESRRAAHVNHAISKTVVAVAQRTERGIALEQLQGIRERVTVRRDQRARQSSCPFHQLGSFLEYKARRAGVPYLEVDPAYTSQRCPRCGHTERGNRPSRDHFFCRRCGLAGPADHVAGVNVRERARSAWVFVNMPQPDPV

SEQ ID NO: 55912 - protein, 434 aa, Microcoleus sp.
VRVAEENAGTEFSKSLLISHLSEKLYNTKRRLGKVLHKVVKVPLYPTSQQIVLLAKSFGCARWWWNFALNKSIETYKETGKGLSQSALNALLPQLKKEEETLWLGECYSQVLQAVTLNLTTAYRNFFEGRAMFPRFKSKHGKQSIQFPQGVKVKGDIIQLPKIGNLKAKIHRPVEGKIKTVTVSLAPSGKYFASILTEVEGELPKTSTDGRVVGIDLGLTHFAIVSDGSKVSKYDNPRHLAKHEKNLKRKQQKLSRKQKGSNSRNKYRKNVAKIHERVSNSRQDFLHKLTRKLVNENQVVVVENLHVKGMVRNHSLAKAISDAGWGIFTNFLAYKQELKGGKLVEIDRWFPSSKLCSNCYYQIDELPLDAREWTCPHCGTHHDRDGNAATNIRAEGIRMLKADGTAVSAVGGEVRPKLGRKSKLRHSLVSTETA

SEQ ID NO: 55913 - protein, 413 aa, Microcoleus sp.
MIVLEFKAKGKITQYAAIDEAIRTTQFVRNKIIRYWMENPGVGQKELYRHNTALRAEFPFVKALNSHACQVAVDRAYTSITRFYSNCKKSIPGKKGYPKFQKNCRCVEYKTSGWKLSQNRKQIDFIDKKGIGKLKLKGKWDLNFYQEDQIIRVRIVRRADGYYVQFLVNAENKVDIDLTGKMLGLDVGLLEFYTDSNGQTEPNPKFYRQSEKRLKLRQRRVSRKKKGSANRRKAINRLGRLHLKISRQREEHACRVARCVIQSNDLVAYEDLRIQNLVKNHCLAKSINDASWYQFRKWLEHFGIKFGKITVAVNPALTSQECSNCGTLVKKSLSMRTHICQCGFVLDRDWNAAINILKLALSTTGHVGTWVLNPNALPRFAHHASQTGDLTSTLAGAILSGQAESMNEESSPF

SEQ ID NO: 55914 - protein, 415 aa, unknown
  TnpB Polypeptide
MLTGRRFRVEFTDAQAEFAERIGAACRAVWNTGLEQRREYRRRGAWMNYQPQAKELAEAKTEHPWLKDVPGHCLQQTLMDLDRACREHGTWRVRWRAGRRWSPSFRFPEGSKMAVDKLNRRHGRIKLPKLGWVKFRASRSLDGETIRSATLTREGRYWVLSVLVDDGRRAPEAHQVPGSAVGVDRGVATAIATSAGALFDRQFATNGERRRALALQRKLSRTAKGSANRAKTRAALAGVRARERRRRLDFCAQTAHRLTATNATVVIEDLKTKQMTKSAKGTIDQPGRRVAAKSGLNRAILGKGWHQFALALASAARYTGTAVVKVPAAYTSQRCSLCGHMDPKSRESQAVFRCTQCARAEHADVNAAKNILAAGLAVIACEDQPRPAGRARSSTQEPAGNREELLLQPTAASAA

SEQ ID NO: 55915 - protein, 379 aa, Streptomyces sp.
MATERACEKRQFGHRARLALTPAQVVLMDGQAHSARTLWNLLHDWWTMLPRGKRSLAAADAAIRQARKEIDWIAHLPAQAAQAVLKTYFQAWKNCWEGRAAAPDFKARFRTVMSVDIPQGRDLCITRAHRRWGMVNIPKVGRVRFRWTKGLPVGKRANADNRITGARLVKDALGWHIAFRVQTLEPTPEPHTGPEVGIDMGVTVPLALSDGKTYDHDAWLTSEEQVKLLQMERRAAHRKSFRKRGERTSRRLRATYDQIAGIRARAKRRRLDWQHKATTAIAAKYSVVVVEDLNVTNMVRSAKGTVEAPGKNVAQKSGLNRAISGEAWGRTVGLVMYKTARNGGTLHKVPAPGTSQRCSMCGFTTPGSRESQAVFVCKN

SEQ ID NO: 55916 - protein, 761 aa, Streptomyces sp.
MATERACEKRQFGHRARLALTPAQVVLMDGQAHSARTLWNLLHDWWTMLPRGKRSLAAADAAIRQARKEIDWIAHLPAQAAQAVLKTYFQAWKNCWEGRAAAPDFKARFRTVMSVDIPQGRDLCITRAHRRWGMVNIPKVGRVRFRWTKGLPVGKRANADNRITGARLVKDALGWHIAFRVQTLEPTPEPHTGPEVGIDMGVTVPLALSDGKTYDHDAWLTSEEQVKLLQMERRAAHRKSFRKRGERTSRRLRATYDQIAGIRARAKRRRLDWQHKATTAIAAKYSVVVVEDLNVTNMVRSAKGTVEAPGKNVAQKSGLNRAISGEAWGRTVGLVMYKTARNGGTLHKVPAPGTSQRCSMCGFTTPGSRESQAVFVCKNSPPTVSATTRTCSATPMSPNSPTSPSACAPRAPPPSPARTPAPRCPWPSPPSSGSPLREGYGRLREDGVDIAAVDAHGPARGGRREGRAEVDGHIGDLLRLDQPLEQRLGPVLGHELPLRLVPGQAGVHQFVHELLDAAGVRRPGDQRVDGHPGTRGILGEAAGHREQRGLRHAVVDHLGGDDDGGVAGDVHDPAPGPALHRGQIGADHPYGRQHVHLEIAAPLVVADLQRRNGAEDAQVVDEDVDVRDGRGDLLGAVFGGDVTRGGDKAATAVRRPLQFRDGGGHGLLPASVDGDTGARPRQSGGDGEADALGRPGDEGGFAGEIDQHGAPPKGCGTRTKRRCVSGVHAGAAETAARGGPGWCAVAGPHRVTSDHGNCIRV

SEQ ID NO: 55917 - protein, 416 aa, unknown
  TnpB Polypeptide
MRVRAYRFRAYCSNTTARVLKTQLEVACKLYNTLLHAEQEEYEENKHTMNKTELRQLALDLRKQNPEFQVLHSQVAQQVADRFYQARQRFFEGLANKPKKKKPHKFLSLVYPQSGWRLSDTREVGLGKNKKKKARLYLSKIGFFTLVMHRVFPESQVSQVCVKLDPSGRIHVIFLVEEAETLGQSSEEPKKAVGVDLGITRLATLSDGRYLENPKPLERSLERIRMLQRTLSRKKFLSKNWLKTKTRLAKQHERVKDFRRDLFFKLGALLAQEYDLLVLEDLNVQGLVQKGETKRRRMRLYDSSFSELRAVLEWEFRKRGKHVLPVPSYNSSRECFLCGGINQSLTLDDRVFHCPHCGFTLDRDLNASLVLLKRAGWVPPSVPAVELHPIPPLPALGLVGRQGGVMRQEAPPFMAG

SEQ ID NO: 55918 - protein, 758 aa, unknown
  TnpB Polypeptide
VNDTGARLDVENMETETITLTRTFGMVPASRDDSIAPAVLERVMVAANAFIKAGAGLDPAVLAGTTMVAVKRFYAAARQLPWLDPVLRSTHLRERAWRCASQVAYFALQEHRRRGTILPAVARAMQGLLLSNSFARIRLGTFPEREMLDVARDLLKDANLPGGCLSSEYLSGMARHARGLLKAAFGTRFRNEVTRSISALVRDAAAIVEAVTAEIQGSLENLPASITRSTSKQLTRRVKDRTRGRGPPAGMHRFDALVDAMLDGKVLACWQQARRPARDALLQDLESQAGRADVAEIASEAVRDLLSAMTMEEVVAAMFSVRSPPPVDISSKGSIDMARVLRDRALVSARNRIGEALWRSLAPVADRALGEMAGEPTRHLVLPRVTKQVVPLAIDDGQVYRLDLEREEGTGRVVNATVRFSLEPGKTCTFTLRGTDRIDALLARGFVPARGTITRKPGGRLLLHLPFEKDCPVEPLPGGDGDDGGGEDDPPATTVVAGTDLGLKHLAWGSIGACRRAAAGDGSWEPVDEARPEIARVCIDQAQLAGPKDAWLAGLPSAPLSNLKRELVALSSQARALQEEMAMLRRRYRGFYRHVRQYFVARREWQRCWRKMRHLHEEMARQVATRLVAACKYYHVQVLRFEDLSWSHHSAKRVSGAWLSSWQVHWFFSQVQARTTLLARLEGIAVELVDARGTSKRCSACNTNGIRAGKTFSCTNDGCKKVVDSDLNAARNVRIAPISPRPRAKGEGARYRPLACQV

SEQ ID NO: 55919 - protein, 441 aa, unknown
  TnpB Polypeptide
MEQIITAKLKLHTTPEQCARLRSTQLAYRDGLNHVSRYAFDHGKISSAARLQKATYADVRTQYNLPAQMACNIPRQVAATYKGLWSKATANTKARASGQTKKRHKGLDKPPTYSQPTVTYNYGRDYGFKCDSRVSILTLEGRLVLPYSGYDTHTALIREGATIGAAKLWYDKPKKRFYLLVSLAVQIAAPTPNNLPAVAGVDLGLRYLAVTSDTAGQAAFHSGKAARQKANHLARVRKRLQQKGTRAAKRRLVAIGQRERRQQAATNHTIVRRIVAANPMTLIGVERLTHIRERTGPRKRGKRASVKQRKANRVTSKWSFAETQAMLAYKATLTGSQVVWIDADYTSQMCPMCGHTSRANHPNKGLLFVCQMCRYTLHADLIGARNVALRTLLTRQDWVGTGVLSVRPDVSDVEAKAARLRRCAELRWSLGASPRVYAWGH

SEQ ID NO: 55920 - protein, 401 aa, Fischerella sp.
MRLAYQYRLRPTKQQIGTFENWLELCRRQYNYRLAERFNWWEQNRCDVDKCSLISCSIAPLKDKPGYYSQKRDLTNTKTLFPDYKDIPSHTLQDVIARVEKTFDRWLKGDSNGKKSGRPRFKGKGRYRSLAFPDPIKPEQVHGKFIQLPKIGKVKMILHRPIPDGFKIKTATITCKADGWYISLSLQDVTVPSLKTDVIPAPDNTVGIDMGLKSFLVTSDNQTIEIPQYYRKAEKRCSRLQRQLSRRKKGSNRRQKSIKRVAKTHLKVANQRKDFHYKTAIWLLNHSKVIAHENLNIKGLAKSMLAKSVTDAGWGQFLQILNTKAASAGCLVVAVNPNGTSQECSECGATVPKTLAHRWHSCQCGASYDRDHNAARNIKHRAAGHPVLQSSVNVRRVAGSR

SEQ ID NO: 55921 - protein, 307 aa, unknown
  TnpB Polypeptide
MLTLSAMRGERRIRTLVPETPGWFAERYPVRKLGAAKLLIDLRARTAQIALIYRVEGESPVADGDVLGVDLGQHSLYVDSRGGETTSSKIREAKRKYAHNRKTLQEKGTRSAHRRLKAMSGREKRFIRDVNHCVSKQLANSPNVQAIAFEDLTHIRRQAAKCSKTSKRRRNMPHQWSFSQLQEFTTYKAAANGIRIIMVDPSYTSQQCNRCGYVDAGNRNRARFDCKRCAWSDNADHNAAMNIRDRAIDTLEHENTSTDRPVDRVQSTTRMDGTPTMTSTSDDDGRVVGDHVHVQTAGLAPEVVDVA

SEQ ID NO: 55922 - protein, 428 aa, unknown
  TnpB Polypeptide
LVQYNAVTSYRSYQERVKVANGESSKYVSQGWKRTVDASAPSYGEDYVNLGAVDRAYARIENDPFADGEIVMRMVIQGAWYRLVFDFDNERFAEGKVTLPVIKVEDGRPVFIFTVVTDNPVVQFSGYYTIGVDVGINNYATVVVREVEAGRIVCETTLSQRVHSLWNSVRASQSQVRDLRKKAATLIRDRQARMSVLDEARLHREAASRKKRELAILAAQEIAYLSHVWGNAVVAVEDLGWISNTMQNGRWNRGAFVQWLTHYVSQNGGWVVAVDPANTSQQCNRCGSRVKHPTYEVSVCAEHGVMDRDVNAATNIADRAVPRVAKARVTRAKNRKLRPQVPLKTPPARASLKYPGRDRTKNKPTLKRKNHRRVFREVILPLCPARAQTRCLEARVLADQGACGVLGTSWAAIEYGNVTYECRLCTLI

SEQ ID NO: 55923 - protein, 436 aa, unknown
  TnpB Polypeptide
MSSYEAVKVRLDPTPRQERRMASHAGAARFAYNAGLARAKEAIDNGESPKWSHYDLRRWWNENKDTLAVNRDTGEVWWSQNSKETYSMAFRDLAQGLSNWSKSRKGKRKGKRVGFPRFKSKNATMRFAYSTGFTAPTASDPCGLKLPRIGRVHCMENVYKLVNGAHVIRISVSRRAGHWYASLTVDREPAMVLASAPKGGAVGVDLGVKNLATLSDGTVIPNPRALSSKLRTLRKAQKALSRKVMGSVRREKARARVARLHARVADVRADAINKATTMIAETYSVVCVEDLNVAGMVKNHSLARSLSDAALGEFRRQLEYKTARNGTVLRVVDRWFPSSKTCSNCGVVKDKLSLSERTFNCDACGLSLDRDLNAAINIKVAGSAPETLNARGEGVRRTNVLLGNADLGEARTKRVCQSAVRLGAGLGNEAMQPRIN

SEQ ID NO: 55924 - protein, 394 aa, unknown
  TnpB Polypeptide
VGKRSRLEIPVGQELKDEYGLGYHERLRLEVRGNPKWDGKQGRLELEYDEVSDTFRAFQPVTVPDSRLDSPLASEEAALDVGANNLVACSTTTGNQYLYDGRELFGRFRETTDEIARLQSKLREGRYSSNRIRRLYRQRTKRRDHAQNALVRDLVERLYDEGVATVYVGDLTDVLEAHWSVRVNEKTHNFWAFKKFIHRLACVCEEYGISLETESEAWTSQSRPHGVRDVPSGKQQLRNQADGTARAIRVGRPRLVGETIPSRKSQRSAHEPASCLRGSVAEPSTEESSRFSAGRMSSLLRLPDLPLERLREHADRPPLRPVGDEHEGDRHVERAVAVQPPIADGPRRPPYAMGGCPPVRRGRRPARTTGRSTPRGPARRGRRRGVVPAGRRPR

SEQ ID NO: 55925 - protein, 402 aa, unknown
  TnpB Polypeptide
VGKRSRLEIPVGQELKDEYGLGYHERLRLEVRGNPKWDGKQGRLELEYDEVSDTFRAFQPVTVPDSRLDSPLASEEAALDVGANNLVACSTTTGNQYLYDGRELFGRFRETTDEIARLQSKLREGRYSSNRIRRLYRQRTKRRDHAQNALVRDLVERLYDEGVATVYVGDLTDVLEAHWSVRVNEKTHNFWAFKKFIHRLACVCEEYGISLETESEAWTSQTCPECGDHEKTVRHEDTLTCPCGFEGHADLTASETFLRENSNCEIRPMARPVRLLGRPRLVGETIPSRKSQRSAHEPASCLRGSVAEPSTEESSRFSAGGCQLHSRDASFRPRTAIEHARSRSPVSFLALLKPVAVGSVVPAAVSTRTATITYKERGGGVAGAGSRPPGATRRVADEAGEV

SEQ ID NO: 55926 - protein, 270 aa, unknown
  TnpB Polypeptide
  misc_feature (35)..(35): Xaa can be any naturally occurring amino acid
QRQNRDDAAGPRPTSVWCRCRTQRSDHHPPERRVXAEHRGVDFGITDWATFDDGSTVANPRWVRQALPRLAVLQRKRARKKRCSLRYRRLGRSAARLHDRIGNLRREFLHQTTARLVATCAVIATEALQIQNMTRSARGTNEAPGRRVKQKAGLNRELLSVGLGLAHQMLAYKAVEASTRLHLADTRQLKPSQRCAGCWAIVPKSLAQRVHQCPHCGHTMPRDQNSALVVLIDAHTPGTGVAARPKPLARQRAKSTSVTRETHATAPQGP

SEQ ID NO: 55927 - protein, 235 aa, Clostridioides sp.
  misc_feature (231)..(231): Xaa can be any naturally occurring amino acid
VVVVEKAYKFRMYPNKKQQELINKTFGCCRFVYNKYLAKRIDVYKKHKETFTYKQCSSDLTNLKKELKWLKEPDKFSLQNALKDLDNAYKKFFKEKTGFPKFKSKKINRFSYKTNFTNGNIMYCGQHIKLPKLGMVKIRDKQVPQGRILNATISKEPSGRYYVSLCCTDVDIEAFENTNNHIGLDLGIKEFCISSCGEFIENPKYLKKSLNKLAKLQRELSRKTIGSLNRXLLIN

SEQ ID NO: 55928 - protein, 444 aa, Thermincola sp.
MEEREGAVIPLNSLRGYTDPLVFLKKGGDQILFLTVKAQVHADRETEAVLKDAMFCATKVYNGLLWHLREGSKETGKVNLSWSNINRIIKELPQAKGYYSLSVRMTCLEVMEAYRSFFALKKNGRVKHNAPGFRRKTALSPLKYVQSGFKVVGDRVTVSLGTSRPDGVRRVSFRVSRRSGISLSNLRELSIIYDKLTGRLEARLVVEVQLCENAGTGRAAVDLGETVLLAAAFDDGGSILYSGRLIKSIRRYWQKVRAKVKPPSKEQPRMSRHYRQIARKERRQVEHLLHIVSKHFVEECVMRGVGEIVFGDLTGRVEGRRFGRMNQRLHAWAFHKLTDMVVYKAALVGIAVRKHDENGTSITCHACGVEKPSNRKSRGLYLCRCGWTAHADINAALNIYERAYNVSPVKGSSGLVARPVVLSFRMDRHTVHEPKRRITLRPSA

SEQ ID NO: 55929 - protein, 399 aa, unknown
  TnpB Polypeptide
MKKNSKKKGDYKSVPTTRKIKIRLTNEQFKTLKIWAGICRKIFNVALDSYNKKETEFNELDHKFTLSTSEFLKKPENEFILQCPKEVREIMIQRLKISLSTNFDKLKDGSCKKFKIKFKTGKNYEQTIPLPKSGFSKKQTDGSINIYPLKGIGKLMLSRPNEDLGENWIQSNIIINKHGECWLCLTKDTEKTKNQLKTSFCSLDPGIRTFQTIYSPSGIVYKIGDKDIGRLLRLQHHLSKIRSKIDSNKSSRKKSILEKAYYKLNSKIKNLVSELHNKTINFLVKNFESVIIPDTNIKNMVTKKNRNLGKNNVKGMLLFSHYQFRTRLLMKSSIIENFNVIVNGEEYTTKTCGKCGLLNQTIGSKKIFKCSCGLLIDRDINGSRNILLKYLTERAYSIK

SEQ ID NO: 55930 - protein, 403 aa, Thermotoga sp.
VVYQLKINLDSASEETKEKLFKMFLEAKWLYNYIVADIETRLNSNADKLKEVEIKVGENFERRKIENLSSQMKQALRERIEQNLHSLRLLKEKGYKTGKLQFKRHVNSIPLKQFGNTFKFVNQQKTRVKIQGIKKPLRVLGGHQIPEDSEIAKAELIKKPSGIYLFVTCYIDRDKYTKVWEQRKNKEGVVKPRIWQTFETDSGIDFKPTGFMLSNGLKLEWQIKETRRLKKLQKQFARQKKGSKRWYKTKEKIAKEYERLTNIKYDVINKTCSFLYRYRKICFQEDNIKGWKDGHFSKSVHYSAVGTIKRRLSDSLRVSTAVVNCCVPTTKTCSRCGSRQEISLSDRIFRCSVCGLEIDRDLNAAINMLKEVGLDRSELTPVEWETAARIFRGNPYILVSHTT

SEQ ID NO: 55931 - protein, 387 aa, Endozoicomonas sp.
MLLAHKIELRPTKQQADYLDRACGSRRHAFNQLLAHFNQEGVKWSKKAANEKYKELRLEFPWYAEVSQRVTRNTIDDLHNAFTHFFRRVKKGEKAGYPRFKQRGLHDSFSLREKPKFDVDGRTLRIEKLKTKIKMRQELRFTGTPCQVTISKRAGKYFASILVDTQDYDPKAQSNESVGVDFGIKDLAICSNGKTFAANQKLKHSLKRLNRKQRALSRKTKGSNRYAKAKRAVAKLHYRISNQRSAVLHEVSDYLTSRFKIITIENLNVKGMVKNRKLARAVSDAGFGRLRELIEYKAELRGCRIVIADRFFPSSKKCAVQTCNHINDNLTLSDREWRCPKCKTLHDRDYSASLNLDNYGRDTLQLDPKPYARVELDTIRRASMLTA

SEQ ID NO: 55932 - protein, 406 aa, unknown
  TnpB Polypeptide
MQQVYSFEVNKDSCSCFGFLKQGCRVQKDLYNQALYTWHIHREELNEYIHFKDFDKLMKTVENLEGEINYRLGKTQVAQQTLRRLDTSISSFFKAIKKWKENPAKFSGRPGFPKYLRKKGYTQMTFTNQSISIKEREDGTGYILVDRHHILDIPNYSDYKHLFKNFNQIRFIPSKNCEYIKVEIVYTVDDEFYHNTELDYSRFASCDLGLVNLMTIVTDFCEPIIFSGKEVKSYNNFFNKHLAKAKSDVKLINKHNSSNRIRTLYHKRDNYLNDIFQKTTTALVQLLIDNHIGNFTVGYNKEWKQNQKKDKKLKKKTRQQFQHVPYAKLLHMLKYKCERAGIIFKEVNESHTSKCDALAFEEIEHHETYLGKRVKRGLYKSSTGQVINADVNGALNIMRRSINDSS

SEQ ID NO: 55933 - protein, 410 aa, Lachnospiraceae sp.
MIAQRVEKHIIKKNSPHYSMLLDFCHRSKNLYNHANYIIREELTKNGKWIRYNDLDKILKADKEYPDYADMPTAASAQQTLRVLDKDWKGYFKSHKDWKKHPEKYLGEPKFPKFKKKNGYFSVYHTGQQCKIKNGIVRFPKSFNGFTLSSKIDARDDFISLQQVRIKPCGFCLKAEIVYRIDVPEQLSDNSKHMGIDIGVDNLATVVNNLGKKPFVINGKGLKSINQYYNKQIARYRKIAKQMNDRHNTKRMDRITDRRNRKVDDYMQKASRIIVNYAKSNDISVIVIGHNDEWKQKSDMGKIVNQNFTQLPFNRLIEMIEYKSEEYGIAVVRTEESYTSGTSVIDGEAPLKQNYNKSRRIFRGLFKTESGVKINADVNGAYQIMKKVFPNEFSDGIVGVALHPVIVNAA

SEQ ID NO: 55934 - protein, 377 aa, unknown
  TnpB Polypeptide
MIKTNRAIVYRLYPNKKQAEFFQKTFGCVRFVYNQMLSVQEERYKNNKSHLSKFDMNFYCNHNLKTEYTWLKEIDKFALTNAIYHLEDGYQRMFKHLGKHPKYKNKHKSKKSYTTNFTNNNIEVGENYIKLPKVGKVKAKISLDTRYLQIKSATITQNRDETYQVSILFEIIEEEPVQVIPTKNNTTGLDYKSDGLYVSDTGVVANMPHYYKQSANSLAKQQRKLRNKVIGSKNYYKQQKKVAKIHKHIVNQRKDYLHKQSTAIAKQYAYVCVESLNMRAISNKGFGNGKATLDNGYGMFLDMLAYKLQERGGKLVKVDKWFPSSQICNCCRFQNPILKDLTIRHWNCPNCGTTNIDRDINAAKNIKQEGLRLLGIA

SEQ ID NO: 55935 - protein, 206 aa, unknown
  TnpB Polypeptide
MKDTAVKIKQLNQITVLQRYLELIMQCREWQCFQKRLRRKKQVFFRKNEKRLAREQRKLSRCVRGSHNYELQKKKVARCHEKIRNQRRDYLHKLSRKIADNYDAVAVEDIDMKAMGQCLHFGKSVQDNGYGMFREMLDYKLAWKGKKMVKVDRFFPSSKKCCKCGRIKKELKLSERVYRCACGNEMDRDRNAAINIREEARRMLTA

SEQ ID NO: 55936 - protein, 407 aa, unknown
  TnpB Polypeptide
MKEIKTYSVRLFPNKMIERQLNHLSVIRNTIYNELVDIEQTEYDNTKKILSEYDLNYRLPGLKSEHPEYKVLHSKACQRISSEVFGSYKSFFNIVKRDNTAHPPKRIEDIEVFHTIAFNQCGWKFKEKTLLLNGIEIPYKGKSGVDYQSLKVKEVRLKKKNGKYLLDFSIETLMPEPEEITVNNRILAIDLGIKNIVNGIDNQEHWVTIPNKAKKVNNYFRKQIAKIQKKMSVCKKGSNRYDRLKKTRKKLYKRRDAQVKQTLHIQSKKLANMNYKTIVVGELSVKKLMGTTDNKLRKTSRSFGETSIAMFLEYLKYKCLIRNCEVETISERWTTQQNCLTGRLFKEKIDLSVRVVSLSDSITVDRDLNAAINIMKRYEQNHIALLTEPLDVSSVVGKYNLLTNTCS

SEQ ID NO: 55937 - protein, 403 aa, unknown
  TnpB Polypeptide
MRNTKHKLFHDKILKYLQNDFDICGIVRNHFIALSMRYYRMYGKGLSYSKMSAHLTKLKKLEKYQHWNIPYAWSLQNVVKRLAQSFREMKTHSRGHPKFKSSKKHKGMTFDGLHAPVEKVLDKQKNERNHPTYHIRLNGRWYRFSLHRELKGQITQVQVTRDALGDVYITLTEDYTEVIPEPKTGKAEGFDMGIKDFLTGSDGYRYTSPMFYKQNANKLAKAQQVHSRKVKGSNNRERERKKVARIHKKTENQRADHHWKLAIELCQKFDILFFEDLNLNGMKRLWGKQVSDLAFGEFVKKLNHQSNKRNRFVFKIGRWTPTTKCCCVCGHKNETLTLADRDWTCRRCDTHLDRDQNAALNILKEGVASFGLGDIRPIVLLRQIVGYSVEASSSLLNPTNAFA

SEQ ID NO: 55938 - protein, 421 aa, Clostridium sp.
MDIALLHYDELILIKPVDKVSAQQLRQQYMEHLIHSTGSSHAKYCGFDRRFYKFPSYLRRDAINTAVGRVFSYRSLLKNWEESGSKGQKPFLNRTQDVMPCLYRGNTFVQNGNEARIKIYNDHDWVWLCIKLRQTDLDYIAKNVSDWEESAPVLTKRYHKYELRFAYTKSGKKLPQYVKDKDVDTVVGVDLGVNTDAVCSAIRHDGTVTGETFIDSPVEKDRMDGLLNTVRKAQQHGSRKNSRLWRFINNYNTAIAKKTASAIVSFAAESHAKVIVFEYLHMHGKRRGSKRQRLSLWRKREIQLRTEALASRLGIRVSYVCAVNTSRLAYDGSGMVRRGTGAGFKNQKLCIFKSGKVYNCDLSASKNIGARYFIRALLKSMSAKMLLSAQAKVPELDRRTSCTLATLIHCYAALHAIKASA

SEQ ID NO: 55939 - protein, 405 aa, unknown
  TnpB Polypeptide
MMVKKAFKVELDLVPEQEILCRKHAGARRFVYNWMLAQCIFARESGLKKPSAYDLVKKFRAEVKPTLEWYSEISSRTEEGAARDLDQAYKHFFRRVKQGKRGKKVGFPKFSKKRDGVGSFTTFGTIKITDNTVQIQKFGVLKLKEHGYIPVNSRVTSATVSTRGGRWFISCLCEVDIQPIDKIETVGMDLGIKSAIVTSDGDTFDAPKPLNRYTLKLRKLNKSLSRKQRGSNRRKVAVRKLNKLHYRISNIRADFIHKVTTSIAKTKQTVVIEDLNVSGMVANHHLARAISDVGFYEIRRQLEYKMKWYGGDLIIAPRFYPSSKLCHVCRYKNDGLTLSDRDWVCPQCGTWLDRDINAAINLAQLAPNYDESLNGRGDGSSVAASNGAAQPVDETSIRVLDMVFT

SEQ ID NO: 55940 - protein, 445 aa, unknown
  TnpB Polypeptide
MNIFSSYKVKIKHYNHIFEQTVEIYRNAVSFFINVCDKEWDVLESLKNLERCRKLEELTLQTKKNQNPKYDFNEKFYKMPSYLRRSAINTATGCYSSYYSNLKNWEEKSIGSKPRLQLDRNVMPTLYKDNMYIRTDDNTAKIKIFHRNDWVWLDVALNNQDVKYIQNHCKFKKEYVPTLKKQGKCWYLVFPFEDKVEFQKVDIQDQIICAVDLGLNNNATCSIMQSDGTVVGRKFVNLATEKDHLYKALNRVKKTQQNGARRCPTLWKHVNDLNTDISRKTAKEIIDFAVLYNADVIVFEHLDTQGKKNGKEKQKLALWRKQEIRKLVEHKAHILGIRISHICAWNTSRLAFDGSGRVERGTYIQNGVEKYNYSICTFPNGKQYHCDLNASYNIGARYFIREFLKSDSVMRRLPSQTKDSDYGTGTTRTLSTLIRLNADLCGNAV

SEQ ID NO: 55941 - protein, 404 aa, unknown
  TnpB Polypeptide
LKVQRCEQHNIKYGTDFYKFIDEMCFKSKNLYNYANYIIRQEFINNRNWIQYNQLFHLVKESEPYKDIGNNTGQGTLRILDKAWKSFFKSIKDWKKNPNKYLGRPKLPKYLKKDGRFVLSLDSNKVKLKDEYVYFAWKPFKPYNNMFKTNAQERILQCRFIPRCRKYVMEIVYEIEVPDVSETSDRVAAIDIGVDNFITMVNNIGENPIAVKGGVIKSINQFYNKQKANIQSELKKVNGKDWSNKLQKLTDKRYEMIKYQMHCISKYVVDWCVLYGIDTLIVGHNDEWKQNKQGMQNFTYIPYELFIQMLAYKCENNGIRFIENEEAYTSGTSFLDNEDPVKENYNKERRVHRGLFIADCGKKINADVNGAYQILKKVIPEAFSKGIEGAGSHPTIINLAMLRA

SEQ ID NO: 55942 - protein, 411 aa, unknown
  TnpB Polypeptide
MTMNNLAYQFRIYPNAEQEIVLNRTFGCPNDVYQQLKDDKEALYSYKYKTENEYKIIFPFLSEVDAKALQNVNRNLFQAFQNFFDGVKGKRPSVGYPSFKSKHGKQSYTTNNINGNTKIDFARKRIKLPKIDTWFKYRDDRTFNEKIRKVTVSKTKSSKYFVSISFERESNIEPVQEIDESKITAFDMSFASFVVSENARMDNPRFYRKNEQKLKRLHRQVSKKQKGSINRNKARVKLARFYDRIGNARNDWQHKVSRELVNANDAIILEDLNIEGMKRFNSGFAKTVTLDFSWSEFVRMLGYKMEWTGKSLVLVDRFFPSSKTCSACGFIKSDLTLDERSWKCSSCNFVHDRDVNAAKNLKREGKRILVEERNIKINKSTVGTTESHASGDRARLVTSMATVDERRIHAL

SEQ ID NO: 55943 - protein, 387 aa, unknown
  TnpB Polypeptide
METSLQFVDALNYTSRYALEHQEFTKGGLQKVIYNDLRKLFGLRSQMTINCIREVDARYKGKFKNNRNKDTQVVFKQCHYALNYPRDYRIVSNDTISINTVNGRVKAKYVCGKYQHALLDSGEWVIASSVISIRRDGKVFINIAVEKELAGTTMLNKDGIVGVDLGISFVAVTTDSTGKTRFHGGGKIKYRRWLHDKHRQEAQSKGTRAAKQFLKRQSGRERRFVTAQNHAIAKDIVTKALETFDSPIISMEDLKGVRQQSYIGKAQRTRLAKWSFYQLQQFIEYKALERGIPVVYINPAYTSQQCPKCGHVEQANRNKRLHVFKCKHCGYTSNDDRIGSMNIRDRGVDFRYIRESRGLVNDPIIAGDDVEASSDELTLNPATSHNL

SEQ ID NO: 55944 - protein, 280 aa, Bacillus sp.
MPKNLRHKKIFYIEIVPKQKSRFFEVHDTYEMHVSQMKKPSTTTSNALNCDLGVDRLVSCVTNTGYAFLIDGKKLKSINQYFNKTIRNLQLKNMENGLSKRLVTNKIAALWHKRERQINGYIAQTVGLLFKKVKEFDIDTIVVGYNAGWKQKSHMGKKNNQTFVQIPFEKLMAAIENKCIKEGIRFFKQEESYTSKASFLDKDPVPVWSKDDKTQYRFSGKRITRGLYQSKAGTCIHADINGALNTLKKSKIVELDDNLKVKTPILLEVQKRKAIASRIA

SEQ ID NO: 55945 - protein, 398 aa, unknown
  TnpB Polypeptide
MLRMHMNCGTVDNPLMPPSFTRTLRLKIRAESYPWLNAAAIEVNQVFNYANQASYDARRRTDLKSKWLSGFDLCNLTSGATEYFERIGADTIQSICVHYAQKRGAAKRLKLRWRVSRGARRSLGWIPMKAASLRRCGTALRFAGKTFRVFERERLADVKWRDGCFAQDAVGDWWLCLPVTVTAEQTAAPSEAVGIDLGLKTIATTSDGEKLEAGCWTAGNAEKLAVAQRRGHKRQAKRIHRKTANQRKDALHKFSTRIVRRYQTIVVGDVSSLKLVKTRMAKSVLDSGWGMLKGFLDYKSQSAARSFSVVNEQYTSITCSACGRLSGPRGVNELIVRSWICRDCGESHDRDVNAARNILIAGRCPPSVSGNELKPHAVASSTASRRRETGKRPREVAA

SEQ ID NO: 55946 - protein, 421 aa, unknown
  TnpB Polypeptide
MELTKKVRLYPNHTMTKALDDLCNYRRYCWNQGLELWNDLYEQRVEMIPASLRKKSQLAIKDKTITFSDDEQKLLDMFLSPSHHVVQNIMVKDKEDWQYLLSSRVLQLAVKDLAHAWSAFFNSKKPTKKASKKKKRKVGKPSFRSKKNIKQGFKTDMARIIDGKLVLDEPRAYKDTWYGIPFKGYDLSDGKIKHCVITKVNNKYYASLIGDCPKQSLPKTGKKTAIDANVNHFDYTDGSFAVCPKQLDTLYVQIKYYQRLLARKRQVNGKNATQSNQYFKVRTKLQRCYKRVTNIQNDLLHKFTTMIYHNYDTVVIEDLDVQAMQMSKKAKNLHRSLFGRFRQFMEYKADKFDKELILANQYYPSTQRCSQCGHVKTGDDKIGLDGNAKHGTRHNEYVCYECGFEADRDKNAVMNLLALAN

SEQ ID NO: 55947 - protein, 410 aa, unknown
  TnpB Polypeptide
MRLNLQVKLYPTKQMRAYLDSQCDYRRYCWNKGLQTWNDLYSQRVISLPTELKLKIKESLKDKTIKFTKEETTLRMQFPSPTERIVRNELVADKNDWEYENSSRVLQLAIRDLSNTWTQFFKKSQDNTGKPKFKNRKNPKQGFKTDTARIKNNRLQLDKPRGYKGHWESIRFKGYNIPDGPIKLCAITRVKNQYIATLTVETEVTPSKRTSKVTAVDANVDHFDYTDGVYTLKPNELNRLYAKVKHYQRVLARKRNVNGKHGMHSKSYQKTRTKLQMTYLKIKQIQNDLLHKFTTVLYTNYDTIVIEDLSVKKMQMSKKAKNLHRSLFGRFRQFMEYKAKKFGKTLIIADKYYPSTQRCSSCGYIKTGDEKITLSGNKKHGTHHNEYICYRCGYEDDRDHNAVFNLLALI

SEQ ID NO: 55948 - protein, 400 aa, unknown
  TnpB Polypeptide
MLAVLDSLCNYRRFCWNQALDVWQTLYRQRQEHLPSDLRLKVKQSVKDKSISFTNNEKTLLAQYPSPTYYTINGIMTSLKQDWQYQLSSRVSYLTVKDLAKAWKSFFDNMKDSTSHAGKPGFKSKKNSKQGFKTDRAQIKNGKLHLDKARAYKDAWYGISFNGYNLPDCKIKHCAITKINNKYYASLVIDIPVEQLPKTGKKTAIDANVNHFDYTDGSFAVCPKQLDVLYGQIKHYQRILARKRKVNGKKATQSNQYFKARTKLQRCYERVANIQNDLLHKFTTEIYHNYDAVVIEDLNVKAMQMSKKAKNLHRSLFGKFRLQMEYKSKNFDKALIVAKRYYPSTQRCSNCGHVKTGDDKITLNGNAKHGTKHNEYVCYECGFEADRDKNAVLNLLALAN

SEQ ID NO: 55949 - protein, 481 aa, unknown
  TnpB Polypeptide
  misc_feature (99)..(99): Xaa can be any naturally occurring amino acid
  misc_feature (109)..(109): Xaa can be any naturally occurring amino acid
  misc_feature (127)..(127): Xaa can be any naturally occurring amino acid
MGMIKTYRLQHSANPGKIKKVISVVKSYRDLAGSLAREQWVLFHKTGLFNEDLEVKHVQTPLSARYKQTCQYQAVGMLDSFIANRQNDFVTVARKSLLXEDVKHKLFIXNRLRLWQATAPFSQLKHXMLIDVETQKLARKIWSHVLSLHKNPSMSHINMALDSKVALVSDNRFGETKHFDHWIRFSTLEKGEPVYLPIMSNEYYDNVPGIRKNFIQVNVSDNNTVSFSFIKDAPAPTDYLPETDKLALDLGLSTLFASNHGDLWGRTFFSVLKKYDDVLTKLARNRQRQGLKPRSPKYDRLVDNIREFMKNEISRVLNRAVDIHKPAELVVERLDFRSPDLSRRMNRLLSMFGKSLVQRKLDSLKATFGITVTETNAAYSSQECSVCGYVDKNNRPTQKEFKCNCCHTGMHADVNAARNHHARSSDVEINVYQGTQTVLHILTARFRSAVERTIRHYRMASGLLSSNPYFAGPLAQPKGFL

SEQ ID NO: 55950 - protein, 393 aa, Oscillochloris sp.
VAAHVCSRSGAWLGERDLNALSSGGRFRLHSQSIQALVQKLLANVDTARTSREREQATGGKPVTRYPYHEQPYQTVTWKGQAVRVEGSRLVLPNGRKQRDLVLPLPARFHAADIKQVELLWRADHYQLALTVAELPTPDEQPKPQAAGQVAGVDLGEINLAAVCTEDGRALVVSGRLLRHVKQLRNKRHAAYTERQARCKKGSRRWKRLQRQKSRASAKLYRQQRNILHQASRKVAAFAEAHGVGELAIGDVRAISDGVSKGRHANQKIAQWPHGQFRAYVTQKAERRGMRATLHDEAYSSRTCSACGFRHPSAPRGRVFRCSGCGTTLHRDANGAANICSKRVAGCFAAVQVKNTMHRQAAAVRAPTRAPVAGPKHPDPPPGDGMAPEAHAL

SEQ ID NO: 55951 - protein, 378 aa, unknown
  TnpB Polypeptide
MISYKYKLYKNKNVRFLDAMLRESAFVWNHALALQKRYYALYKAYVSSAKMQKHFAKRIKRNLLHSQTVQEIIQRLDTAYNRFFKHIAKRPPKFKRVKDFVSFAFKQGGYALNGNELIINKIRKRFRFSYSREYKGNIKMVQIKRSHLGEYYVYIITDCQPMTYRKSHDGASVGIDFGLKTYMTLSNGERIDSPQFLKRSIKDVKKASRHLSKCQKGSNHKEQARLSYCRLQENLVNKRTDFMWKLAHNLCRKYDYIFIEDLNLNGMMKMWGRKVSDLSHGTFINILEQVANKYNVVVHKINRWYASSKLCDCGYKNDKLMLKDREWVCPQCGQIHDRDVNAAKNILRKGISELVSNGKTDKSNDLGRLRLSQESHSL

SEQ ID NO: 55952 - protein, 258 aa, unknown
  TnpB Polypeptide
VGENWIKVPKLSAIKAVIHRPVTGKVKSITLSMDCCGDFFASILFEDGLAAPEPLKEVKESLVTADDMGLDAFFTDSNKVKVYAPKPLKKALKKVRKASRTLSRRQKGSKNREKARLRLARINRRVKRVRQDFLHKVSRKQVNESQALVFETLKINNMVRNRRLARSIMDAAWGEYFRMASYKAEREGKRVVKIDQFFPSSKTCSACGHVLEELKLSTRRWTCPACGAHHDRDENAAINLKRQGILHLRANGLVVLRG

SEQ ID NO: 55953 - protein, 312 aa, Planktothrix sp.
  misc_feature (35)..(35): Xaa can be any naturally occurring amino acid
  misc_feature (277)..(277): Xaa can be any naturally occurring amino acid
MTEKAYRYRFYPTPEQEDLLRRTLGCVRLIYNKAXKRAGFPKFKSKQGKQSIQYPQNVKIVEGNVKLPGNIGIVKAKIHRPIEGKIKTVTVSQTPSGKYLASILTEIEGENPTVSEGKIYGIDLGLKHFAVVTDGENVSKYDNPKHLAKHEKNLKLKQKKLARKQKGSKSRQKYRKIVAKVYERVSNSRQDFLHKLSHKLVSDSQAVIVENLHVKGMVRNHNLAQAISDCGWGTFTNFLAYKLGRKGGKLVEIDRWFPSSKLCSNCFYQVSEMPLDXQQRLQQKPGFLQRDFCYSSKDYSRNPVSSSTIVYL

SEQ ID NO: 55954 - protein, 432 aa, unknown
  TnpB Polypeptide
MVIISQRIRIYPTDKDIEGFKKYIGYSRYLYNKAIDVQKELWLEYKEKKSRIENFDLLDKKVKKEFYKAYYPNSGNVKYIMTRMKSEWEYDYASRMVSTAAESVCQAVKNAFNPKMPNHKLPKYKTKKEQKKLSFSLDGILIKNNKVIIPKANKSILTGIKPKNPIIFSKIPLANELRYTGRIAGYPTISLGKNNKWYISITIKLDEESEKRYIAKYHKDRTNKPECGIDANIRGFRYNKAEGGYEDWLTLDNRLKKQYKLIKYYSRVLAKKRLGNKNWKSSKTYAKMRTKLNKSYTKAYNIQEDSLNQFIKYLNENYSSVTIEDLDVNGMKMNKSLCKSLHRSLFGRFKQKIEMKFNQINIDFIKADRFYPSTQRCSSCGHVKTGDEKLGLSGDKYGNAHNEYKCYSCGEILERDDNAVENLKQYKYLITQ

SEQ ID NO: 55955 - protein, 296 aa, Cuspidothrix sp.
KSIQYPQNVKVVDGNVKLPGNIGIVKAKIHRPIEGKIKTVTISKTPSGKYFASILTEVEGVSTLPNTRKNQTISQGKIYGIDLGLKHFAVVTDGEKVSKYDNPKHLAKHEKNLKRKQKKLARKQKGSKSRNRYRKVVAKVYERVSNSRQDFLHKLSYKLVSDSQAVIVENLHVKGMVRNHNLAKSISDAGWGTFTNFLAYKLERKGGKLVEIDRWFPSSQLCSNCFYQIGDMPLDVREWTCPHCGTHHDRDGNAAINIRTEGIRMLALSEVEGIKAEGSAVWCCRRGDKTKTWAKV

SEQ ID NO: 55956 - protein, 398 aa, unknown
  TnpB Polypeptide
MNVITYNVELKPTEATFSYWERLLGLYAQAYNDCATFLAENKVPLSMKVVHSKVYDWLRTKYPELPSQGVIRLYKDVIPAFKSIRSNKHRNAEVPQKHGLSLRLDKRLYTRIDTDGIVITSEVARKRVKIPFVLYPKVAELLATSEPCDPTIFIRDGRMFLSIPFQAPTIATSGDDAVGVDLGIKRLFVTSEGKAFRDKTYLRERRKVRHLKRKLQEKSKNSRSARRHLAKVSKRERNLSKDMLHRATNALLRSTSASVLVVEDLSKIKTKTAKTGEGFKRKRHNNMFSQVPVRAFRDILAYKAQMRGKRVETVSPTYTSQMDCRTGNRDGLRKGCRYVCADGLVFDADWNAAANIATRANHPSPNALPLDGTLKFLDGRELSASRTTRFIPCQAHEL

SEQ ID NO: 55957 - protein, 277 aa, unknown
  TnpB Polypeptide
LNPEQEDWWAALIDDEDESVWAGEIRLQRDSDRWVLHVAANYEVEPDHSCSCESDEVTPVGFDVGESKLLVGCAFRDNTPIDPLFVDGGRVRHLRQRQESAEDRLKQRYASNLLDNLVWSRWQDAIEDEIEKASAQAVEYASQFENPVIVLEYLDGITDEDIGKYWNRRLGKWLFSRLQSRIEEKATERGIPVEYVYPHYTSKTCHACQHLGYRPHQGTFKCTNEACWVSEYQADLNAAANIANRLNPWGESLPWKSAGDDSLRAGPVAGPRRHVTE

SEQ ID NO: 55958 - protein, 415 aa, Acidilobales sp.
MSEVTRTVVVPSVVLTMRKLEIFRELEEIYKNILVELVDFGFRNSIDSFTRLKRDKYHELRKKFPQPPSHYIHTACQDASTRIKSFNKLKKRGLAKSEKPDVKRVSIWLDDHLWKRAGHAAILIHTHRGWVPVELALHKQYWKYINAGWSLRAQPRIKIDYKHRRLLVYFVFTKTVSVNEGGAKQTISVDVNENNVAVKVLNKVYILETGIKRITVGYVRYREVAQSVKGNRHVKRATHSREHARKRDIKLKIASIVANTARALNAVVVLEKLPKHCPRNMVKDIKDPVLRHRIYQAGFRGMIKTIEEKCLEKEVPVVKVDPRNTSSACPICDSKLMRGNAPRLLRCPRCGLEAGRDVVAVLNLEKKYLALKGSVPLTPMSSDPAPEVAVLPVKEWARWKPLDATNKYKLMRMSI

SEQ ID NO: 55959 - protein, 405 aa, Planktothrix sp.
MLVFEAKLRGTNEQYAILDEMIRTARFVRNSCLRYWMDNKGVNKYDLNKYCKVLREQFEWCKKLSAQACQASAERAWSAIARFFDNCKKQVPGKKSFPKFKKHQTHGSVEYKVDGWVLSDDRLTITFRDGFKAGTFRMWGSRDLHFYQKEQIKRVRVVRRADGYYVQFSIDQERIEPRVATNKMLGIDVGLNHFYTDSEGNKVENPRFLRKSEKALKRASSRVSRRAKGDKNRLKAIKKLGRVHLKVQRRRKDFAVKTARALVQSSDLVAIEDLKVRNMVKNHHLAKSISDAAWTLFREWLEYFGKVFDVPVIAVAPHYTTQNCSNCGHEVKKALSTRTHKCSHCGYLDDRDTNAAKNILIKALIGLAQLPSGRRKVTPGDEMIRCEDGETQTGKVARRTRKSLQ

SEQ ID NO: 55960 - protein, 370 aa, unknown
  TnpB Polypeptide
MGYSYKFRLYPNTEQENLIQRTFGCARFVYNHFLSERITQYRETGKSPTRFQQDKELTQLKKSVEWLKEVDATALQSSLQSLDAAYQNFFRRVKSGEKPGFPRFKSKHDHRKSYKSKAVGTNIKVLDGAVQLPKLGKVKCRISRKVEGRILSATVSQNPSGKYFVSLCCTDVEIEPLPKTGCVIGVDMGLKAFAITSDGTEYPNPRYLAKNQKKLARLQRQLSRKSKGSNRREKARIQVARLHEHIASQRSDMMHKLSTQLIRENDVVCIEDLAPKNMVKNHRLAKSISDASWGEFRRRLEYKAAWYGKKVIAIDRFFPSSQLCSCCGYRNTGTKNLAVREWTCPKCETHHDRDINAAKNILSEGLRLLA

SEQ ID NO: 55961 - protein, 943 aa, unknown
  TnpB Polypeptide
MDSGSSCGDPNEPVEVPGLGDAGEDEEESPPPEPPTVVQPPESVPDGAQDVVTADRAVACRLDPIVRNEAALEKIRAMARWMHGVRRDAYELINHHVFRVLETGGTLPDLHEDSVVYRFLVAVTTAPSETKAYSDLDTEIATTLSQCMPGFVRHIPLTGSLPVMQLERIRYTSHLKTQVHRSFRKRVGRIVQLRLRLDDAAAAALTREERTRRKCMTKIAMISATRPRGSAGLEGEFKAVVDAVISDLRIDKIDLKIKDVAKSIPYVLKAKPTRFLPALWRINLELEAAGETRFGLVPLTTSNVPGFIALDQGVLKRMGLVDKQAQVEINRRIKIRTTAVAPYKAQLRSLRAEISKHESEWKDADHNLKMGRYPDFSLRWIVSDLISQVEFEAAAAATASNGKKRKRDASKPTRARKRQAMPKTAVPTAEQKLIDEAESERRAATLQPFRDEIAAIESDPIYLQLVDDASNEKRDTFEAVFDISKTMRHPEQWSHSFSTDGFSARLMMRRPQKSLPTYTKSTDGSKTSNKPKLTAMPKCGIFPIEEIKGLLTNEVPIESVEARRLSALPPLALNSELKVKLDRAHGVSCPYLIMGVDPGKSELVVITDPDIAFRNHNERLQFPLPSTERERKFCPETQAAVRYTSKQRKFETTPGHYILNKNGHRDPKRVALAVSAKSYRDSTKPTDPERLKAAIASLSLHCKNAATGSGFRAYTDARRTAQPLLDATYADDDFMHRRLRWKAFIDKQKSLQGLVNRLKAIERSTGKQIILAYGSWGMHAGEAGSPVNKGSPPCLGVGLARHLARSFVVSWTPEHFTSKTCFHCGCHECKNHDKIAEQHRPKRDARALKRRDERLAHLETSGGTQAAKDKTESIYQRTISAVPELRSLRFCPTCTRCLNRDRNAANNIGLQFKRLIFDLGTIKSMTKSEKELNDADAEIEGAD

SEQ ID NO: 55962 - protein, 435 aa, Lactobacillus sp.
MVKKAKQSVVIKVKLKLHRNTDADLLTTMMQQYRNACNFVSQAFFDDHFRSNTQALTKRLYHQLRHDFHLKAQLAQSVVRTVMARYKAVETQLGDHPYCYPTGEKLPNGRPELFWVHRDCHWLWQPINFSQPQTDLQRGRDWSFLSNGDLSINTLEKRIRVTPVCHGLQEYLAGEPITSTSHGFEQYLDGTWKFGVAKILHIRGKWYLHIAMTKDTDELHLSNTPKVVGIDRGLRFLVTTYDHQQQTTFVSGKTVQRKRSKFKKTREALQRKGTKSARRRLKKIENRENRWMTDVNHCLSKTLVTTYGTDTLFVLEDLTGVSFNRDDLPKALRNDNSSWAFYQLEMMLTYKARRQGSLVLKVPANFTSQRCPKCEVINKENRDQQRRQYQCADCGYRSNDDRVGAMNIQTLGQRYVAGHTKPRFKKPKSTKTTVD

SEQ ID NO: 55963 - protein, 367 aa, Moraxella sp.
MKTLKLRIKDKHANQLNKIAGSVNHVWNYVNELSYKHLQRTGKFFSAYDLNQYTKGSGELLGLHSQTIQAINETHAKSRKQFKKAKLNWRTNNPKAKRKSLGWLPFKQSAIKHIATHQTGKKGLKSTLQLSLAKGQKLIIDLWDSHNLSPYQINTLEIVQDSRNRWYACITVKDYPKQPCGTASVGIDLGLKDSATTSNGDKLITKQTQKWAKKLAIAQRANNKKRIKAIHAKIKNTRLDLIHKFTTQLVKDNALIVVGDVKSRSFTNKKTKLAKSTYDAGWFELKRQLDYKCKHAGCRFEIVNEKYTTQTCSHCGDMSSSPKGRAGLRIREWTCAKCGTWHDRDINASRNILAVGLHRLAEGIPER

SEQ ID NO: 55964 - protein, 404 aa, unknown
  TnpB Polypeptide
VAFSGKDGVEVANLEKHPKNTQPGPAVQYQTIKVPLYPTPQQEELFQKTFGCCRYIWNQMLADHERFYLETDAHFIPTPAKYKKGAPFLKEVDNQALTQEYHKLSQAFRNFFRNPKAFGYPKFKRKKDDRDTFSACNHFCGSSATIYITKDAVRMTKSGLVKAKFSRRPRSGWKLTRVTVERTKTGKYYAHLLYACPVRPPEPVPPRADHTLALQCSLSHFYVADDGSTADPPLWLRQSQEKLTALQQKLGRMQPGSNRYQKMVQKYRLLHEHVANQRRDFLHKESRRLANTWDAVCVRKDALRDLSQALGGSAVHNAGFGRFRELLRYKLARQGKRLLEVDRYAPTTKVCSACGCINDTLSPKARRWVCPVCGAEHGRGVNAAANIKARGLAQYQETPAPAVS

SEQ ID NO: 55965 - protein, 384 aa, Sulfobacillus sp.
MLKAYRYRLYPTEEQTAFLNRQFGSVRYVYNWALAVATTACQTQGNGVTRFQLDKRLTALKQELPGLGEVAAQPLQQALVHLDRAFTRFFREKKGYRVFTPSGASRVDVSPRREDPLEERRHLPSESRMDSSGVESALQGPVKTVTISGVPSGKFFISVLVEDENQVPDVVPETRERAAGGDLGLHDLLVLSTGEKYGHPQWLESELYRLKILQRRLARAVKGSKNRAKIRRQIARLHEQAANRRQDFVHRLRTDLLRRFDTVCLEDLNVAGIVRNHPLARRIAQSGWAEFRRQLEYKAQWTGKHVRVIGRFAPSSRLYVCGYYNHHLALADRTWTCPHCGQRHDLDVLAATNIKRFDFAQHETGRDMPGVTGERPPVDDRRRP

SEQ ID NO: 55966 - protein, 402 aa, Escherichia sp.
VKRLQAFKFQLRPGGQQEREMRRFAGACRFVFNRALALQNENHEAGNKYIPYGKMASWLVEWKNATETQWLKNAPSQPLQQSLKDLERAYKNFFQKRAAFPRFKKRGQNDSFRYPQGVKLDQENSRIFLPKLGWMRYRNSRQVTGVVKNVTVSQSCGKWHISIQTESEVSTPVHPSASMVGLDAGVAKLATLSDGTVFEPVNSFQKKQKTLARLQRQLSRKVKFSNNWQKQKRKIQRLHSRIANIRRDYLHKVTTTVSKNHAMIVIEDLKVSNMSKSAAGTVSQPGRHVRAKSGLNRPIPEQGWNEMRRQLEYKQLWRGGQVLAVPPAYTSQRCACCGHTAKENRLSQSKFRCQVCGYTANADVNGARNILAAGHAVLACGEMVQSGRPLKQEPTEMIQATA

SEQ ID NO: 55967 - protein, 306 aa, Spirochaetales sp.
MLIKDSLEDLQSFLNSKVKKRSTPSFYQDNVKVQFTDTHMKVEGFSVSKKKNKQKLNWIRLSEHNYIPTNCKYYNPRIKFDGINWWITVGIEYEDITKIPSNEGIGIDLGIKDLAICSDGNKYQNINKTQKVKKMEKRKRRLQRSISRRYEKNKKGESYCKTSNIIKREKELLKINHRLTNIRQNYLHQITSEIIKREPSFICIEDLNVSGMMKNRHLSKAIQQQKFYEFRRQIKYKSAWNNILVIIADRFFPSSKLCSCCGTIKKDLKLSDRIYKCECGNMIDRDYQAALNLKIYGENVLKQSVA

SEQ ID NO: 55968 - protein, 418 aa, unknown
  TnpB Polypeptide
MILPRSEVVWLGPNKMFGHLAHLSKNLWNQANYIIRQEMFATGRTVGFRELRGSLRDSLNYKGLPAQTAEYTLLMVEAAWYAYHKAHEDWKFHPEKYLAEPRFPGYKAKDGQFIVGFTNQQSRLKDGVFTVLPKLLGLKIRTRLPNGTKITGARVLPKGVGYQFEITYEKEVDVKKEKMKIELDKEDGTYKGPLNHRILGLDAGAENLLATANNIGTPPILFKGGPVKSVNQYYNKKKAKLQGQYAVQHLGTGPALQRLSLKRDRRINDYFHRVTKLIVLYCKMWEIDVLVIGRNKNWKQGINLGARNNQMFVNIPFHRLWKMLRYKAEEAGITVIEVEEDYTSICSLLDRESIEHHEVYMGKRIKRGLFRTAKGGLINADVNGAGNTIRKVFPNAMDKVIADGIEGVSISPIRAVVY

SEQ ID NO: 55969 - protein, 424 aa, Nostoc sp.
MQKAFKVTLIPNHNQEVLINKSIGCARFVYNHFLALKQEFYQAEQKTLTYNACSQKLTLLKKEIGWLKDVDKFALQNSLKNLEAAYKNFFADLKKVKGKKSVGFPKFKKKHISKQSYKTNLTNKNIQVTENRLKLPKLGWVKFYKSQDITGHVVNVTVTRTSSGKYIASILCKAEIEKYPQVTQSIGLDLGIKSYLVTSNNETVDNPKYYRTQKRKLGKAHKELSRSVKGSNNRVKAKIKLARTYQRITNLRDDFLHKLSTRLIKENSIICIEDLRVANMVKNHKLALSISDASWSKFVTMLEYKANWHDRILQKVDTFYPSSQTCKCCGFINPLVKDLKLREWSCPICGNYNLRDLNASLNILSEGLRILTAKSGGINTAGVSPAAKRLFKTAAVGAPDALNACGELVRPGVIQARIVEAGIA

SEQ ID NO: 55970 - protein, 397 aa, Streptomyces sp.
VTTHAKRAFKYRFYPTDTQAAELSRTFGCVRKVYNMALQARTEAWTRQERVNYNATSAMLTVWKRTDELAYLNDVSSVPLQQALRHLQVAFTNFFGKRAKYPRFKSRKKSRKSAEYTTSAFRFRDGRLTLAKMSEPLDIRWSRPLPKGASPSTVTISQDAAGRWFASLLCEDPSVKPLPATDAAVGIDVGLHHLLTLSTGEKVANPRHERRDRAALAKAQRRLAKKAKGNGANRAKARRKVAQIHARITDRRRDTLHKLTTRLVRENQTLVIEDLTVRTMVTNRSLARAISDAAWSDFRSMLEYKAQWYGREVIAVDRWFPSSKLCSVCGTLQDKMPLHVRTWTCTCGTTHDRDVNAATNLLAVGLTASVCGAGVRPQRSSPGGQSATKQKTSQREP

SEQ ID NO: 55971 - protein, 564 aa, Syntrophomonadaceae sp.
MPRKKRSYKNEEPEFTIQGEWFPEVYPASCTQKWSRGGEDPLSTEMRLFCSCMRWSFNRLLEGETREKLKKEGQEIFGLNSRFADDAVLKAKAVIESQRELIEQETQETEAKLNRVGKKLNYAEKSLKRAETKGDKTGIEKYRRIVRGRRLRLKSLQEKLNELRTHQQNGTIPKIIFGSRSLWKKLCKGRATKEDWHNIRKNRLYSRGDRTKHGNPNLKISFKGGEFYLSATISHLSEQNGVDTKNRPKMTRAPKVDGRLWLPGKHRLKVWDLLLSGAPYTVEIIKGGDKRYRVYITFSIPEPELVTDPARGYLGMDTNPDGAALANVNCFGQPEPWPEDFEIPYPKALYKFAGEFQVTIHPNGFLYIKMPEIAYSRGYRRTYLTGVLAKVVVDIAKFLGKPIALENLSFSKDRLDTNKKFNRMASNFPFKKMFEAVIRRAHKEGVGIKAVKPAHTSTIGYWKYMEHYGVTVHHAAAMVIARRAMGYKESITRDLKQKIRFIKEKLNQEVNSLPGEGKGMTRKVQQLFKRLDGKLPVHNGLTRYKQESFYSVWHDLKELALSFR

SEQ ID NO: 55972 - protein, 358 aa, unknown
  TnpB Polypeptide
MAKAVIRTAKNQLKLLKESARYQYNNLYKRRRSLYKKIAKFKAILSSSSATLKQRKLAKLQLFWTQMRLNKVNQLIDNGLKLHLTFGTKHLLKTNKQKFLAKRDNQVVYIGDKNETCGNQQFQISFNPKYNRFEYKLRLDNHWVSGIDKYIYGSFTLKNKEAKAHILKTLSEKKSNPLTYRIIKRDNSLYLQLMYRRETKDITRYNHGVLGVDFNKGFISVSEINIDGKLRSLTRYNYLHQGKATKTKNSMLDLVSKLVSQAVSVGKDIVIEDLVSLDSNKKQEKTTSKNYNYMINSLKFGLFKCCLLSKATKEGVSIHVVTPYNTSKIAKVNYTDSMKLNVHDAASYVIARRFYQYD

SEQ ID NO: 55973 - protein, 473 aa, unknown
  TnpB Polypeptide
MPRKRAPDAPPVVHRTARCGLRATAGQRRRLFGLLRSAGDVWCAVLELNEWRRRRQDAPLAGYRELCEQLARSGPGTFGQLDTEGARSVLRRYSDAWFAAAKRRKAGDKSARFPRRRRGLVPVRWYAGTFALDGRVLRLPVARGCVPLVVRLDRDPPYPAEQVRSVTLLAEAGRLWVDVTAEVPVAVYPDGRAPDPGRVAGVDLGVIHPYATAGPGGQLLLVSGRAIRAECRQHLRDARARHRAVARRAPKPGQRGSRRWRQFRRRQREVEARHRRRVRQAQHEAAKTVLGWAVQHRVGTLAVGDPRGVLGLDAGRRHNQRLRAWRVGHLIRVLTDKAQVAGITVALVDERGTSSTCPACARRVPKPAGRVFTCPHCGQAGHRDLVAAANIAARAGGGAIPAQTARITHRRAGAHLPGVHPARRDPRRRPHHGPPHGPLAGTGPPRPRSTPAGSRSRHSEEPGIHHRIYGRMH

SEQ ID NO: 55974 - protein, 387 aa, unknown
  TnpB Polypeptide
MLMLAHQIRLTPNRSQEEYFRKACGTSRFAWNWGLAEWKRRHRAGERVDALKLKKDFNALKPMDFPWVYEVTKYASQQPFLHLQAAFRRFFDQKARYPRFKRKGVNDSFYIGGDPIQVSGKRIRIPRLGWVRMREELRFRGRVVSGTVRPIADRWFVSVQVELDGAPVPCESQAGIGVDLGVNRLATLSNGEKFDGPKPLRQELRKLRRLSRRLSRKRKGSKNGHKARMRLARLHYRIRCIRQDALHKLTSYLTENFAVIAIEDLNVKGMLRNRCLARAIADMGFHEFRRQLDYKARMRGNHVEIVDRWFASSKACSQCGRVKENLTLSDRAFACEGCGFQCDRDLNAAMNLFGTVSSTGTQACGEEGPGSSTRWSETILCEAGTWA

SEQ ID NO: 55975 - protein, 362 aa, Bacillus sp.
VKLVSQTITVKVKLLPTKEQIRLLEQSSHEYIKVINTLVSKMAEEKKSTKQSTKDIAANIPSAVKNQAIKDAISVFSTKVKKSKYKIVPILKKPVCVWNNQNYSFDLTHISIPFMVNGKSTRLNVRALLIDKHNRNFDLLKYKLGTLRITKKSNKWIAQISVTIPTNKKTGTKILGVDLGLKVPAVAITDDDKVLFFGNGRQNKYMKRKFRSTRKKLGKNKKLNVIQKLDNKEQRWMQDGDHKVSREIINFSTANNISVIRLEQLTNIRQTARTSRKNEKNLHTWSFYRLAQFIEYKATLVGIKVEYVNPAYTSQTCPKCSEKNKAQDRKYKCRCGFEKHRDIVGAMNIRYATVIDGNSQSA

SEQ ID NO: 55976 - protein, 507 aa, Mycobacterium sp.
VARFEIPEGWTAQAYRFALDPTAAQLQALCSHAGARNFAFNTMLAAVKANLDQRTAEKTYGLAAEELTPCLGWSMRSLRDEWNQRKHVVAVGEDGMPWWEENSKEAYASGCQALANALQNWSTSRTARRKGPRVGFPRFKSKRHSVKKFTFTTGALRVEPDRRHVVLPRIGRVRTLESTRKLARRLETSTARILSATVSFTGGRWHCAFQVIVAGKTRPAHACRSRHPVVGVDVGVKDLLVIAAPDGTEVARIPAPKPLARAQSRLRAAQRQAARRCGPYDPKTQTRREPSKRWQRAIARVGRIHAWVAAIRAQEIHQATTDLAVAHQVVAVEELAVKNMARRSGRRKRGLNRALGDAALGRIATQLGYKTTWYGAQLVRAPRFFPSTQLCSRCAAKTKLRLRDRIYRCRNGCPPLCRDLNAAINLARLGDPTHGGGRRTGTGSRPAASVSAGDGRGAFHKTSPITTSGVVGDGRRRRSVNPAPRGDRCSARRSCLKCKPPKRLHFR

SEQ ID NO: 55977 - protein, 403 aa, unknown
  TnpB Polypeptide
MLVFEFKAKGKTTQYLAIDEAIKTSQFVRNKCIRYWMDNKNVGQKDLYRYNTSLRGEFPFVKDLNSHACQTAVERAYSSIARFYSNCKKAIPGKKGYPKFKKNCRSVEYKTSGWKLSETRKQITFTDKKGIGKLKLKGTWDLNFYQLGSIKRVRLVRRADGYYVQFLVNAENKTESQPTGKAIGLDVGLKEFYTDSLGHKEPNPRFYRESEKGLSVLQRRVSRKNKGSANRKKAINRLGRFHLNISRQREEHAKRVARCVIQSNDLVAYEDLRIKNLVKNHCLAKSINDAGWYQFRKWLEHFGVKFSKITIAVNPAYTSQKCSNCGTTVKKSLSTRTHVCRCGFVLDRDWNAAINILRLALSTAGHVGTWILNPNALGDQTSTLIGEILSRQAGSMNKESPHL

SEQ ID NO: 55978 - protein, 374 aa, unknown
  TnpB Polypeptide
MRLVYRFRYPRSEQLDILAYISKNLYNEANYIIRQEFFANGLWTRYYQLNLQLKKSSRNYKLLKAQTSQQIIKVLDKNWASFFKAIKDWKQHPEKYNGRPRIPNYKDKDDQFMLIFTNQNSKIKNNCELVITMSHCFKDVYPQYKEPLRISIPYYPHKDFSSYQQVRILPRRKYFEIEIVYHEQAVVNPNLDKNRYLALDLGINNLVTAIENRNIKPFIVSGRVLKSVNQFWNKKRAKLRSIKDKQHLRWTQLLDDLTIRRNSEVYDYLHKTARFIIKYCLANDIGNICVGELKHIKDGVNLGKKNNQNFVNIPLQKLKKLITYKAELVGIAVHEVNEAYTSKCNALDFEVITKHQKYLGCRTARVCLKEQTIS

SEQ ID NO: 55979 - protein, 408 aa, Salinibacter sp.
VAQKKDFKYRFYPTEEQEAVLAKVFGHTRYVWNWALELRTDAYYEEGKSLSYTDTAKYLTDLKEEKTWLREVSSVALQQKLRDLDQAFQNFFDGRCGYPNFKAKHDKQAARFASNAFTLHGKKLSVAKVPGSLNVRWSRELPDEAKPTSVTLTKDPAGRYFVSITSAVPAPEPNPTVTDEDGNRKSVGIDLGVADIVVTSDGCKSGNPKYLEDDLYRLRKAQRRLSRKEKNGPDGPSENWKKQKRRVAKIHAEIKDKQEDFLHKLSRRVVDENQVIALESLSVKGMQQNRSLARPISDTGWSTLVRMIEYKAKEAGRTVVKIDRWFPSTKRCSECGYVTESKPLSVRSWDCPRCEATHDRDINAAKNIRTAGLAGASQKANDSGGHSKTRDAFRIERSRPNAHGPVNE

SEQ ID NO: 55980 - protein, 451 aa, Salinibacter sp.
LGRAREGPEPVGSWTPGFSRPAWRCDIASRPFSWSKSGPDTRSSKPYQVIVVVDSVMKHEIKRTYRYRIYPNSEQRQELARTFGCSRWVYNWALETKTKAYYQDEESLSFTDLSGRLTDKKREEETEWLSEVSAVTLQQSLRNLNQAFTNFFEGRAEYPSFKSKKGDQTARYVGTAFDIREENGKQKLRLSKMPGLINIRWSRELPSKPSSCTVTKNAAGQYHVCFVCTEEVKLLPRVNGEGGDLEFVGVDLGIESLAVLSTGEKAGNPRWFENEYKRLRREQQKLSRKEKGSNNWERQRKRVAKVHQRIQDRRKDFIEKLTTRLVENFDVIVVEDLSVKNMQQNGNLARHIGGAGWNQIVRRLRDKCKWYGRTLVITDKWFPSSQRCSECGHVDGKKSLDVRDWTCDECGTCHDRDINAAKNLSRVGQTRIQAPGDLGKPDAFEVVGSGR

SEQ ID NO: 55981 - protein, 402 aa, Firmicutes sp.
MVQSLSCAGKIHKARCKREEQTKMILTYKYRFYPTQKQMIYINNTFAIIQKYWNKLLLEKNDYFKKYGKILNHTIQNIKINDEYIGNGNYDKLAVKSSLFQLNTLYKISIKARQTLKLKNNYSQKSYPINNYNNRILLEKDSIFIGGMGVISIANSRSIPNYAKINKAIILKTNTNKYFICISFFIEEKAKEVVNYKSAIGLDFSIHNLYVDSNGNRNTKYMSHEFDCYYDKLRKLYAVLKKKKKGSSNYIKIYQKISSVYEKIKNIKKDFLHKESSRIVSKYDIIVVESLDLKDMASSYYVNKETGNKFKLGGKVYEKSYALFISYLNYKCKLNGKKLIFVDRHFPSSQICNNCGFLNKEAKQLNKKTIICPQCGRIYDRDINAAKNIRDEGLRILNTKKN

SEQ ID NO: 55982 - protein, 402 aa, Escherichia sp.
VKRLQAFKFQLRPGGQQEREMRRFAGACRFVFNRALARQNENHEAGNKYIPYGKMASWLVEWKNATETQWLKDSPSQPLQQSLKDLERAYKNFFRKRAAFPRFKKRGQNDAFRYPQGVKLDQENSRIFLPKLGWMRYRNSRQVTGVVKNVTVSQSCGKWYISIQTESEVSTPVHPSASMVGLDAGVAKLATLSDGTVFEPVNSFQKNQKTLARLQRQLSRKVKFSNNWQKQKRKIQRLHSCIANIRRDYLHKVTTTVSKNHAMIVIEDLKVSNMSKSAAGTVSQPGRNVRAKSGLNRSILDQGWYEMRRQLEYKQLWRGGQVLAVPPAYTSQRCACCGHTAKENRLSQSKFRCQVCGYTANADVNGARNILAAGHAVLACGEMVQSGRPLKQEPTEMIQATA

SEQ ID NO: 55983 - protein, 310 aa, Escherichia sp.
VKRLQAFKFQLRPGGQQEREMRRFAGACRFVFNRALARQNENHEAGNKYIPYGKMASWLVEWKNATETQWLKDSPSQPLQQSLKDLERAYKNFFQNRAAFPRFKKRGQNDAFRYPQGVKLDQENSRIFLPKLGWMRYRNSRQVTGVVKNVTVSQSCGKWYISIQTESEVSTPVHPSASMVGLDAGVAKLATLSDGTVFEPVNSFQKNQKTLARLQRQLSRRVKFSNNWQKQKRKIQRLHSRIANIRRDYLHKVTTTVSKNHAMIVIEDLKVSNMSKSAAGTVSQPGRNVRAKQPRLGSYVGWLVQTSGYG

SEQ ID NO: 55984 - protein, 292 aa, Escherichia sp.
VKRLQAFKFQLRPGGQQEREMRRFAGACRFVFNRALARQNENHEAGNKYIPYGKMASWLVEWKNATETQWLKDSPSQPLQQSLKDLERAYKNFFQNRAAFPRFKKRGQNDAFRYPQGVKLDQENSRIFLPKLGWMRYRNSRQVTGVVKNVTVSQSCGKWYISIQTESEVSTPVHPSASMVGLDAGVAKLATLSDGTVFEPVNSFQKNQKTLARLQRQLSRRVKFSNNWQKQKRKIQRLHSRIANIRRDYLHKVTTTVSKNHAMIVIEDLKVSNMSKSAAGTVSQPGRNVRAK

SEQ ID NO: 55985 - protein, 457 aa, Moorea sp.
VYKTIPVKSNFSDEEKVFWEFQCQQANSLFNSAIYYAKQNHYKWLEEQEAYTTYWYGDELKAGWKTYKCSTKYPEIDKALKMSPHYKAMAAQSAQQTLKTVGEAISSYNKLVGLYYQGKVDRPRFPRYRKSGGFASVTFPRQALTYKEGLFYPSVSKESKPELLTQITLSPPDFIDPDWVKEVTVRPCYGQLWIDWVIDDRKQPITDNPRLDYSQAIGIDHGGDNWLTCVSTLGKSFIIDGRKLKSMNQGYCRLVAKYKSGKPEKYWDSHLDKIQLKRNNQMRDAINKAARFIINRCLNDGIGNIVIGWNEGQKSRPNMGKSSNQKFVVIPTNRLIERLKQLCPEYGIKLIIIEEYYTSKASFLDSDLLPKHGEKPQGWKPSGKRVRRGLYKTSNGNLINADCNGAANIIRKVTTQLIDLAKVGRGILTVPHRYDLFTDLSRSYRNKGGAVRIHPTA

SEQ ID NO: 55986 - protein, 475 aa, Moorea sp.
MYKTIPVKANFTDEEEVFWVFQCQQANNLINCAIYYSKQKHYTWLEQQEEGFSTYWQEDILRYGWKTYKCNVKYAELCKNLKDNPHYKAMAAQSAQQTLKTVAESINGYNQLVGHYYSGKVDRPKLPRYRKKGGLAAVTFPRQALNYKKGLFYPSVSKESKGDLVTEIILEAPDFIDPDWVKEVTIRPYLGQLWIDWVISDGKQPIENNPNLDYSQAWSFDHGGDNWLTGVSTQGKSLIIDGRKLKSLNQGYCRLVAKYKQGKPGFYWDPNLDWVQRKRNNQMRDAIRRSRRYANNKAARFIVNRCLSDSAKPTLRERIGNLIVGWNEGQKTQSNMGKRGNQNFVVIPTKRLIERLKQLCSEYGIKLTITEEAYTSKASYLDDDSLPKHGEKPKGWKPSGKRIKRGLYKSSEGHLVNADCNGAGNIARKVAVQLGIDLTKAGRGSMTVPHRYDIFKSLKKSYRTRSETARVHPAV

SEQ ID NO: 55987 - protein, 427 aa, Lentzea sp.
MKPTEYDGVVQLRYNFRVYPTPGQREALARAFGCARVVFNDALHARRAAHVNGDPYLSDGELSKQVITRAKCTPERAWLGEVSAVVLQQALADLNTAYRNFFSSVTGARKGRKVAPPRFRSRKDNRQAIRFTRNARFTVLGNGRLRLPKIGDLDVRWSRDLPSEPSSVTIVKDAAGRYFASFVVVSEQDETLPSSESEVGIDLGLTHFAVLSDGTKVTAPKFLRQAARRLARLQQALSRKAKGSNRRKKAVVKVARAHAKVADSRRDWQHKLSTAIIRDNQAVYVEDLCVAGLGRTRLAKSVHDAGWATFTDMLEYKAARHGRTFGRIDRWLPTSQTCSACGRVDGQKPLNIRSWTCLCSAAHDRDINAAINILAAGRAERLNDRGAQVSPASVPAQRCETGIHPDATRSVEGIPALQGEENVKVPR

SEQ ID NO: 55988 - protein, 415 aa, unknown
  TnpB Polypeptide
MLRAYKYRIYPTNEQKALLAKTFGCCRFVYNWALNLKITAYKERKETLGNVYLTNLMKSELKAEHEWLSEVNSQSLQSALRNLDTAYTNFFRNTKAVGFPRFKSRKNKQSFLCPQHCRVDFEKGTITIPKAKDIPAVLHRKFKGMVKTVTISMTPSGRYFASVLVDTAIREIPVTPIQGDTALGIDLGIKSLAVCSDGRTFDNPKNFQKSLDRLKLLQKRLSRKQKDSANRNKARSRVARLQEHIANSRKDNLHKITHALTHDSQVRTICMENLNVKGMQRNHHLAQAVGDASFGTFLTLLEYKCRWYGVNLIKIDRFAPSSKTCGKCGYVYKGLKLSERSWTCPECGTHHDRDFNAACNIKEFGLKTLPTERGKVKPVDCPTVDERPRVLKSRGSKKQEKRGGIGISEAAKSLV

SEQ ID NO: 55989 - protein, 250 aa, Frankia sp.
LRRLDRAFAGFFRRVKAGGTPGYSRFRGAGRFDTVEWPRDGDGCRWNSQPDHPTRVRFQGVGHVKVHQHRPVAGTVKTVSVRREGRRWYVVLSCDDVPAQPLAPTGVVVGVDVGVASLVTLSDGRQVGNLRCLAAAAGRLARAQRELARKKRGSTRRRKAVAKVAALHGRVRRQRLDLAHTVARSLVADHDLIAVEALRIVNMTRRGSPRPDPDRPGVFLANGQAAKSGLNRSVLDAGWGGVPQRAACQG

SEQ ID NO: 55990 - protein, 517 aa, Frankia sp.
VAVYRPWRGPAPGYAEQNRQLTEARADNPWLAAGNIIVQQQALRDFATAMANFFRGSHRRPTFRRRGRGEGFRIVAVKPGDVRRVNRRWARVRVPKVGWVRFRWSRAVPGARSYRVTRDRAGRWHVAFAVAPDPIPAPGMSGVVGVDRGVVVSAALSTGELLSCPGLRPGERARLLRLQRRLSKARRGSRRRGRVKVQIARLRAREVDRRKDWVEKTSTDLARRFDVIRVEDLKIRGMTRSARGTVEAPGTNVRQKAGLNRGILAHGWGLLVHRLEQKAPGRVEKIPAAYTSQRCSACGQVAPGNRESQAVFRCVACGHTANADVNAAMNIAVGYIAAGRAVTAREARRRPGPRTANLNTAHPFQRVCRSWNPPRFTRGRTSRARFAAGHDWRSERRPARAAPFDPNVRRARPCSPSVDAKIAARFTRMCGLFEVRGRLERNGSGDAERAGWRGTGRMRAADRFRPGAAADRLRSGPRRRRPAVPAARRPRGGVPDEMGARGPPWLVRRRRRPPRST

SEQ ID NO: 55991 - protein, 385 aa, Frankia sp.
MLSPVGSKVVKRAYRYRFNPTPDQAAQLARTFGCVRYVYNRALAERHRAWFQEQRRVTHAETDRMLTAWKRDPETEWLAEPSKGPLQATLRNLQTSYVNFWQKRAGYPTFKKKGRTLDSATYFRNCFSFRDGRITLAKQDGPLAIVWSRPLPEGAEPSQVTVSRNARGQYHISILVEETITTLPALPGRVGIDAGVASLVTLSTGEKVANPKHERRDRARLARAQRDLSRKVQGSANRAKARARVARVHGRIADRRRDHLHALSTRIIRENQTVVIEDLSVRNMVRNHSLARAISDASWSELRRMLEYKAGWYGRTLIAIDRFYPSSKTCSVCGSIVKELPLNVREWACRGCGTVHDRDVNAAVNILAAGLAVAACGDGVRPPRS

SEQ ID NO: 55992 - protein, 403 aa, Frankia sp.
VAVSRFRLYPDAVQEQALLVHCGHARFVWNLACEQQSWYRPWRGRAPGYAEQNRQLTEARSGNPWLAAGSVIVQQQALRDFATAMANFFRGSHRRPTFRRRGRGEGFRIVAVKPGDVRRVNRRWARVRVPKAGWVRFRWSRAVPGARSYRVTRDRAGRWHVAFAVAPHPIPAPGTGGVVGVDRGVVVSAALSTGELLSCPGLRAGERARLVRLQRRLSRARRGSQRRGRLKARIARLRAREVDRRKDWVEKTSTDLARRFDVIRVEDLKIGQMTRSARGTVEAPGSNVRQKAGLNRGILANGWGLLVARLEEKAPGRVEKVPAAYTSQRCSACGHVASGNRESQAVFWCVACGYTANADVNAAVNIAVGNIAAGRAVTARGGAALAVPVNREPQHCAPLLVGV

SEQ ID NO: 55993 - protein, 442 aa, Frankia sp.
MRTLQAYRFALDPNDAQAANLRRHAGAARFAYNWGLARVKAAFAQRDAEKSYGLDGDLLTPVPWTLPALRLAWNAAKRDVAPWWDECSKEAYSAGLDQLARALKNFTDSRKGKRNGRRVGFPRFKKRGKARDSFRYTTGAYGPATDLYVKLPRIGRVKVGEPMGALTSRLADGRARLGGATVSRTAGRWFVAFTVDTDRDVSERPTRRQWTGGTVGVDLGVKHLAVLSTGETVANPKRHAAALRKLRRASRAYARSKPGSAGRRQRAAGLATIHARVANQRRDGLHKLTTRLARSHDVIVVEDLHVAGMVRNRRLARAVSDVGMGEIRRQLDYKTRWYGSRLHVADRWYPSSKTCSGCGWRNPSLTLSDRTFRCQSCGLVADRDHNAAINLRHQVAASTSETVNARGADHKTRTSGQVAGKREPGTAKAGQTRSAGAQVPAA

SEQ ID NO: 55994 - protein, 461 aa, Frankia sp.
VKVLQAYRFALDPNQAQLADLRRHAGAARFVFNWGLARVKAALSQRDAEQSYGLTGDMLTPVPWTLPALRLAWNEAKSTVAPWWSACSKEAYSSGLDQLARGLKNFTDSRTGKRKGKRVGFPRFKKRGRARDSFRYTTGAYGPASNLQVKLPRLGRVKVHEAMGALTGRLAAGSARLLGATVSRTAGRWFVAFTVEIDREIPQNPSARQRAGGAVGVDAGVKHLAVLSTGEQVDNPRPLTRSLRRLRTASRACARSKPGSAGRRQRAAALGHLHAHIAHQRRDGLHKLTTRLTKNHDVIVVEDLHVAGMVRNRRLARAVSDTGMAEIRRQLTYKTVWYGSRLVVADRWYPSSKTCSGCGWRNPSLTPADRTFACQSCGLVIDRDLNAAINLRNLVAASTSETENARGADRRTQPAGRVAGKREPGTVGMTPCERVRPGVPHREARRHDRALPGAHMQRRWH

SEQ ID NO: 55995 - protein, 396 aa, Frankia sp.
VSRFRLYPASEQAAVMEAHCGHARFVWNLAVEQQSWWTPRRGPAPDYHEQSRQLTEARREFPWLTEGSQTVQQQALRDFAQAMDNYFRGSHRKPTFRKRGRSEGFRIVAVKSSDIRTVNRRWSEVRVPKVGWVRFRRSRTVPKAKSYRVTRDRAGRWHVAFAAIPEPIDAPGTGATVGVDRGVAVSAALSTGELLSCPRLPPTEAQRLVRLQRRLARAKRDSNRRSRLKAQIARVKAREVDRRKDWVEKTSTDLSRRFDLIRVEDLKVRNMTRSARGTGEAPGRNVRQKAGLNRAILASGWGLLVQRLEDKAPGRVEKIPAAYTSQCCSACRHVATESRESQARFACVACGYEDNADVNAARNIAEGHAVTARGGIGLPKPMNREPQLTAPPPVTA

SEQ ID NO: 55996 - protein, 403 aa, Frankia sp.
VVVSRFRLYPDAAQEEALLVHCGHARFVWNLAVEQQSWYRLWCGRAPGYVEQNRQLTEARSDNPWLAAGSVIVQQQALRDFATAMANFFRGSHRRPTFRRRGRGEGFRIVAVRPGDVRRVNRRWAWVRVPKVGWVRFRWTREVSGARSYRVTRDRAGRWHVAFAVAPNPIPAPGTEKVVGVDRGVVVSAALSTGELLSCPGLRAGEQGRLVRLQRRLSRARRGSRRRGRVKARIARLRAREVDRRKDWVEKTSTDLARRFDVIRGEDLKIRGMTRSARGTVEAPGSNVRQKAGLNRGILAHGWGLLVARLEQKAPGRVEKVPAAYTSQRCSACGHRAPGNRESQAVFRCLACGHTANADVNAAMNIAVGNIAAGRAVTARGGTALAVPANREPQHRVPLPVGV

SEQ ID NO: 55997 - protein, 487 aa, Frankia sp.
LVRRRVCRGRACRQRPAAAGRRSLGGRRRPGTGHHRDPDVDVRPALWPPRRREPGRSRRRGRHRGSHVKTTLQAYRFALDPNNVGRAGLRRHAGACRFAFNWGLARVKAALAQREAEESYGLAGDLLTAVPWTLPALRLAWNTVKNDIAPWWAECSKEAFSAGLAQLAAGLKNFSDSRKGKRKGRTAGFPRFKKRGKDRDSFRYTTGSYGPDGDRHVKLPRIGRVKVHEPMGALTALLGDGRARLLGAAVSRTAGRWFVSFTVQVEKKLRRTSRAYARSQPGSSGRRKLATDLAKQHAHTANQRRDGLHKVTTNLARTHHTVVIEDLHVAGMVRDHSLAKAVSDVGMGELRRQLEYKCGRWVRDPKTRTQVYVPGWHGAHLHVADRWYPSSKTCSGCGWRNPSLTLSDRTFSCPSCGLVIDRDENAAVNLARLVDREYIGDVKTARGADRKTNAPAPPARRRVAVKREPGTAKTGQTRGASPKGEAA

SEQ ID NO: 55998 - protein, 355 aa, Frankia sp.
LDRCRVGCHARSCASVRQGSLEALLVVCRQPAQGLLLACAACGVPARALPASHAVVTVVCRGHRRCGVRGHGPPVHRHSVRAAVAARSTPGETDLQVSAPPDRWDSQPGPPAQTRVRLQGVGHVKVNQHQPVRGTVKTVGVKREGCRWYVVLSCDDVPAQPLAPTGVVTGVDMGVASLATTSEGRHVGNPRYLAAAGRLARAQRELARRKRGSARGRRAVAKVAALHGKVRRQRLGLAHRTALDLVRDHELIVVEALRGANMAKAGLNKSILDAGWGVFLAVLRAKAESAGRTVVEVPSADTSRTCAVCGHCHADNRRTQAAFGCGGCGHTAHADVNAAVNILRVGLALQAAQAA

SEQ ID NO: 55999 - protein, 399 aa, Frankia sp.
VRRSFKFQLRPTARQAAALSVMLGDHRALYNAALQERRDAWRHPSKTMIRYGDQSAQLKEIRACDPDQGRWSFSSQQATLRRLDKAMAAFFRRVRAGAAPGYPRFRGAGRFDTVEWPKDGDGCRWDSQPDHPTRTWVRLQGIGHVRVNQHRPVAGTVKTISLRREGRRWYVLLSCDDVPAEPAPATGAVVGADLGVASLVTLSDGRHVGNPRYLAAAAGRLARAQRELARKKRGSTRRRKAVAKVAALHGAVRRQRLDLAHKAALGLVREHDLIAVEALRVTNMTRRARPKPDPDQSGAFLPNGQAAKSGLNKSILDAGWGVFLAVLRAKAESAGRVVVEVNPANTSRTCAVCGHCHADNRRTQAAFTCVACGHAAHADVNAAVNILRVGLARQADEAA

SEQ ID NO: 56000 - protein, 375 aa, Frankia sp.
VKRAYRYRFYPTVEQAEQLARTFGCVRYVYNRALAERHRVWFQEQRRVTHAETDKMLTAWKRDPETAWLAEPSKGPLQATLRHLQTAYVNFWEKRAGYPSFKKKGRTLDSATYFRNCFSFRDGQVRLAKQDLPLDIAWSRPLPEGAAPSQVTVSRNTRGQYHISILVEETISSLPPSPAQVGVDAGVTSLVALSTGEKVTNPWHERADRARLARAQRELSRKRKGSANRARSRLTVARIHGRIADRRRDHLHKLSTRIIRENQTVVIEDLAVRTMVRNHSLAQAISDASWSELRRMLEYKADWYGRTVIAVDRFYPSSRTCSACGSIVEKLPLNVREWECRCGAHHDRDVNAAKNILAAGLAVSACGDGVRPPRS

SEQ ID NO: 56001 - protein, 333 aa, unknown
  TnpB Polypeptide
VRTRPRPVTGGNADDGRDLRLFVRNDSYEIQWGDYSRVAVPVGQDLKDEYDMGYFERLRLEVRGDPKWSGKQGELEIQYDEVEDTYRAYQPVTIDESEVDSPLASEEAALDLGVNNLVACTTTTGKQYLYDGEELFEQFRSTTEEIGRLSSKLPAERDTSQRIRRLYRKRSRQRTHAQKALIRDLVERLHDEGVETVYIGDLTGVIESQLSPEINEKLENFWAFKQFIDQLRSVCEEDRVEVEATSEAWTSQTCPECGEQTETIRHRETLTCPCGFEGHADLTASETFLRWNTDQQVRPMARPVRFQWDNHEWRSTTDAPEFGVNPNEQRTNP

SEQ ID NO: 56002 - protein, 443 aa, unknown
  TnpB Polypeptide
VKIISSYKVQILPSNKLSFKGTIQIYRKAIAYLIDVYSKEWNVISAIAKKYDRFVFSENLVHTTKGSKAKYDFDTVFYKMPSYLRRAAINAALGAVSSYRSTLSLWELSHEGKKLTLQVDRNVMPVFYNGAMHTVDQETNTHYIKLYQHNDWVWVPLKLRQTDLRYLERYWSHVKASAPILERRYNRWYLRFAFEEQQTLSDTSIQDQRICAVDLGLNTDAVCSIMTADGTVLQRKFIDFPSDKDHLYHVLNRIKRRQREHGYTSTHALWLYARRLNNELAIKVAAAITDFAVLHSAGVIVFEHLDFKSRKHKGNKAQKLSLWKRNSIQDYVTHKAHRCGIRISRICAWGTSALAFDGSGSLSRDKHNHALAVFASGKQYNCDLSASYNIGARYFIRELAKPIPAKEWSDIAAKVPDVQRRTSCTLSTLRALAAVLGLSSPAA

SEQ ID NO: 56003 - protein, 723 aa, Actinomadura sp.
MVRRRPVLTRRRPLPTFRAAPSRPRQAPSRPRAAPSRHRAPSRCLGPCCVLAHAEIRGVVRVAVGEALFGEASGRAPLQDRRDRHDLRARLPQRLHRREDGAARGGGVLDGEHPASLDVRSLDAPLQAVGLARLADDERVQRTSPGRGRVQHRAGYRVGAQRETPDGVVAEVGGLVQHDPAHQRCRGPVQRDPAQVHVPGRPLARGQHEVPVHHGLVLDHLQQHFAIAHPGNPIHLAHGPRRRPCTVPGRALNGWVRAFEHEHSYAAVSGSGGLSVADATVRSVMVTQAYRFALDPTPAQRRALCSHAGAARFAWNWGLAACARRYDAEGKWWSGTELHRLWNQVKKTDPALGWWGENSKCVYQEAFRDLDRALRDFVESRNGVRRGRRLGFPRFKKRDRCREAFRFSTGAIRCTGKTVTLPRLGTISTHESTRKLARRLENGTARILSATVSRTAHRWHVCFTVQVDRHVPRRHARPGSAVGVDLGVKTLLTAVDDQGMLIEIAGSRALRAGLRKLRRLAKAHSRAQLGSANRVKAAGRLARYNARVADVRADALHKATSLLAARYETVVVEDLNVTGMLGNQRLARAVADQGFGQARRMLDYKTGWRGGRLVVADRWYPSSKTCSGCGRRKPSLTLSERTYRCGCGLVLGRDVNAARNLLVLAASGAERQNACGGDVRPGPAGQPPAKQEPGATPAVGQTGTAAAQAVAARNDAHHRSHSA

SEQ ID NO: 56004 - protein, 576 aa, Natrialbaceae sp.
MQLTEQFHIPDEHHEACDRLTTLVQQHTQRLLNAEYWTDAHLDAISDHTGQSYTYIRDGDYDAFEDVEEYVYSRFKRCVYHRVTHVLDAHTDEYQAFQFVTDTVAERKIRRIGWHRLRQRLFDENSPYINWRVLESVVEQLNTYYDQHGHFPETYTELVETPEPNGTLPYAPDKGDYHIHELTVEDGEGRFVLNAPDSLSPESYHDWTKHELRFPIHPRFNEMLEAGDVKAPTLHASEHGYTLDVPVAVPEQETDVVADRVLAVDLGVKKQATAVVLDSGDDERHEQVAPPQFIDHPAKAKLFRVKADAESINDRLAELRRQGNAHTERFEHLLSEYRQTRQKERQLREQIQHGVANELVWLAAENGCETIVFESLGQIDSPDTGGAVAWSISSWARGELLDHVRYKADLLGIEFETVNPWGTSRFCPRCGERGETVNAPNDHEENRHGGHFHCPHCSYECDRDVVGAVNVGRKHLSESKMEEANPTEYSSAGNHASFSSPSEGARSAGVQSTTESQDQASGRQTHLSRHCSSSLTAKRRETDTGGLYQNHGSHTGQQSPSGSITQYVLASTTECG

SEQ ID NO: 56005 - protein, 409 aa, unknown
  TnpB Polypeptide
MRVLATAKVKAVAPDPSHHHKLLQFLRAYRDWTQYVIDQIWCDKKIPSMKELHHRFYRVLREQGFRAHHCHKVERRAREVVKAAKKNNGSKPFLKKLTARLDYQDYKLGLKNKTLKVAVLNNEWVVLKLQWYSYLDKYFNNSWKLREILVGYRDDEVWVYFTFEKEVVFKQPKAVMGIDINFDNITYTIIDLRGNLVTMGTIPFNGLKRALAHKVIAEKIQRKYSRRWRYIKGIREAIRGHCGKARNILIDSCHYVSRRVVEIAKEYSALIVLENLNKLKSRANGSKRFNKRLTLWTYRRMQSYIHYKALIEGLEINYVNPKGTSKLSPIGDKLVFINYRWIKLPNGHIATRDIVASWNLALRSLKSLTRDVGLRGYVEALKAPNQMQTQEGMKGKPVQVPVISKIPKI

SEQ ID NO: 56006 - protein, 272 aa, Richelia sp.
MLLSIKTKLKLSKEQELIMCKHAGIARFTYNWGLATWNNLYKDGLKPNKYILKKFFNNHVKPEYSWIKEKGICQKITQYAFDNLGTAFDRFFQKKADYPRFKKKGVYDSFTIDAGGKPIPVGGKSIKLPTIGWVRTYEGLPHATCKSITISRTANSWFIAFAYEKTHEPTVKEHDLVGVDLGVKVLATLSTGVVFPNPKHYKTHLSKLKRLSKTFARKPKGSNNRYKAKIQLGKHHAKVANLRKNTLHQITTYLCKTTQNSNRRFKRIRNAS

SEQ ID NO: 56007 - protein, 397 aa, unknown
  TnpB Polypeptide
MITRTVVFPIHPTESQKEALEKTVELYTKAFKECIDIAWDMEKLSANQVHKETYKKLREKLGLKSQYVCSARNRAVETVKAMRALKKRGKKISKPVQDNPVIKPIPIRLDVRTLSFDKPREIASVATQKGRIKIPIFWHKQAMRYKEWGCKAGEVGVDKNGKWVIRLIFEKKPEKYKRTGNVIGADRGIRHAVVSSNFVGRSSTGAKTDNKFFGKGEWREYERRLLLLRSRLQSKGTTSAKGHLKRLSGRLRRFRENCDRIVAKDFFSDIFPGDTVVLENLTNIRERCGKKGQVHKKHRKKMGRWSFKRLENAINYIAQLKGVYVEYIKPHYTSQMCSNCNVIIKSNRKSQSFYSCSCGLKLNADLNASRNIANIWRMANGYMSGLTVNQPIVTNCL

SEQ ID NO: 56008 - protein, 231 aa, Lactobacillus sp.
  misc_feature (193)..(226): Xaa can be any naturally occurring amino acid
MKRMSSLAYHFGVKLRFYPSSKQKKIIKLNYDAQRFVYNSYVGRNRSNYHAKHYLAVRQYQAMPFAFSALNSYEARLAEEVVANSELLAKPKNIRDTYSFLRVKEIDSLAIANAIQNYQKAWSNYRKIGHGIPTFHKKRSDWSYQTNCQYPKQKEAFLDNGTARFIDAKHIKLPKLGIVRIAGFRRLIKERLXXXXXXXXXXXXXXXXXXXXXXXXXXXXXXXXXXTYQCN

SEQ ID NO: 56009 - protein, 604 aa, Rhodococcus sp.
MADAGFTALRQFSFTIRPYLAVDDETGARIGLDDLDVRVGWLLDLISGAEAQMLSRLWQPATFDVLAAGCDSHGRKLPMHGHVAAARLGWTPHYPDGVYVPSRVTRVVTAQAVGTLRALAHRDTAITALSARFDPATGRIAAPTTAAEYVPSGYARGVVRQLTAHARAAAGAAGAADARLRITDVQAPPQVSAMARLSAADRQLSHITVTDAVMTLTVTLSTTAAPTGRAQWRRVRLTAAIPPHLHGRPISEWHLPTLELDHRGLLLRCAATEVVPAADVTSGTTAVGVDWSPSTLGAAAVATHTPEGVVSDYRGFTYDDRGLGIKLARLQTEGQLLHRKAARLTQLAATAPPEVRAQLEAKIAVLDAHRTAVGAKRGKINRELAFDFARQVTDYATAAGAQVIAVEDLTTLETRGHGRVNNNRAAQSARRQAVAALAHTAAGVGIAVVSVPARGSSAQCPGCDEPLSRPGGYHDAWCDRCQVGGNRDHMAGVNLAKRALLGRNKVTWRRGQMPAVRVTEHAPVRRSRDKHAPTPSRPRHRRVRRSLPTVTPRLGVTPNQHVPASQASVWDTVKPAPPHGDAGSRDTRPSPTPATQVADSMRST

SEQ ID NO: 56010 - protein, 378 aa, unknown
  TnpB Polypeptide
MAPEVNVMKTFCFKLYKSEHNAKLHKQINAAGLTYNHCIALHNRYYKFFGKFLNQNKLKKHLTKLKKISKFSYLLEYGSQAVQDVAERINRAFELFFGNVKRKVHCSPPKFKKVRRYKSFTLKRAGWKLDEDNRTLKINGQSYKYFQSRRISGKVKTVTIKRDSLGDIYIYFVTDAKKIEVETRTGQSVGFDFGLKTFLTASDGKDITSPLFFASNSKAIAKASRELSRKSNGSNNRRRARLKLARLHKKAANRRRDFHFKLAQKLCLEYDTICLENLSVKAMQRLHGKKISDLAFGNFVKILKYEARKFGTLIVEVERFFASSQLCSYCGEKNLQVKDLNVREWKCPKCGAEHDRDRNAAINILREGLGQRPLQETP

SEQ ID NO: 56011 - protein, 260 aa, unknown
  TnpB Polypeptide
LDDGAPARRYPDARPVSAVLKREAGRWSAVVCHPLAVPQPEDDGTAVGIDMNAGQVAASDGRLFHAPDMRRLEARKRRYQRMVARRRRASRRRARARARLARTTRRIAMARRDWHHQVSRRIAEGAHTVAIEDLKVKAMTASARGTAKEPGSGVKQKAGLNRVVLDTGWAALRAMLDYKAARVIAVDPRHTSRTCAACGHVDAASRRSQAVFHCVACGHADNADANAARNIRRRGLAQLHGEAAGVPGRGTVNTRGRMAA

SEQ ID NO: 56012 - protein, 430 aa, unknown
  TnpB Polypeptide
VTIKAFRFQLRTRPAVEMQLRRFAGMGRQVWNRALAEQRARHARGEKYAGHAEMCKWLTNWRHDPATAWLAEGPVHPQQQVLRRLDEAYRRFFAAAKAGMAGGRGRTGLPAFKRYGDEPGIRFPDPKQFALDHENGRIRLPKLGWVRLRMSQPVEGVARNVSIAREGAKWFASLQVESRETVPALGVAPTLGIDLGLAAFAATSDGALVAPLKALAKQQVRLKRYQRSVARMKKGSANRKKAVARLGNLHRRIARQRSDWLHKLTTGLADRHAVIALEDLRIKNMSASGAGTVEAPGMNVRQKAGLNRGILDAAWGEFARQLTYKVEWRSGQVILVDPAYTSRTCRMCGHESAQNRKTQSVFSCVACGHTENADIHAAKNILAAGHAAWLSESKGSSVAACGGEVSRGRRASVGRAAPMKQEPTEAKVLV

SEQ ID NO: 56013 - protein, 464 aa, unknown
  TnpB Polypeptide
MPKARKRKNTQFNNKMSKCVFLYGEPTNDKAAKIRKMQAEFVKLINNYIKALNDNSEVTLQLVKSDNKDSQMRAFEKSIRPEKVNAAYCQNAFDMAVFHLANRLDNIRLDMCRECKSIFTTSKVLFAMSIDGRSKAEMITALKDISKSVKSKKDISFYDDCAEELESIGDSEFEFMQNEFRVIYDMVSCEYKIPYVSRSQIPLDSRIMTIKPSENIEAPYVITISNMLDVGGDRIVVPLNTAKHSIHKINTRKMAGMVSISMDIQKCLKVDWSYKSCVSQPKTSKIIGVDTGISDAFHTSEDKAIGSMSPVIDFYKNDVEKSFASLSDIRNKKRKISHYLRRHENLPEDVRRSLIQKMDRLDQMIQKAKAPHRKNRRYYGMLEHEIKSSIDSYIKSIDHETLTVLEKLDIKEFNNSRKANGKRSMFARGQLQKKLMETLNWKGYDFKEIEPDYACIYIGYISQR

SEQ ID NO: 56014 - protein, 233 aa, unknown
  TnpB Polypeptide
VKCCVSKKVKGRILSATVSQNPSGKYFVALCCTDVEIDPLPSTGAVVGLDMGLKSFAITSDGATYPNHKFLTKNQKKLARFQRQLSRKSKGSKRREKSRVKVAKLQEHIVNQRQDTLHKLSTRLIRDYDLICIEDLATKNMVKNHKLARSISDASWSEFRRQLEYKAAWYWKQVVTVDRFFPSSQLCSACGAQWSGTKDLSVREWTCPVCGTVHDRDINAAKNILDEGLRLLA

SEQ ID NO: 56015 - protein, 483 aa, Acidimicrobiaceae sp.
MDQPYRMRAVVVPLDPTPAQVQLLRSYCGAARFAYNWTVAIAKENWDKRKEERRAGIDEAQLSKSLDWSAWSMTPLWNSVKDEVAPWHHDVTKHAFRSGVTDAATALKNFHESNKGVRKGQSVGFPKFKNRRSKQSFTLIEFKQPGYWFSEDSRHVRLILPLSATDPRIARRREQLRWIHSTESLRRLKKKITSGEWTVQAVTISFTGGHWQASFLVRQYVVPASSAIRMRGPIVGVDLGVKHLATMTVPVKDLSDEHAHIENPRHLDAELDRLAKLDRRLSRCQKGSKNHAKIRKRRQRLHGRISRTRDLHLHRLTTTLAGSFETVVIEDLNLVGMVKKSKKNTVTALRRSILDAGFYELRRQLTYKTEDRGHRVVVVNRFYPSSKLCSHCGETKAKLAISVRVFECNKCGITLDRDVNAARNIRDEGIRLLANEASNVAGHQPETLNAVLRDRETEPPRRGRGDRYQSRTTQPKRELSPLA

SEQ ID NO: 56016 - protein, 446 aa, unknown
  TnpB Polypeptide
MAKKAKKDKVLIGVQQNLLSLSKEAGAIVTYLCEQSNSLYNCGLYWARQIFFKTGIIISKFDPVYECGKNIHAQALPSTPAQQTLLSVSEAFKSFKELKNKFVQGELHFRPRPPKYRTSGGLFKVSYPNTGAQRPKLSEDGKTLTFSLGNQVNRWFKVKSFDLPMPANLDYFKVKEFTILPKNGTFYLESSYEVEREVHALNIDEALGIDLGTASNLMACVDTLGNSFLVDSKQAKAMNQLYNKRIAQRKKGKSQDYWDVVCDAITRKRNNQMRDMVNKAAKLVVVHCIQHSLGTLVIGWNVGIKDECNMGKRENQKFVQMPLAKLKSRISQLCEKHGIRFVETEEANTSAASYLDGDSLPEYGQKPKAWKASGKRSPRGLYTTANNSIVNADLNGAANILRKVAGNLGIDLGRLGRRSLATVGRIKLWQTSKFNTCPKESQRLQP

SEQ ID NO: 56017 - protein, 450 aa, unknown
  TnpB Polypeptide
LLIRRQTFRLYPNKAQTAKLFEARRLHAYLYNACIENRRTEYERFGRSVSYFDQQNCLPAFKDVWIEYKELHSQALQATVKRVDLAYNSFFEGLRKRPKFKSIRDYSGWTYPAPSGWKVKTTGKHGTVTLNDLDITLRMRGKAKEWGNPKNLTIVYKPHLDQWVASIPVEIPTPLVKFGSQSSLEYESIAAIELGTETALTLYNGNDFEEVTNPHFVRKTERSIKQASKKLRRKRAPNKKRKVKASSRWKKARKQVSRLQRQVSAQRKDWQHKVTTDIARRHDIVVTEKLETKKMTRKGKKRKKQKAELNKSILDVGFATLNKMITYKIEGKGGLVFFLPTSELKPSQRCPKCGTVHEEWAGLTNRYHICGCGVEMPKDKTSTVVMYQALLDKQPGFGMSLDNRGCLSSTSKTGKRKHTGSMKQLGQKKRTKPSLVDGGDSEPPSVYTAG

SEQ ID NO: 56018 - protein, 572 aa, unknown
  TnpB Polypeptide
MRTVEFKLDLNQSQQAKVDDWLNVQRWVWNRGLHLLEEFDNFTSWDKVSKTWTASCPLPWSYYKDSSGQLVPFTRLAQTKPYRMSCPIHQAYRQPELESPTYFGLLYYFAQKNHKDKPWFCELPSKFVGGTLKALADAWSEYKAGKRKRPRYKRHKDKLKTLINNNSKSTNIDGKQITLPKLGKVTVKTLTKRWDASVPIATMKIVKEPSGYYLQLTGKLPTKTVKPSNKAVGLSLGYRELFTTDGGKAVSPPANYRKMEKRLARLQRKLSRQQKLCPITTYNADLGEHFLSCPINPDKGANKAKTQQKISRQHEKIRRTRKAFNHKISTKLVREYGGIATAKSDVQKITRRPKPIVDKEGTGYEQNGAFIKSQFNKLILASGLGQLTTLIEQKATVNGREYIKFAPSSIPDEPRQRAEHYSKRLRLPRAVHLASFQQGRYRAWPWELTPGESPVTPNQEATKVAALGDAKTTSKSSSETTNPRSGVDVPPATSTLNASNNQQPQPKARAGGKSTRAASKKLPETESGKATSSSKDADKQQKKAPRHRPAPPISENQSGKRKRRPAGTNGSS

SEQ ID NO: 56019 - protein, 389 aa, unknown
  TnpB Polypeptide
MVLTYRYRIKDATTGRHLQRQAREVNRVWNYCSEIHNAARRHNRRWPSGFDLITLTSGSSKLLGLHSDTAQAVCKQFAISRDACGKRPRWRGRKSLGWIPFQAPRAIRWQGDRVIFLGRQYRLWLSRPIEGKILCGGFGEDARGRWYLNLQVKVPEDREHGAGEIGIDLGLKSLVTLSTGQKIEAPRIYRKHEQALGIAQRAGRKPRVRAIHAKIANCRKHFLHELSTRLVRENRRICVGNVNSCSLARTSLAKSVLDVGWSQLRSQLRNKAMRHGGEYIEVDERFSTQVCSACGVRGGPQGREGLVVREWSCGGCGARHDRDINSAINLLVSGRNVGLRQTEIPSLEGGEDVNHVQFPECGEIETESRASAGTTPRDARGRSTRCRTR

SEQ ID NO: 56020 - protein, 427 aa, unknown
  TnpB Polypeptide
MLVTERIKVKWSDELHDLCHESKDLYNRANYLIRQNYFYAGDELDYQFVNYDLLYFQIKNDPSYKVLPAQLAQQTLRVLEKNWSSFFEAMKAWKANPSKFLGMPRPPKYKNRDGENVATFTNQQCWIEGGVLRFPPRMANKPGDVKTRLPDDVVISEVRLIPRGLSYIIEIVYERPEDDLQLNKKNLLSIDLGLNNIVTCADNIGDKPFVIWGGAVKSINQYYNKKKTWLQSIKDLQGYDFETKRMQRLTEKRNWKIYDYFHKVSRIIVDHCIQHDIGTIAIGYNEEWKQHSNIGKRNNQNFVSIPFLDLVKKIEYKAKLVGIDVVLTEESYTSKASFLDLDEFAWEYCTGRRLRTVSRRGVKCRCNLYKRSNGQKIHADVNAAYNIGRKAVPEAYTGGIEGLALVPRSVVVDATVVRNQTRLAILA

SEQ ID NO: 56021 - protein, 394 aa, unknown
  TnpB Polypeptide
MRQAFVYRLYPSRTQERTMEAILTTTRLFYNSLLAERTQAWEERGERVTKVQQLRRVKERKATNPYAASVHSHILQVVADDLDKAFLAFFRRVRTGDKPGYPRFRGANRWTSFGLKELGNGFKIDGRRLKVSGVGRIPVRWHRPIEGDIKTVRISKKAGKWYAAFSCVVLDKEPLRATGESVGLDVGLAHLLTTSDGGSIPNPRWYRTEQAKLRVIQRRIARRTKGGSNRKRAVAQVQRQHERIGNRRKDFLNKLVADLVRSHDLIAIEDLRITNMTRNHHLSKSILDAGWGYLADHLTRKAACAGREVCLVDPSYTTKTCSGCGERFTQEITLSVRWVTCQACGLSLDRDHNAAINILGRACSMLDRQPAGTPPLGANVTGLPVCVAQEAAPL

SEQ ID NO: 56022 - protein, 381 aa, unknown
  TnpB Polypeptide
MNVVRAYKFRLYPNKIQEKEMHAHLFLSKNLWNDGLEFAKQIYLYYQRFPSRQAYQEISKNSGLYSQVAQNVFIRLDLAIKAKIRCKKNGLKGGFPRFKSIDRMKSLRYPQNGFSLSERKLKVTPFGEINIRKHRELNGKIKTLILKRESSGRWFAILTAVARSATTLKITNGKQIGLDLGLMTFATLSNGEQIKKPKNMQRYEEHLAFKQREISNKKLRSKNRRKAKIRVARIYSKIADARRDWLHKTANNLLSRYSFIALEDLKVQEIAEEHGKGVGDAGWSIFTNILSYKAESAGCDVMFVNPMNTSKECSDCGTLVNKNLWDRQHNCPSCGLWIDRDFNAAINILKRATAGIAGCNACEDEAIVSSMKQEAHALKCG

SEQ ID NO: 56023 - protein, 459 aa, Thermocrinis sp.
MSKSLRCITISLNDLPEEYRIVLGYLTYHSGKLYNQALYFLKNKLAKVNMFDLYSKLNSSIHLKALQSRTAQIVLDELVRAYKNWFEFLKNPQKFKGKKIKTPKFRPKRKPHRTLTYDRTGFKVIGTKVRLSLSKELRRWLREKHNIHVKYLWIETGLELREELVKNIQIVPKGTGYELHIIYEHKIENREYSGNKVMVIDPNSGNFMVIAIEGIKTPYIIDGKGLKSLLRKYLKKIAKLQSLKDNLKNKGLPYHRVEERISKLWVKIKRLLRYYAHTVSNLILELAIKHGVKEIYIGDAVKNKNKESKLNSVADQIWSLLPHGKVKKYLEYKALEYGISVDYIDESYTSGVDSTLFCGVSKENYTPEGRIKRGLFRTSLGLLNADVNAVRNYLKKLGKFDLETALGRPVRLRVFYKLKGSSSAIPLYCGMGRSRGGVNPPVVVRNALSVQTYHEAPHL

SEQ ID NO: 56024 - protein, 386 aa, Streptomyces sp.
MKIVVQVKLTPDAVQAPAIESTLHAANEAANRVSEVSFEHFGLKGSVRELRKLCYGELKARGFGAQAAQHIIKRVADAYTTLRAGIKAGNLGPEGSKRRRKVESKPITFRSDAAHTYDDRCLSWNYDAQTVSIWTLSGRVKNVRFACSPAALKQLTEHRKGESDLIGRDGKLFLVATIDIAEPEVFEPKGWIGVDRGINNLATTSDGDNHSGRRLGRYRRWQARKKAEIQAKRTRSAAQLLKKRARREARHATHVNHKVSKTVVAVAQRTERGLSLEQLQGIRERVTVPRDQRARQSSWPFHQLGSFIEYKARRAGVPFIEVDPAYTSQRCPRCGHTERGNRRTRDHFSCRRCGLAGPADHVAGVNIAQRGATAWVFVNMPQPGPA

SEQ ID NO: 56025 - protein, 385 aa, unknown
  TnpB Polypeptide
MAVAVTPCIRTLRLKVKTEAHPWLNAAAVEINQVWNWANATSYKAARPFAGPARWLTGFDLDKLAAGASEYFEHIGSATIQRVNAEFATRRRQFNKAKFKWRVSRGAKRSLGWIPFKAVQLKRRGKSLRFAGKAFRVFEQELLEGARWKCGCFAQDAVGDWWLCLPVERALAGSVAEQEAVGLDLGLKDTVVTSDGEKLEAGHFYRDIEFKIAQAQRRGHKRQAKRLHRTAARRRKDALHKCSRKIVDRYQVIFVGDVSSTQLAMTRMAKSVLDAGWGMFKTQLQYKGQQAGRSVLIVSERNTTRTCSSCGSLTGPAGLDRCVVRTWMCSGCGDTHDRDVNAAKNILSAGRCPPSVSGNESPSSAVPSRQANRRESGKSALKMAA

SEQ ID NO: 56026 - protein, 405 aa, Halomicrobium sp.
MEIQRTAVVKLSVPDQRRDDLKRTMNTFRDAAQRFADRGWERDDNGYVITSRSRLQPLVYDDIRDDTGLHSDLTVAAVNHAADALTGCVDKMKAGERTSKPVFTSNTTVYNTSAISYFDGYCSLAAYGSGRVHAAYVYPDDSLQAEYMESSEWTKQGAKLRYDHQTDTYYLHVSVKQEREDSLEEAESRTVLGVDRNVDGYLAVTSTGAFIGNADLLNHKRREYERRRARLQQQGTRSAHLTIQSIGDTFANWSEDFLHQTSKRLVKEAMSRGCSVIVFEDLEQIRERISNASKFQQWAFRELKRQTTYKARAEGIAVESVHPAYTSQRCSHADCGFTHEDNRDSDQFTCQKCGKELHADYNAARNVAHRFIQNRLKSGSGGATHHLALKSGTMNGNGDYSPSTV

SEQ ID NO: 56027 - protein, 348 aa, Pseudoduganella sp.
MIIVCRYRVKSLNGLLNQWGRAVNFVWNYCNDRQKDALRFGRPWLTGFDLNKLTTGSSKELGLHSGAINATCEQFAKSRSQHRRPFLRYRGRKSLGWVPLKGRDLHREGNAFRFAGNTFRVFYSRPLPEGKIKDGTCFSCDSRGNWFLNIVMEVADPPLRPIDQGVGIDLGLKDLATLSNGKKVPALGLYREAEAALAVAQRAHKRRRIKAIHARTARRRMDFLHNRAVEIAKAFDHIAVGNINASGLAQTSLAKSVLDAGWSSFRKMLAYKAVRHGARYIEVDERFTTQTCSNCGALPDSRPRGIAGLGIREWMCSDCGAAHDRDFNAAKNILRRGRATLVAGISVL

SEQ ID NO: 56028 - protein, 486 aa, Escherichia sp.
  misc_feature (375)..(459): Xaa can be any naturally occurring amino acid
VKRLQAFKFQLRPGGQQECEMRRFAGACRFVFNRALARQNENHEAGNKYIPYGKMASWLVEWKNATETQWLKDSPSQPLQQSLKDLERAYKNFFRKRAAFPRFKKRGQNDAFRYPQGVKLDQENSRIFLPKLGWMRYRNSRQVTGVVKNVTVSQSCGKWYISIQTESEVSTPVHPSASMVGLDAGVAKLAMLSDGTVFEPVNSFQKNQKKLARLQRQLSRKVKFSNNWQKQKRKIQRLHSCIANIRRDYLHKVTTAVSKNHAMIVIEDLKVSNMSKSAAGTVSQPGRNVRAKSGLNRSILDQGWYEMRRQLAYKQLWRGGQVLAVPPAYTSQRCAYCGHTAKENRLSQSKFRCQVCGYTANADVNGARNILAAGXXXXXXXXXXXXXXXXXXXXXXXXXXXXXXXXXXXXXXXXXXXXXXXXXXXXXXXXXXXXXXXXXXXXXXXXXXXXXXXXXXXXXSGYGQPAGAQCPGKIRFKPFDTGSGLV

SEQ ID NO: 56029 - protein, 215 aa, unknown
  TnpB Polypeptide
LETNDKAVGLDMGITYLVADSDGGFVRNPKSFRASAAKLAHAQQKLAKCTKGSHRRRKAKRRVTRVHERITNQRKDKLHKVSRFYVNNYGTIAIEDLKPANMVKNHSLALSISDASWGLLRFFLAYKAESAGREFAAVPPHYTSQKCSRCEELVQKSLSVRTHVCPHCGYVADRDANAAQNILRIGLDETFAEGRRGAGYASESSVPLKREAIGL

SEQ ID NO: 56030 - protein, 429 aa, unknown
  TnpB Polypeptide
MEYITEYKGLFNSIQRKAFHIIKNSYINVGEFTLKDKGILTKNIATTYNLTSRTAISIVYNMTGRFNAIREVKEYEKKQLETKIKSLEKKIAKTEKARQKLNLRMASNVATKKEQEKYEKIKISLYWSRNKLNKLKRKIKKVEKEIKTQRYKVCFGTKKLLQTNYNKFVEQRDSELFYMGNVTDATCNNNFQMRYNKKDNQFYFKIRKEINTKPDKYVKGKVYFSKTQTKKIKELLRSKESPLTYRIKVKDGKYYLQIIFQHKHNKTTYDTRNSNGVIGVDFNKGFVAVSETDRYGNLINTFQIKYRFRSGTKTENDFQCIAKILSEYCLEDGKDLVIENLKFDKKKASILKGEFKIYNKMLSSLAYAKFSKIIESKCAKKRIFLKKVNPAWTSYIAKEKYCKIKKLNIHSGASYVIARRGQGLKDKVK

SEQ ID NO: 56031 - protein, 375 aa, unknown
  TnpB Polypeptide
MTIKMIRTLKIKLAKSNDLIQTVRIFNLVCQDVLDYGFKEKIFNKSKLDKGTYHQIREKYPTLPSGLVQTARDQASDILKRDKFKHHPIKKSLSSIRYDIRTAKIFLESGYCKLTTIFGRMQYDFNLAEYYQKYNTWQIKSTQLIINHNCCYIHVQVEKETPKFVISNDNRLGIDLGVNNIAVCSDNTFYNSKELKNIKGKYQHLKGELQSKGTRSAKRKLKKISERERRFVKDLNHCLAKELVSKKYDVLVFENLNSIKKEKKGKKKGKRFNKKLGRWSFAELQQFTAYKAEERNKKVIYVNPRYTSQTCSRCGYKDKNNRKGHIFKCKQCKFQLNADLNASRNIATFSRSVSSRLFVNPPIVASKDSYKPLPL

SEQ ID NO: 56032 - protein, 362 aa, unknown
  TnpB Polypeptide
LKQQYHDESNTSVTEHPEPPGFRNNEDDGYQLKSFIRNSSYTGEWDNRSRLEILVGSELKDRYDHTERPRLEIADNPNWPDYEKQGRLELWYDETDSTFRASQPVTVSDDARETPPAEQKATLDIGAHNLVACITTAGEQYLYECRELFERFRETAREIARLQSKLEDGRYSSKRIRQLYRKRTRRRDHAQEALCRDLLERLYENGVDTMYIGGLTDVLETHWSVETNAKTHNFWSFKKFTERLVCTAEEYGISVEIRSEVLTSQECPQCGPTDRTTRHQETLTCPCGFERHADVTASETFLERHTGKAVKPMARPVRFNWDDHTRSESPRSPVRESPNEQRTDPSTVDRDENVASGDSQPV

SEQ ID NO: 56033 - protein, 435 aa, unknown
  TnpB Polypeptide
MKINKAYKFRLEPNVEQEVILNNLVGSARFVWNQILAISFEMFAQNEHINAVNLVKKITALKKNPQFSFLDGNSNAVSLQQKVRDLASAWGKFFNPKEHTRLKEKKRKPKKPKFFKLADGTEVQLRPLMPRFKKKSDGYDSIRLVQFDKYCWVKGNKLKLPNGVGVIKFRKSQEILGTIKNVTISKVSGRWYVSFCTETELTEMPIHPSKSAIGVDLGVKKLITTSNGQVFDPINSFKTNQIKLARLQRKQRKKVKFSQNWKKLNFKINKLHHHIANIRHDYLQKITTTLSKNHAMIAVEDLKVANMSKSASGTVENQGKNVKAKSGLNKSILDQGWGMLIGMLEYKQEWRGGLLVKVDPKYTSQTCCECGHVAKENRQTQAKFECVGCGYVANADLNASRNILSAGHAVLSVEGGCGKGRPKKQKASEIREEVA

SEQ ID NO: 56034 - protein, 432 aa, Prevotella sp.
VSVLANIIFFHATNIIKGLVAYKVSCNFVNDMRKINRTYKFRLYPNKEQAVLLAKHFGCTRFVYNYFLNQRKEQYRLTGKSDNYYAQAKTLTAMKKQEATAWLKEVNSQTLQFAIRSLEVAYTNFFQKRAKFPTFKSKHSKNSFTVPQFASIVGGRLFIPKFKEGIKCRLHREIKGEIGKVAISRTSSGKYFVSVFTEEAYTTSLEKTGKAVGIDMGLKDLLITSEGETFKNNRYTRKYERKLARAQQHLSRKKKGSRGFENQRLKVAIIHEKIVNCRADYLHKCSIALVRRYDTICIEDLNVKGMERNHHLAKYITDASWGNFVAMLTYKAEWNGKHLVKINRFFPSSQTCNVCGYVNKETKDLSVREWECPVCHTHHNRDVNAAINILRIGLNQTSAGTVDYTGGEKVSTNLLEGRFSAKPEAHESLAHG

SEQ ID NO: 56035 - protein, 365 aa, unknown
  TnpB Polypeptide
LDSATIPEITHFGQINQVRIIPSTKNDKNKSLSNLFEEYCSGQIAQPLFTVEIVYTAPLTKQRISNQSLNLRYETKITQKVRKKDNKVYEIKTQELVEVHYKEEFLKSVAGIDQNLDQLAVGIVTPEETLTFNYDIKYLKSINHHWNKQKARLQEEISKQEKLLDDLKDSLELKLINGDSSKSKLVESINNKKILIKRLKNKIKRITTKRNRKIDNYVHQLSRKLINHLSQLGVKNIIYGKNVNFKQEINLGKVTNQNFVNIPFNLIIERLRYKAALAGINFMTVEESYTSKTSFLDREKLHSYKSDKAPKKYEFLGNRFTRSLFKSKDGYIIHADTNASFNIIRKVTGDSIYNFVEMASIKGRS

SEQ ID NO: 56036 - protein, 463 aa, Vibrio sp.
MGYSLLTGIKLRANPTSNQKLVLSQWMGCARSIWNAKVDEERYYRTFARKYYPIGTYAPLDQKTSQFKSKELSPWLYQCPSQILRNSAVNWYQTYQKFMKGACGRPKRKPKTDKGSIYLTREVFHFDRCEDGNLRLFIGTKTNNIGYLSFKAHRKFEIPNSLYVRKERGQYTVSFCYENGKNEVELSSNAEHLAFLQGSTKEYLEESVIGVDRGVAIPAHAGSMMFDFCDNQKKKMTKVDRYIKRLQRKLARQTKGSNRRNKTKHRIATHHAKKANIRNDFAHKTSRSLVDSQAKVIVFEALSTSRMTRKPKAKQNEQGRYVSNKAKQKAGLNKSILNVGWHIIETYTKYKAYQAGKAVFKIPAPYTSQECAQCDHTHPDNRKSQELFVCGNCGNTDNADNNASLVIKKRAINLILDTGTVLSDDGVLRTQSDSGRGGNRKTSRAKSSTSGVQRSVKKEKLAA

SEQ ID NO: 56037 - protein, 402 aa, Escherichia sp.
  misc_feature (312)..(312): Xaa can be any naturally occurring amino acid
VERLQAFKFQLRPGGQQEREMRRFAGACRFVFNRALARQNENHEAGNKYIPYGKMASWLVEWKNATETQWLKDSPSQPLQQSLKDLERAYKNFFQNRAAFPRFKKRGQNDAFRYPQGVKLDQENSRIFLPKLGWMRYRNSRQVTGVVKNVTVSQSCGKWYISIQTESEVSTPVHPSASMVGLDAGVAKLATLSDGTVFEPVNSFQKNQKTLARLQRQLSRRVKFSNNWQKQKRKIQRLHSRIANIRRDYLHKVTTTVSKNHAMIVIEDLKVSNMSKSAAGTVSQPGRNVRAKSGLNRSILDQGWYEMRRQLXYKQLWRGGQVLAVPPAYTSQRCACCGHTAKENRLSQSKFRCQVCGYTANADVNGARNILAAGHAVLACGEMVQSGRSLKQEPTEMIQATA

SEQ ID NO: 56038 - protein, 279 aa, Okeania sp.
LLDPKHIEFTDKKGIGKLKLVGTWDLAFYRVEQIKRVRLVRRADGYYCQFCISVDIKVDVEPTKRNVGLDVGLKEFYTDSDGNTEPNPRFYKKSEKPMKFYRRRVSRKKKGSANRKEAINKLGRVHLKISRQREEHAKRVARCVVQSNDVVAYENLRIKNLVKNHCLAKSINDAGWYQFRKWIEYFGTKFGRVTVAVNPAYRSQNCSSCGTTVKKSLSTRTHVCPCGCVLDRDHNAAINILNSALSTMGHIGTWLNESNASGDSASTLVGENLSKQVGS

SEQ ID NO: 56039 - protein, 376 aa, unknown
  TnpB Polypeptide
MTPKEKADRQKYVPVHITLLLDDATRAILQTTFDEFVKACNKLSVKLHAEAVKHNDFSICTKNDDHTKNLAWGAIQPALHDVYKYSVAQIVVNAYKEANEKNQLDPLNPIRFANNPKQGETDVYTIPLRVTNKATKKDKNNAKNNVVADFESKTCKLDLIDGMHYIPFLYPDWIPKPPDSWKVLQGMIKKAEEDWEVIISYGNPLFPYDYDKVVKYVGVDRGEVNVATTFSDANGSKRYSSEEYCKKVKSAVTKLERHRARLEKDYRVAWDMVTREPEGALFVLEDLQFKERIPGWSYRNFADWLSFFAALHHQYIDYCDPHNTSRICPHCGAIMKQRNLIDRSFVCPNPECGYGTDEYVNDDENAAENICRRGEA

SEQ ID NO: 56040 - protein, 391 aa, Aneurinibacillus sp.
MKPKVKRITHLVKLKNPTKRKQTEWREAQRAYADCINACIPRLIAGETLSSANVEANLKSAIRNEAIQRAKKAVSDYQSGSAKKVPVFKSRLPININNQNWDTKQKNGRWYIGFVVSSKKKYIPVEENDFVKHYFSFFEPNIVKQTKQVKNRRTGEWTEKHVRSDINRAFRCTIQLLRKGESWYLAIPVEVACPLSTLSILPRTSIGIDLGLRHLAVVSEPVSGKRQFFSGKEVGYIRRHYRSLRRSLGKKKALRAIMRLGHKESRWMKDYNRKLARQIVDFALQFDRPVIKMENLGNIRETCHTTNRADRILHSWSFYQLQQCIVEQAEKYHVQVLFVDPRYTSQMCHVCKHIDKKNRHRDRFHCQKCGHNNHADQNAARNIALCTSLAV

SEQ ID NO: 56041 - protein, 370 aa, unknown
  TnpB Polypeptide
MKMTVKCRLKPSEEQAGILNKTLVECLDASNYISGIAWKQHCFNRVALHHMTYHKTREKFGLTSQICCALKDNVVFSYKRDKKKQHIFKQAVLPLNFIRTISLKGLELASISTLSGRQKIPLILGDYQRQALSRAVKFCDSELFKRGRKFYLAITIEISEEPPKNPDKVLGVDLGIKNIAVCSEGSKFTGEQVQSVRNRHLRLRSALQSKGTKSARHHLKKMSGRERLFQASENHRISKQIIELASRNNSAIALEDLRYIRERARLRKEQRRDLHRWAFAQLRSFIAYKAQRTGIALYLVNPRDTSKTCSSCGQLGSRQGSQFSCPYCGYQADADFNASINIAQRAVVNHPIVSLTPLVSRCKPQTLVVG

SEQ ID NO: 56042 - protein, 315 aa, Exiguobacterium sp.
MRKTYHDLLEGGGTDMLKGYKYRLHPTPAQAEFLIKTIGCARFIYNKLLEDRIAIREEAKAGIVTRRKPATPASYKPLFPFLAESDSLALANAKLNLDTAFAKFFAGTGKFFISLLVKQDDEPWIPAENKVGIDLGLEHFAVMTNDAMVSEKIENPRFLRKSEEKVKKAQRALSRKKIGSKNREKAKLLLAKKHEKIANQRKDFLHKLSRRIVDENQVIVVETLKSKDMMKNHKVAKSIGDVSWYEFVRQLEYKCKFYGRTLIKADPWYASTQICSTCGVKGEKKKLDVREWTCACGAQHDRDINASINLLMLAD

SEQ ID NO: 56043 - protein, 312 aa, Ruminococcus sp.
MNKAYKFRMYPTPQQLTKIEKTFDGVRFIFNKMLTDKLAYYNETGKQLKNTPAQYKTAFPWLREVDSLALANAQLNLQDAYTRFFRNPAAGFPKFKSKKHSRKAYTTNCVNGNIVIRDGAVKLPKIGLVKIKLHRTIPDSYKLKSVTVKCDFKGRYYACVLFEYEPQKTDVLPQSCIGVEYSDKGLFTDSNGREIGYPPYIQKTLKKLRREKKRLANMKYKSNNRDKQHKKVLKIREKFYRQRDDFLHKQSRQIANAYDCVCIKDPAQGVSYDFGWALFKFFLKYKLLEKGKSLVMTDNIALSKMLYSFQAV

SEQ ID NO: 56044 - protein, 238 aa, unknown
  TnpB Polypeptide
MQMGIRHEKGSDQLRLSLPKDLKSYIEETYGIHEKFLYLENKIFRNMARIKQLRIYPPENGTCDLIVIYEIEEPELLSQNGHYLSVDLGLHNLMTCYDSRNGRTFILGRKYLSLERYFHKEIARVQSVWYAQQSKRGIKYPKSSKHIQRLYRKKQNAVKDYLHKVTRWLAEYCRKEDIRCVVVGDIRNIRKEKDMGRKTNQKFHGLPYNRLYIMLEYKLKLYGIQLIKQPANKKSRLN

SEQ ID NO: 56045 - protein, 428 aa, Moorea sp.
MLVIEAKLKGTRSQYSKLDEAIRTGQFIQNTCLRYWEDNQGISRKDLQKLCSVLAKNKKTPWARKLNSQPRQAHADRAWVSIEHFYSDCRLGKPGKKGYPKYKKFSRSFEYKHSGWKLSADRRQIRFTDVFEVGMMDLWSSRDLLWYTEKQISRVRVIRSADGYYAQFLVNWEIRQEHPFQGKMTGINLGLKEFYTDSDGNTVENTRYLRKSEGRLKMLQCRVSKKHIERKKQSKRYHVSRKALGKQHLKVSRKREDKARKDALALVSSNELIVYEDLKIKNMVKNHHLAKSISDASWYQFTRWLQYFAKVHGVIVIAVPPHNTRIDCFCCGAKVKKNLSTRPHRCNQCGTVLDRDHNAAKNILAKGFKLLSQYLNGTVGHTESRAKSSKAQGEPDLWLKNGDALVLSRLDELRTKVSWESLARLLSN

SEQ ID NO: 56046 - protein, 317 aa, unknown
  TnpB Polypeptide
MEVRRTVLVKLKVDSDAAALLRETIVDFLWAANYVVDHAWKGEYKTTSKAQLQEETYDDVRDQTRLHANLVQNARNKAADAVQSVVARWKQGEYAGKPHFSTSTAVYDKRCASFHGEYVSLATVDGRIELEYVLPDSDRDTPHNRYLDNDDYEVTSAELHNKDGEWFLHLRTKAEMEFDMPDQATTGHRTVLGVDLGVNQLAVTSTGTFWSGHEFDHWRREYEKRRGSLQHCGSRHAHENIQAVGQKETGRFTMMIHRIANGIIDEAAENGCTVIAFEELTGIRDRLSSASWGHKWAFERLYDYVEYKAETRGVIRL

SEQ ID NO: 56047 - protein, 399 aa, unknown
  TnpB Polypeptide
MRKSFKYRAVLNKETEAEALRWLGLCQILYNVALEQRILLYQCHRKTFSAYDQNRQLPELKKEFPEFKSVGSQVLENVLDRLHKAYQSFFRRIKHGETPGFPRFKAKHRYNSFTLRQAGWKLEGQNLYIRNVGRLKLNLHRPIEGKIKTVTIRLTPTEKWFVSFSCDKVVPKTYSHTAAKVGIDVGLKNFAVDSDGHVIENPKFFNKSQKILRRRQRKLSRCKKGSKQRGKARLLVAKAHEKISNQRLDFLHKTANYYVENYDVIHIEALRIDKMIKNKYLARSIADASWGKFFELLSFKAEEAGRTLVRVDPKDTSQTCSSCGRKTPKSLSIRVHKCKHCGLVLDRDLNAALNIKEARSGPSKRNVRHKPERVLRSCQRELRDNATASINKIPREPLF

SEQ ID NO: 56048 - protein, 233 aa, Eubacterium sp.
MRSCFFSGKVGDYKVLFVATRKCRSTPKKAAGKGPGSWEAIGLDMSLPELYVDSDGNTPAYPKPYRKLERKIAREQRKLSRMEKDSRNYTKQLKKIAKLHAKAKHQRADFLHKLSYRLVTHYDIICIEDLSMSAIKKALSFGKSASDNGWGMFVRMLSYKAEWYGSTVIKVGKFFPSSKTCCACGHVHKELKLSDRVYVCPAYGHVMGRDHQAAVNIREEGVRIYISTHPFAA

SEQ ID NO: 56049 - protein, 254 aa, unknown
  TnpB Polypeptide
MQTSSGICVMQHPSSGMSVITSVSITKKQGWRSILTGTIRKKPIKRICGINSSHQTAQEVCRLLDKAWKSFYALKRTGVIETPRPPRFKQESIPITYMQMGIVHERDTDRVRLSLPKTLKKYMEETYQIHENFLYLENKIFRGMDQIKQLRIYPPEKGSCKIIVVYEVPDQEELPQNGHELSIDLGLHNLMTCYDSGNGKTFILGRKYLALERYFHKEIARVQAQWYGQQSGKGVKHPVTSNISGSYIRENKTQ

SEQ ID NO: 56050 - protein, 416 aa, unknown
  TnpB Polypeptide
MLRAYKYRIYPTDDQKILLAKTFGCCRFVYNWALNLKIEAYRQEKKTIAYKEVQDRMVNELKKENQWLTEVNSQALLNSIRNLDTAYKNFFRDTHAVGFPHFKSRKNKQSFQCPQHCSVDFKKGTLSIPKAKDIPAALHRRFKGTVKTVTVSMTPSGKYFASVLVDTDIQELPASPVQGDTALGIDLGIKSLAVCSDGRTFDNPKNLQHSLDRLALLQKRLSRKQKGSANRNKSRIRVARLQEHIANCRKDNLHQITHALTHDSQVRTLCMENLNVKGMQRNHYLAQAVGDASFGMFLTMLEYKCQWYGVNLVKIDRFAPSSKTCGQCGYVYKGLKLSERSWICPECGTHHDRDFNAACNIKEFGLKALPTERGKVKPVDCPMVDDRPRVLKSRGRKKQEKRGGIGISEAHAFRRG

SEQ ID NO: 56051 - protein, 377 aa, unknown
  TnpB Polypeptide
MDVKKAYRFRFYPTPEQEQILAKTFGCARFAYNHMLRIRTDAWYKEQKRVGYHETSALLTELKKQPETIWMNEVSSVPVQQSLRHLQTAFGNFFAKRAKYPAFKSKHDKQAAEYTSSAFKWDGKALKLAKIDAPLNIHWSRTLPKAAKPTTVTVSKDAAGRYFASLLCDDTVMPKPEAAGQIGIDLGLTHFAILSTGEKIAAPNTFRKNESKLAKLQRRLAKKQKGSANRFKAKRKVARLHAKTADTRRDFLHKLSTRLVNENQVIAIESLAVSNMQKNHCLAKSISDAGWSEFVRQLEYKSLWYGRTLVGIDRWYPSSKRCSDCGHTVPKMPLKVREWVCPECGSIHDRDINAARNVLTAGLAGLAHGVEVSPVII

SEQ ID NO: 56052 - protein, 412 aa, unknown
  TnpB Polypeptide
MTVIQQVEKHIIKKSHPYYSMFCEYTHLSKNLYNHANFLVRSEFLRTGKWLRYQELDKILRKDVDYPDYANMSAAQSAQQTLQLLDRNWKSFFNSIKDWSKNKDKYSGRPKLPKYKPKDGRMVFMLTNQQVRMRDGLLYFPKSFQGFTLIPRCVRLDNFKKINQIRIVPTNQLFCVEIVYSISITDNLLQDNGRYMSIDLGLDNLATIVTNIGLNPIIVNGKGLKSNNQYYNKKQAHYQQVAKQMNNKFYTNRLYRLTRKRNSKIDDSLHKVSKFIVTSAISNDIHTIVIGNNKDWKRDVSLGKRVNQSFVNIPHQKLIEKIIYKARNVGINVILTEESYTSGTSFLDGESPKKEFYNKKRRLHRGLFISNQGISINADVNAAYQIMKKVFPNVLADGIEDVVLHPVRVDII

SEQ ID NO: 56053 - protein, 435 aa, Campylobacter sp.
MNKTDNIYSTIRSAKFVLKPNSKQKEMIESFFGLSRAIYNISLYNIKDSKFGTYEIQNGKNKGNIVPRIPTEFDLNKSLPKLKDEYSYLALFPADYAQAIMRNLSRAFNNFYITLNYPKFKDKKSSTQSFNCYKGAKIEGDYIILRKPRASDYAEDDLRIRFKRHKIKYEFEKVTGFTISREDNKYYISFTFYTDIESKETSESVGIDLGIKDFVICSDGTVYENKRFFEKSLRKLKISQRKLSKKQKGSNNREKQRLKVSKLHKKVKNQRNDYQHKVSRELVNQYRTICLETLKVKNMVKNKKLAKAISDVSWSSFIEKLSYKVAENQGYLVKIDTYYPSSKTCSNCGCVKETLSLSERTFHCKECGFAIDRDLNASINILNLGLKNIVATVTTTGTTLKNQSLWSSKKTQIKSEKNYEARKTIKNVKNFYSSL

SEQ ID NO: 56054 - protein, 313 aa, Rhodospirillaceae sp.
MLIAHKIALDPNNVQATYFARAAGTARFAWNWALAEWQRQYKACKADSALSKPSQMALRRQLNGIKGERFPWMREVTKNVPQMAIIQLGAAFKNFFAGRARYPRFRKKGIHDRFSLTNEQSSIDGSRIRIPKLGWVRMRETLRFTGRILSATVSRVADRWFASITVDTPDSSHLPEAENQGAVGVDLGVSALVTFSTGEVITGPKAHKILLDRLRRLSRGLSRKVKGSRNRKKAKAKLARLHVRISNIRQNAMHQLTTKPHTSVPHHRHQGFERARHGQEQALVACRVGYGLLRVPAATGIQGGTARRGDRGG

SEQ ID NO: 56055 - protein, 406 aa, Okeania sp.
MKQITTISCKLKITPELAKEIEATLVAYANACQFIHENSDKNLTNNVAMQSLMYDRVRENFQLSAQTTIHAIRRVCANRKTSKINHIKKELSFNPTSVDYDSRTFSLDTKTWIVSVKLLTKRTKIELLIGNYQRGILKGIKPKSAVLTKRKDGSYYINIHIDNIVSDSIDTDKVTGIDLGRTDIATTSEGESWSGKEITNKRNHYSQMRAVLQQKASKGTRSSRRRCRKLQQRLSGKERRFQKHINHEITTYLVKKAATNKTSIAIEDLTNIRTRTNQQRRAKKERRLSNNWAFYQFRMFLTYKCVLNGVRLILVNPAYTSQTCHKCLHIHPTKGKSYRKGKNYHCNHCGWEGDADYNGAKNIAALGLSVDQSGGSWLFCKISNLDFRPRQLTIWDILEGYKKPAS

SEQ ID NO: 56056 - protein, 355 aa, Okeania sp.
MQSIKTKLKVNNQQKTILAKHAGVARHAYNWGLATCIAEYKETKKRPSAITLHKRLVAKVKSENPWYYEVSKCAPQQALRDLDRAFKNFLTVPKRGFPNYKKKGRKDSFYLEGSIKILKGNYIKLPRIGIVKTYEILPSVPVKNVRISKRANNWYIAFKYDYQPTPTAKEREFIGVDVGINTLATCSDGTTYPNVKAYKQAKKRLSRYQRRVSQKEPGSKNRLKAIKRLSGLHKKVADIRADTLHKLTTWLAKNHSTIVIEDLNVSGMLRNHKLASAIANCGFYEFKRQLTYKCEWYGSELIIADRFYPSSQICSHCGHQQKMPLNVRTYECGHCGFKADRDFNAAINLENYARQ

SEQ ID NO: 56057 - protein, 398 aa, Thermoplasma sp.
MIKTLKVRLYPNEEQTVLLEKHFGGCRFVWNHFLEVRNRYYAEHMNDKKKGLTAFDTMKMLTALKEELTWLNEINSQSLQHSLVELDKAFRQFFRHNASYPTFKSKRDKQYFIIPSGFKAKGNRLIIPKFTEGIKYRDKSSIPNNIKQIVITKDADLYYASIQYESNEELEGGKGIVGLDMGIKHFLTTSDGIEVDPANSYRKFERKIKREQRRLSRKKKGSKNSKKQMVKVQTMHKKIRDARTDFNHKVSTAIAKHYGTVVIENLNIQGMQRNHHLAKSIADQGWYRFKTMLTYKLGWREAKLIEIGRFDPSSRMCSRCGNIKHDLKLSDRIYHCDVCGLTIDRDLNAAINIRNIGLIKVGQGMSEFTPVESAMAGYLNREGISYHSLKQEPQSLQR

SEQ ID NO: 56058 - protein, 344 aa, unknown
  TnpB Polypeptide
VQGVVARWKHGEYAGKPHFSKPTVVYDKRCASFHDEYVSLATVDRRIEIDYVLPDPERDTPHSRYLDTDDFEVTSAELHHRDGEWFLHLRTKAEMEFDTPEQATTGHPTVLGVDLGVNQLAVTSTGVFWSGHEFDHWRREYEKRRASLQQCGSHHAHENIQAVGRKETGRFTMMLHRIANGIIAEAAQNRCTVIAFEDLTGIRDRLPGASWGHEWAFERLHEYVEYKAKMYGIAVEKVDLEHTSRRCSTCGFTHHDNRDGEDFECLKCGYKNHADYNAAKNIGLRYLRCNQTGDGGGAPVGVRLNRGTLNANGEFEPPAGEPGQSGSPRENPTRNKARSSDRAK

SEQ ID NO: 56059 - protein, 485 aa, Moorea sp.
MAKKVGATKKISTQIVPVVGMTASVETELLSTMKKLGIVRSESYNKLGSINYWNLDWKKAIPEVKSFRTPDTLELPAKLMDWTVNDVGKAITASQAACKDSVTNKIYKRFPGKENQNKRKEYVTQLKTSAFLDNSLLHRLVRKEFQRGHSWVKNQIVYQQVGYKCKRLSRNTWQLELAGLKRGKRNRILVRSNRKIKGQIRLIYNQDLPRFEVHFLVDHGTVEIKSERRSIGVDKGYTEAFYDSEGQAHGKKLGKTATRKSVRVAWPFGHRICAKNRNRGKLWALHRKLEKIDPAKSARILENNLTRKTENRRYRQNQGELTAIIGAASKSLFNGEALRVFAEDLTQPIKGKRQSKAVSRKLNSWMKGAMRDSLQKWANWTGSVVTEVQPSYTSQIDSRNGTLLGKRTGDNFTGFDGVVLQADHNAAKNILARGTDKEIGKYMNKTEVQAVLLRRTARFLVRSYRQNKAAFMVCRLWVKGLKLYD

SEQ ID NO: 56060 - protein, 476 aa, Moorea sp.
VYKTVPVKANFSDEEKVFWEFQCQQANSLFNCAIYYAKQKHYQWLEDQEAYTTFWRRDELRSGWKTYKCSTKYPEIDKALKMSPHYKGMAAQSAQQTLKTVGEAITSYNKLVALYYQGKVDKPKFPRYRKKGGLAAVTFPKQALTYKEGLFYPSVSKESKPELLTQITLTPPNFIDPDWVKEVTIRPYYGQLWIDWVIDDGKQPVKTNPNLDYSHAIGIDHGGDNWLTCVSTRGKSFIIDGKKLKTMNQGYCRLISKYKSGKSELYWDSNLDRVQRKRNNQMRDAINKAAIFIINRCLNYGIGNVVIGWNEGQKNRSNMGSKGNQRFVVIPTKRLIERLKQLCSEYGINLIITEESYTSKASFLDGDSLPKHGEKPEGWDPSGKRVRRGLYRTGSGKLINADCNGAANILRKVTTQLFDLTKVAREALTLPHRYDLFTSLSRSYRTSCEVARVHPATSHPCRIPRALAGGDVKTNR

SEQ ID NO: 56061 - protein, 140 aa, Synechococcus sp.
WVNHRISKTIVSRAKATHSVIALEDLTGIRERINQAPRSTTERRRANRWAFYQLRSFISYKAAQAGVRVVLVNPRYSSQTCHKCLHIHPDPEQSCRSGKKFTCGHCGWEGDADLNGANMIAIRAAARSAILGAAVNQPRG

SEQ ID NO: 56062 - protein, 696 aa, Streptomyces sp.
VRRKIQLAEGETERLACASASAFRGLDTVTGEVLGAEALAGRVGWLTSLVETLCTEVTAAHWNRPDLARLASGRDRSGARLPSNAWMAVRTLGWGASVPEGLYVPDRVCRVAEEQAGRALRSAWWRSEITDAVLATWPTGPDADPMRRTETEWAALRAACPDGQAVAASVLRARTRQVVAFHVAYGHLPVDVCALESAPSGGRQVVLAAADKQLCTLTRCPDDPARYGVLNVRLPVRPDPRTRADWHPAVIRFRLPPTIPLGAALHAPTLRLRSGRLRLDVAFTSAAPTTRAGGHTRAVAFDYGLNTLLTGGTLTLTGGAQPTVLTDGHPVFFRPDGVLAKADRLRLLGEQLWTKTVHLQALLDGRTMAGQWPEPLTTAKLAVLQAEHAAVSRRRTKLNEQLAKAAARFMVETARAAGATVIYLEDLRDMEARGKGRTLNTRLSSSVRGQIVAHTRHQAAAHGIAVVIVPARGTSKYCPRCLSVFRHHAAPDNPKPGWKWATCPDTDCGYSADRDVAAWQRIGARGLTHQRTTVLDRSSGTYVIRRTVKELDQPVRHTSHPDPVTSSGLPQPRATADRTKTGPTRNRPVPRQRRRVPAPPATPAAHTAATGPGGKRPAGRQPQSPRRHPQWRGRRQAPHTMSTPTQHQPRGARLGAGFHLHTHATPVRRQGRPSGEPRSSSQGRSRAENPAPPRKT

SEQ ID NO: 56063 - protein, 510 aa, unknown
  TnpB Polypeptide
MRAQTPSFVASVKLLLPEQIQNHLEKSFRIANSAYNEALNFGLRRFDAMKQNPSYQELLELRRELLAKNDKEQKNKEFKAQKKEIDNKLAEIRKDYSLTEFGLSQHLSKQRRKPDSAYQHLNSGELQVVASHVMKALEKVLFYQIEPHKVRFRSKYDTDMSFRNRVNSTGTRLVESDKMGIAYRLYIHKTSTFVDIPVKAFNTYQQMSLLRSNRIKYVQMIRKIIRGKKVYYIQIVCEGTPPAKVNRGEGVVGIDPGISTVAYVAPNKVALIDLVPRNITQKEKLLKVLDRRIERSRRVNNPTCFNENGTIKKGCRFKRLSNRALRLMNRRRKAYRSLSEERKKLQGQLINQVVSNASVIKMEELNVKGLQKRAKDLRINPKTNRPFSKKRFGKLIFRAAPSAFREALKTRAVQLGIEVIMISPKEVKPSQYNHISQTFEKKPLSTRIFDLSPECTSLQRDLYSAFLIAHIENGHYQETALNQDFPVFYQQMRDFLHQSPQTSRLAWYFS

SEQ ID NO: 56064 - protein, 402 aa, unknown
  TnpB Polypeptide
LGYGLLLSFKYRLKTSREQVEILGEQLRLCRLAYNTLLGHCFDERKAGRGTPTSTSLNYLLPAMNARTPELEGVHSQVLQNVAKRVRSGFESYWKRRKAGLKTHLPRFRRANKYDSLTYPQSGFSLDGCMLRLSKIGDVKLIQHRPLEGKVKTLTVTRSASGRWFAVFSCEVENKPIPGRLPAVGVDFGLNSLVALSDGTLIEAPQSYRGAEERLGRAQRCLSRKRRGSRNREKARLRVASVCEKVADQRRDFAYKTARMIVNRYVRVYVEDLKIANMVQNRRLGKSIGDAGWGMLRNALTYMAKMSEGVMAFVSPRNTSQLCSGCGALVPKPLSERTHRCPVCGLVLDRDVNAARNMLKRGLEIGLERAEYTPGGEAANTQLSEAERVASMNQEASLLVGR

SEQ ID NO: 56065 - protein, 390 aa, unknown
  TnpB Polypeptide
MDENNGMRTFEYRLFVKKKQHHLLMQCLIESRVIYNRMLERAKAQYVEQGTFPSKYDLEEAFKEQGEHVPATTIQMLADRLHKALKRFLAGKELGLDVGFPRFKQPNHWHSIQLRQYGNEENHRDVMLAPDNKHVFVPKKLGGLLKVKLHRPLEGTPKTAHLVLRADGHWYLLIACEIEPQTSHTPSECAHPDIGLDVGLKSFLADSQDQVVENPRFYRTSQRTLRRKQRMNARRKKGSKRRRKAAKSTAQTHLKIKRQRRDFHYKTAKRYAEHYQVIAVEKLSILNMVQNHCLAKSIMDASWGAFLDILEDKAARAGHQVIRVNPRFTSQKCFKCDEIVQKSLSVRTHICPFCGYIDDRDANAAKNILKSARPGHGLQDLTYTNGCSVS

SEQ ID NO: 56066 - protein, 256 aa, unknown
  TnpB Polypeptide
MLKDALNGKYKLGAVQLVERNGWYYFIVPIKKEVSVEKRDTVVGVDIGLRYLAVITVLHRDGKITDVEFLKYRKLLDKIRYLWRRIDYLKSLLPEGQRSSKQIRRLWRKTRRINDWIAHNVSKRIVEVAKENNAMIALEDLRWSRPKRGRRRKDMNRRLANWVHGRIAKYTLYKANWEGIYVKFVNARDTSKRCHVCGAVGYRKSVIFSCREHSYTSNADFNASVNIGIRAMFPSVWGIVNMPAPSGCKTPCVSEG

SEQ ID NO: 56067 - protein, 422 aa, unknown
  TnpB Polypeptide
VGKSEKRKSTLEATMERRKTQDYKVFTCKIDYSHLSKEKKEYLTRLFLEAKWLRNYIIARNDIFNETDKHDFVIVFNKDGEEEKRDLMCLSSQMKQGILNQIKDDIFGLSASKKKGRNVGKLKFKSRVNSINLQQFKQTYRIVGKNHIMLQCFKKRFRVRGLKQIPVGAEIANAKLLRKPSGYYIAITCFVPKVERIKAGKEIGFDFGIGTHITDTEGKKNNWKFQETTRHKRLQRKVNKTYKSGKKSSKNREYRKHLCRLEHEKLSNRKKDTIKKFVLNIKKNYDFIGVQDENIAAWKSSRMKGWGRIVHYSIMGGIIRELKKLSQTHVVDKWERTTQECLICGKKTKHGLNERVFVCPHCGYTEDRDIHSARLVLKKAKEISTEYRNVMPVESESSTYESEMADEQDSSMKQEAPSFRMG

SEQ ID NO: 56068 - protein, 348 aa, unknown
  TnpB Polypeptide
VNLVYRYRVKSLNGLLNKQARAVNYVFNFCNETQKHALKWGKLWPSGFDLEKLTAGSSKELGLHSDTLTVICAQYAKARKQCKRPYLRWRSQKSLGWIPLKGRDLRETPSGFHFHGREFEVFKSRDLPAGAKIKDGTNFSRDTRGNWFLNVCIEVPDAAARQVERGVGIDLGLKSFATLSTGETIDNPRHFRVLQERLAKAQRGNKKRQAKTIHAKITNSRSDFLHKLSTRLVGEFDYIAVGNVSASNLAKTSMAKSVLDAGWSSFRAQLAYKAVKHGARFEEVNESWSTQTCNVCGVIAGPKGRAGLNERRWICSCGVDHDRDQNAALNILRRGSGHRATDEGILAL

SEQ ID NO: 56069 - protein, 417 aa, Synechococcus sp.
MLNMTWEFKLEPTSEQVSEIEHILDVCRNVWNFSLRERKDWLDSRKSPVNACSIRQEFILPANAPFPSYARQCKSLTAAKADFPSLKTVNAQVLQQVIRKVEASWESWRLKRSGLPRFKKPNRMRSFVFPQMLRNCISSEGIKLPQLGLVKVRWSREIPNLFEVKQARIVRKASGYSVMLSLQADVDIPAVAPHGHPVGIDVGLEYFLSTSDGEQVKRPRFFNGLHRKLKSLQRRLKKKRKGSANWLKLQKKIGRVHQRIANTRKDWHFKLAHHLCDHAGMVFVEDLDFRTMSKGMLGKHTLDAGLGQFVNQVLPWVCWKRDVFYSKVDARGTSQECPDCGGEVCKDLSTRSHHCHHCGSIKPRDVAAAQVISTRGQRGIENACGADAAGAGVTQSSWLALKQEIFGVTQGISMHNP

SEQ ID NO: 56070 - protein, 381 aa, unknown
  TnpB Polypeptide
MIAYKYKLYRTDRTKHLDKMLREACFVWNHALALQKRYYRLYHKYIGIGKMKTHFAKRIHRHLLHSQTSQEILERLDISYQRFFKHLAKRPPKFKKGKDFNSFLFKQGGYSLNGNVLTINSIGKRFKFSLSRPYEGKIKTLTVKRSHIGDFYIVIVLDKAPVAIRKSHNGASVGIDFGLKKYMTLSNGQTVDNPQFLKSGLRQLQRKSRNLSKCVPGSHNRERKRLELERHHEKVVNQRNDFQWLLAHQLCRQYDRIFIEDLQLTGMSALWGRKMADLAHGEFVMKLQYLATKYGVTIHKIDRYYPSSKMCTCGYKNEGLQLHERTWTCPECGTVHKRDLLAANNILRQGIAELESVSKSKNATGASSQSRLHPRISFLQV

SEQ ID NO: 56071 - protein, 312 aa, Deinococcus sp.
MFYKKDYSFKKGQQVSVDTLDKRIVIPHEGYAKHLEYIQNGAEIGSGTLWYDKRKKQYSLLVALTITVPDPQPTDHKRVIGVDVGQRYHAVATDTRSNAAFFSGKAARQKKDHFARLRKKLQRQGIRSATRRLIALSGRERRFIAAHNHKLANDILARFPQALIGLEDLRKICERTEGRRNKDASKKSRKNKRRRSQWSFAELQAFIDDKAPLAIKVDANYTSQACTSCGHTSKANRPNAGLMFRCESCGYEVHSDLLGGRNIALRTLVVRQDWAATGCLSTTPDVSCSEVKAARLSRYAELRWSTDTNPSL

SEQ ID NO: 56072 - protein, 355 aa, Deinococcus sp.
MREYTTHHVIRVDRRTYPQLRAAVKDHQLQPSDENLKVMLQGQVYRPADHLLSRQVLLHDRLLQLGDLQLEAECYRLPEQEYVTLLTDSRGNYRQYPGAHQLLTALLAPMTPDAEAAWWERVHMAVAQGRQPTTAVDLVDDAWTPTAWLRDRTRLIQQGQEWFLILYFAQPPRWRRPEGRGVVGIDVGLRPLASAAVGQAHAWTFEVHWPTVADDAPAEVQTFAQILDYAAARAALEMFTVPLLASASVLVLEDLNYAQFQSNFPDVARRRAVSDWHQSWVRQRAYARRIRIEEVPAFNTSVTCSQCRGYVRGTRQGRMFSCPHGHSSDAHLNAARNLVRRYWGQRIRASAPREV

SEQ ID NO: 56073 - protein, 397 aa, Deinococcus sp.
LRWGSVRGPPRFRNEVYSHLREEIGLPSQMACSARRQVAATYKGLWTKLKKHNEREARLCPEKPRRKFRPFNAAPKFSSRTLEYQYGKDYTWKKGQQISVLTLEGRQVMAHEGYSRHLNLIAQGCEVGAAKLSYQKSKKQYSLLVSLEVDLPDPPPEDHTRIVGVDAGQRYHAVVTDNPQRSKFFSGKSVNQKKDHFVRIRKSLQRKGTRSATRRLVAFSRRERRFIAQRNHSLASQILKLYPHALIGLGNLKDIRSRTAGRSNPKATKKAKRAKRRRSPWSFAELQTFLDCKAPPVGSMAVKVDANYTSQSCTRCGYTRRENRPGKGRMFACKGCGSQVHAGLRGGRNIALRTLVIRQDPMATEHLSIAPDVADLEAKAVRLSRYAELRWSPATSA

SEQ ID NO: 56074 - protein, 279 aa, Streptomyces sp.
VAANRAVAYRIHEDAVRGRWYLTASWTIPPAATVPLEAVRANGLIGVDTNADRLAAWRLDKHGNPIGEPRRFGYDLTGTTDHRDAQVRHALIRLLHWAKHHGLAIAVEDLDFSAEKTREKHGRRKEFRRLISGMPVARLRARLISMAAELRIPLVAVDPAYTSRWGAQHWQKPLTSKNRKLTRHDAASIAIGRRALGHPIRRRTAPPRDDQSDRRGYRTAQAGPGTRGREETRPRIPGPRTRCDGTGCGANAGDQDAQHRSGRPAAHEFWQQDSLPLSL

SEQ ID NO: 56075 - protein, 367 aa, unknown
  TnpB Polypeptide
MKTLKLRIKDKHANQLNKLAGSVNYAWNYVNDVSYKHLQKTGKFFSAYDLNEYTKGSGEYLGLHSQTLQAINETHAKSRKQFKKAKLSWRTNRADAKRKSLGWIPFKKSAIKYLSTRQTGKKALKSTIQLSLSKGQKLIIDVFDSYNLSLYQINTLEIVQDSRNRWYACITVKDFPRQVSGKGSVGIDLGLKESATTSMGDVLTTKQTQKWAKKLAVAQRANNRKWVKAIHAKIKNSRLDLIHKFTTQLIKDNALIVVGDVKSRSFTNKKTKLAKSTYDAGWYELKRQLKYKCENAGCRFEIVNEKYTTQTCSCCGDMSSSPKGRAGLRIRGWFCAECGTWHDRDINAAKNILAVGLDRLAGGIPSV

SEQ ID NO: 56076 - protein, 357 aa, unknown
  TnpB Polypeptide
MIRSSKHTTKYLTAKKKDLLNQMFIIWGYYLQKTIDLMWDKKVPVSKYLSSKQIDWMDGLGGQYKNLIHKQASEIVRGVRNRKGKKTKPKVENFSINFDINQVSIEISKTNEFDMWVKLRLPFLMPNRKDRHRMEILIPVKDHKNSLKFKDWKRAAGVKISKNFVTFTYEKETPKKKSVGEVVGMDMGYKKLLATSEGKMIGSEMESVYEKISRKKQGSKGFRRALVERDNKINETINKGLCLDSTKELIIEDLYNVKKGNGKGKKRKITKSFMNKLQRWSYVKCVKKLEMLCEENRVLLTQVDPAFTSQRCSVCGFTDKKNRCGERFLCVDCGLTLDADYNAAINISHMGVYNPHA

SEQ ID NO: 56077 - protein, 549 aa, unknown
  TnpB Polypeptide
MVVGMLLYFFIINYWLKWRFRDKERLGIMARGKRKRDKKWMWVAKPGDKIVVSRTAILPSKQLSRRDFKVLEEILNIYSRMLGDVLSHASRNIIESYYRLKNGRYRVLRNIYPNMPSHYIHGLCQDAVERVSSFRRNRARQYSREIFDELVRHLGLGKKDLRGRRLARYLWRRSWEIARHQVDLEMMEGKLVPRINSVSLWLVDDHVWKPIDATKININGVVNTFFTSVAINTHRGWMRIDLEPSKEFYKLLARGFKPTSHAKIKLDRRSRRVLFHLSLEKEIEIYRPGNIKPIDVNENSAATLYEAFAVILETDLTKTTLGYSYRKESIQRRNGSCSREARKAMEKLREGKKKRDYRMKTANMIVRDALRMRGVIVIERISGEDIRVMIARYRDKQLRHRIYQSALKGELNAIIDKAREYGVPVLMVDPRNTSKICPIHNAIIEYGEDRIGICSKGGEKWHREVVALINLYFKALEALYEGSAQKGFGDPSLDGSPMPLGSTTTHEPIEIPRSLWGRWKSLDDHRDVIASLWIKKQSNPKQININDNQ

SEQ ID NO: 56078 - protein, 393 aa, unknown
  TnpB Polypeptide
MASGDEGVLTISIGMRVSPEPEAIELLRRYNVALNYAMNKILRLNLKKVGEVHNALYREFKEWFGLPSRIAVDCYRDALANANAWRNNPRRGRRRPRVRKLSMLLHQGSGYRVKEGYVEIIGGIKLRIIGWDGRYDQYENGEARLVYRGDRMMLWISKRIPKPKPYQPRDAIAVDINEKKIVYGDHVINGERDTKIDEAHRWKLIAESLQKKYSSPKYPAWRRRRGILNRIRSYHRKARDILEDWARKTSLEIVRFAKKLGYAVAREDLTGLINSLRKIKNKDHRTKLIIMGYARLERWIDWQTMKHGVPLAIVNPNGTSSECPKCDSKLEETGYRRLRCPRCEFKADRDVIGKLNIRKRALKKLGINPPGGVLAPLTAPQMTDVNPNRWGNL

SEQ ID NO: 56079 - protein, 221 aa, Moorea sp.
LGLDNFATCVSTTQKSFIIDGKRIKSENQFYNKRNAKLQSIKDLQGIKTLTNRQARLLRKRNHKIRDFTKKAARYVVSWCRQNKISKIVIGYNPDLKQRVNMGKRNNQKFTQIPIYMFKDKLESLCQRYGIELIEQEESYTSKASSLDKDELPVWNADNPKSYTFSGKRIKRGLYRTSKGWLINADCNGALNIIRKHTSKPDDFIGGFRGCLAQPLRVLCS

SEQ ID NO: 56080 - protein, 450 aa, Methylococcales sp.
VKTQIAFSDNFNKGKFAALFEQAQRLGAIRTEIWQRFGSLKGVGLGDRTIRDNWLKEGRQFNVPANAWKQTLSDAIGDIRANREAAKVKVKQAIRRRTKESTEQKRLYTLLKSDKYADDGYLSRLMRHACRRGHNHTHNQINVRSDDYTVFTLKNNVWLKIPSLVKGKRIAIPLSTTVAPKGNLRLILRHDKVEVHYAVKVIKTNDCGSQIIGVDKGFTEALTDSDGVHHGCLLGEILSKESDRLKLKYQRRYKLQAIAKKKPHVQKHNLGRKKLDKQSVKHQSAVRTIVHEAVNAVVDKAAVIVAEDLTSPIAGKKFSKNVSRRLSAWTKGVIAQAIENVSHRRGSTVVHVNAAYTSQMDSRNGTLSGKRSGDKFYCEDGVVLQADVNAARNVLARSQDPEIGLWTPYQQVKSILLKRTECLRLKLLNQDSSCKPYGLSTESELPNAYI

SEQ ID NO: 56081 - protein, 319 aa, Synechococcus sp.
MGRLEKAFNALWNSGFGFPRFKKRFRSFSFPQLGKNPIGDNQIKLPVFGWVKTVMHRPLPDGFEVKQARVVKRASGWYIQLVIQSDVKIPDPPIGGYAIGIDVGLSHFVATSEGELIGRPRFFVDAQHRLKVLNRAVARKQKGSKNQQKARQRVARFYERIANRRKDFHRKLAHHLCDQAEMIFAEELNLKGLAKGMLGKHCLDAGWGQFLETLRWVCFKRGVHFQKVAANGTSQECPSCGVAVKKDLSMRRHECPECGYTTNRDVASGQVIRNRGLASTEHVAELVEACRSVAVGQTVQSCGATPSREALKQEFLKAI

SEQ ID NO: 56082 - protein, 163 aa, Dictyobacter sp.
MTPFERGLRCHHTSLLIFSSIISDEFYFCNTSRLHAHIANIRKDALHKATAQLVMKTKSPNERPAVIVLEDLNVSGMLKNRHLSRAITDVGFFEFRRQMDYKAQQSGIQVKVISRWEPTSKTCSRCKAVREEIDLSERIFICHECGFVIDRDLNAAYNLANLA

SEQ ID NO: 56083 - protein, 382 aa, Dictyobacter sp.
MTLIVRGYKTELKLNNAQRTACLKHAGTSRYAYNWGLRRYQEERAAGRKAPTAMSLHKELNALKQGELSWMYEVSKAAPQESLRDLEHAFKHFWKRCAKKQQGRWRGKLGYPRFKSKKRGIGSFRLTGAIHVGEDWVQLPRLGKLRLKERGYLPTTGVHILSATVSERAGRWYVSLQVEEEHAEAAIALGETIGIDLGIKALATLSDGRVFGNPKALGSHLKQLRRLSRQHARKQLGSKNRQKAARKLARLHAHIANLRQDTVHQVTALIVAKTKPDQQRPTCIVLEDLQVSSMVKNRNLSRAIADVGFAEFRRQLEYKAQQAGSLVYTVSQWEPSSKTCSWCGWIDEDLTLSDRLFHCEACGSVIDRDRNASINLALKAAG

SEQ ID NO: 56084 - protein, 375 aa, Dictyobacter sp.
MLIYEYKLDCTKAQYAAIDEAIRVCQFIRNKCLRLWMDDHASKNDLQCYCAVLAKEYSFANNLNSQARQAAADRAWNAIQRFYTNCKAKKPGKKGYPHFQHDNRSVEYKTSGWKLEPDGRHITFKDGCGIGRLRLVGTRTIETFPIKQIKRVRLIRRADGYYVQFAVQSDRIVEHEPTGATVGIDVGLKAYYTDSNGHTVENPRYYRKAEAHLKRLQRRLSRKKRGSKNRLKARKQVARAHLKVQRQREDFARKEANALVTSHDLIAYEDLKIANMVRNRHLAKSISDAGWGQFLQWVNYYGSLHAIPIMKVAPHFTSQDCSGCSTLVKKSLSVRTHICPGCGLVLDRDHNAARNILEKALSTEGHSGTDAPVSA

SEQ ID NO: 56085 - protein, 497 aa, Dictyobacter sp.
MAKATTTIQQTLTYQPHHGDWLAANQALFNRVASFYFDVIQAHCNVLDHPNKEALTILELLTHTTQRNSNPVMPLSDIAEDIPAYFRRAAIHAALGSAHSFHSHLEKWKQRKEKAIAKGKTFHVRPPVPPRAWNKSVTLYQGMWKDRTDNSIMIKVWTGTCWSWINVRITGRELPLDAELGSPQLIRKGTQWWLHTPVEKQFQNPGKIEKQVTTNLETKICAVDLNISENIAVCTVQTVEGTILATKFIKGGDEISGFRKRQLGRIARNRRKTSIIAKGEQDNIALWKMIRQVDEQCAHRISARIVQFAKQHEASILVFEHLGNLRPAKGMYSRRGNTKRAYWMRGRIFTYAKYKAYNTGIVTSRVSPRNTSRECAYCHNLIARYNAGKPAEGYTPGAPLAACGACGMKGNADRNASLVIGQRLIERYHPKEKPQALRRVSKDTGVIVSQDAKNKKEPSIPSVRHADSNEHGTAQDVVFRMDEHASDIPTQLRLFNE

SEQ ID NO: 56086 - protein, 412 aa, Dictyobacter sp.
MRLVERHLVRTTDPRFAAIDAAAFASKNLYNQANYQIRQTYISHGKYLSYADVFHLVKGMDCYKALPAKVANSILILLHKNWVSFFEALEAFQTEPSRFTGRPRLPRYKDKAKGRNILIYDTQALGKRAFKKTGKLIPSGLPIEIETSVTEWWQLAQVRIVPRADGYMIEVVYEQQEEQADVDTKLVAALDPGVNVLAALTSNKPGFVPRLVSGKPLKSLNQQYNKRRAQHQSRLSHEKRFTSRHLDRVTTKRNRRVDSYLHTASRRIIDLLVEEGIGVLVIGKNPLWKQEVNLGSKNNQQFVQLPHARFIEQLAYKAQLVGIQVIIQEESYTSKASFLDNDPLPTYQANRSERPIFSGRRIARSWYRASDGTIIHADINGSWNILRKSNSDLLQLGRGVAGAAVRPRRLAV

SEQ ID NO: 56087 - protein, 375 aa, Dictyobacter sp.
MLIHEYKLDGNKAQYAAIDEAIRVCQFIRNTCLRLWMDDHATKNDLQKYCAVLAKEFPFANPLNSQARQAAADRAWNAIQRFYDNCKAKKPGKKGYPRFQHDNRSVEYKQTGWKLEPDGRHLTLIDGCGIGRLRLVGTRDIETFPIKQIKRLRLIRRADGYYAQFAVQAHRVIEHEMTGATVGIDVGLKAYYTDSNSNTIKNPRHYRKAEKRLKKLQRRLSRTAKKSNNRKKARQRVAKAHLKVQRQREDFARKEANALVTSHDLIAYEDLKIVNMVRNRHLAKSINDAGWGHFLQWVNYYGAMHDIPVVKVVPHFTSQNCSGCGTLVKKSLSVRTHICPACGLVMDRDHNAAVNILNKALSTVGQTGTDAPVSA

SEQ ID NO: 56088 - protein, 378 aa, Dictyobacter sp.
MQVIRGYKTELDLNNAQKTACLQHAGASRFTYNWGLKRYEEEYKAGRKAPSAMSLHKELNALKQTHFPWMYTVSKCAPQEALRNLEKAFKQFFGKVKLKAQGTYRGKLGYPRWKSKKRGIGSFRLTGAIHVFEDRIQLPRLGTLRLHEHGYIPTNAKVLSATVSEQAGRWFVSVQVEEYGSDPVLATGPALGIDLGVKAMATASDGTIIANPKALRSNLKKLRRASRQHSRKQKGSKNRARATRKLARLHAHIGNIRKDALHKATSQLVMKTKSSSERPAVIVLEDLNVSGMLKNRRLSRAIADVGFYEFRRQMLYKAEQTGCKVVLVSRWEPSSKTCSGCKAVREELDLRERTFLCHACGLVLDRDLNAAYNLAALA

SEQ ID NO: 56089 - protein, 473 aa, Dictyobacter sp.
MGPLRPTQNPSSVTNERSSTDKEFSLVLGVEKQMAAMIKAHKIRLNPTPEQEEYLRRACGTRRFVYNWGLAEWNKQYQEYQEGKREKKPTAHTLKKQFQAMRAREFPWTFAVTKCVIEGAFEDLGDAFSRFFKGQNTYPTFKKKNRSRESFYVANDKLSVGDHWIVVPVLGQFLLDKQQADGMLPQKIRNKTKYKRSLGKINMAESLRFVRADYAKTSGKWRNERKHVLCSSVKILGATIGLSGGHWYVSIHVEIPSVSVVNPHPLVGVDVGIKEAAIVSDGRRFKNHKPLSRQIKKLKRLSRSLSRKHYDPQTKQGSKNREKARVKLARLHGKIADMRRDSHHKLTTEIAQTCSVVGLEDLHIKGMFKNRKLARAMADAGLGQLLQFFATKMQAVGGQAMVVDRFFPSTKRCSGCGHVKKRMPLKYRTYCCLKCGMVRDRDLNAALNLECEARRLLDERLHVPVADSGSGPT

SEQ ID NO: 56090 - protein, 290 aa, Dictyobacter sp.
LGRFILDQRHTTKDRGKLLRPLGTVNLAEKLRFVQAGKATRPTTKRHRRTQVLCEDLKILGATVSCEAGQWYVSIQLDIQKERSPTPVPVVGVDVGITHAAVVSDGRRLQNHRPLASHLKKLGKLQRQISRKQKTKDLETGRTIFSKNYEKQRRKVAREHQKIANIRRDVQHKFTTELARTCGAVGIEDLHVVGMMANRKLSRAVADAAMGQLLQFLQTKVESAGGDLFIASRWFPSTKRCSCCGHIKKRMPLKHRTYVCQICELVIDRDMNAAFNLAWFATDMLCQRHA

SEQ ID NO: 56091 - protein, 602 aa, unknown
  TnpB Polypeptide
MKKKKNPDKDLPNSHRTIKCSLKTILRNKEIQSTINDLVIKCNNIIIETYQFIRLFCLYKYHNKQDIPELTEKFILYCIKCLGIRDNRGKKADNDNLLTELNQFYENEFKSLLDHKDKYELKNMSFLLPYLATQVHTSFHNNLKEHFITRLLRFINKTTTDYEIGLDKEQVNKERTKLKNALYDNTECPERYREWYEFYRKYILPEKWNKSLAYDIKVYPCKYIIHSIYMNEVLENKEMKLFQPISLRNTIIPHYITIDTATLISLFGEKGMKGKLLKNITENQFYVWNKYFNFDLKIFRQKNYKFNYTIQTDGVGVSLLFVHKDYTGNSSCINCKVKDDYDITYLYEYTKEQLEIQKNKTIIGCDPGKFNLVYMTDGKNILRYTAFQRRTESMAKRNAKILYTEKLKNNIIEKETQLSTSNSKTVNYNKFKDYLIKKNKLNTELRDFYNKELYRKMKWRQFVYTKKSEDRFLNKIEETFGNNISIAYGDWSRTTQMKHFIPTKGIGMRKLIAKRYETYAINEYRTSKLCNCCHNDLSYFKFNNNKVFRYLMCNKCVSSQSENNTFITRDLNSALNIRNLALQWIAEQTRPSAFNRVGGLTT

SEQ ID NO: 56092 - protein, 399 aa, Mastigocoleus sp.
MLVARKIRILVSDHDAKTLEFMQSKSRALYNWWLGKLKSGEKWNFVEAKRSLKASREHDPELNDVYGMLLAEVYFRLDRAMQAFFRRVKKGEKPGFPRFRPRHKFFSLVYPGRYIKLKGNKVILPTGGKGKNKKYHSVRGILTEKPPREYRSVVVSRDASGKYYCSFMYDKEVLGQSNKGGIVAFDLGIKTLAMGVTDSGRDYEIGGFTGYRWFNKQLDKIRSLRSRCKKGSRRYKFLSETYQKVSAKRRNKLKDCLHKASHLIACKLAESAVIVGDLSQREMVSKSDNKKLNRAVYNNWGLYEFITQLKYKCKLSGKDLYLESEKGTSKTCFCCGSQQEMPLYKREYFCTSCGIKINRDANSARNILLRHIARQEPEKLLGAYSVLGVRPRNQVFITT

SEQ ID NO: 56093 - protein, 463 aa, Clostridium sp.
MGTIIKNVKQYSYILDTEMLNELKFIANQYKNVKNYIYSRYSGINSIPLLSKERQIRNEWVKSEFAKQWKLPARYWKLALTEAMGNIKSKWFNIKSKIKEQVKVNENLSDEDKHYINYIVKFNSYYHKVLNYIGFDIPKIFKKKNLNFKYLNNLIRRYTRKYKGHIPYSKIGKTFSIDTGLYSYKNNCINITSTKKGKRLSIKLTDSNKYNRTMIVKIIDNKIVVNCPLKIKTRKNKNTNIIGIDKGYRYLFAVSSDKFYGENLNNYLSKETERLNKVNAQRNRFWALYNQYLDKGYIKKANKIKENNLGKVKYNHNKLKHDQTVKSYINYSLNQLIKEEKPKEIVMENLDFVNWNDKYPKIVKCKLSRWIKGYIRERVEYKCDFYSIKYTYINPAYTSKVCSVCGSFGKRDGDIFICPKCNKFHADINASKNILNRKYDNDITLYTNYKKVKDILEKRIKVS

SEQ ID NO: 56094 - protein, 338 aa, unknown
  TnpB Polypeptide
LYTLETGDRSRIEIPVGSALKEEYDHTGRLRLEVAGDPKWDGKQGQLQIQYDEIDDTFRAFQPVTVPDSQQDSPLASEEAALDVGANNLIACTTTTGQQYLYEGRDLFDHFRETTDEIARLQSKLREGRYSSNRIRQLYQKRTRRRDHAQEALARDLMERLYTDGVETVYVGDLTDVLSTHWCAEVNAKTHQFWAFRAFIDRLLYAAEEYGIRVEVQSEANTTRTCPVCGEREDTDRDGDVFRCPCGHEAHADLCASRTFLEQQTCELEGGSMARPVRLTGTTTTGQRHHTLPRGKVPTRSAQTRVPATGKLPPWVRYSQHPTGGILALQRGEDVKHS

SEQ ID NO: 56095 - protein, 403 aa, unknown
  TnpB Polypeptide
VVEYSAHNRICPRSNRGGSTINCVRGGGVYLVNKINSFNKSFKVRIYPNEEQKVLIDKTFGCTRFIYNFMLNLKQKLYKNFNITLSYNHMSKILTEIKRNKIWLREIDAVALKECLKDLDVAYQKFFKGNGFPKFKSKKRDKLSYRANSCLHLDKDTKTVKIPKVGWIKFRDKSSFEGLKRIYSVTISKSSSGKYYASISAEVDIAHFEKNNQNCGIDLGIKDFCVLNDGTRFENPKFLVHNEKRLRLLQKSLSRKIYGSKNYEKARLKLAKFHEYIVNCRKDYLHKISLYLVKNYDIICSETLRVRNMVKKHSLAKLIIDVSWYEFCRQLECKCLWYGKKLVQISTSFASSQLCSNCGFKNSEVKNLNIREWTCPECHTHHDRDINASTNILKEGLRILELI

SEQ ID NO: 56096 - protein, 169 aa, unknown
  TnpB Polypeptide
VEKAFKYRIYPNKKQQELIQKTFGCTRFVYNYYLNKRKELYENDKTIFTYNMCSKDLTKLKKELEWLKEPDKDSLQKTLKDLDMAYQKFFKEHTGYPKFKSKKNRYQSYRTSYTKTTAGGNIMFINKHIKLPKLGLVKTKDKQIPQGRILNATISQEPNGHYYCSYSFN

SEQ ID NO: 56097 - protein, 377 aa, unknown
  TnpB Polypeptide
MLNVMNLTLKVKLGPSPEQFEALKTTMERFNIACNHIAEAACREQTANKMKLQKVVYREVRDTFGLSAQMTIRAIAKVCEAYKRDRSIKPEFAPHGAMVYDQRILSWKSLDRVSILTLEGRALVPVVMSAYHKSRLDRVRGQADLILIDDIFYLCVIVDVPEPEKIRTTGALGIDLGIVNIAVDSDGEAHSGKTVNESRDRAAHLRAELQAVGTKSAKRHLKKLSGREQRFARDINHCISKKLVSKAKDTRRAIALEDLTGIRTGITVRRTQRRRHSSWSFGQLRAFIEYKAALAGIPVIAVNPRGTSHICPQCGHEGKENRPTRDNFACSRCGLAGPADHVAALNIAARATVNPPIVPEVFCLSHFGSPSGTSQRL

SEQ ID NO: 56098 - protein, 440 aa, Vibrio sp.
MKIVRSDRLNINTNTHQSEALRATLNVYRKYVRDLMVLINARWRKFQHHSGNEIIAAVESLIHPTKKRPEIKHHYFHHHYYKFPSYLRRVAIMDAMGQVRSFHSRFNDWLDSGCKNRPPKLTCATATYPSLYAGQCIKFSNCGTKADIKVFKSNDWVWIAVKLNGKERFSGKKLSPLLVLKNKKWLLSVPVKMDVSLKPKVNFSGKVLSVDVGINTTATCAVVDKSGTVHGRYFLNRSDKDREYRLMNRIRAKARKQTRHGNKLPSGFCKNDHRRLKQLADNEAHQISRRIVSLARDSECDAIAVEDLKGWRPSAGKKRSTMKAKFHRWYHRMLIDRLESKAIELGIRLINVYARGTSSNAYDGSGKVKRDKGNYALCQFVTGKRYNADLNAAYNIAARGILKFFYPKVREKLWKSGKPNACPLTGSPFVLSSIWLLSQT

SEQ ID NO: 56099 - protein, 412 aa, Vibrio sp.
HSFKLEPTPEQADKLAQMAGCGRVVFNDSLELMLSIARKKTGIDDKKELYKHLNGLTYAERKALNKLLPSSPGLNKLLPVWKKLDNRKWLDSAYAHCLQQRQRDLVDKGINEWVKGKKGFPVWRKRQVAHHSTMRFPSAKKQIGIERNHIKLPNGLGMVRYHNSRDVVGELRNATVALNAVGEWNISIMCLVDVELPEHVQGETTGVDMGIAKNMTLSTDVCGDKGVFWGVHSFRAHQDKLAIEQRKLSRKVLGSHNWKKQKLKVAKLHQRIANIRSDYQHKATTSISKNHAMVICEALKVANMSKSAKGDGENHGKNVAAKSGLNKSILDQGWHELRRQLEYKMKWKGGVYGEVNPRNTSRECGKCGHIEKDNRKTQAEFLCQSCGHSDNADKNAARVILMRYLRELELAA

SEQ ID NO: 56100 - protein, 420 aa, Nostoc sp.
MMTPMIVTRRTTFRLYPTKSQESKLHYWRRLHKDLFNACLYHRKTEYQRFGNSISYYDQQNILPDFKECWHEYKELGSQALQATVKRLDYAFQRFFSRLGGYPKFKSARHYRGWTYPGISGWKAHTTGDNGYLELSNLGQIQMRGKARTWGTPTTCTIIWKQAKWYASITVNCESKRETSTGAIGLDFGTYHAVACSDGTIIDNPKFLANTQQKIEQASKKLRRKRAPNFKKKIKASKRWRKAKKQISKLQSKVTNQRQDWQHKVAAQIVKNNSLVASEKLNIKGMTRKAKKGSKRKHQKTGLNRSLLDVGIGNLISLIKYKLDEFNGVFVDVPLKIAPSQTCPRCGHKNKKELSERVHNCEVCNFVADRDVAAAMVMLNYAKGLGTSLSNADAKPLSKTPQHCGGFRKVQQVKRQKPRT

SEQ ID NO: 56101 - protein, 514 aa, unknown
  TnpB Polypeptide
MKFICRNWVFGYNKNMATLTYTKGLPTPAEELNALGCTQFEMFLNAYAPIYRLAVNETVNHLLSGTTFNKGAWNTYLQQTYRINKRHANGVISDAIGQVSSAKKCRQNHIKQLQGKLKSTQEWIRKAQIKLKLARKLYSQKDWQHSQTGCIFPIASSLQYRNTNWQHLGFKIHQKKRKACLLERKISHLKLKPIQVKVPHSQCFVVGCSSEKRGNQVCQWDGVTLKFRVPACLEDQFGEYVTTRLGGYDRKINRLPSEGAKTWHFYRKHDKWNAAVQFTPTSVNRVSRHSSDGCIGIDMNPGSIGWAYVDKDGNLKAKGQIPLQMGLPHGQQDAQIVDSCLQLATLANTFECPVVCENLDFSRKKEQLKECGSKYARMLSGWAYSRFYELLESILSNRGIYLLKVNPAYTSLIGLVKYARQYGLASDEAAALAVARRGMKLSEKLPSSITAYLDVKSGKHVWSLWYQLNKLLKSCTRIKNRHSVYSVSNWGLEVKGMVAPACGGNQTKRKRTSS

SEQ ID NO: 56102 - protein, 273 aa, Microcystis sp.
MSDLKITTSRREIIEVRIVPKSSCYVIEIVYERRSETTDKQEIAGIDLGVNNLMAVTTNQTGVAPLLVNGRPLKAINTFYNKQRSRLQSQLKTRNNQPSSKRLIFLTHKRNCRVENYLHTASKRVIDWCIRPQIGTLIIGHNERIKQCLNLGKRNNQQFVNIPHYRLIEMLTYKAQLKGIKVIITEESYTSQSSALDRDELPKYGEEKPLFKGKRLARGLYKMGTNQLLNADVNGSFNIIRKVIPDVIDQGIKGLPFNPVVLDPLRMTKLSGF

SEQ ID NO: 56103 - protein, 749 aa, Streptomyces sp.
VPWARTWDASNTHDQWGLSRRAQHAHLQSLEAAIGMLRHRLSLPVGEKGSRGRPGGYGSKREWFRKSRRLAVLEERYAQVRAEREAGRVSVVRGGRRLFNQCHDLAAAGRTADQWRAEWEASRWFLTADGESGKRFGNETIRVTPDGEISIKLPASLAGLANAKHGRYVLAARVSFPRRGEEWRDRVAENRAVAYRIHLDMIRGRWYLDASWTRKALPVVPLATLRAGEVAGVDMNADHLAAWRLDAHGNPTGQPRRFDYDLTGSAGHRDAQLRHALIRLLHWARATGVTAIAVEDLDFTDSTTREKHGRRKKFRQLVSGIPTGKLRARLVSMCAEAGIGVIAVDPAYTSMWGAEHWQKPLTTTNRKTSRHAAAAVAIGRRALGHRIRRRAAPPRDDQSDRRGHRTAQARPGTRGREETRPRVPGPRTRSVQPDAERTRGTSASKTVRGAPVDQAWVQDPLLLTVQERYRRSHGHPRGALGHRRHDLRLRERGPDRDAGAPRRRGAAGHLGLCGGGPAALEGAHGAALAPVRGRGRGLPGPAARPGAGLPRAAGAHRRRGRRLVRPVRGPLRGRLGALPRHRARPRPAGPGLPPRSAVQLQHPQPGAQAPRVGRTGPLRGRGVRRRAGRGQARPGGLPRRLHRPGPAPPPGGVRRGPAGHRRPGCRGGGPAGDLAGPRGDRRETRADPDHRPPSAARAAACGYAFWSTVHLRVMFFLRRGERAERPESPGSASRAGSLLEVIKFRWPMV

SEQ ID NO: 56104 - protein, 386 aa, unknown
  TnpB Polypeptide
MYQYRLYPSHKHKERLYSQFDACKELYNSLLELNNRTYKTTGKGLRKFDFNKASKGTHPELFSQVRQNVSDRVSKAFQNFFRRVKDPACKKKGFPRFKSSVHSITYPQNGFKFKSDKRLYCSKIGNIPIVLHRLPKGKIKTLTIKRNRAGQWFAVFACEVKIPKTIHNGVKVGIDVGLENFATLSDSTVISNPRYLLKSERRLARLQRGLSRKKKGSSNRRKAKFLVARQHLKVSNQRTDFLHKLSHSIAVKYSVISIEDLNIKGMVRNHCLSKHIHDASWSTFFNMLSYKAVTCGGVVIRKNPRNTSRTCSRCGAIQDMPLSKRVYECPVCGFVCHRDLNASINIGRGGLPRTYTPADIEPIQPEIQAASSVNESGTICDRNSTN

SEQ ID NO: 56105 - protein, 386 aa, unknown; identical to SEQ ID NO: 56104
  TnpB Polypeptide

SEQ ID NO: 56106 - protein, 488 aa, Bacillus sp.
LLEKQTYVWYNVSKGVKIVSLTYSRKIKVSFVKEAELILDGQSKICNWLYNQLLDACQKDYRENHQALKLLKDRNLRNYGVSLKAKHPFLHTVFSSPLKEPAERLKKAYEGFFKNGRGYPKFRSWKKKWFSLVFDEPNKGWELIHDGTEVSVSLGDIPDLPKGKGKRNPSVIGKLKEPFRLKEGELVKTFSICKQQGVFYAVFTIEKCKQEELLHKEKLSAYRKECHLAKKEKRKLPKKPILKERKMEIPSDVKWVALDPNHKNFFVSMDYKGESIEFAKIKEINYWDKKIDHLKSLRDVCEKHYRKRKTQHGNSYTAHSPRWNRLNRALDKAYHGRREQIKTALYSIAHELYRRYDLVLIGDYTPNTGTAKFENMHRSMLNQEKIGEFRNVLEWVSSKLEKFYIKVNEHNTTKECCVCGHLEKKDPSVREFECASCGTKILRDINSSVNIGKKAGYLLETSKHLLQEFTYKGEYRYGQKVFVGINKQ

SEQ ID NO: 56107 - protein, 396 aa, unknown
  TnpB Polypeptide
MRRQTTHVWVVPRGEYMLTLKTRGELVEGSPNELYEELYLTRRAIQYVIDALWELDKTPSLNQIHQMFYKTLRVQGFRAHQCKQIYKYALSTVKSAKNNGGKKPELKKLTARLDKYDARVDLGSRIVVVKLRNKEFKIRLIHRRSYIEKFKGRKWYEVIVSIDKQGRIWITIPFRWEYKPYKPKKLISLDINLGKIVVYDGRSIRRIDTRFTEALSPKIHAERIQKKYPRMWRYSKRILDRIKKLHRRSRNIAIDWSCKFAKYIVFKAKRTRNAIVLEDLEKLWFNVSKKSNAIADKLSRFAYRKLQLAIITKAIEYNVPVIYVNPKGTSSMCPNCGARLVYNYRLAICKNCRFIADRDTIGAINIYLRALRGMQGVLGYSLSAPPMNDETRGRES

SEQ ID NO: 56108 - protein, 347 aa, unknown
  TnpB Polypeptide
MLTYQYRIKDSTTKKILIKLASNVNFIWNVSLSIVKQRWNESRLYTDEKLLNAVTKGSSKEDEIFINAQTVQAIYEEVIKKTKQFKKSPRFRSRKIRLGWIPFKGQTFKIIGNYAIYNGFRLKLWKHRQFPEGSVVKSGSFSEDSQGRWYVNIVISFPEYLEKAEDKSVGIDLGIKTTLSLATEERFNHDNFSKELEVKLAKAQRRKNKRQVTKIHAKIKNKRKDWNHKTSYILAENFRNIFVGDTTPTAILADFAKINRSIYDASWFQIKTFLAYKVLRRRGCYLEVPEKDSTLTCSSCLKKLESLELKIREWTCPHCNSRHDRDFNAAKNHLRLGSETLSRRKSA

SEQ ID NO: 56109 - protein, 528 aa, unknown
  TnpB Polypeptide
MLKLHNPSKRKQQIMDEAMMNYSRAYQFLLDKAYEQIDEIERSLKDERGKFRAVTLGKWIDKEIARELNSFEIEPFKDSLKMDFSMTLASFLTLKGMQNEVSYPIAFVSEAKWKQSNDDALREVAEGARTVEQYLREMRKLAQKVGTLKPVFFCRYAMNRDYCLLYDSSKDRYYVKLYLMNVKSNNRKMPNIETEYDLQYIHRDGGILEKNSRRERFVLVPLSFGKWQEHYLKMALENPELLKTARLIKKGKEYFLSVNMDVGEPERVKTNAFLGLARGLKNAVHYTVVNREGTLVSSGVVKVEAGTGDSSEVLPPNTIHTLANEIVSIAREKKAQVVMQAFIDRGDKLQWTDEYNERYTPVLNYRSYNKLLSILEYKLDGHGLPPPVKVSPVGVFYTCPNCGLHAARNRFSRDIFICIECGTTMNIEALGSLNIARKLIRYGTGLLKVKVERTSTGVKFINKDLGLEFIPSNPMDCLDEFAEEIRRIIADFYAQINTLTKDRTFKKKYSLIKRIEEEPDLTKLVEMI

SEQ ID NO: 56110 - protein, 367 aa, Haloterrigena sp.
VSTTRTTNSPSGNESGRCSANCTRKPPKPPSHASTATSQTFARKKRRGHKVGRLKRQAPTEYRSVTYNQSGFDLDEKRGHDKYAYVRFSKIGWVKIRYTRPVPDNATVKEVTFKKETTGEWFVSFGLESDETDLPEKPDVDSLNVSNSIGIDLGILNYIHTSDGKTVDWLNLEDEYEQLRREQRKLSRKEKGSNNYEKQRLKVAKVKRYIRRKVLDYQHKITTWLVKEYDAVFVEDLNVQSMLQGDGNARNKQDAAWRQFITLLEYKGELYGTHVVQVEARGTTKECASCGVETAKPIWVREHSCPSCGFETDRDANAAMNVLKRGFDEIGLGWPESTPVETVAATDTTQFQSVSASHVIETGSLPS

SEQ ID NO: 56111 - protein, 416 aa, Haloterrigena sp.
MAIEVTRTYVGLIQNQRQVCEDLDSLGDSASKIWNVARWTADRIWDETGEIPDEGTLKACMKNQPCWKDLNAQSSQKVIEELSDAFQSWFDLRQTDDEANPPGYRKHGDNRPRSTVTFKADGFKHDPENNRVRLSKGSNLKENWSDFILCEYQIRSDVDLSEVTRVQNVRAVWNGDEWELHFVCKVEVETSDSAGDGVAGIDLGITNIATVAFPDEYVLYPGNSIKEDKHYFTRVEYDTEGENGPSETSIWARRKLAEREIHFYHVLTDTIITECIERGVGTLAVSWPEDVRDSDWGKTGNKKLHSWAFDRIYQYLAYKGEIRGVEVLKENEWDSSKTCSRCGDETASNRVERGLYVCSSCELVANADCNGAENMRQKITPSPHGEDRSNGCVAQPSTYLFDRESGTFRTREQVVS

SEQ ID NO: 56112 - protein, 409 aa, Haloterrigena sp.
MNYNYRYRLDPSDALQETLDQHRDLCRQVYNHFLHRLNHSDGGTKYDEINLLPSIKEWWTDLTDLYSRTLQNVVERLYDNLSRLKDAEDNGRSVGLLKWKAPNEYRSFTYRQSGFELKNTSGQTVLRLSKIGEIPVHFHRELPEDATIKQVTVKKEPTGEWFATFGVETPDDPPKKPENPEGVVGIDVGILKYAHDTDGTAVESVDLSDERNRLEREQRKLSRKEHGSNNYENQRRRVAECHADLKRKRRDFLHKLSNYYAREYDLVAVEDLDAKGLVELDGNSRNRAGAAWGTFLRMLEYKCEREGTHFVAVNPAGTTKECAACGVSTDKPLWVREHSCPSCGFTADRDWNAAWNILSRGIKQLGAGRSESTPVETALPTGTHSVPAKRVVETGSPTLKERTASAVSE

SEQ ID NO: 56113 - protein, 255 aa, Haloterrigena sp.
LKYLFSDAFETTGAELHYKHGEWMLHVHTKAEVEPDTSVKATTEHPTVLGVDLGVNKFAVASTGRFWDGGEFDHWRREYEKRRASLAQCGTRWAHENIQSVGETGRFKQMLHEISNEIIDEAVEHGCTVIAFEQLTGIRDRLNASWGHKWAYNRLYDFVEYKAARYDIDVEMVEPENTSKRCSTYGFTHPDNRDGEDFACQKCGYETHADYNVAKNIGLRYLRRNQTGSDGGAPVGVRLNSGMLNESGEYIARLG

SEQ ID NO: 56114 - protein, 422 aa, unknown
  TnpB Polypeptide
MKYSPRYRLFPNEEQQDELDWQRDTIRQLYNHALREFNKIPEDAGTLRQRVWMVRDTIPALKDWWTDLNKVYSTVLQKAVERIRDNINNLGKLKAKGYKVGSLNWKKPREFRSFTYRQSGFKLDKKSGHDGHALLTLKKLAGETRKIPVRLHRDFPDHDAIKEVTLKKDATGAWYASFTIDTAAPEKPVPEDIDPEDTVGLDLGVLNFIHDSDGRSVKRLDLSHDRERLEREQRSLSRKKEGLNNWEKQRRRVAEIHVRMSNKKRDLKHKLAHFYTTEYDAVFVEDLNVKSMLEGYQNARNKAEVGWREFLTILEHHGNKNGCHVVEVEARGTTKECAECGVETAKPLWVREHSCPSCGFEIDRDWNAALNVQQRGWTRLGVVHSEDTPAETATTVDTLAVSASRVVDSGSPCLKEAAQAAE

SEQ ID NO: 56115 - protein, 381 aa, unknown
  TnpB Polypeptide
MSKMMSSANFLWNYIVAFSRRYYKFYGKQVTYDDLKKHIKKIFYKRPFKDELITYLLDDYFSTINKYLKFPRLNKKCKLKLIKFSRNEFHVQKSMNNEKHGIVVVNSSIFNGNFKFKITRDFVSPLNIKIFKDIDNRFYVLILCDVQNLCSKSVEKYRGTIGIDFGLKTFLTLSTGEKIDMPDFFSNSYKKLSNIDRTYQRKKCACVYGSSFRRTKRERQKIYRHIKNQRSDYHWKLANELCLKNSFISVEDLDLNEMKKKVYDIKTGKMRKRFGRKVSSLAYGKFLIKLNAVAEKYGTIVYKIDRYFPSSQKCSVCGHRDNKTKNLGVREWVCQKCGTKHDRDINAARNILLRGVRKSHGKGIPRSCKGRKCLGTLTNQS

SEQ ID NO: 56116 - protein, 367 aa, unknown
  TnpB Polypeptide
LEKAYKFRFYPTKSQIKKLNNIFGCARYVYNHFLGLKQELYNKEKKSMSYSKCSKELTVLKKEKEWLKDVDKFSLQNSLKDLDKAYKNFFNGKGYPKFKSRKDNRKSYRTNYTNNNIEFLDKWIKMPKLGKLKIRDKMKPQGRILSATITQAPSGKYYISLCCTDVEIKKLESANKNVGIDLGIKDFAIASDGTIIENPKYLQKSLNKLAILQRELSRKPKGSSNRNKARIKVARLFEKISNQRKDFLQKLSTMLINKYDIICLEDLQVKNMIRNHKLARNISDVSWSEFGRILEYKAKWYGRTIVRVDKFFASSQLCNCCGYRNKEVKDLSIRRWTCPVCETIHDRDINAARNILNEGLRILNTSA

SEQ ID NO: 56117 - protein, 375 aa, Fischerella sp.
MKTLKFKLYQHKRNRHLKRTINAAGVIYNHCIAIHRRYYRMFGKYLSCAKLQSHIAKLRKRNSFWQQVGSQAVQDICQRIDKAYQLFFKHNKKGVRPPGFKKVRKYKSFTLKQAGYKFLGGNRVKIGNRVYQFWKSREIEGTVKTLTIKRTNIGELFMIVVVDCGSTPEVNLTTGNIAGFDFGLKTFLTCSDGTKIESPQFLKQALNAIKRANRQHSRKIKGSSNRERARKDLARKHEYVTNQRRDWFWKLAHELTDKFDILCFETLNLKGMQRLWGRKISDLAFGEFLKILEWVAKKKNKLVIYIDQWYPSSKACSCCGNVLESLDLSVREWRCPSCQSINGRDDNAARNIQAVGASTVGIGDVRRAVVPAIAV

SEQ ID NO: 56118 - protein, 438 aa, unknown
  TnpB Polypeptide
LDGIFHFHLDVHLVLNYTIKRKVVNTKMVRTVKLKLLISQEEDLALEEISSVYNKVCDFVSNHVFENGFELNFMTLQKKIYNTTRDLFGLNSQMTISAFKTVTARYKTVKEQLRSNPMKFRDPYTEKLHIIPRDLFWLKKPLSFQSPQACFVRGRNYRILQDGKLSLTGMNGTVKAEFVAPPQFHERVAAGWELGTATLIRRKKTWYLCVPMKSPEEEKTLEREGIRRIVGIDRGLINLLCAADSDGKTTFYSGRKIVDKRNKYAKIRKELQTKHTRSARKKLKLLEQRENRWMTDVNHVLSKALVERYGSGTLFVLEDLEGVSFEEKNLSQRKSKSRRNLRSWAFYQFEQFLAYKAEASGSRVLKVSAKYTSQRCPKCGVVDKTQRDHDAHEYHCRCGFRTNDDRVGALNLLELGRRFLAGDENPKFIKSTTICVAT

SEQ ID NO: 56119 - protein, 367 aa, unknown
  TnpB Polypeptide
MLQTLMVRLDPSDDQYQMLLETMQRFNEACNDTSKTAFDLHMANKIDLQKVVYYDIRERYGLPAQMTVRAIAKVVEAYKRDKSIKPEFRLDGAVVYDQRILAWNGFEAISILTLEGRQKIPIRIGDYQKARMDRGKGQADLILVKGTFYLCVVVDASEESPFDPKGVLGADLSIKYLAVDSDGEIHSRDQVNQTRDRLDSLKSRLQSKGTKSAKRHLKKLSGRMARFSKDVNHCTSKKLVAKAKDTKRAIALEDISGIRNRVTVRKAQRRNLYTWGFYQLRTFVEYKAKVVGVPVIFVDPRNTSRTCHSCGHISKANRPTRDEFRCVQCGFAGSADHIAAINIASRAAVNQPIVSEHNLFPGTSPVL

SEQ ID NO: 56120 - protein, 518 aa, Caldilineaceae sp.
VLDALHGFLTGRLKMATRTAAPKSKAKPPVEVRIERYRIRFDRRAQAALCAQIAGACRLVWNLLLADCERRYRLARAYGQWTDVPPGNRPDLSTSFFTLGQRFTDIRSRPGAAWVRSFLRSPWGRRYAEMDLSWLRDLPYAPVRYTLKYLADAYTAFYARAAAAKAEGKSLGVRQSDGKPKGFPKYRKKFDKDDGFTIPGEVRMDGDRLHIPKVGWVRLEGSGLYRGCKPKQVRIRKEGTEEHPKWYAYVFHEVPVDRLKPPVWTGAVGVDRNVGQATDSEGEVYEVPDDPKLDGKIKRKERKKAKSLARSKSNGKAMSNRGRRIGGQLKKLKRKQKRRRENAAHQHSRKLADRAHTVVMEDLNTKARTRSAKGTVAEPGKHVKQKSGLNRGILKSNWGRTERMLDYKAGQVLKVPPAYTSQTCAACGHVDKANRRTQAHFRCTACGHTANADRNAAQNILARGLALCPTARGTGAAARREALGPCPLPVAMDKSTSTTREQGMPSRPRGSPPWYTGI

SEQ ID NO: 56121 - protein, 355 aa, Okeania sp.
MAQHAGYSRWCYNWGLSLWNVAYKNGYKPNARKLREVFTSHTKPMHPWMKNLSSRVYQYAFINLGEAFKRFFKGLGKHPRFKKKGKHDSFTIDNCGKPIELNGWSHKLPFIGIVKTYEPIELSTKKITISRQAGSWYLSCSYEFNGITTAKKTDVIGVDLGVKTLATLSDGKVFESVRAYHKFEAKLSRLQYLNRHKEVGSANWKKAQQKIALLHIKVANIRQDALHKLTTYLAKNHGTIVIEDLNVRGMLANRKLAKSIADQGFYEFRRQLKYKCQWYGSKLVVVDRFFPSSKTCSSCGHIQDMPLNIRTYDCPECGLSIDRDLNASINLRNAVGLTVNACGRSAADSSGGSRK

SEQ ID NO: 56122 - protein, 402 aa, Escherichia sp.
VKRLQAFKFQLRPGDQQECEMRRFAGACRFVFNRALALQNENHEAGNKYIPYGKMASWLVEWKNATETQWLKDSPSQPLQQSLKDLERAYKNFFRKRAAFPRFKKRGQNDAFRYPQGVKLDQENSRIFLPKLGWMRYRNSRQVTGVVKNVTVSQSCGKWYISIQTESEVSTPVHPSASMVGLDAGVAKLATLSDGTVFEPVNSFQKNQKTLARLQRQLSRKVKFSNNWQKQKRKIQRLHSRIANIRRDYLHKVTTAVSKNHAMIVIEDLKVSNMSKSAAGTVSQPGRNVRAKSGLNRSILDQGWYEMHRQLEYKQLWSGGQVLAVPPAYTSQRCACCGHTAKENRLSQSQFRCQVCGYTANADVNGARNILAAGHAVLACGEMVQSGRSLKQEPTEMIQATA

SEQ ID NO: 56123 - protein, 362 aa, Candidate divison MSBL1 archaeon
MEVKKTVRVKLHYLTNNKRELLEREYRDFQKAVDGEASKLYSATEQQAEKVRRQKNPKNEQPGRLRNDLLRVEEQDTEISDFWVKFPVYNPEEERGESIWCAAIIPRKDRGDVEECEFGDSELVKDGEDWFVHLVIKREVELELIRPDRSSSFSDVIAVDMGVRWIATSVALEDRETKFYGEEVREIREHYKMLRKRIGKKKVRKGKRVIKRIGIKESRKVEDRLHKISRKIVEDAKERDAIIAIGDLGGIRDQEDKGRKFNDKVHKFPFDKLKRFIKYKANGKELELLKWMRGIPRKLVTSAEVKTRRGLDKESSFVEIVVWKIMQTKMEHLILLNELWVSLFEDLYPKWGHHWLCPELQQ

SEQ ID NO: 56124 - protein, 377 aa, Sulfobacillus sp.
MQAKCRALYNWHLSQLKAGAQWSLYDAKKTLQQSRAVDPEINAVYGKLLQEVFFRLDDAMKAFFRRVKAGETPGFPRYHSRHKFFTLKYPGMYIRIEGKTLTLPTGGRGSSKPFPDIRAILTETVPIPFREVAITKDTEGAYYATFLRDVSESPKTADDGSAIAYDLGIKTLATGYSTTGRFVHIGGFTTYRWYNKQLDHIRSLRSRCRKGSRRYRYLTQVYHRVSEKKRRKQRDFLHKASTFLTRQAERAIVLGDLSQQQMVQKSRKATKRTKGLHRSVQNEWGLFQFVAMIRYKAQRTGKDLHIISERYTSKDCSGCGYRQDMPLWKRTYQCPQCGLVMDRDENSARNILARFLARLGPYSAQMQNDVLSVSSGI

SEQ ID NO: 56125 - protein, 371 aa, Bacillus sp.
MLVNQKYEIFPNEEQKEMLDRWLQYCRQTYNSALLDKERKYRQNKENYNRYDIQRQQTLDKKRYPFLKEVPSQPLQEVFVRLKKAFDSFFRKDTKYPKQKKYKDYTSMTFPQFGINEKGKRMAMSFSDNGKLFNTKLGEIDILLHRPLEGRMKQLVLKRQGKRWYAIFCVERQVIPTSIDSNNAVGIDVGLNKYAVLSNGLEYDNPRFLRKKEKQLKKAQRKLSKKKKGSANYIRQVQQVRQFHEKVANQRKDFLHKLSYNLAKDYSVIAVENLNIRNMVRNRKLSKSISDAGWGMFRNMLTYKCEKNGGVLIKIEPAFTSQDCSCCNNRVKKSLSIRTHICTKCGTVLDRDYNAAINILQKAKEELLVTN

SEQ ID NO: 56126 - protein, 489 aa, Bacillus sp.
MGVKIMTKEKEKQYKTQQIWIKKGHRMYSYFKNLCENAKNMYNTTNFYYRQVYTGLTQDKELQPLQKEVLATIENNIEKMNDSQKAAYQQKVAKEKAKQQENQKKIKCNLFEAPTKENPYVDYNFLDSLFKVITQNDYRSLPAQSSQGIMKTVFQNWKSFFASLKEYKKNPSKYKARPRIPGYSRVSEKEVLFTNQDCVIKEHKFLKFPKTKEQLNIGKLGVAEGKLKQVRVIPKYGQYVVELVVDVQNPKEELKTNGRYMSIDIGIDNLATIVTNTGRGPILVKGKNVKSINQYYNKVKAYYLGILRQGKKTNEGPFTSNRLEKLHQKRNLKLKDIFHKASYHIVKTAVEEDVSLIIIGQNKDWKQEVNMGKKNNQSFVNIPHKMLIDMITYKAAEHGMKVEVTEESYTSKASFLDHDGIPVYEKGKKHFFSGRRIKRGLYKTKNNILINADVNGAANIMKKAILRLFGEKEFNTGSVQIFHPQTLVV

SEQ ID NO: 56127 - protein, 393 aa, unknown
  TnpB Polypeptide
MKGMPMPVECAYRFRFYPTPEQADVLNRTFGCVRVVYNRARAMRETAWAERKERCGFKQTNAMLTALKKQPAFAWLNAVSSVPLQQALRHLDTAYRNFFQRRAHYPQFRRKDGPQSAEFTKSGFRYRDGALTLAKMAEPLAVVWSRGLPSAPSTVTVTREPDGRWYVSCRVVAFTETLEGGDSVGLDLGLKDLAVLSTGEKIANPRHLAKRQKRLAREQRRLARKQKGSKNRAKARLKVARAHAAVRHARHDFLHKLSTRLIRENQTVCVETLLVKGMLKAKRHSKSIADAGWGELIRMLAYKAAWYGRTLVKIDRFYPSTKTCSACGTTGHALTLSDRAWTCPDCGAHHDRDHNAARNILAAGLAVTACGEGVSPGVLRHSGQSSMKQEPAP

SEQ ID NO: 56128 - protein, 427 aa, unknown
  TnpB Polypeptide
MSVRKPSGITLKGLNISKGAGKLVRRKVDVRTVCIALEVDADASEKMHQTRRLYGQACNLLVPIVVSDTDRKKRLWQRYNLHKAAYPMVRTKMSVLGAQLACNVMRSVSSMYQSWISNHPNFSKDKKMVLPSISFRNPVVHLDKNTIRFFNNYTEASVYTVNGRVGVRLRPGKFQLSQLAGFLAEELAGTSKENRIYRLGECNLVWKCGIKGTPSRWELHIAIEKKLKEVSLDNLSLNQVMGVDVGENNAAALSTGRIFKAGKMKDDRDKYLSSRARFQRNGSRSARQALRKASGREKRHVEQINDEISKSIIEDAAERNIRLIVLEDLTDIRERIKAGQKVRARLHRWPFRELQQKIVDKACRAGIEVIFVDPRYTSQTCPHCNAIGTRQKHRFVCKNCGYRAHSDLNGGRNLQRLGCLLITQGLV

SEQ ID NO: 56129 - protein, 559 aa, unknown
  TnpB Polypeptide
VRALAPVLVAAPPSGARIRTRLRLNADDEQVLGAVGHHLGRLAGQDLAWRCRLGRGPDQRTDRKRALTAPSSSRWAGAITRTSDDQLARAYANLLDARTGLRRAVKRLWARLPVPVGQARGRGRSRVRGYHSQAERFQKQRRLQVLQARLGEVEGRLAAGRVSVCRGGRRLAKLRHAVAGDAVVGRGKDPSTSQVTKAQWRERWDAERLFLTADGEADKAWGNETIRVHPDEQWLELRLPSPLAHLSNTPGRAPTFRLACPVVFTHRAEEWAAQVATGAVRYDITFDPAKGRWYLHASWRLAVATPPGLEDLRHCRALGVDLNAHHLDAWVLDPTGNPVGPPHTIPLELDGLPASTRDGRLRAAITAVLRLAADRGCESILVENLDFADARHSGRETLGRGRRGKQFRRIVAGIPTRRFRTLLVGMAANHGLWVIAVDPAWTSVWGQRYWQTQLKESTKASATITRHHAAAVVIGRRGLGVGARRRPGVPGHDRRIVAGELPARPDHQRVGREGPGPPGGQRAAEHPRKTRPGERNRLGDQVVQDRSGPPGQDDLPLTL

SEQ ID NO: 56130 - protein, 441 aa, Cyanobacteria sp.
MLVIEAKLKGTQVQYGKLDEAIRTGQFIRNTCLRYWEDNKGVTRNDLQKLCAVLAKNKEFPWAKKLNSQARQAHADRAWSAIQRFYENCRLGKSGKKGYPKYKKFSRSVEYKNSGWKLSADRRQITFTDGFEVGTMDLWSSRDLVWYVAPTGAPASLREKQISRVRVIRRADGYYAQFLVDWDRREEHEFQGKMTGIDLGLKEFYTDSDGNTVDNLRYLRKSERRLKRLQRRVSKKHVQGKKQSNRYHKVRKALAKQHLKVSRQREDKARKDALAVVKSNDLIVYVRRSRCRRLDLKIRNMVKNHHLAKSISDASWYQFTRWLQYFAKVHGVIVIAVQPHNTTVDCSCCGAKLKKTLSTRTHKCNKCGTVLDRDHNAAKNILAKGFKLLAEYLNSTVGHTESDPKRVKAQGETDLWLKNGDALALSWLNELRISAAENPPL

SEQ ID NO: 56131 - protein, 378 aa, Alkalibacterium sp.
MYKGIEGKIYPNKDQQVLINQTFGHSRFVWNQMLNMLNTRYENNPDLNMLSFSKLSSLLTQMKKEYAWLKDVDSKALQNSVKTLRETFDRFFKKQSNYPRFKSGKIHKQSYKTLERTIRFNHNQKYIKLPKLGWVKCRMSLNHINNNNIKSVTVTRKSNNNYYISVLVECENQELPKTDKIVGVDLGLADLAITSDGIKYPSLYLDRKYKKQLHYWEKRLARRRIQAKNEGIDLRSAKNYQKARIQVAKLNQKIKDTRKDYLHKITTELVETYDVICIEDLRTSNMMKNSKLAQNIASQSWRMFRTLLEYKCLAYGKEFIAVNPYKTSQICSSCGSETGKKPLNIRSFICPECNTPHDRDINASKNIRNIGLGMSLSQ

SEQ ID NO: 56132 - protein, 422 aa, unknown
  TnpB Polypeptide
MLALKINITKFIKQEERDRIFKYSKSLAECYNLALTELKTNNDFNAIHPLTKKFQNEHKEIYSKHAQNCGRDAISAVKSFFKLRKTNDKAKYPKHNRKYSTITLDANKQKVTTKDGSTHINFCGGFKFIEDKVIKFTYPQMLLDLSSCKYFNSQLINKDSIKQIIIKVDEGKIYACFVYSEPKKEDKQLNNEFIAIDLGISAIASIYSSKGECFKYQTKRMKSLEKNKDKIKSKLDRKKKYSKKYLKIQQTLKKKQKKITNKRNDYLHKASKHIINYCLKEKIDNIIIGDIETKKLVTKKEEFKELNYKQRKIAHSRNKSTQNEGLLSRFKSFINYKALNKNINVLMVNEAYTSQTNCLTGIRNLSSDLSIRKVNLGHDFIVDRDLNSAVNIAKKYGALWSVHSFNKYSLLNVKEINSNELE

SEQ ID NO: 56133 - protein, 379 aa, unknown
  TnpB Polypeptide
MEQITITAKIQISATADDKVLLNKTMSVYTDACNYVSDYVFYTHDLKQFSLNKSLYSTLREKFGLKSQMTQSVFKTVIARYKTILETQKKWIKPSFKKPQYDLVWNRDYSLTQNCFSINTLNGRVKLKYYAKGISKYFDHTIYKFGTAKLVNKHSKYFLHIPVTYDIEESNITDICNVVGIDRGINFVVATYNSKHKSGFVSGKTIKQKRAHYSKLRKELQIRNTPSSRRRIKAIGQRENRWMQDVNHQISKALVESNPKHTLFVLEDLSGIRNATEHVKTKDRYISVSWSFYDFEQKLMYKAKQNQSSVIKVNPAYTSQCCPVCGHIEKSNRNKKIHLFSCKNCGYKSNDDRIGAMNLYRMGINFLEESQVPSTVTVE

SEQ ID NO: 56134 - protein, 392 aa, unknown
  TnpB Polypeptide
MYSYSLLRPLVFCGVYDRIYPIVQLTVKVKLLPTEQQKQSLLKTMEVFNAACNYISQVAHQNKRFSQVPLHRDCYYDVREKFNLSAQFVVRAIDKVSQSYRVEKKSVHKFKKYSAVIYDQRLLSFKGLDSCSILTIDGRQKMPIVIGQYTQLEGKKIRGQADLIYSRSKFFLCLVVEFPEGAPIDPEGVLGVDMGIVNIATTSDGDIFSGEAVEKVREKTTRFKRALQKCGSKNAKRRLKKISGREARFKRNTNHVISKRIVSIAKDTRRAIGIEELKGFRVTVKKADRERFGKWAFLQLREHIEYKARLAGVPVVSVNPRNTSRTCSNCGYVAKSNRKSQNLFSCNACGFSKHADINGAINIALLGSVNSRIAVHAETLTTAPPGTASQQL

SEQ ID NO: 56135 - protein, 483 aa, unknown
  TnpB Polypeptide
MSDTYYKTFQISIKKDHRLFPYFHQMSQSAKNMYNATNFYIRQVFTAFRKEGSLQPLQKEVLDTIEQYIEEMNERQFKAYQLKVLREQQKPLEKRREVKLNLFNVPSKEKPYLDYNSLDSLFKVMKQTDYRSLPTQSSQWVMKNVFQNWTSFFESLKDYRSYPEKYKAKPRIPNYSRALEKEIQFTNQDCTVKDGRFLKFPKTKHRLNIGKLGYTKGKLKHVRVVPKYGQYVLEIIFESTFETKVFDKERYMAIDLGVDNLATIITTTGSQPILVKGKHIKAINQYYNKMKAHYMSILRHGKKPKEGQHTSKRIERLHRNRHRKIKDLLHKASYHIIHQAVKQNTGTIIIGQNRGWKQESNIGKRNNQSFSHIPHQMLISMINYKAAEQGIEVQLTEESYTSKASFLDLDPLPIYGEEKTINFSGKRIHRGLYKSEKGFINADVNGSANILRKVVPTASAYGIEGLDGTQSVNVSTPLVLSIR

SEQ ID NO: 56136 - protein, 523 aa, unknown
  TnpB Polypeptide
  misc_feature (424)..(457): Xaa can be any naturally occurring amino acid
MKNAPTQPSYFFSEDMLSGSYGVVQNFSKKDIQKQCDLNPTKQTIVTLQFKIKSLKPSLIAKLRQGAMEVNTSWNYCNEISHKAIADRHIWLTHFDLNTLMTGNMRFSDDNPFGFKVINNAVTQCVAAEYVTRREQFNKSLLRWRKSTGSLSSGRSTSWIPFKEEHINITYPYSFIQTTTTQKIKTHKKTGEQTICTVVKETTQHKTVRVAGKNTPVENLYALYSMHNDSGSEYGLPRCLGTPTIKILGTHLKVFNEEYLGYYLYHLGAIVKSGSITENTIGEWFVNLAVAIDADIYREKHCFGKLNINPVAQREKLGLDPGAKTMVVASDGTEYYANGKRCVVSAYADANTSSTPTTLSDNPPLSPYLALEEQIKQAQRNNDWDQVRRLYLKGKNQLKDATSKAALDIIRKTQWINMGNLKIXXXXXXXXXXXXXXXXXXXXXXXXXXXXXXXXXXSTKSSSKTNTTVFIIQVIQVIQVIQAIVFHFKVKHQQQTSTKILIRKTQQKTTTVKPLLQTNQNTG

SEQ ID NO: 56137 - protein, 369 aa, unknown
  TnpB Polypeptide
VNKAYRYRLYPTTEQEILFAKTFGCARFIYNKMLGDRLDYYRKTGKKLNNTPAQYKEEFPWLKEVDSLALANAQLNLNKAYNNFWRNRKHFGKPRFKSKKVGRASYSTNNQKGSVRIEGNKVKLPKVGWVKLCQHRPLEEGSIIKTVTICKTPSGKYYISILVEYENQILPVIPKTFLGLDFAMHGLYVASDEDDAGYPAFLRRAEKRLAKAQRKLSKRQKDSRNWEKQRFRVAVLHETIANQRRDFLHKKARFLADRYDVIGIEDISVKAMAKRKKNGRFRFGKSVADNGWSMFVNMLSYKLAWQGKQLVKIDKWYPSSQLCHVCGYQNSETKNLSVREWICPKCGSHHDRDKNAAINIREGAKRIAT

SEQ ID NO: 56138 - protein, 409 aa, unknown
  TnpB Polypeptide
MNVWLTFLITTVWLVVVKSIRTVKVKIHGSTRADKMLVVWLKAANWLSEIVYKTKELNSNRLAKSHYANLRKIGLPSQLACSACKAVCAAYKTAKTNNQWRLAEFSSATLPVVWRKDFNRTRKGVTLWGELMTVLDSRPLPEGAWKDSRIKRINNQWFLYLAHEVEIQDPVETGCIVGVDMGIKRMLVASNSANAKPFFFHGGVLNHRRSCIRRARAAVQSVGTKSARRLLKRMSGREAAVTGHLLHVASKALIGYAIEVGARKIVVEELSGIRESSLNKGKSLRCRIHQWPYADMRFKIAYKAAAVGIEVEAVSPRNTSRGCNACGHVSASNRKGLQFRCGKCGHRDDADQNASKNIRVRSVSIACNAAETGSVKAPKSIESFNIGSKPCVLHGGLVLVEDSAKSHNF

SEQ ID NO: 56139 - protein, 557 aa, unknown
  TnpB Polypeptide
VTEAKQPPLKRTAKYETLWLNPGKRQTLLGMALAYTRVKDGFLRRLGRTSAWRELDDSHALRAATKAGRLAGVPVHLHDQALFDAVDTMRRHILGAIANTHLRARLFQRFKGEQRHYAFWILRRYVRIGAVLRGEAPDPTPPPGSKWKGIAISVPERKAVVRFVRRTLRKSLGRPPRVRLRRSFALDSTLYSVFEHHGRQYVSIATLVPKKRVALPLRGRGRVSGNVRVVLNPDRGTVSVHVAYDVRIAAQAASGPALGLDAGVTEVLASSAGEKYGLDYGKLLERLSAETTDTGKARNRLHQIAKKAETRGDGAKASRIRRNNLGGKKLRRRREWGEAAVKTVVGQAVRAAVKNRPAVVAVEDLSRLRGRTKSRKLSRIVSRWARTTLRERLEFRTQAGGSRLETVNAAYTSQACPDPSCGYVHRDNRHGDRFHCLRCGWDGDADVVAGMNLLARVGDPEIRLWTPVDRVKAILTERFRRRKETGNRGDDAAAVLSAAAVRGVVDEGNGTPLPAGLQRSRAHNPAPQGLRGYGGRGEKSPRAEREQYEKNLVHRNV

SEQ ID NO: 56140 - protein, 363 aa, unknown
  TnpB Polypeptide
MSDKEYKKLLKQYHKLSDRHILVVETDMPYPDVLKVVALSDKIRKAGNELVSLMRKNYDQLMRTKKYRKLLKLYGNTEDKDKLKALANQLNDMQKSYNVTWDFCRTSMIPIGKKYSIDAVFALTKAEDIWRGMEKERLYYRAMDRSRRATNPQNYNPDGTIKKGKKTWKYSNHYKKLKAKHAELCRINAVNRQLAINEDANYLRSLGDTFVTEPKNASKLMKRAKKTTVNSKGKFNKKKRFGKSIKNRCPSGFQTTVEKKFKVTGGAYIEVSNNYRASQYDHTADDYIKKKLSDRLYRLRDGTLVQRDWYSSFLLYCYDYRTQDIDKDKCITDFGRCYDKEKALIAWIKANHIKILNSGIKVA

SEQ ID NO: 56141 - protein, 226 aa, unknown
  TnpB Polypeptide
LVKGKILKSINQRYNKQVAELKSKKHYEHIRIKGVKRYWQLQDLMHKASRLAVNFCLAHDLGRIVIGTNKNWKQRVSLGKRNNQNFVMLPHAKFIEMVRYKAEEYGIQVTVREESYTSRASAMDFDEIPDFDPKGRNPTTSFSGRRLKRGLYQSSKRHLINADINGAANIGRKELGDEWLKKLLELDGGVFVDTPAVVRNLHASVGVRQSLKMGARSHETVHVSAR

SEQ ID NO: 56142 - protein, 421 aa, unknown
  TnpB Polypeptide
MGANSAISLMAMQKCLALNTLPLTGTKRAKLRGTYGSFLQMAQECFALVKAGKVKSGTELHRLTYNEYRKRFGVAAQLVEEARRYAWGISKTADRISYVVVRFDRRLFSLKTTRRGNPALSVRANTERVGLPIVQDGAWHRLQAHLGAGWEISSVIMKSNLRFLAVLRKDEPPKREGPNVLGVDINAGSVAVTIHSAEGKILRQLYLGQDLAGMQAKFERRRARLQAHRDAHSRSKAGKKLKRLSRRQRNYTRTRCWQLAGELVELARRFNARIAIERLKHLGKRRGEWGKWSRKRVNRIPYGFLRFALEHKAAQESVIVETVGARYTSQTCPRCGLVDKANRRNFHYFRCVRCGFEANADRVASLNICNRAGPEGWRPEQPESQIPAAGGAVNRRVLSGEGVCWQLQSPEGQAPSFSRGS

SEQ ID NO: 56143 - protein, 397 aa, Moorea sp.
MIVLEFKVKGNKTQYAAIDEAIRTGQFVRNKCIRYWMDNKGIGQKDLYRYNTWLRAEYPFVKDLNSHACQTSVERAYSSISRFYDKCKKQVPGKKGYPKFKKFSRSVEYKTSGWKLSLDTKSIKFLDKKGIGKLKLKGTWELWRYDQKLIKRVRLVRRADGYYVQFCVKADVKESLEPSHTNIGLDVGLKEFYTDSKGNTEPNPRFYRKGEKRLKFHQRRVSRKNKGSSSRKKAVNRLGRMHLKISRQREEHAKRLARCVIHSNDVVAYEDLRVRNLVKNHCLSKSINDAGWYQFRKWLEYFGRKFGRETVAVNPTYTSQNCSNCGEVVKKSLSTRTHTCKCGCVLDRDHNAAINILKRALGTVGHTGTWIIDPNAYGELSSTFPGSGLVEQDGSVK

SEQ ID NO: 56144 - protein, 430 aa, unknown
  TnpB Polypeptide
MAWDVTRTVRVRLNVPDNRKSDLHATNSKFQYCVNRTADWAWRSPEDDCVTSKSEAEAAIYDELRHDTDGLHANLVQKAIKRATDSIDNCVDRLADGENASKPEYDTFSIVYDKRAATYYRDKVSLATVNGRVACDYDLPENLDGTPHGEYLTNENYSFSTSTVHYDSEADEFYLHATMERELDVNSPEKAEDSNVLGVDCNVDDHIAVTSTGRFIGNADYLNHQRREFEKRRASLQQTGTRSAHLTFQRIGDRFGRWSEDYLHQCSKAIVEEARHFECTHIAFENLERIRARISDGKKFQQWAFNALQTIVEYKAEAYGIVVETVNPQYTSQQCSKCGCTLEENRNDQHFECLDCGYTANADYNAAKNVARKLALNLQRGQKSPAGGAFCQYALKSGTMTVNATEVASDQYVSAERESTDKPTALAVGS

SEQ ID NO: 56145 - protein, 422 aa, unknown
  TnpB Polypeptide
VLSALPQGSLYRNRITPDSNARRKAMRTYKLKIPYSEQLDVLNAASASVWGECLKLQEVWCYAHGSWGYFPNIKECELWMDKQLSKSQPLHSQSIQEVRSRYFKNWQGFRVLRRNGDKTARPPHKNKRFQTTTWKKSAIRFKEGLFGKQVVLSNGRRGKSLVVNLPKRFDIKNIPSIINLVYNRGQYELHFVYKTEKSVKTESDGIVGVDIGEIHPMVSHDGVIAEIFNGRYIRSLYRLRNKVIASMNTKIGRCERHSKRWWHLVRRKWKRIRTIDNQIMDGLHKHTTKFVKSCESRGIGTIVLGDLTGIRDNIKARKKERQKLHQWAFGKITQLITYKAKALGIKVELINEAYTSQTCLNCGKRNKPQKRSYKCKCGFEHHRDGVGAINIRQKYLGCLGTPVAATMASPVGIRLECRRCSA

SEQ ID NO: 56146 - protein, 375 aa, unknown
  TnpB Polypeptide
MDSMKLTKTLKVRVRDKHAAVLREWARSVNFVWNYVNELSGRSIREQGRFLSAYDIHPYTVGSGKLLGLHSQTVQGITEEYVIRRKQFKKRQLRWRASGGAKRSLGWVPFKARAAQWKNGQVYFGGQYFKVWDSYGLSDYTFRSGSFTEDARGRWYFNVVVDVERTLSAGQDAVGIDLGLKTVATCSDGEKLSSGRFYRDLQDKLAVAQRAGRKARTRAIHAKIANRRKDAQHKFSNALVARCGTIVVGNVSSTKLVKTRMAKSVLDSGWGQLKMMLEYKCDHAGIVFKVVDEKYTTQTCSCCGLRPSTRPKGIAGLGIREWTCECGVTHDRDINAAKNILALGLSVQMWESPSQGGEDVNSDWLQGLRYPCSRI

SEQ ID NO: 56147 - protein, 396 aa, Kibdelosporangium sp.
MSRYRLLPTSDQEVQLLGHCAHARFIWNLACEQHLQWRPGRTSAPDYNEQARQLTEARAESAWLRVGSVTVQQQALRDFAQAMRRFFAGTHGRPTWRKAGRDQGFRQVGVQRDHVQRLSRRRGQVWVPKVGWVRFRWSRALLREVKSYRVSCDRAGRWHVAFATVPEPIPPPNNSRVVGVDVGVAASAALSTGELLHVPGLTCGQRRRLRGLYRALARRQRGSNRHSRVKRTIARYRARETDLRKDWVEKTSTELARGFDLIRVERLNIRGMTRSARGTSRRPGRNVRQKAGLNRSILANGWGLLVARLEQKAPGRVDKVRAAFTSQQCSACGHSASENRKSQAVFRCMACGFACNADVNAAKNIAAGRAVTARGALQPLGEAMNREPQLAPSLPE

SEQ ID NO: 56148 - protein, 579 aa, Haloferax sp.
MASTHLSLPLHLPFEERERHDRLDALTTRVANTLIERYWTPEHLVGIHEYSYQAWKYFDEDEAFAEVDLYLPSRYKRCVMQKVGETLRSHADKREAFQSIQSVLPDHKIRRINTRRIKERLWGSENYIKSGYVDLLIGQLNSYYDKHGRFPESYFKMQECPSYSKGVLPYSADDGPTRGQAVKYEYDEDAQSLTVKLKAPDTLEPETRGDWTWTEHTLEGYEAFHELLDHGSLSAPSFHPAQNKTGDEYYELSFPVEVEHQEKPDDVESVLAIDGGLRKDATAVVVDEDGEQLSVPYFIQNTERERMRNLARERNQLNSKLAYLRREGRDHTDSFTHVHAEYERANNKIRHKREQLVHDVANQLLALALVYDVDAIVHEDLRSLSPPRGEGQLSWELSSWARREIISKIEYRADIAGVHVRKVRPGNTSRSCPRCGSTGHTTKSPDHSFEVWHGGHFRCDNARCGFQADRDYVGAVNVARVFFSETATLTHDFTSSYIGDSEIVPAGRSAGPRLAFGTAPLAFTEQSEVVTAGGGSCFIAPAVTPTETKNNSSNTNSVSSPATHSTSQFVKMTAVYCRK

SEQ ID NO: 56149 - protein, 513 aa, Microcoleus sp.
LTRSRFSCFFKVSVAFQGYTNYTVVWEGRKKRKFPMQLTYKYRLKPTKAQLGTIVAHLELCRRQYNYRLSERFRWWESTRTPVNACPLTASIVSVEEIYQNIPLTRVQTRDGRKKDESGNPLTRKGDVFSNVEGGYVQWQAIQLADLKNTKKLFPDYKALNSQVLQDVVNRVETSFSNFTTPDKNGNRRGKPKFKGFDYYKSFTYPQLDNLDIIKDEQNIICVNLAKIGQVPMVFHRPIPTGFTVKTGTVIREADRWYIALTLEDKAVPVTVAEIQPTDENTLGIDLGITNYVYLSNGERVENPRFLRRYAEKLARLQAKLASRVKGSKPWQVIKSKISRLHQFVARARLDFQFKTAHELFRKCDVLVVEDLSVKNLTRRAKAKTDIDNNGNLVYLPNGQSAKSGLNKSMLDAAHGQFASVLKYVAWKLGKNVLLVNPKGTSQYCWNCLNKVSKELSERCHSCQCGESLERDENSAKLIKKIGLIHQSGGGASSLKKALAQREIEACGLTVLR

SEQ ID NO: 56150 - protein, 395 aa, Microcoleus sp.
MTLKAFSYRFYPTPEQEILLRRTIGCTRLVYNRALAARTEAWYTEQKRVGYAETSSMLTEWKKTEELDFLNAVSSVPLQQCLRHLQTAYTNFFDGQAKYPNFKKKRNGGSAQFTKSAFKFKDGQVTLAKCTQPLSIRWSRTLPEGARPSTITVKLAPSGRWSISLLVDVEIEALVKTNSQVGIDLGITSLVALSNGEKIVNPKGFQAKYRKLKRAQKALSRKQKGSNNRHKARRKVARVHQEIADTRKDNLHKLTTRLVRENQAIAVEDLAVKNMVKNRKLALAISDASWGELVRQLEYKCDWYGRTLVKIDRWFPSSKRCFECGHIAQKMPLNVRSWDCRNCGTHHDRDINAAKNILAAGLAVSVCGATVRPEQSKSVRAGAKPRKGQKQKPKS

SEQ ID NO: 56151 - protein, 413 aa, Marinobacterium sp.
MKILKAYKYRLKPTDEQVNLLYRMAGCGRVVFNESLEMLLSIARKELSFVGDKKALYNELNSLLPKDRITLAKKFPSSAALNKHLTQWKKKTELSFLTEAYTDNLQQRQRDLRDRAVKDWCSGKRGFPVFRTRKLAHHSTLRFVNFPKYCRLEGRHAKLPNGLGLMRYYQSQPIQGLPKSCTVTLDPCGNWHLSILCEVEIEPARTGTGAVGIDMGVAKNMTLSNGVVYKGVSSFATHRDKLAKEQRRLSRKVRGSANWKKQKQKVARLHKRIADIRYDYQQKATTEISKTHAMVAVEALKVANMSRSAKGTVDDPGKNVRQKSGLNRSILDQGWGELRRQLEYKMTWNGGLLIAVPPHHTSQTCPACLHVSAENRTSQASFACVHCGLVENADVVGAINVLNRGLAALESAA

SEQ ID NO: 56152 - protein, 381 aa, unknown
  TnpB Polypeptide
MKAVKVRLYPNAKQQQIIASQIGAVRYVYNRTLALRINAYKKFGLKVGKFDLIKHVTKLKNRDNTSWLKEADSQALQQSVANMDSAYKHFFKGGGYPKFKSKHHSRQSFQYPQRVKIENNKLYLPKVGWVKCKGLRDDITGKIKTVTVSYEAYQYHASILFDTGDIKPKINTNNKVIGLDVGVSLMIADSDGNKIKPLDLVRELSKLRIKAQQLSRKKKGSKNRAKAKAKVAKQNLHIANMRKDFLHKLSKQYSENQTVVVEDLKIKNMTKATKGTVEKPSKNAKAKRGLNRSITQQSWGMFFELLEYKLKANGGELIKVNPKFTSQTCNKCGHISKENRQSQSKFVCTSCGHTANADINASKNILDRGIHGNNACLKIAS

SEQ ID NO: 56153 - protein, 440 aa, unknown
  TnpB Polypeptide
MPRLHGFTKTLRFNLLVPDSINQQMYCSTDLYRQVVSYYLQIFLDHQELIGHSQWLKMAETLTHRTKSNLQPTYPFDEEYPNLPSGIRRAAISEACGLAEAWKSNYDKWLTEKQKTEEKNVKRITKGKKPVVFKEHPPQYPVENNSWVSYYNTEFKWLDKHHILLKLYTGSSYSYRKVALFQPLTVPEGYATGAPSLIHKPTGWELHVPLVLVKKSGLRKIKYIVNDPAARICTVDLGMNRHAAITIQDTKGRVYATKFISGAQDNHLRKRYLEKIVQLQKNTMIIPEGERFAKDLWDKVSNFNNNIAHKVSRQIVDFALIHGAKIIVFEYLDNLRPEKGTKSHWLNRRFGYWVKGRVFRYTQYKGLHAGIVTSRVSPQDTSARCPYCGYLAIERYTPGKEKGVDLARCANCGVHDINADFIGALGIGRNFRLKHLSHAG

SEQ ID NO: 56154 - protein, 396 aa, unknown
  TnpB Polypeptide
MIISYKYRAYPDATTETRLNAALDTCRWLYNKLLEECNTAREHGFTPTMREMQARIVTLKEENPFLKGVYSKVLQMVNYTLWSNIAALSQTKKRGRKIGKLRFKSASRYRTLNYNQSGFKIDREHSAVTFSKIGTIPFAMHRPYSGVVKGVLITRSGDNWYVIIQAEQDVSEPKKEGRSVGIDVGLDSFAVDSDGRVIENPRFYEHSRDRIKKLQQSVARKQRFSKNWKKAKGKLEKAYDHITNQKNDFLHKLSRRYVDTYAAICVEDLNIKYLKENGKSRGLRRSIHSASWGRFYSYLSYKAESAGTELVKVDPRDTTQMCSNCGSIVKKTLSERVHECPYCGFVADRDYNAAVNIHRVGMEQPFEPVEPRPLHHISVVQVLAMIAGKPRPRGAG

SEQ ID NO: 56155 - protein, 468 aa, unknown
  TnpB Polypeptide
MKHKNTNEITLKIKYHTDNSDRICDYIKNYNNVLRFVYNRLYDNINHELSTKDLLSDIRTINNIFVDTYFKNGAIYEARSMFSDSKEQEHKVIFGGKKLFIQRCQNKISKEEFNIKRLHPLQIVGASYNNGNCKFQIINENTILFKPCRNEHFILHLSSVGKNYTKYLTKLIQAQNNCDIAITYKLGLEYVYISFDLNKLNKPKETNCIDNRIFAIDLNPNYIGYSVIDWKNSDNFNIVNSGVISNKPLTDYDKSVIRSSDSPEHHYITNKRNYEVTKIAHDLVKLAKHYQCQIFAIEDLKIESKDNKKGNRYNRLVNNQWNRNLLINIITKDCLQNSIRLQKVVANFTSFVGNLVYRSLQLPDMILASIEISRRAYEFYHQYIIKDKPITKNIVFNSSELAKISIEKSLEEFGYTKTCDSIKDLYNKLKKTRCNYRFPLEQSLLLRPKQSLFSKNYIKRMIIYYEFK

SEQ ID NO: 56156 - protein, 516 aa, unknown
  TnpB Polypeptide
VSNLPYGTKSKTKTFILTLPLVTDMHDEAVLHNNFKRYSQAYNWLLRKTNRMWHQVRKTKVYKQLLLDIAATPKDSDERKALYIKRTELLSRYGFSGASFEKIIKPFAKYYHLHSAIAQKIAARVWNAWEKFFYKNGKAVHYKKFDDFSSFAAKSNATGIIFVNDTTPYIKFCGKRILVSVRKGNTGRYQQEALKHQVKYCAFKRNIVHGRWRYFVQLALADEPPVKCDRYGVIKHSFKNGKIGLDIGTQTLAISGTDICDLRVLAPSAIAELRNGLVKTIARIQRAMDRSRRATNPQYFNANGTIKRLKRTNGRKQIRKWRYSNRYFRLRYMLRDMHRKLATVRKTEHNILANELLAHGNIFYVEDMNYKALQKRSKDTKVNIKTGRTHSKKRFGKSLGRCAPAAFLATLEQKAKRYNGQVVRVSTFATKASQFDHTDESYTKKKLSERFAKLSDGTVVQRDLYSAFLLAHLNKNLVTYNKQSIKKDFPQFLTLHEQTTKRLQSSHDWLPASVGF

SEQ ID NO: 56157 - protein, 482 aa, unknown
  TnpB Polypeptide
MSYQTTKLLLTGNITDQTKDVLVFLCHEANNLWNTAVYQTRQAHFSSCGIREFFDKNDCFRRQFKDKKVKISYYQLCEEFKKSPHYQWLGGQQGQQVLKSVVEAFSSYNELLEMWLNGEVEHKPKLPSYRTKGGLCDFSFPAQSLRLNYENGCWLLPMSKLIKEYWVKEEFSIPSVNYIGEENIAEVRILPQHGKLWAELVYKVKEKQAVRLDYSQALGCDPGVNNLLTCVSTLGKSFIVDGHKIKGANAKYNKTVAKYKQGKSDFYWDEYLDELTHRRSCFMRDAINKAARFIINYCLKHQIGNIVFGWGQGLKTNCNLGSKNNQNFVQIPMARLKNRIKELAASVGIKFTETEESYTSRSSFLDHDCLPVFGGEKPANWKASGKRVKRGLYQTRNGKLINADCNGAANILRKVSTQLGFGLAEVCREGLSVPKRYDVFSSLKKLYRKCGDPPRSPHEMAGALVRRCKGGKTNNSIANDPS

SEQ ID NO: 56158 - protein, 389 aa, unknown
  TnpB Polypeptide
MNAAPPSYGEDTINLGAVDRCYAVIENNPFTDGEIILKIVIRGVWYRLFFPFDNTRFTEGKVTLPLIKVENNQPVFIFSVVTDSPVVQFSSDYTIGVDVGINDYTTVAVRNTKTGKITYQTTLSRRVHSLWNSVRASEKQVRQLREKAVSLSLYDRQAIMATLDEADLHRASASRKKRELAILAAQEIAYLSHFFGNAVVAVEDLSWITNTMQNGRWNRGAFTQWLTHYVSQNGGWVVSVNAANTSQLCHVCGSEVAHPAHKVSRCAKHGIMDRDVNAAANIAARAVPKVEKARAKRSKNSKLQPQAPLKTPVARCSLKYPGRDRTKNCPTPKRKKKGVNTLSSPARVQASRVDTSVLADCLTYGVAGTTSHAAIKQGTITKYRLCSPI

SEQ ID NO: 56159 - protein, 361 aa, Proteiniphilum sp.
MKLKLKIKLLPTSEQAGVLIQTMREANAVCNAISDVAWQNKVFNQFKIHNLCYHGFKSTFNLSSQMLVRCIGKVADAYKLDKKTKRMFKPLGGIAYDSRIMTYKSDSIVSLWCIGGRQKIKFVCHNQNYMPYIKGEADLVYKKGKFYLFQTVDVPDEDIDDVEDFIGVDFGLTDIIVTSDGKKHTAETLNNYREHRQKVRSSIQRKGTRSSKRLLKRLKGKERTTATIINHTISKSIVQSAKMQGKGISVEDLTNIRFTSKRRNKKFRVKLGRWSFGQLRSFIDYKARLNGVKFVVVEPAYTSQTCSVCHSIGTRKNKSFTCTNCGNDMDADFNAAKNIATLGAAVNQPEKSGMYCLLHTA

SEQ ID NO: 56160 - protein, 369 aa, Proteiniphilum sp.
VIRSIKYELKLTKGQTKKLNQSFGNCRFVYNWALDRKIKAYQEEEKKLSCFDLMKELTQVKKKEEFEWLNLSGSQQLQQSISNLDNAFTNFFKAKKGFPKFKKKQNRQSFRIPQNVKVDYENFKFFIPKVGWVKFYKDKEIKGAIKFATVSKTPTNRYFVSITFETQEQKKFGKGSVGIDLGIKYLAITSDGEVFENQKYLKSNLKKLRVEQRSLQRKFKKGLKEQSNNYYKQGLRVAKLHEKITNQRKDLLHKVTTYLATTYETVCIEDLNVSGMVKNHNLALAISDCGWGVFRQFLEYKVKDLRVIGRFEPSSQICNICGDRNRNLTLKDREWVCSNGHKLDRDINAALNIKDFGLRASTLNANVSH

SEQ ID NO: 56161 - protein, 382 aa, Enterococcus sp.
MEQLKAYKFRIYPTEEQEIFCAKSCGCVRKVYNLMLDDRKKAYEEVKNDSSKKMTCQTPAKYKKEFPFWKEIDSLALANAQLNLDKAYKNFFRDKSVGFPRFKSKKNPVQSYTTNNQNGTIALIDSKFIKVPKLKSLVRIKLHRQPKGIIKSATISRHSSGKYYISLLCKEEIIELPKTNSTIGIDLGIMDFAILSDGQKIDNNKFTSKMEKKLKREQRKLSRRALLAKNKGTNLFEAKNYQKQKRKVARLHEKVMNQRTDFLNKLSTEMIKNHDIICIEDLNTKGMLRNHKLAKSISDVSWSKFVTKLQYKADWYGRKIIKVDKWFPSSQICSECGHKDGKKSLEIREWTCPVCHTHHDRDINASINILTEGLRLHSMGLA

SEQ ID NO: 56162 - protein, 380 aa, unknown
  TnpB Polypeptide
VKVVRATNTPLKFATASKRGELQKILPEYAKVVNHFIGLFWNLDEKPSNKICTADLYNTAETWLSPTMRQIASREAVAMVLASKERDGADAVMPAHNGKSMRLTEQVVKYSESETGSFDFWLTFTAIAADKSMKFSVPLKRHKHYNRLAKRGKLCKSYTVSDTGIQFAFEIETGPKKTGTKAIGIDTGINALASLSTGEQLGRDIKAAIERIKRCRLGSNGQQQAIRALKQRIAEVAKSIAQRDDIDLVVVEDLHNLSHNTKLKGRLSRNIRSSIGKWNWRLWLQRLEWACELHRVKLRRVPPQYTSQTCSHCGYVDRANRNGELFRCQECNYADNADLNAAKNILSRFTTGIYGSCYRGLLPSVSDSKLALTQFEFASA

SEQ ID NO: 56163 - protein, 427 aa, unknown
  TnpB Polypeptide
MQLTERHLIKPNHKLYQTLDDLTFKAKNLYNHGLYLYRQSYFEYKKDSEKSVLSWIDIDRNLRQQNHEDIRALPSKVANAVLKNLGEAISAYWKLVHLKRNGDLNQTPKLPHYLHKTNGRYPLSFNYQTFGKTRGLNHELILCPKGLCITIPTKVDNPKQVRIVPNHHNFIIEVIYDVEEPVSNTTSKYAGIDLGVDNFATITFSTKNQPLIIKGHELKSINQGYNRLIAKAQSLLPESQKTSKSIHRLWSRRSWILNSKIHQITAFLATLFDEMQIETVFVGKNKNWKQELPFGKVVKQRFAYLPYETFIEQLRYKCQLRGISVVSQEESYTSKASFLDDDEIPVYGDVENPRFSGRRIKRGLYRSGNGKIINADVNGSYNIMKKGLISYHRFQHIDDPIIQPLVIKGIGQVSNKTLVNVYVTPNR

SEQ ID NO: 56164 - protein, 377 aa, Bacillus sp.
MTMLLSQKYEIFPTKEQKEMLERWLQYCRQTYNSALLDKQRKYKEHQQLYTRSDMQKQQVIDKKRYPFLKAVPSQPLQEVFLRLKKAYDGFLSGDTNYPKLKTYKDYNSLTFPQFGFKSNGKHRFAMSFADNGNLYNKQLGEIEIHLHRPIEGTIKQLILKRQSKRWYTIFSVERQDVPPSIDMENAIGIDVRLNQYAVLSNGMVFENPRFLLQKEKQLRKAQHNLSKKKKDSTNYKKQVERIRSLHEKVANQRKDFLHKLSYHLTQMYSVICIENLDIRKMVRNRKVSKSISDAGWGAFRKMLLYKCEKFGGLLVKVDPAYTSQDCSSCGNRVEKSLSIRTHICTKCGTVLDRDYNASLNILRKGLEQLLVRTTEE

SEQ ID NO: 56165 - protein, 419 aa, unknown
  TnpB Polypeptide
MPRYECRVARIDVDITTHWLLSQMAWASTKLYNTALWDARMRWERTGKIPSGFDLQKVVLASPYHSYLPAHTYQHPAHQVWNAFRAWFKLRKKDKTAHPPGFRPKAMPSTFMVDAFKAIDGNTVQITLGPSLREKLSYPDKRLTLHLNWNTPFPADGKIVQMDIVPKEGYFECHAKITLPEPVWRLEGDVKTIDLGQRNPVVMAGENGTDIFKGGAILATLHYWNKEKARVQSQIMERSGGKRHWSKHLQRMSSRGNHQVKQTVHSLSATIAEMCDKDGTKEVVVGDLGGIKKEKNGQGKRWNDKSSQNWQQFPVRTLVAQLGYKLARHGIRLSEQDERGTSRGRCSLCGCMDRSKLHRVHRGLFHCEECHAYQNADENGAWNQRARYLHQEDKPSMGSSGRLASPRVWRWDNHRWVVA

SEQ ID NO: 56166 - protein, 191 aa, Vibrio sp.
LATLSNGEVYEPLNSFRKLESILAKLQRQLKNKKKFSENWKRLKRKIQKVHSKIANARTDYLHKTSTKITNNHGMIAIEDLKVSNMSKSAKGDAENHGKNVAAKSGLNKSILDQGWYEFRRQLTYKQDWKGGVLIAVPPHFTSQTCPCCEHVSKDNRQTQSNFECVECGFNENADLVGSINILSKAHELMA

SEQ ID NO: 56167 - protein, 373 aa, unknown
  TnpB Polypeptide
MQKRTASIKLVTTTQQSALLSAVQRESARVCNTIVLLAHKNNCWNHVKLHRLAYYPIRATTTLGSQMVCNSLKAVCNAFKSLNYKKTKELPINTFKPSSSVHYDKKTYSFKDGALSLYTLSGRIVLPMALGKPQKEYLRIGTPKEAQLVYRNKKWFFNLVFDIPDVPLSKLSGKVLGVDLGENVVAATSSGKLYGGRQLRHKRDCAVAQRRRLQRKGTKSSKRKLKTTSDKEARHIKHTNHLISKAIVHEALDSECHVIALENLTNIRDRIKATKRVRYRLHGWAWAQLQRFIVYKAQAAGLKVVFVNPAYTSKTCAECKQLGIRVKHRFVCKVCGIQRHSDLNASLNISRIAASADAATGAVNHPNMEAALA

SEQ ID NO: 56168 - protein, 549 aa, Bacillus sp.
VKKAYFSKRIYKTDVAHELVDILTQTIETFNTAKRYAFQTIVREKRWGRKMHTDSLHLVLKRKFQLNDYYANSANQEAKAMFAGLTELQKMYEKQTQEKLKKLKKKLKTERMKLTQLRKIKQSCVKGKIAFPKNSRFSKKNNIIGVSRKNDTLIWFNEYLFEHQYIDVQIKWTKAKMGRLMHRQFRLEQKLVSYQAHIPSSVFGSKKLFRSQFTKDDMVQNHDKWKTLFSRARNKQLIVSGRKDAKHGNFVFQYKIENHELWMTTSEGKPIVFPSVTFPYGQESVETVITNQLQCKDKKAYGKPIAWSVEDHGDYYIVKCLVDVQANTNTNYSKSDGVIGMDCNLDHFAWANVSRDGNYKGSGSLRFSVLGKTSGQVTKIIEAEAIRLVDLALQYNKPIVMEKLDTTLSKTGDRYGNKKANRMKSMFAYQKMTSAIMNRADKMGVAVFQVNPAYTSISGKMKYMQKLGISIHQSAAFTIGRRGLGYKEKVPTALQTYITNIKAHHWSQWHALDKILSFRTHLFYKLFTGKQIHNHEMTDSETKIIAKLF

SEQ ID NO: 56169 - protein, 404 aa, unknown
  TnpB Polypeptide
MKLNRQVRLYPNKTMRQVLDSLCDYRRYCWNEAIACWNDQYEARLIGLPQSVLDKLKSKTELTPEEEELVNQYPNPSHYSVRDELVAQKEDWQTAFSSRVLQQAVKDVATAWNLFFKHQDSAGKPTFKTRKAPKQGFKTDTARIRNGQLLLDKPRGYQGQWKPIRFKGLIIPDGKLALCSITRVNGRYTATFTLEVEPTLLPKTGQKTAVDANVDHFDTTEGRTSLKPDVLNPLYTRVRHYQRILARKRSTNPRTIHSKGYQATRTKLQRTYERIARIQKDLLHKFTTDLYQRFDIVVIEDLDVKKMQMSKRAKNLHRSLFGQFRQMMEYKSQKFDKTLIIADRYYPSTQRCSSCGFVKTGDDKITLSGNQKHGTRHNEYICYHCGYTDDRDHNAVLNLLALAE

SEQ ID NO: 56170 - protein, 401 aa, unknown
  TnpB Polypeptide
MRTEFITTYRYRLLPTQEQLAQLREFAGCCRYIYNRAVAELNVDDAPERVSYSTLCKWLTSLKRDPDVPWLKKAPSQSLQQALKDLTQSCRKVTDERRRGREAHVRFRSRFDGLGSIRFPQNVRLEEAWGTSKPRAFVVLPKLGTVEYRRSRTIPGNAAVVQATVREECGRWYVSIVVRETLDVPNVNDISAFGVDLGVRNFAVLYDGVETIFRDIPEAIKRKLRRLDERIRRLQTIRSAKIERKAFGSAYHKLCEKIRKLWLKVRRIRQDFLHKLTTWMAKSQHHVTVEALEVQRMTSAEGEHKRSLNRSILEQGWYLFRTFLRYKLECADRYFTEVNPAFTSRTCSMCGNCSKSNRDGEQFKCSACGHEDHADANASKNIWAAGQAVLRGLLVPVPADR

SEQ ID NO: 56171 - protein, 431 aa, Nonomuraea sp.
VSRFRLQPAPAQEAALAEHCAHARYVWNLAVEQHAHWKPGRKSAPGFAEQCRQLTEARAASPWLAAGSVVVQQQALKDFAQAMANFFGGTHRRPTWRKRGQTEGFRIVAVKTGDVRRLSRNVGEVKIPKVGWVRFRWSRAVPGGAKSYRVTRDRAGRWHLAFAAVPEPITGPGTGQVVGVDRGVTVSAALSTGELLTVRGLRDTEKARLGRLLRKLARAKRGSNRRAKVKTAIARLKAREADRRKDWAEKTSTDLARRFDVIAVEDLKIRSMTRTARGTLEAPGRNVRQKAGLNRGILAAGWGRLVQRLEQKAPGRVQKINPRHTSQTCNACKHVASESRESQALFLCVACGQSGLRRLRASGQRRRQRGQEHAGHGRRACGHCAGRPAIRRAGEPRTSTRPPLGGVGKVGIPRLRAGEDVNWHDKQFSCL

SEQ ID NO: 56172 - protein, 446 aa, Lachnospiraceae sp.
MKIMSTYSVKIKEYNHIFKDTIILYRRAVDFYIDVMLKEWDEFSVCSNQNKAVNLAESYSVTSKKRPVVIYDLAVNFYKFPSYLRRAAIAEAYGKVCSYKSNLDNWENTDRNLRGEQPSFPKAGYIYPAMYRGNTFRRIDDLHAELKVFYHNTWDWITVSLRKTDVDYIKKYCFSRKECVPTLQKRGKQWFLDFAFEEKVKLDETDIFDQTVLAVDLGINNACTCSVMRSDGTILGRRFLRLSREYDSLKRKTDRIKAAQRHGSRRLSRLWRLADGVNDDIAVKTAHFIVDMAQEYNVNTIVFEHLELDGRKRGSKKMRLQMWKARYVQSMVADKAHRLSMRISRVNVWGTSRLAFDGSGRVLRGNESAKTKGKYSLCEFSTGKIYNCDLNASYNIGARYFIREIIKSLPVTKGQQLLAKVPEAVYRSTCTLSTLISLNAELCAAA

SEQ ID NO: 56173 - protein, 235 aa, Microbispora sp.
LEFHANKHAILGWPGGMMCGVAQMVKRAYRYRFYPTPEQAGDVVGVDAGITSLVTLSRPIPDLTDENGKVANPRHERAGRRRLAKAQRSLARKAAGSANRAKARLKVARAHARIADRRRDFLHKLSTRLVRDNQVVVIEDLAVRAMVKNHSLARAISDAGWRQLRSMLEYKARWYGRELVVIDRWFPASKLCSACGALQKSMPLNVRVWECACGATHDRDVNAARNILAAGLAER

SEQ ID NO: 56174 - protein, 347 aa, Microcystis sp.
MEKAYSFRFYPTPEQESLLQRTLGCVRLVYNKALHLRTQAWYEKQERVGYAQTSSMLTDWKKQEELDFLNEVSCVPLQQGLRHLQTAFTNFFAGRTKYPNFKKKHQGGSAEFTKSAFTIKDRQIYLAKCTEPLPIRWSRQIPESCEPSTVTVRLHPSGRWHISIRFDDLTIKPLSVTDKAIGIDLGISSLVITSDGDKVSNPKHFKKHYRRLRKAQKSLSRKQKGSKNREKARIKVARLHAQITDSRKDHLHKLTTQLVRENQTIVVENLAVKNMVKNPKLSQAISDVSWGEITRQLAYKCRWYGRNYIEIDRWFPSSKRCSNCGYIALENAVKCSRVGLSRLWDSP

SEQ ID NO: 56175 - protein, 393 aa, Lentzea sp.
VKRAFRYRFYPTETQAEELSRTFGCVRKVYNLALQVRTEAWTQRGERVGYMATSALLTAWKRTEELAFLGDVSAVPLQQALRHLQTGFTNFFAKRARYPRFKSRKKSRAGAEYTRSAFRWRDGELMLAKMAEPLDIRWSRPLPEGVAPSTVTVSRDAAGRWFVSLLCEDPGVRPLPTTDAVVGIDVGLDQLLVLSTGEKIGNPRHERRDRTALAKAQRALCRKQKGSSNRDKARVKVARVHARITDRRADFLHKVTTRLVRDTQTFVIEDLAVSNMVGNRRLARAISDAGWRQFRQLLEYKASWYGRDVITVDRWFPSSKLCSVCGALAAAMPLHLRTWTCGCGATHDRDVNAARNILAAGLAVTVCGAGVRPQRNTPGGQSATKQKTLRRKL

SEQ ID NO: 56176 - protein, 436 aa, unknown
  TnpB Polypeptide
MSAVVRRTNTFAVRPLSTQDEELLRDLLDASASLWNELNYERRQQFFDGESVWDTADYRKQYVGVLGSATAQQVIRKNSEAWRSFFAARENGEDTAPPGYWGNEDDGRELRTYIRTDQYTLETGERSRLEIPVGQDLKDEYGLGYHDRLRLEVTGDPKWDGEQGRLELYYDEVDDTFRAFQPVTVPDSRRDSPLASEAAALDVGANNLVACTTTTGQQYLYEGRNLFDRFRETTEEIARLQSKLREGRYSSQRIRRLYRTRTRRRNHAQEALVRDMMERLYAEGVATVYVGDLTDVLSTHWCAEVNAKTHQFWAFRTFIKRLSHTAEEYGITVEVRSEADTTRTCPACGEQEETDRDGDMFRCPCGHEAHADLCASRTFLERQAGKEVGSMARPVRLTWDDHNWSELPHSPERASPNEKRTNRSTGDGKLASVGTA

SEQ ID NO: 56177 - protein, 425 aa, Helicobacter sp.
MTISHKIELIPNNKHIAYFKKAFGCSRFAYNWGLAKWQEYYKQGVKKTHLDLKKEFNAIKKEQFPFVYEVTKYATQQPFLNLNLAFQKFFRDLKQGKVSYPKFKKKKDNQGSFYLGGDIVKFESKNNKQFLKIPNLGSVKLRENLRFQGKIHSCTISQKANRFYASFSLEISESEFKRTHKDGKQTKLGLGIDVGLKSFVSLSNGLSIQAPKPLDKLTKRLKRVSRSLSKKQHPKTKSEAMQGIKKSNNYLKQSVKLNKLHTKIANVRNDFLHKLTSSLVRHYTYFGLENLNIKGLMKNHRLAKAISDVSFYEFKRLLSYKAEYNNRRVIGADKFYPSSKTCSKCGSIKETLTLKERIYECENCGLKIDRDYNASLNLYNLIPQKIGQVLPEFTPADLTALQYDLAINNIATSKVETGIQQENYL

SEQ ID NO: 56178 - protein, 448 aa, Nocardiopsis sp.
VDVRLWPQQGGEGVVEVYRGHNARLSLEPEQVRKLDAQAHAARALWNLLHDWWTMVGENRRVSVKDADAVIRQARKDIDWLAVLPAQAAQAVLKTYVQAWKNCWEGRAGRPLFKARLRSPMSVDIPQGQHMDITRVHRRWGMVNIPRAGRVRFRWTRDLPVGRRADADNRITGARLVKDALGWHIVFRVHTLEEDPQLHSGGDVGIDVGVTVPLALSDGDHHDHGRPSRMKDGKADRDKWLTIEEKAELARCEHQAAHRKSFRERGERTSRRLSETYDRIRALRARAKRRHLDWQHKTTTDIAKTYGTVVVEDLNITNMTRSARGKVEQPGKNVRTKAGLNRSISQEAWGRTVSLLEYKLARRGGALHRVPARGTSQRCSMCGCTTPGNRESQAVFVCKNITCGWSGNADYNAARNILHLYRMGLALVPAAGRAAVRRARRAEPATAR

SEQ ID NO: 56179 - protein, 261 aa, unknown
  TnpB Polypeptide
VSIWTLDGRQSVPFVCGARQRQLLAAQHGETDLALVNGEWYLFAVCEAETPELIDVEGVLGIDMGVTNIAVDNDGETHSGKAIKNIRYRHRSLRNKLQHKRTHGARRRLRKLAGQERRFATWVNHNLSKRVVAKAERTKRAIALEDLTHIRTRVRARRSQRATLHSWAFAQLRAFIAYKAALAGVPVHAVDPRNTSRTCPACGCIDKANRKTQASFLCTSCGFAGPADVIAAVNISRRAPVSAPHYPVADSSVVQGKAHQL

SEQ ID NO: 56180 - protein, 415 aa, unknown
  TnpB Polypeptide
VTAYRSYEERVKAANGESAKYVSQGWKRTVNGSAPSYGEDYVNLGAVDKQYAAIENNTFLDGEIILRMVIQGQWYRLIFSFDNKRFTEGKVTLPLIKIQDGEPVFIFTVVTDNPVVQFSGDYTIGVDVGINNYATVVVRSVETGRIVYETTLSQRVHSLWNSVRMSERQVRFLKKKSDRLLSKRQERMAALDEAQLHRQAASRKKRELAILAAQEIAALSHVWGNAVVAVEDLGWVANTMRNGRWNRGELVRWLTHYVTQNGGWVVSVNSSNTSQLCYKCSSKVTHPTHKESVCPEHGVMDRDVNAAVNIAARAVPRVTKARVTRAKNRKLRPQAPLKTPVARNSLKYPGRDRTKNAPTPKRKSHRFISKGVILPSCPARAQAPRLMASVLADQGILGTVQAALKQGNVVYKCRL

SEQ ID NO: 56181 - protein, 203 aa, Microcystis sp.
MDRSNLKLALKGASLSISEDITADFKVMRSLRLCYNLDDLISRSTKVKAKTYKCHHNTCNRLILSIRNLVDELHHKVARFLVENFDGILLPTFEVSEMVLRSGRKIQSKSVRQILTWSQYRFKIFLKSRAFEYGKTVINCCEAHRSKTVSRTGELIDNLGGKKVVKSEIDGRQMDRYPNGVRGFFLFALVDTPSFKDSLSVHC

SEQ ID NO: 56182 - protein, 385 aa, unknown
  TnpB Polypeptide
MFEQYRWYYNATVAIVYQHYGADKITDIKSYSNRSIRDLIRKYEYTEEKFEHLVFQSFEYKEERNETPIPPWWNKNEVHKRLPRGASDKFTSSLNSAISNYKNRNVKHFEMKFMSKKRPTDYLHFEDKQFPSFIRKIKSNYWFTNSKGRRDRISFSDITTIEKGIEIIYEKDTGRYFLHYPVDRNWFPEEDRRNESQVKFISEGDRIISLDPGVRKFLVGYDPRGKSIFIGEDAHIELTELLVEIDKTTTHEIKCKLWRKVKNLVAELHWKTISFLVENYDVILLPDFRVSQMVKGKKLARITKRLLMMFSFHSFKEKLKYKCSMYNKKLIIVDESYTSCTCGRCGNRKRTKLEVYSCDECGLVIDRDATGSRNIFIKNSRLRCP

SEQ ID NO: 56183 - protein, 519 aa, unknown
  TnpB Polypeptide
MKKKSKNLKIQKACSEYYKAYSFEILPTEEQRKFFDLNISASRKVYNYFLKDIKDYKNNPNKKSFSYNKVYNKLSSFLTTIKRQKEFEWLKQAESSALQQTLKNLVQALKNFIDNNNHFEFPKEKSYKDCNSFRVQNNKNIKVNQKNAVIILPKLKEPLKYIKTREILEKDILRVTITRKSYKRNKNTYVSKYFISVQVKLNNIPEVTKEPYKAIGIDLGVKNYAVTSDGFFINSKDSKVSKSFEKETKRIKRYQKILAKKTKARQRIQEKYKNSRRVRRFPRHKKNYNKVKAKLNISYFRRSNILKDFQHKTTTELVRENTVIVVENLNIKGMTKSAKGTLENPGVNVSAKRALNNSIISQGFGEFIRMLEYKCLWNGKTLVKVNPRNTSRTCSSCCHVSKENRKTQEKFKCVSCGFETNADYNASLNILNIFEEQLSLTVLKILLEFSQLLLRVGQPLNNFFKELLMPVSLEISEKSLGCRRNNLSSISKYWKYFDKVPLKQEDSSNNLNIRRISST

SEQ ID NO: 56184 - protein, 414 aa, unknown
  TnpB Polypeptide
METYTAYKIKLKKFTEVETEARLEAAKLWNRVVKLHKWFRVRKLPWPTESVFKKHFKDRFNLHSQTIQAIIEKFFSNIETTRVNRKRGDKEARYPYKFKKYFIVPWKSSAIRIKDKYITLSMGRGKKPLKFKLPFEVSGKIVEVQLGFFELILIVKQSLPEITQQPTGVASVDLGIIHTAMITDGYTTLGIVGRELRAIIQKHNKKKSIINKLLSKCKKGSRRWKKLKRALKDYSRKRENSQKNFLHQASNKIKKYCKENNIGTLVVGDVTEINRGKKGKFSKRLNQENGNNPLGKLLQYLEYKLKPPGCKVVKINEAYTTQTCPTCGEKHKPSGRIYNCKSCGKVFVRDEVGAMNILNKYLNGKILPGKLLPTGNVKYLRPVKIFTERSRPTDIRQSTNSRKSTNSRKVAYQA

SEQ ID NO: 56185 - protein, 368 aa, unknown
  TnpB Polypeptide
MNIAYRFRIYPNREQEVLLAKTFGCCRFLYNQMLNDKIREYEATKKMLRNTPAMYKKAYPFLKEVDSLALANVQMHLEKAYKNFFRDPKIGFPKFKSKHRSRKSYTTNVVNGNIQVEDHQIKLPKLKWIRMKKHRDIPEKYCLKSVTISMEPSGKYYASLLYEKTDCENQAEELDYEDAKILGIDYAMHGMAVFSEDIQKENEGYFRKSEERLAREQRKLSHCVKGSNNYYRQKKRVALCHEKIRNQRKDFLHKLSHEMAETYDVVAVEDIDMKAMSQCMHFGKSVMDNGYGKFRELLEYKLTWRGKKLVRVDRFFPSSKKCCKCGSVKKELKLSDRVYLCRCGNRIDRDLNAAINIREEARRMLLVG

SEQ ID NO: 56186 - protein, 404 aa, unknown
  TnpB Polypeptide
MIRTTEHSLKYITDYKKQKLDILFDEYQRVVNQYINVFWNQTSWKSKATADEYKLVDSWLMGKVMKCAYAQAIQMIRSTKDKQKKLVYKQYKRVYSKAKRKNKNWDIVNQTFTVWSKDKTFRDRTKIPFFSGDSIELNSDLCKIYQDVSISHFDMVVRLGSIWGNRLSLELPIRKHKHFNQLFASGFGVKTSLRLSRKNNKYSINLYMSKDFEQVKDEGNIIGIDVGIKKLMSVSDGTFIGTDIESIIRKYKRRKQNSKNSKKTLKQIKDYIGHSVNQLNFTDTQCIVMEELKPSNMLVKGKSSKEFRKILSKWNQNLLVERIQNKCELNRVELQFVLPHHTSQQCSQCGEIHKESRKGELYQCVGCGYTIDADYNASLNIVNKFLNKEFTVPSNTKTTIPRFS

SEQ ID NO: 56187 - protein, 383 aa, unknown
  TnpB Polypeptide
LIHKKSGNRRAGMNRAYKYRIYPTAEQEQLLTDTFGSCRFVYNHYLALQSENHQQGKAYMNKTACNNDCNRILKQEYPWLRQVDKFALTNAIYALDAGYQRFFRKQGGHPRFKSRHHSRMSYTTNYTNGNIAVQDGTVKLPKLGKVKAVIHRTAPEEWRLKQAAVSRESDGSYYVSVLYEYQDRIMPQAVRPELVIGLDYKSDGLYMDSEGTCCGMPHFFRKNQKKLTKAQRKLKTKQLHSVNYRKQQKRVARAAKKAANQRKDFLHKRSTEIANQYDLVCVEDLDMRALSNRKFKNGKATMDNGYGSFLTMLKYKLEDRGKHLIRIDKWYASSKTCSRCGAVRLMPLSVRQYECICGMSMDRDLNAAINIRKKGYEIYRKAA

SEQ ID NO: 56188 - protein, 376 aa, unknown
  TnpB Polypeptide
MSRKANNLYNQCVYFAKHSENLFEDLKNLDKVMKNFPDEHDNYRSLGYSVCAQQVLRLFQQNLRSYFAAIKDYKKNPAKYTGRPCFPKFRKSGDRFQVIFTNQAVKLIGQTISIASKTFENKLVIKLRTCSAKKICQVVFAPRNNYFLAYVIYEADPIMSENTNKIVAIDVGLSNLATITFSEEDEPILYRSDLMKINHDFNRITSKYVSILKKTQNKDTSKRRKRYSEKYSGLVEDRLHKISRAIINDLSHRGVSTVIVGKNTGQKINNKLKNFVQVPLFRLINMIKYKAELAGITFIQVNESYTSGTSFLDNELPTKEFYDKSRRQYRGLFLSNQSKRINADVNASFQIMKKIYTEFAYTNSVKYANPTVKTIC

SEQ ID NO: 56189 - protein, 512 aa, unknown
  TnpB Polypeptide
MLSKSAVSRTYPRVPYAAFDKNGGPLDLKEVLDGIRQDAELVAHYALQEMTEQNLALSTYFDRLKPSGAGYMMGLKLPSEVKKQFKSGASRLERMFREQVVTNLRSWAARVEVMTQTYPKYVSAGWKRTDDASKPASLHPRLALSATDKGYHKNFSVTPERISLDMVVQGSWVTLHFPTPPKLLEVGCEPGVPDIWVDKNDRVVFGFHGKTDPGRPKFSERYVVGVDLGVTNPAAYVVWDTEKKQIVEQSLLSQRAHSLNNKIKRTQTQVTSLQKKNRPEEAAYHREHLSNRRKELSILVAQELANVSWKYGNAIVSFEDLSHIKNTMKHGRWFRGEVYRRTRDMVEADGGRAMKVSAAYTSQRCHVCQSDLDMSNYSSPVCKSCGITHHRDLNAAANIAQRANVKKACETRSKHATKTNRVRRSKCQLKPLKHPGTKNRPTPKAPQNQKKAHTRTYPPLPSKEVSVRMCPADNRVSAVNHREDSGFQTTSGTTNPKENLSTSTVDWVYSKE

SEQ ID NO: 56190 - protein, 315 aa, unknown
  TnpB Polypeptide
MVSVTLTSKALFVSMSYEETEQERFPETEKEILERLRQYSEEELIACGNGIDRGVVRPVQTSNDPEPYSLTKDQLERIRRKERQRKHYQKCMARCEKGSRNRAKMRRKVARTFDYRKNVINDFAHQTSHAMVSDDKVQFFVLEDLRVKNMTKRPEPKYDDNAKALPNGARAKAGLNRAILSSGWGKTEEYLKYKAKKAGKLVIKVEPAYTSQRCPKCGRVERKNRPSQSEFRCVSCGFESANADYVAAGNILMAGVELIREGRLEPKKVKATLRGKPAKATNIKLGPGWADVMPVEPERCLRKLRCQTRYEAGSP

SEQ ID NO: 56191 - protein, 312 aa, Microcoleus sp.
MKGRGFGFPRFKNYSRMRSYVYPQMLKNPLRKDAVKLPQLGWVKMRLSRPIPDGFELKQARIVRRASGYFVVLSLQLDVNIPLPPLHGHVIGIDLGLEKFLATSDGQLVARPKFFNSLHRKLELLQRRLRNKKKGSKNRRKLNQKIARVHQKISDTRKDFHFKTAHHLCNQAQTVFAEDLNLKAMSKGMLCKHTLDAGFGQFLNILSWTCWKRGAHFAKVSPNGTSQICPKCDAQVKKHLSVRVHHCPECGYTTHRDVASAQVIRERGITAAGLVVEQIACGGDEAGAGVTQPSWHPLRQETLGAILGNPLL

SEQ ID NO: 56192 - protein, 188 aa, unknown
  TnpB Polypeptide
MTVSTSQVLSAARLLNKNVLTIPNSVKKLQMRQTPSSRRRLKAIGQRENRWMQDVNHCVSKALVENNPKHTLFVLEDLSGIRNVTERVRIKDRYVSVSWSFYDLEQKLIYKAKQNQSSVIKVDPRYTSQCCPICGHTEKSNRNKKIHLFTCKNCGYKSNDDRIGAMNLYRMGINYLVDSQVPNTVVTE

SEQ ID NO: 56193 - protein, 259 aa, unknown
  TnpB Polypeptide
MIFLVKVNERSTSMQQMTITVKVQIVATDTDKVLLDETMSVYRDACNYVSDYVFQTHDLKQFSLNKVLYSTLREKFGLKSQMAQSVLKTVIARYRTILENQNEWIQPTFKKPQYDLVWNRDYSLTQNCFSVNTLNGRVKLPYFAEGMSKYFDHTIYKFGTAKLTNKHGKYYLHIPATYDVEESNISDICNVVGIDRGINFVVATYDSKHKSGFVSGKTIKQKRANYSKLRKKTPNAANSIFKAKIKSDWSARKPLDARC

SEQ ID NO: 56194 - protein, 310 aa, unknown
  TnpB Polypeptide
MSVFCYKYYIIDHGVNLKLPGRKERLYLSNVEADSVLKEVKIKPYYGRYILCLTLESENFAADNTDMPNICAIDFGVSNFAAVVCNDGSSMLYKGGAVLSECQWFHKKRAKAVSIITKGHEHMHASSRYLSALSRHHADFIKDQCHKISRSIINYCMEHHAGTLVLGENKRWKQDCDMGSQNNQNFVSMPTGLLKQMIIYKASDAGIKTIMQEESYTSQADITAMDYIPVYGVDAENAVFSGRRISRSLYRCFNGMIINADCNGAANIMRKAITDAWNSITDFSFLASPEVSGFHELNPLSISVKGIAAA

SEQ ID NO: 56195 - protein, 226 aa, Pseudothermotoga sp.
MSVDLGIIRPITCFDGSEVISYHGGILNSLIRYRNKKLADFQRTLSKCKKGSKRYRKLLKAKQRMLKRTKHQITDILHKITSNFLKMCLQKGYGTIVIGDITNIRERVEGNDNFNQKVHQWCFRKMVDMTTYKAQLLGIEVKLASEEYTSQVCPVCGSKNHAVGRNYECKSCGFSYHRDGVGAINIWQRYLGKKFQVVAGLAPVRGVRFKPHLCGHGVSNAPWKAA

SEQ ID NO: 56196 - protein, 398 aa, Bacillus sp.
MKGGNSMLRGQKVFFRASKTDFKRLYACNRESALVWNECLRLAKEHFLQYGQWISKSELQKQTKGKFHLHSQSIQAVCHKYVFARQAAQKAIQQGLRHARYPYKKKKYFNTKWAKDGFTIHENGKIALSMGIHNGKREKPIIIYAANLPQGTIKEIECCYDNGWYLAVTYEDGQEAKAYQPGQSVGVDLGEVHTIAAFCENGQSLLITGRKVRSLHRLRNKKLAEIQRRQAKCQKGSRQWKRYERAKRYILSKSERQLRDGLHKTTKQFVDWCLVQSVSDVYMGKVEGVQRNTRKKKRVNRKQAQKLSNWSFGKVKQYLAYKLTKHGIRLKEIEETYTSQTCPVCQKRRKVSTRIFACSCGYEEHRDIHGAKNILSKAVHENILPWHISTKLTYLRIA

SEQ ID NO: 56197 - protein, 381 aa, Caryophanon sp.
VKRVIKAIKIRLFPTNEQEILMRKSCGIARFAYNWGLARWEEMYQQGLVPTKGAIKKEFNQTVKRLDEFKWLYEVSAQVTAQAFEDLNQAYQYFFKGIQQKPQFKTKKRARKSFYVRYDALKFKDSTVNIEKIGKVKYKTNYKIPKLNKYANPRCSFDGKYWYLAFGFEQDENKVMLDKSLHVGIDLGIKYLAVVNCLEEPIENINKTAEMKRLKKKLIRLQRQVSRKYEMNKCEGSFVKTKNILKTEQQIKLVYRRLTNIRTNHIHQATKAIIKLKPACVVMEHLNIRGMLKNKYLAGAIQEQKLYEFIRQMKYKCTFDGIEFIQADRFYSSSKICSNCGVKKQKLKLDERIFTCDICGISIDRDKNASINLANYKLRLN

SEQ ID NO: 56198 - protein, 392 aa, unknown
  TnpB Polypeptide
MAHYTYKFRIYPNDEQQQKLAKCFGCQRFIYNYFLNKRNEIYQNNETSTYNKDAAELTQLKKQDEYIWLKEGLSQSLQRTLRNLDTAFNSFFAKRSKFPKFKSRRHKQSFCIPQNSKVEDNKLYIPKFKEGIKIKQHRVMEGEIINSTISKKPCGHYYVTITVERNIEKYKPNNKSVGVDLGIKELAILSDGTRYKNIKPYRTLEKRLARLQRKHSKKVKGSANRNKARVKVARLHEKITNIRNNHLHQITSKIVSENQTICLEDLNVKGMLKNRKLAKSIADVSFCEFVRQIEYKSSWYGRTAIKIDRWYPSSKTCRHCHFVNQDLTLNDRDWNCPRCDRKLDRDLNAAKNIEREGLRLNTVGTTEIKACGENARPSARRRFSVKQEAPTL

SEQ ID NO: 56199 - protein, 402 aa, Escherichia sp.
VKRLQAFKFQLRPGGQQECEMRRFAGACRFVFNRALARQNENHEAGNKYIPYGKMASWLVEWKNATETQWLKDSPSQPLQQSLKDLERAYKNFFRKRAAFPRFKKRGQNDAFRYPQGVKLDQENSRIFLQKLGWMRYRNSRQVTGVVKNVTVSQSCGKWYISIQTESEVSTPVHPSASMIGLDAGVAKLATLSDGTVFGPVNSFQKNQKTLARLQRQLSRKVKFSNNWQKQKRKIQRLHSRIANIRRDYLHKVTTTVSKNHAMIVIEDLKVSNMSKSAAGTVSQPGRNVRAKSGLNRSILDQGWYEMRRQLEYKQLWSGGQVLAVPPAYTSQRCACCGHTAKENRLSQSQFRCQVCGYTANADVNGARNILAAGHAVLACGEMVQSGRSLKQEPTEMIQATA

SEQ ID NO: 56200 - protein, 400 aa, Lachnospiraceae sp.
MLAAREAVEWLLPVIRKEWPELEKASGEKKRFNAAEKLIHETKGNRAKYPFDRHFPKMPSYFRRAVLQHVIGQVSSAETQGTEAGKEQHYMPVFYRDNMYRSGEEGTFLKLYNGRDWVWQEVRLKKTDLDYLEKHWTGRREKAPVLVKRHKKYFLQFAFEEQVTLTDRRIWGQRICAVDLGINTDAVCSIMSADGTVAARRFIRFAAEKDRLYRVLGRIRGKQGRYGPESVRSQWAYAGRLNDEIARRTAGAILDFAREHGADVIVFEHLDLRGHIHGKNRQRLHLWKKKEVQKVTEHQAHRQGMRISRICAWNTSALAYDGSGPVKRDPGNYSLAAFRNGKRYNCDLSASYNIGARYFVREILKSVPETEQSLLTAKVPGAGRRTSCVYADLISLAACM

SEQ ID NO: 56201 - protein, 381 aa, Micromonospora sp.
MWGVGEVVKRAYKYRFYPSPEQAEQLSRTFGCVRLVYNRALEARTRAWAVDRQRTTYVQSSGWLTGWKRTDDLAFLNEVSSVPLQQTLRHLQAGFVAFWDKRSRYPRFKSKRKSRASAEYTRSAFRWRDGRLTLAKMNAPLNIVWSRPLPEGAEPSTVTVSRDAAGRWFVSILVEDPAVKPLPPAAAEVGVDAGITSLLTLSHPMPGISDEEGKVANPRYGQADRRKLAKAQRNLARKQKGSNNRAKARMKLARIHARVADRRRDHLHKLTTRLVRETQTVAIEDLSVRNMLRNRRLARVISDAAWGQFRSMLEYKAQWYGREVIPVDRWLPSSKTCSMCGRINTTLALNVRAWTCPGCGAEHDRDINAAKNILAAGLAER

SEQ ID NO: 56202 - protein, 556 aa, Crenarchaeote sp.
MPFSGQFNGSEEREPISPAMPEEGIYEVEHKNKRTNVVRILPNCFQERKLRRLANISAKLYNEINYERRQQFFKQHEVDFKSTYDKYYQKYKDKLGSASAQQVINKNNEAWDSFFKLLKLKKEGKLPLFIKRVSPPGYWKDKDTKKKKLILVVREDNYVVDEKNNKLILKYFDMEIDFVGKLRWYGKQGRLEIFYDETRNAWYASIPVEVGVETTRRGNKAKHIVNGERKVIQVESPKGNKVASIDLGINILASVVINDGTWLLYKGVRTKEDYFYLKKKISEVQLLASKTKNLGEYEAYEELLMEMKRLYKKLNRRLLHLYRTFASHLLEQLHELGVPTIYLGYPFNIAQEKGNKFTVNLWSYRKLMDAIELKAQEYGMRVYEVVEYNTSKYCAYHNVEVTRKPRGVISCPLDHKLHSDLNGALNILKMATNIVVSTVKKPLSFIIDHNRVAPVKGCNPRDLREPSPFRAGRRSDVVTKYIRKMDKHFIKVNNRLLEGMAKLDGGKFYCEGYTLYRLASFSEYVKIYHRMFSSYLVPYIIGLKKLEEEYSCLAKN

SEQ ID NO: 56203 - protein, 417 aa, Streptomyces sp.
VHLRYSYRLYPTAGQRVLLARTFGCARVVYNDALAVRREARKAGVPYPKAAELQKQVITAAKRTAERAWLASVGVDPLIQSLRDLDTAYRNFFDSVTGKRQGRPVGLPRFKSRKDSRQSLRFSRNGFRIRPSGKLNLAKIGDVRVRWSRALPAAPSSVTVVLDSAGRYHASFVVDVEPEQFPETDREVGVDLGLTAYAVLSTGEVIDNPRLLRKAEKNLRAAQRELSRKAKGSRNRAKARRKVARAHAKVADTRRDWLHKLTTGIVRENQAVYLEDLNVRGLARGRLAKSVHDAGWGTFRRLIEEKAARYGRTVRAVPRAFPSSRLCSTCGHLDGPKPLAVRGWACGACGALHDRDLNAARNILAAGQADRLNAPGGPVRPGAAIPRPARPVERGTRLGDPTGTGSRAAGAGGTPVR

SEQ ID NO: 56204 - protein, 488 aa, unknown
  TnpB Polypeptide
VKTTVRGVILSFGEGEQSILDKLMSDYSAAVRWAYNRLLGGMDVQKLRVMVQGKFLPNSRQANDAVYEAQATIKSQRELLKLNYKNVLAKVDSMQKKLSKARNPNKIIKLTMKLEKWQRKLAYWKRFIETHTLPPVVFGTRELFIRRCKGLISKEEWKQARNNRYVSRGDATKGGNLNTRISFKDNKLYLDIAIEAVKTKNLVRFKRITLPIYLAQKPSKKSGKVNGRNYRQMVIDYLQTGKAYQVEIIRENNRYYVHVTIEETETAPYSLTNGFLGIDTNPDGLGVADVDYLGQYGGSYFLHQGEWTYARSNRRLKLIGEVAKSIVMRAKYEGKGIAVEDLDFRDDKSISAKFNRISHGFVWSKFLNFIERDCLRDGVPLKKVKPPYSSVIGILKYQSQYGISNHEAAGYVIGRRALGYSEEKIPAIFLKFLTKKQAENFSKQTNWKQWSLVQKGIIKQLNSNKKEVKSLVSWQHLRKNCLAEATLT

SEQ ID NO: 56205 - protein, 262 aa, unknown
  TnpB Polypeptide
VKYDKGGFWVSVYFKRSVRTVEPRTVMSIDLNFDNVTLAVLTLDGKLIRLKRFKTPHRRILTHRIWIERIQGRYPRSWRFTKGIREAIERHGERIRSTSRDYAHKLGDLIAELALRFRSVVVLEDLEKLRENGKKNRRFNKRLGLWFYRRVQFCVEYEARERGLEIVKVDPRGTSSKCPRCGGKLVENGYRVLRCRKCSFIGDRDVTATINLYKKYVSRYSRCGVPGVVLNAPKPDEAPSGMRGNRDEAMKNISSCMNSYES

SEQ ID NO: 56206 - protein, 384 aa, unknown
  TnpB Polypeptide
LASRPASPTTGVWSAAGRPWRAASGSHPRWTSTRSGTLGSGRTPSGGWRSPSAPPQEAFRDPERAIRNRREGRAGFPRFKRKKVLEDNKARLTGSIRVTPRHVQLPRIGKVRTKERTDRLVALLHERKARILSATISREADRRFVSLTCEVERPDPEPREVRGPEDVVGIDVGLDSFAVLSDGARIEAPKPLEKALRLLKRRSKQLSRKQKRAVGEVDPETGEERKRTVFSRNYEKAALGLARLHRRIRNIRWDFLHELTTEPAKAKPVIVVEDLTVSPFGVKSMTMRCGTAASPVSRKPGRGRKLKRGDGVLLIFIKFIEPAVLSQPLADEFAFIHHFPFQNVDFVSALGDIPSIFHFSSDHNIGVSLHPLAELPIPTLGCLV

SEQ ID NO: 56207 - protein, 432 aa, unknown
  TnpB Polypeptide
MVRVARTVIVRSTKLPRKVFKLLVELEGMYRNMVEQLVMYAVRGGIRSFTKLKALKYREMRNLYPHLPSHYAYTASQDASTRAKSFLRLKKLGLAEREYPEVRRVSIWLDDHLWKLNGLTSIKIATHKGWITVELEPHKQYWKHINLRWKLASEAKIKLDKRNRQVVIYLTFVKEAQEYTPKGYLPVDVNENNVTILVDGVAYLFETNTERLVLGYYYRRKRIQKRYDKLYGVRSRIKRKVLRKLKERMKKNDIKWKIANIIVRTAYEKRYAIVLEKLGKKPAQNIIKKIKDKQLRHRVFQASFRGIQKAIEEKAKEYNVPIIYVNPRNTSKLCPIHNAPITYSNGSRIGKCSKGGELWHRDVVACWNLFLKTLRGDGSHAPSSVGYNLDVRLVPLASKVTHDPIGISKSLWARWKSLETTLNNPYLQGMTL

SEQ ID NO: 56208 - protein, 340 aa, Nonomuraea sp.
VTGRQGFRVELAPTLEQRARLGRHAGLSRVVENFCLEKVKAAFAQREAEKTYGVPESNLTSVPWSAPALERLWRLEHRDRYPWFTKEGLSSRVPKEACRVRAAGFKNFFDSRFGKRKGRKAGFPGWRKRKHGSRFRYDADRARPLAARVIALPGVGRVRALEDMSWLTDRIADGRARVVGSTIREQAGRWWLSFQLEVDRSDVNEKHAVSSGAPACGIDVGVKTFATIVDDDGTVTEIHASKPLKAMLRKLRKAGKAVSRKKLGSSNRAKAVKRLARVHLEVAGQRADFLHRTTTMLARSKRAIAVETLNVAGMVKNRRLSGSVSSSANSPTRRSGTARA

SEQ ID NO: 56209 - protein, 406 aa, Lactobacillus sp.
MTKVVKGIKLRLYPNQSQREQIWQMFGNDRFVWNQMLEMAKERYQNNPNSLFINEYGMNYLLKPLKREYTFLKDSDSTSFQVVNHNLAQAFNTLFRHRGGYPHFKNRHSLRQSYTGRSTCKVLARRRMQLPKLGAIRTSKTGRVGDAKIKRYTVSYEPTGRYYLSLMVEAEVNQLPKTHQAVGLDMGLADLAISSDGVKYGTFNAKRLEKQAVQWKRKYSRRRYLAQCQVWNWNHNRSDHLEDLDDYSNWQRARVNKARCQKRIANKRRDYLHKLTTDLVRNYDVIVIEDLRTKNLQKNHHLAKSIANASWYQFRTMLEYKCAWYGKQLVVVKPDYTSQICSNCGFNSGKKPLEVREWTCPKCGIHHDRDVNAAVNILYKGLNAIGQELALVKQRSSVSQVAGIPV

SEQ ID NO: 56210 - protein, 447 aa, unknown
  TnpB Polypeptide
MAGKGKGNIQGTVFGVIRQRLNHLSRKEYESLYSMCKISKNLYNQTLYNIRQHFFQTGSYLRYEENYHLLKHSENYRMLNSNMAQQVIKKAHASFESFFSLLKQAKEKNLPRPSIPRYLPKDGLYPLHIVMFSIRDGYLTIPVSKQGKELFGEVKIIVPKMVLGLDLKEVKIVPEAKGKWFEVHYVYRVKEREEKKNKPKKVLGIDLGVDNLATCISSDGKSFIVDGRDIKAVNQWFNKELARLKSIYARQGIKSSKRLAVLSEKRQNQIRDYMHKTARTILDFCLKEGIELVVVGDCSYVYDKPEPGRVNNQNMKFLPLGYLRELIRHKCEKHGITYMEVDEAYTSQADSLCRDYIPKHHERGNHVFSGKRISRGLYLSGTGKVINADVNGAINIMRKAGFEPEFSHIPVPVRVKVWRNASNGAYAVGGACERSSEETSSSESSMP

SEQ ID NO: 56211 - protein, 520 aa, unknown
  TnpB Polypeptide
LPTRRPSRPARVVRRTRWRGSAGRDRRGSWQPSRRGDPPPLQPSRREARRARRGREGSSGARTTGVVASGALIASSSPRRLRALQQRADAGPSKFPEGTRGINRQGNQGSGHSLPRGHYTPWVPSRLVRRSYKFRLRPTTRQHVALGRCLDAHRELYNAALEERRYAWSFAKAGISYNAQSAQLSEIRALRPDIGLWSFSSEQATLRRLDRAFAAFFRRVKAGDTPGYPRFKAAHRFDSVCWPKDGDGCRWKPEASRVYLQGIGEVKVSVHRPAEGSLKTISVKREGHRWYLVLSCDDIPTKPLEPTGEDVGIDVGIASFLTTSNGQQVDNPRWARNAADRLVRAQRALQTKKPRSANRRAARETVAARHRKVANARRDFHHKTARALVTTFDVMCLEDLRVSNMVRRPKAKANPEVPGHFLPNGAAAKSGLDRSISDAGWAQFRSILTAKAEEAGRHVIEVDPRHTSTTCSSCGHINPSNRVSQAVFRCLACGYEAHADVNAACNILRAGLARQVAAAV

SEQ ID NO: 56212 - protein, 402 aa, unknown
  TnpB Polypeptide
VKRLQAFKFQLRPSGQQECEMRRFAGACRFVFNRALALQNENHEAGNKYIPYGKMASWLVEWKNATETQWLKDAPSQPLQQSLKDLERAYKNFFQKRAAFPRFKKRGQNDAFRYPQGVKLDQENSRIFLPKLGWMRYRNSRQVTGVVKNVTVSQSCGKWYISIQTENEVSTPVHPSASMVGLDAGVAKLATLSDGTVFGPVNSFQKNQKTLARLQRQLSRKVKFSNNWQKQKRKIQRLHSRIANIRRDYLHKVTTTVSKNHAMIVIEDLKVSNMSKSAAGTVSQPGRNVRAKSGLNRSILDQGWYEMRRQLEYKQLWSGGQVLAVPPAYTSQRCACCGHTAKENRLSQSKFRCQACGYTANADVNGARNILAAGHAVLACGGMVQSGRPLKQEPTEIIQATA

SEQ ID NO: 56213 - protein, 425 aa, unknown
  TnpB Polypeptide
MSSKTYKYRIYANKATTDNLYGVLNLCRELYNAGLQERRDAYETRVKRHPNYYDEPTRQQLAKEHAISVYEQKRDLVEIKEVLRPEYQDIASHVLQDVLFRLEKAYKRFFQRVKSGENPGYPRFQGRHRYTSFTYPDGSGWKLDAVTRPADTQGMVRVNLRLRKIGTVKLHLHRDMAGTIKTLTIKREGEQWYACFTCEIGKPEALDVRYEDVGIDLGVTHFAALSTGECIENPRHYRKSEKKLKKLQAALSRKKRGSHRRKKAVQAVARTHRKIRNQRADFLHKESCKLVNRFQLIVFEDLQTANLVKRPQPKQDEETGQYLPNGASSKAGLNKSISDAGWSQFVQYCTYKAAWAGRTLVQVDPKGTSQVCSGCGAVVKKTLDERWHRCTCGCELDRDTNAAKNILRAGYQRLSVGTRPTRATA

SEQ ID NO: 56214 - protein, 370 aa, Sporosarcina sp.
MTKHHKAYKFRLYPTEEQALLIRKTFGCVRFVYNKMLAERKELYETYKDDQVELKKQKLPTPATYKTEFEWLKEVDSLALANAQLNLQTAYRNFFSGTADFPRFKSKKSRKSYTTNVVNGNIMLLDGHIKLPKLKLVKIIQHRTIPEGHTIKFCTLSMTPAGAYYVSILTEYKQEIIQKEVKDVVGLDFAMAELYVSSEDEKANYPRFYRQMLARLAKEQRILSRRTKGSSRWNKQRMVVAKLQEKVANQRKNFLHHQSKSLASTYDAVVIEDLDMKGMSRALRFGKSVYDNGWGMFTTFLDYKLREQGKRLVKIDKWFPSTKLCSSCGNQKIMAMSERVYSCPCGSILDRDYNSALNIKNEGIRLLASE

SEQ ID NO: 56215 - protein, 476 aa, unknown
  TnpB Polypeptide
MPRCRDLQSPKVVYRTARAGLRVTRGQRRRLIGLLVSAGDVWACVLELNAWRRGRGDAPLASYQELCRELAASGPGTFGELDSVGARSVLRRYSDAWFAAAKRRRSGDSAAQYPRRRRCMMPVRWYHGTCGLAGRALQIPVARGCPPLRVRLDRDLPYPAETVRSVTLVYEVGRLWVDVTAEVPVAVYPPGQEPDPSLVAGVDLGIIHPYAVAGQGADGLLVSGRAIRAEHYQHHYDAKTRRRAVARRAPKPRQRGSRRWRQFRRSQQRVEARHRRRVRQAQHEAATMVIDFAVAHRAGTLAVGDPRGVLTMSAGRRHNRRTRDWRVGHLIRALTDKAEQAGIEVKLVDERGTSSTCPPAASGLLSPPGGSSPARTASSPATAISSPRPTSPPARAAGSRQPLSRLTSRTAGPERTCQVSLRHDVTRAAALITAAPADPLAGTGPPRAPLAGCGRESLAVRRGSRKHGKRTYGEVH

SEQ ID NO: 56216 - protein, 558 aa, Streptomyces sp.
VSGLRKVAAPFVVPSPSGVAVRAGLKGLTGQDETVLRRVGALLGSLASGDLKARCAAGLEHDGEQWARRKRALTGQSSARWAGSITRATHDQWALARRGQLAHLQNLQAGIEVITRRLAQPLGTKGTQGAPGGYRSRREWFAKARRLHVLQDRLAQVRADVEAGRVRVVRGGRKLARARHHLQAAQLTEAQWRLRWQAERWFLQADGESGKRYGNETIRISPGGEVSIKLPAPLAHLANAPHGRYVLACRARFRHREEEWADRVAASRAVAYRIHYDPDRGRWYVTAAWQIPPVQAVPLEAVRAGGLAGVDLNADHLAAWRLDTHGNPVGDPRRFDYRLTGSAGHRDAQVRHALIRLLHWAKRHGLALAIEDLDFAMEKTREKHGRRKRFRKLLSGLPTTKLRARLVSMAAELGVPVVAVDPAYTSRWGAQHWQKPLTSQTRKPTRHDAAAVAIGRRALGHPIRRRTAPPPHDRSDRAGHRTVQARPGAPGREGPAPAFPDHGHDPPAPDAERKRATSVPTTVRGARLSLCNSCSVFRNGVLLVRVVTQVRDGPVFIP

SEQ ID NO: 56217 - protein, 647 aa, unknown
  TnpB Polypeptide
VYRTARVALRVTPAQRRRCFGLLRSAGDVWACVLEVNAWRRCRQDAPLTGYQELCRELASSGSGTFAELDSTGARSVLRRFSDAWFAAAKRRKAGDLSARSPRRRRGLVPVRWYHGTFTLDGHRVRIPTARCTPALWVRLARQVPYPVEQVRSITLLCEGGRLFLDVTAEVTIAVYPSGEGPDPGRVAGVDVGIIHPYAVAGCGGEALLVSGRAMRAEHRMHLADTKARHRAVARRAPKPGQRGSRRWRQYRARARRVEGRHRRRVRQAQHEAARTVVDWAVDQRVGVLHVGDPRGVLNLPAGQRHHLRLRQWQIGRLLQILTDKAALAGITVHLVDERGTSSTCPICRKRVPKPRGRSLTCPHCQFSGHRDVARRPASPPAPRAADPPPPQRLRCPGWSRTVEPAGTSPEPASPDVTPAAHPAARRSRWPAVARPTTPWGVARPHGEDPQHPTGNPVNVSGHRTRLTGAHRVPARGTGGEDEVTGPDPRVDPDVDLRVPADRGELAARPGAVLGSVAAGGALGALARAGLQHAVPHGPAGFAWATFAVNLTGCLLIGVLMAALERSGGGRPLLRPFLGVGVLGGYTTFATYAVDIRLDIDAGAPQVALGYLAATLLGALVAVWLGDAVTGRLLDAARRRPGPGVGR

SEQ ID NO: 56218 - protein, 374 aa, unknown
  TnpB Polypeptide
MRKTFEYRIYPTRSQLTLLNEILEECRWVYNETLACRKNAWEIEKKSISLFDTNKILTAWKKERSSLNIVHSQTLQDVQTRVDLAFQHFFHRVKQGEDPGYPRFKGYGRYDSITYPQSGWKVNIEKRYVRLSKIGNLKTIFHRDIQGTIKTCSLRRSASGKWFISFSCEKELKPLPHSDKAVGIDMGLTTFATYSDGTKIKNPRFFRAEEKNLAKVQRKLSAVDKSSPDRPKRKHSVSIVYERITNKRSDFAHKLSHQIINNYGIMCLEDLNIKNMLKNHCLAKSIQDASWDLLVTFITYKAEYAGREVMLVNPRDTSKRCSRCGILIQKSLNDRIHICTCCGLVLDRDINASINILAIGLDRLGIKSLEAHDL

SEQ ID NO: 56219 - protein, 373 aa, Syntrophomonadaceae sp.
MSSLKVVRNYKFRLYPNKEQEARLFDWLETCRWIYNTALAQRKEAWEREKRSVTRIEQQVWLKEAKKTDEPLRAVHSQVAQEVLFRVERAFAAFFRRVKNGETPGYPRFKSKGRYKSLTFTQFGEGKGAYFKDGKLKLSKIGLVKIKLHRRIPGTIKTVIVRRDAVGRWWAILAIEKELAKQQHAGPAVGLDAGLEKFSALSNGSLIENPRYLRKTEERLKHAQRNLSRRKKGSRNREKARRKLAKLHAKVCNQRRDFLHKQSRRLVKTYSLIAVEELNIKGMVKNHHLAKSISDAGWGEFISMLEYKAEEAGTKLVKVNPSGTSQECSGCGMAVPKKLSERIHCCPYCGLILDRDINAARNILKSALASEAA

SEQ ID NO: 56220 - protein, 472 aa, Actinopolyspora sp.
LRSGNQPIQVSHTQVWYPVISRSASREVNSMATVLQAYQFALAPTEQQRAALSSHCGAQRFAYNWGLARVKAVLDQRAAERTYGIDEDQLTPSVSWSAYSLRKSWNTAKDEVAPWWAENSKEAYSSGLANLATALDNWYKSRTGKRAGRSVSFPRFTSKRARSSFRISTGQFGLSKQDRRHVRLPRIGLVRTHESTRKLARHVERGTARIRSATVSFQRGRWHVSFSVEITRTEPTPATTGGEVGVDLGVKSLAVLSTGETVANPKHLEAAQRELRRLQRQAARRQGPDKRTKQKPSNRWRTTQARIAKLHTQVANARRDGLHKLSTRLVAEFDTVVIEDLHVAGMVRNRRLARAVSDVGMSELRRQLDYKTTWSGRQLVVADRWYPSSKSCNDCGAVKAKLRLSERTFTCDHCGHAADRDLNAARNLAGLTSSHSWWATKNEPAGNPRKPSPAGTGYRHGKTAPTGAVNAV

SEQ ID NO: 56221 - protein, 442 aa, Actinopolyspora sp.
MAQCSARGGDRLVQLRYRYRLYPSDEQRQALAQAFGNARVVYNDAVRARQDAYAVGEKFPSGTQLQKRLITDAKRTEERGWLSECSNIVLQQAIRDADAAYRNFFDSMRGKRTGRRVGAPRFKSRKDNRQAIRLHTGGLSIRANGKLRLARIGDVTVSWSRDLPSAPSSVTVVKTADDRYFASFVVEAGEETLPAAVDADGNEVEIGLDLGLSAFAVDQHGRVIDNPRFLRRAERKLKRAQRELSRKQRGSNNRAKARKRLARQHAKVSDTRQDWLHKATTSIVQENQLIVLEELAVSGLARTRLAKSVHDASWGTFRRLLEEKAARYGRELVVIDRWLPTSQTCSACGRIDGAKPLSVRTWSCPCGASHDRDINAAVNILAAGRAERQNACGPDVRPHTGADGDEAGSSATPRGDTAPRAAQPRGESPPPTARSTSRAGCP

SEQ ID NO: 56222 - protein, 386 aa, Actinopolyspora sp.
MISVRTAYKVRAYPAPEQATQLGRTFGCVRLVWNKTLDARHRVYHTEGRTTSYTETDAQLAAWKRTDDLAFLSEVSSVPLQQTLRHQHTAFQNFFAGRAKYPRFKSRNGRQSAHYTRSAFKLRAGQLTLAKQSTPLDFVWSWEVDLLASLNPTMVVVSREPDGRWYVTFAVDTDEPEPAAPTGEAIGIDLGVADFATLSTGETVANPKHVDRKARNLARYQRMMARTQRGSNNRRKAKTKVARAHRKVRHARQDFLHRTSTNLVRRADTIAIEDLNVSGMTSSAKGTVDKPGRNVRAKAGLNRRVLDAALGEFRRQLEYKTARAGKRLLVVDRWYPSSKTCSACGLLLNHLKLSVRHWTCPDCGTRHDRDHNAAKNILAAGRAVAG

SEQ ID NO: 56223 - protein, 641 aa, Myxococcales sp.
VRRPEDGVSVLRLALDVHDPVQRARVEAMFRGAYAVRRALQRDVRQRAWAYWAAPHERARDAVAVRERLGLTRTALEHAAYDHLDAAPHLRRSVTKALAMHVADTVWTPVERHLFGDARGRRAGMPRVGRWYDFVRLPGRARSHTTANKWETFRLHGTLAGHRAAYTDGAGDFVQPRRMRAIHADGWWKHPGPLAIVFTGLADGTLVLPVRLPTAPSNQPILDHHLADPSRWHKVDLVRRRDPQAAGGWRYEAHLMVLTTPYVSPAAAARRARAAVEAKERAAGVDVNVSNITVASHERGAAVRVTRLERDATQQQRGSRRARRERRRLRALDRSRRAMNRAQYQLSKRQAKRARRREAAGLPPVAVIPMGPRLARSDGVPLQGYRRDQLSASYRRGRAAQAADAAAAAQARRARAREVAADVVAAHGFRLVVEDTSIAAWSRSWGRAVAAFSPGLLVAAIDREARAVAARAVAQGGVERAATRPTALSQHCPCGARVPKRLADRVHRCPSCGLRADRDAVAAVLASFVAFAERGVPASAQVDYAATCVALPAIRRALEFPAPGWQDTLSESTGLSAREECLFTAWTPSPDPVAVARRTAGMAPRPTLDETGSRPTTPDRARMRTRRSPAYDLWSYLRDTS

SEQ ID NO: 56224 - protein, 373 aa, Oscillatoriales sp.
MLLSIKTKLKLSTNQETIMSKHAGIARFTYNWGLATWNSFYKDGLKPNKYLLKKFFNNHVKPEFTWIKQSGISQKITQYAFDNLGDAFSRFFSGKGGCPKFKKKGIHDSFTIDAGGKPIPVGGTSIKLPTIGWVKTYEGLPHTTCKSITISRTADSWFIAFAGEQEHKPTLKQHEIVGVDLGVKVLATLSTGVVFPNPKHYEAHLKKLKRLSKKFARKVKGSNNKYKAKIQQAKCHARIANLRKETLHQITTYLCKNHAKIVVEDLNTSGMLSNHKLARVIADCGFYEFKQQLEYKAQKFGCEIIIADRWFPSTKTCSNCGYIQDMPLKERIYNCESCGHWMDRDLNAAINLSRLAFIVKAYRGIAAPMLPLK

SEQ ID NO: 56225 - protein, 254 aa, Helicobacter sp.
MTLTERHIIRPTHPIFKRIKDFCHLSKNLYNYANFILREHYFAGFKLPTAYDLINRFVKESQRDYKALPAQSAQQVLMLLSQNWKSYLKALKAYKLKPSSFLARPKIPKFKPKDGVSIGVLTNQQTSFTKGRMTKIKFPKKANLKRLITKINPQTSRLKQVRLIPKTTCFIVEVVYEQTTHKLPQTHGIGIMGIDLGLNNFVTAIDNQSSPFIIKGGGVKSVNQWFNKLKAHYQAKAKTSNKRFWTKRLCKLAL

SEQ ID NO: 56226 - protein, 536 aa, unknown
  TnpB Polypeptide
MINEEYNKILKQYHKLSDRHILVVETDMPYSDVLKVVALSDRIRKAGNELVSLMRKNYDQLLRTKRCRKLLSLYSSTENKVKRKLIADQLNEMQKSYNITWNYCRKSMIPIGKKYGIAAVFALTKAEDVWRGIEKCLYGNGNTIHFSKYGELPCIRAKQINRGIPISVTGDKLQFKLGKTVFGIQINDRFQKDEVDAVLSYIAEPEIVDNKAVNTLIEDAYCIDAYRPCYATLVPKRIRGKYRVYLHLIIEGKAKPKYDKHGNLRHKYGKGMIGADIGTQTVAYTSDTEVGLKNLSERGKSIQTSERKERLLYRAMDRSRRATNPYNYNYDGTIKKGRKIWNYSNHYKKLKAKHTELCRINAVNRQLAINEDANHLRSLGDIFVTEPKNASKLMRRVKETTKNDKGKFNKKKRFGKSIKNRCPSGFQTTVEKKFKATNGTYIEVPNNYRASQYDHTVDDYIKKKLSDRLYKLQDGTEVQRDWYSSFLLYCYNYKTQDIDKDKCIVEFDDCYKKEEALITWIKARKIKILNSGIKTT

SEQ ID NO: 56227 - protein, 398 aa, Richelia sp.
VPRNTTPSFVTEIPLVVKSVDNRELEARFHAGQQLLNAVLGEALIRMELVRSSEPYLRAKKLKGENNKASRKKLFEEARKLYRFSDYELQDFATLTAKKSKWIEYKLDAQVIQKLATRAFKAVERVLLGKAKKIRFKSLDRFKSVEGKTNKQGLRWSLRQTKRVETIGKKSDYRNKIKCSEYVLSWAGLELEPIIDWFDPVIAHGLNSPIKYCRLVWRRLNGKKRWFIQLVNEGLPYQKPKNYVTEGLVGLDLNISNIAFVADNKAGLLPFADKVPTFEKEIKATQRKMQRTQRMHNPDNYEPDFEKKVGNKKVIKKGKVRKGKKTWNNAKNYIKLRHKKANLERRKASYAKSQNRGLVNELLRHGNNFKTENVSVKGWQKRYGKASPIRLVEMSQVS

SEQ ID NO: 56228 - protein, 413 aa, unknown
  TnpB Polypeptide
MDLTLRFRAYLSDEVASEAWRHIDILRQIRNHAVRDYYNTHTNDKPSDYDQHKKFTDWKHTWPIFSNPSAHAAQQTINQIHNDLEGLNEKRDNGYNVGRLRWQGAGEFRSISYNQSNRFNVDHNTGDDRFVRLRLEKIGWLKIRVNRTVPPSEDISEVILKKETTGDWYVSLVVDDVTESREKPAIDGIEPEDCIGVDVGITNYIHTSNNLAVDTLDLSDEYDRYARKQRNLDQKEHGSNNWEKQRQKVAKVRRVIKRKVEDFQHKLTTWLVKTYDVVAVEALDVIPMLEGSHNSKNKQDAAWARFRRLLEYKADVHGTHVVSVDPAGTTKECASCGVETDKPLWIREHSCPACGHTEDRDLNAAKNILNRGLQRLGTGRSESTPVQTALPTFTPPREDVDAKRVVEAGSPEA

SEQ ID NO: 56229 - protein, 532 aa, Microcoleus sp.
MTRYVTPREACKLLSVSEKPLETGTKQEESKPLEPLPISGATTLTPYSPTESTAELPHFTAGSAAPNKNQTSTDKSTISKKSTRKGKFSKILEEDSTSKEKVFLPFWDKSCQELSAKLWSATKTDCAGLVVTLSNGYANKTIANSWFSAEQTYLQKQKWLKISLPSSTSSVVGSTDSENTKLLSKKIRVYPETKLAAIWRAWISASRWCYNQAIAILKTQKIGKYDLRKQIMDSAPDWVKQQPYNPRQLAVFQAFEAHKAAKKSRGAAKFRTFRDRSQTIRFQTDNWKSNTFYPQATKHLSFKASEPIAETMEHEPNLSLINGQWFISYAVSKTKSTTDSNLAVALDPGVRTFMTGFDGQEILEIGKYDIGRIYRLARHLDKVISRIGQSKGKSFKRLRYRLRKAAAQLRIKIENLICELHKKTAKYLCDQYKVIFLPTFETQQMVKKGKRRLNAKTARAMVTLSHYKFKQTLKHQAAKHGCVVVDVTEEYTSKTCSKCGHIHTKLGGNKLFACPSCGHKLDRDKMALLTFC

SEQ ID NO: 56230 - protein, 441 aa, unknown
  TnpB Polypeptide
  misc_feature (348)..(365): Xaa can be any naturally occurring amino acid
MVLLSLWMADVQTRRECTMKWQMKRANTFAVRPLCDADEQVLRELLDASAALWNEINYQRLMRYNDEDGFEGDVWDADTGQLEGQYKGVLGASTAQQVIATNSEAWRAFFRTKDQFHDPDNQQVTDHPEPPGFRGNDDGRVLKGVIRKDAYTVEWGDRSRLEFVVGEELRDKHNSPKSRFRLELVGDPNWPEYDDQGRLALWYDETDGTFRASQPVTVSEQATPLAEESAALDIGANNLVACTTTTGQQYLYEGRELFHRFRSTTREIARLQSKLPEGRYSSQRIRRLYRTRTRRRDHAQAALCRDLIERLYDEGVDTVYIGGLTDVLDTHWSVETNAKTHNFWAFKXXXXXXXXXXXXXXXXXXCRKDDCQQHEPRLRANDRIRPRPADRAEQFEDPDSVGHHRRPDADGNADHRVTLDTEGIDQGRRRRTVSVVAHTIA

SEQ ID NO: 56231 - protein, 394 aa, Thermotalea sp.
MIKTYKVMLLPNNKQRTKLFECAGVARWAYNWALEQQQTNYKNGGKFLSDGELRKKLTELKQTEEYTWLNNYSNNITKQAIKDASIAFKNFFEGRAKFPKFKSKKRSEIGFYQDTDKIVVTDTDVKLEKLTTSKKKNKQKLNWIRLAEKGKIPIGENIKYSNPRITFNGLHWWLSVGIEEKEIKNDKYTEGIGIDLGVKDLAIVSNGQKFTNINKSSKVKKLEKRLKKLQRKLSKKYELNKMKTEGGECRYRKTKNIKKLEILVLKERRRLKNIRHNYIHQITASLVRTKPAYVVMESLNTSGMLKNKKLSKSIQEQLFHELKRQIEYKCAWNRIKFILADRFYPSSKTCSNCGSIKDKLSLSERVFTCEECGYRIDRDLNASINLENYGKSIA

SEQ ID NO: 56232 - protein, 386 aa, unknown
  TnpB Polypeptide
MLLAHKIELRPTLEQAAYLNQACGSRRHCFNQLLAHFKQGGVKWSKKSAYQHYIQHIRPEFPWYHEVSSRVTRNAIDDLDQAFKHFFRRVKAKQKAGFPRFKKKDVNDSFALRESPKFDVNEQTLRIEKLKTRIPMRQSLRFEGKLKQVTISKRAGKFFASFLIETEDYQAEYAQKSESVGVDFGINAWAVCSNGHVEAANQKLKTSMKKLAKRHRALARKQKGSHRRAKAKSALAKLHFRIVRQREAVCHELSHYLTANFKRIVIEDLNVKGMVKNHRLARAVSDAGFGMLRKMIEYKALLRNCEVVLADRFFPSSKMCSGCGTLHDMPLDQRMMTCDCGLVMDRDLNAAINLNNYGVDTFKPTKKRTQEKCQTMTSVSATLVTV

SEQ ID NO: 56233 - protein, 396 aa, unknown
  TnpB Polypeptide
MLADNCARLWNEVNYERRQAYIRYRKFGWYPKHLYEKYAPIIGSATAQQIINKNNEAWRSFLRLKRLKAEGRLPKHITRVSMPRYWKRNGKRELRIIVRNDCYKFDGKYLYLPKGIRLRWKGELKWMGKQGRLEIAYDEVDEVWRGFMAVKVERPPPRGGNKPLYIDLGVINLATVWAEGWRQAIAYSGNKLLQDWWYWTGRIAKEQSRLASVNKAKTSKKLKRLYRIRQRRLRHAVNAMIKDIVERACALGISKIVLGKLEGIRENNNKGGRANSMIHNFWSFQYTVKRFREKSEEYGIEVVEKPEGGTSSKCPECGSEQTHKRKRLFKCLNCNLEAHRDVVGVLNIAALQNGGCHAIGVVAHPLLLWWNGMSWEPKRAMSNRPMKTLEARTSRL

SEQ ID NO: 56234 - protein, 435 aa, unknown
  TnpB Polypeptide
MQITKGFKYRLYLTKEQQKQLNHCCFIYNQAYNICLDLQNETWKNNRDKPKEERIYPKSSELDFKIKQALKNRDLSFKTVIAQRARMNAERALKTAIQKPERGFPKFKNSSEPNQSFTWNNQNCLIEIKEGKRFGVLHLMKTDFKFRCHRTLPQNYKLNEVGISRKGFKYYVSFSVTYEADIETISKEKVQTAIGLDLNVNEVGLSSNELVETRSKQINKIKYAKAFKRLQRKQGRRIEIAKKTKKKVSKNFRKTQRKLNKKYEKATNIKKDIQHKFSKEIVDKFDLIVVENLNVKNMTKRAKLKNVKAKSGLNRSILDTSFSQLIGFLEYKAMHNGKLFTKIPPQYTSKGCSNCGTIKFDLKLKDRTFVCDVCGFVTHRDLNAAINILRRGLKALGILLSQIKEIKLSNVKSKSFELGISLLDSKQLAFRVSGR

SEQ ID NO: 56235 - protein, 495 aa, unknown
  TnpB Polypeptide
MTELASEVRGISSYATYVTRNDTHLGGELARITATAPAEAGRQAGVMMPDFLAFGRGKSRKERLLRYNVVTSFRSWQERINTVNGESDKYISQGWKRTVNDSAPTYGVGDFINLGAVDRSYALIENNPFTDGEITLKMVIHGQWYRLIFDFDNKRFTEGKVTLPLIKIEDNHPVFIFSVVTDNPVVQFSSDYIIGVDVGLNDYATVVVRNTATGKITHQTTLSQRVHSLWNSVRASEKQVRQLREKAVSLSLYDRQGRMAARDEADLHRKAASRKKRELAILAAQEIAYLAHFWDNAVVAVEDLSWITNTMQNGRWNRGAFMQWLAHYVSQNGGWVVTVNAANTSQVCHKCGEEVEHPEYKVSECAQCGVFDRDVNAAANIAARAVPKVEKARKKRAKNSKLQPQAPLKTPIARCSLKYPGRDRTKHVPTPKRKNHPRNVKEVTLPSSPARAQATCLDARVLADCNTCCGSVAETCKAAINQGNKTYTCRLYSLN

SEQ ID NO: 56236 - protein, 521 aa, unknown
  TnpB Polypeptide
LARNQTYKAFVARPTHILNLDGELLDSAPIMTQLTTEVRGISSYATYVTRNDEVLGERLAQAGAVQPTTAGRRAGVTMPDFLASGRTGKSRKEWLVRYNVVTAFRSWQERIKATNGESNKYISQGWKRTANDSAPTYGEDYINLGAVDKQYAIIENNPFGDGEIVLKMVIQGVWYHLIFDFDNKRFTEGKVTLPLIKVQDGVPVFIFSVVTDNPVVQFSGDYTIGVDVGINDYATVVVRNSSTGKIIHHTTLSQRVHSLWNSVRASEKQVRQLHEKADSLSLYNRQAIMAALDEAQLHRKAASRKKRELAILAAQEIAYLSHFYGNAVVAVEDLSWIRNTMQNGRWNRGAFVQWLTHYVGQNGGWVVSVSAANTSQICHVCNGEVTHPEHKVSVCAVHGIFDRDVNAAANIAARAVPKVEKARKTKAKKQKLQKQAPLKTPIVRCSLKYPGRDRTKNTPTPKRKKRVVREVNLPISPAKAQAKCLEASVLADCGAYGATGTSYAAINQGEKTYACRLCSLN

SEQ ID NO: 56237 - protein, 540 aa, unknown
  TnpB Polypeptide
MIILDVLTLIHDTREEGALAKGQTYRAFVARPTHILDLNGELLDSAPIMAQLASEIRGISSYATYVTRNDTQLEAGLAQAGTVQPAVAGRRAGVTMPEFLASGRTGKSRKEWLVRYNVVTAFRSWQERINAVNGESSKYVSQGWKRTVNDSAPTYGEGDFINLGAVDKQYAVIENNPFTDGEIILKMVTQGVWYRLFFPFDNTRFTEGKVTLPLVKVENNNPVFIFSVVTDNPVVQFSGDYTIGVDVGINNYATVVVRNTETGKIVQQTTLSQRVHSLWNSVRASEKQVKQLRKKADSLSPYNRQAIMAALDEAQLHRKAASRKKRELAIVAAQEIAYLSYFFGNAVVAVEDLSWITNTMQNGRWNRGAFVQWLTHYVSQNGGWVVSVSATNTSQVCHKCGEEVEHPEHKVSQCAKHGIMDRDVNAAANIAARAVPKVEKARKTKAKKQKLQKQAPLKTPVARASLKYPGRDRTKSAPTPKRKNHPRNIKEVTLPISPARVIPTTVLADCNTCSINVTETSEAAIKQDNITYECRLYNPI

SEQ ID NO: 56238 - protein, 448 aa, Sutterella sp.
MYLFCNFKYELITDDTRRSALSRFAGCRRAVFNKALELQNERKAKNEKLFSYVEMAHLLVEWKQTDEMAFLKEAPSQALQQTLMDLDRAIKDTFRKKGDSAKKRWPRFKAKDIGDGFRLPQVKPQDIDEPNGRVKLPKLGWFRYRRSRPLAFKCGDGTLIPGKVKQVHITKDCGKWFVTFATEFEIPDPVMKEKDVGIDVGIVHAVTLSNGKTYDLDVATIKKIEGEIAYLKRRMSLNQSSRKKLAAKGLAEAFDKRKPSRTRRRLKELIQKKYKRVRSIRQDFHRKTAHALAQEYGCVYVEDLHLRNMTKSARGTKENPGRHVRQKRALNRSLQRMGLRALRKAIEEALNKMGGMVIAVPPQFTSQRCPNCGCTDRRNRPTQSLFSCINCGYTNNADIVGSINVLMKGRMSPSAHNKKRIAREVSAEGAGDPLSVSVPSAGTTRSTS

SEQ ID NO: 56239 - protein, 380 aa, Sutterella sp.
MLRAAKFRIYPTAAQEAFLWAQWGAVRKCWNMALFLKKHYYRTRGVSLDLIHEIKPLIARAKKSKKYTWLKEYDSMALQESVRNLNKGYRAFFEGRAGYPHYKSRRGPQSSYHCTNVSVGPNYVRVPKMEPIKARIHREVVGKVKSITLEADAAGDYYAAVLWEDGLAEKDPLKEIYEDQVIGIDVGIKDLLTESNGRKEPNPKHLKRARKVLRRRCRQFSRTQKGSRRREKARRRLARAHKRVANARTDNLHKVSSRLVNDLWTTHVCQAPSTVTRELRSEAAGSELVERLIAAAGGIAGLVPSGTEPIPVKRSWNSEHGLQAERSICRVSRFTGPPPIQCRYVRMRQAKRSPHSDLATLHRLIRVMSFWLLPAVFQSQ

SEQ ID NO: 56240 - protein, 261 aa, Sutterella sp.
VRVPKMEPIKARIHREVVGKVKSITLEADAAGDYYAAVLWEDGLAEKEPLKEIYEDQVIGIDVGIKDLLTESNGRKEPNPRHLKHARKVLRRRCRQFSRTQKGSRRREKARRRLARAHKRVANARTDNLHKVSSRLVNESQALAAESLRIINMLKNHHLAESIADAAWGELLRMIAYKMKREGKYFIQIDTFYPSSKMCSCCGFKLEKLDLATREWACPHCGAHHDRDGNAAANIRAEGIRILRAEGLPVLRREMSSPNAR

SEQ ID NO: 56241 - protein, 384 aa, Sutterella sp.
MLRAAKFRIYPTAAQEAFLWAQWGAVRKCWNMALFLKKHYYRTRGVSLDLIHEIKPLIARAKKSRKYARLREYDSMALQETVRNLNKGYRAFFEGRAGFPHYKSRRGPQSSYHCTNVSVGPNYVRVPKMEPIKARIHREVVGKVKSITLEADAAGDYYAAVLWEDGLAEKEPLKEIYEDQVTGIDVGITDLLTESNGRKESNPRHLKRARKALRRRCRQFSRTKKGSRRREKARRRLARAHKRVANARSDNLHKVSSRLVNESQALAAESLRIINMLKNHHLSESIADAAWGELLRMIAYKMKREGKYFMQIDTFYPSSKTCSCCGFKLEKLDLATREWTCPHCGAHHDRNANAAANIRAEGIRILRAEGLPVLRREMSSPNAR

SEQ ID NO: 56242 - protein, 246 aa, Lyngbya sp.
MTSTSNCLILAKQYTFANKLNSQARQSAAECAWSAISRFYDNCKKKTPGKKRCDLAASQAARGSAPRKGFPRFKKNARSVEYKSSGWKLSENRKAITFTDKNGIGKLKLKGTYDLNFYQLKDIKRVRLVRRADGYYVQFAISVDVRIETEPTGKAIGLDVGIKYFLADSFGNTVENPQFYRSSEKQLNRANRKKSKKYVRGVKPQSKNYHKARCRYARKHLRVSRQRKEYCKRVAYCVIQSNDLVA

SEQ ID NO: 56243 - protein, 395 aa, unknown
  TnpB Polypeptide
MSQCRTFRYLLQPTARQRSDLERLLGLQCELYNAALEARKGAWEKERRSVSYIADCATLTQTREVRPDLFEFGVTVCRGTLKRLDRAYRAFYRRCSANQTPGYPRFKSPSRFDSVQWEDTKSWALGTDARRLRLQGIGSIKIRLHRALRGTPKAITVKREGRRWWLSIRCVDVEAQPLPPTGRAIGIDMGVCALVATSDGELVTEGRFGARAQHRLSEAQRALSTKARGSGHRRRAAEAVGRAHRRVSNQRKDLAHQLSRRLVNDHDLIAIEDLKVSSMLRRAKPRPDDKGGFCANGASAKTGLNRSISDAGWGMLRSYLAYKAEEAGRELIAVDPRHTSVRCSCCGHIAPENRVSQAEFRCQGCGHVAHADVNAACNILWAGRAQRACPRAGSN

SEQ ID NO: 56244 - protein, 506 aa, unknown
  TnpB Polypeptide
MELDNNAHSVFLLYYHLVLVVKYRRQVFDETVSERSKEIFVYIAPKYNIMLQEWNYDKDHVQILFRAHPNSEISKFINAYKSASSRLLKKEFPQIRQKLWKECFWSQSFCLLTTGGAPIEVIRKYIESQGEKAAKGAGLMANKAYKFRIYPNREQKTLFAKTFGCVRFIYNKMLDDKIKYYEKTKKKRNNTPAQYKKEFPWLKEVDSLALANAQMNLQKAYNNFFRDPKVGFPKFKSRHKTRASYTTNNQKGTVALENGHLKLPKAGYVKVKQHRAIPEDYRIKSVTISQNPGGDYYASVLFEYENQVQKQPMHQFLGLDFSMQELYRDSEGREPEYPGYYRKAEQKLKREQRKLSKMQKGSKNRGKQRIRVARMHEKVAAQRRDFLHKQSRKIADAYDCVCIEDLDMKAMSQALHFGKSVLDNGWGIFVNFLKYKMEEQGKQLVKVGRFFASSQLCSVCGYKNTETKDLRIRAWICPKCGTHHDRDVNAAVNIRNEGMRLMYSLQ

SEQ ID NO: 56245 - protein, 367 aa, unknown
  TnpB Polypeptide
MIIRELKLKLTSRQKTLLNNWLFNLTGVYNWVIRKIELNAEDKIYFSKFDFYNGLVNLSKKLEIPSHTIRGVLDQAWLAWDRCFKKISKKPKLKSIRNKLNSIPFPDPIPTSRISDKIIGVPRLGKVKYFKQGLPEGSIKRARIIKRASGWYLQLTIDAVHRFEVQETDMKVGIDTGFKHLAVLSDGTKFNNPRNYIKGQKRLAQAQRGRRKKLTACLHEHIKDRRKDYNHKLSRKIVENYQGIYITNDDLRSQAKRFGKLVNDGGISQLRNFILYKGDVHGRVIKLVASKNTTMTCSNCGALTGPTGLLGLAVRDWECSACGAQHDRDINAAKVVLNLGLGYSLDNAEIHAERPEIFRLESSGGAR

SEQ ID NO: 56246 - protein, 460 aa, unknown
  TnpB Polypeptide
LKLALEETSKMALTHWKSVIAESKKELADTLKRFHDQDRHYAYWLLCGINRQFFELLDGRIPVPNPEVSFDRNYCLSYERPLSLKTLRCIAGIVRRTVNRVRRNSVCYPRTKTFHNRIDFDSSCYTVRSAEDAQLLELMSLQPGKRISLRLKGKSKIRGTLQLLRDTAGTYSLRVYVPQQCEERRKTGKVVGIDLGYTEMMATSEQELLGTDLGKYFSAIADKRGKNSEGRNRMHALFRSLLKKSGKNNLAKAERIRKHNLGRKKQRARYIQDIGIIKTLVNRELNLLFTRKINPIRAIVVEDLSARMKAHFGKKWNRRLSGWMRGYLQERIRYKAKKHGIEVNEVNPAHSSRECPRCHCTDKKNRRGDVFKCSSCGYHEHADLVAALNILGRLGDKEIRKGMSPSRVKAVLDGRHVGWKLLNETVTDRTSDEARVVSESPRSASSKSERRSDVQVCTAS

SEQ ID NO: 56247 - protein, 389 aa, unknown
  TnpB Polypeptide
MATKPSITKGQMKTFCAKLYKSKKKWVLYDQITLAGEIYNHCIALHKRYYRLYNKSLNVYALINHITKLKKLSRYKHWRQLGSQAIQDIAERIDKSYKLFFRNQKHGIKSGTPHFKKRTNYKSFTLKQSGYKLLDGNRIKIGNKIYKYFKSQEIEGNVKTLTIKRDKLGDIYLYIVTDAENLKVAPRTGEIVGCDFGLKTFLTVSNGEDVESPLFFHQNRIAIRKTNRKLSKKQRLSNNRRKARKSLERLHKRIANKRSDFHWKLANELTDKYDFMFFETLNIKAMQMLWGKKISDLAFFSFMLKLKYLASVKGKTIFCIGRFVPSSKTCSVCGYVYKDLELKEREWRCPECNTLHDRDRNASYNILRVGASTLGLGDVSPLQTMAISA

SEQ ID NO: 56248 - protein, 430 aa, Oscillatoriales sp.
MLLSIKTKLKLNKSQATVMSKHAGIARFTYNWGLATWSHLYQDGLKPNKYLLKKFFNNHVKPEFTWIKEAEICQKITQYAFDNLGDAFTRFFSKKGEYPKFKKKGHHDSFTIDAGGKPIPVGGTSIKLQTIGWVKTYEGLPHTTCKSITISRTADSWFIAFAYEQEYEPTVKQHDVVGVDLGVKELATLSTGVVFPNPKHYKTHLSKLRRLSKELSRKTKGSSNRFKAKQRLAKHHAKVANLRKNTLHQITTYLGKNHATIVVEDLNVSGLLSNHKLAQVIADCGFYEFKRQLEYKAKKFGCEVIIADRWFPSSKTCSNCGHIQDMPRAERTYNCGNCGHSMDRDLNAAINLSRLAFGFHRESLPRDNRSHAPDEVRSKCLDLSRICIAASLLFKIQPQARCLGPYLRLCPIVIPFSQNNATLGKLQTVM

SEQ ID NO: 56249 - protein, 167 aa, unknown
  TnpB Polypeptide
VEHDLPEPQNTAKVMGVDLGRKDIAHTSEGDNWHGQPLNQVRDHYFWLRAILQQKASQGRRSSRRRCRELLQRLSGQERRLQTWVNPCISKAIVSRAKATDSTIAWADLTGIRERVNSQPRNKTERRRSNSWAFYQLRQFVYYKALRAGVKVVVGRRLQRSVSISEA

SEQ ID NO: 56250 - protein, 378 aa, unknown
  TnpB Polypeptide
MYKAYKFRIYPNREQKIMIDKTFGCTRFIFNNFLSERKTKYEESKIKLSAYDELKELTDLKKENKWLKEVDSCALQKCVFHLDDAFKNFFRGNGYPRFKAKGEHESYTTNNTLNEYKSVKYESIRIDFKNKVITLPRLKKVKFRGYRTTKEIVGKIKSATISKDANKYFVSILVEVPFTKPIINPTSVVGLDLGIKDFIVTSYGEKLKNEVKVNEKRLKGLQKGLARCKPGSKNRYKMKLKIQRLYLKIKNARKHMIFKLANKILKESDIVAVETLDVKSMYQVHSIAKHLNKVPIGDFLSVLKYKADWLGKKVININKYFPSSQCCNRCDYKNEEVKDLSVRKWICPKCGFEQDRDINASENIMFEGLKIYMKESII

SEQ ID NO: 56251 - protein, 370 aa, unknown
  TnpB Polypeptide
VLLYQVLKIVAKIKLLPTPEQSALLLTTLHRCNECANWLSAEAWNIKVFSYFALQKPLYHPAREQFKLTAQLTVRVFSKVADAYKLDKNRLRVFGKTGAIAYDDRILSFRKESHVNIWTIGGRQSIAYIAGPRQIEQLKQRQGESDLIYHRGKWYLGVTCNVEEPALREVDEWLGVDFGVSQIATDSDGGSYSGDTIKGVRYRRRKLRSKLQRKGTRGCHRKLRELAGREYRFASDVNHVISKQIVAKAKDTGRGIAIEELRGIRNRITAGRKQRAVLHSWAFSQLRQFVEYKARLAGVAVAVVDPRNSSRECSECGHIDKRNRPSQSKFRCRSCGHEAHADFNAATNLRERGRASASRPNVAQKLAATS

SEQ ID NO: 56252 - protein, 370 aa, unknown; identical to SEQ ID NO: 56251
  TnpB Polypeptide

SEQ ID NO: 56253 - protein, 288 aa, unknown
  TnpB Polypeptide
MESEAQVNVITSKKIRIYPKYETLWFDSLNLYRRAYNLTIEFRTQICDWCRIECEDNDVTFNCNLIQAAYRKACDTRTTVIKKRVNGEKAELSFMSRMAPHQYFVAPRLSAKKQIFPNILKGCTWTEKVPEDAIGKTVIVTYTNGQWFANVKFIQPIQQVATKKLSMVKKSDETRKRFIRRKTVRGMLGLAHYKFKQTLKWMAKKYGKTVVDVNESYTSKTMWNGSILKNLGGKASILFQGKRVNRDIHGARNILIRFLTKVIEILSPRGAYPLDITKAEFCGFGVFQ

SEQ ID NO: 56254 - protein, 431 aa, unknown
  TnpB Polypeptide
VAVLPANRRRLPRPRPGQRQNHPHRHHQYARRRCPSGAERADHPRPHPQAPRHRRFGLLRPPRHIQRPHRGDQRTTRTPPRHRPRIPQPHQLHRTLTTRSRRVQTATTPWNRMSLVTIKNATVTQRGGRWSIAFSCEVSRTARVRPAPTPRQRAGGTVGIDVGVKVLAALSTGELVPNPRTANTLRAKVTRIQRGIARCEKGSKRQQALYSRLARTKHAEANMRRANLHELTTRLVHSHAHVVLEDLAVKAMTSTARGSIAQPGKKVRQKAGLNRAILDASFGELRRQLTYKTSWYGAQLTVADRWAPTSKTCSACGWRHPSLTLADRRFHCGACGLQLDRDMNAARNLCQLAAADALPDGEPTAVVASTAGETQNARRANISPPAPPGVGGSRRRREKPAPNHLAGIRRATHDHKVVASTNPHGTPAPSP

SEQ ID NO: 56255 - protein, 214 aa, Halostagnicola sp.
VVIDFPEIKEERHRYFTMRKRMQNNGKSSFDRAFEQQEERFVHDQLHKVSRQVVEWVSQFEKPVIVFEDLKEMRNSIDYGTRMNRRLHSLPFHKLREFITYKAAFQGVPSDKINPEYTSQACSLTECEHTTRGNRNKKRFKCVDCGRQDHADRNAAINIAKKGLAKLDRNVPALKTLPNVRKLRRQASGCVTQPTVTHDTARGHHADGVAGVSD

SEQ ID NO: 56256 - protein, 420 aa, unknown
  TnpB Polypeptide
MKNVAKVRIYPTDEHKEALSQAFGCARWFWNNSLNATNELYKETGKGLSQIGMNSRLPELKKEFTWLKDCYSQVLQSVSLNLSRAFINFFEGRASFPNFKSKHDKQSIQYPQNVKLLDGALKIPKIGEVKAKLHRTFEGKLKTVTISMSKTGKYYASLLFDNGLPDALISSYGKAVGIDVGLTHFAITSDGSKFDNPKPLKKREQNLKRKQQKLSRKEKGSKRRAKARRIVARVHERIANTRKDFQHKLSRKLVNENQVVVVENLAVKNMVKNHNLAASISDCGWSEFTKQLKYKAEKDGKTYIETGRFFPSSKTCHVCLNQFASLPLDVRSWTCSNCNTKHDRDVNAAINIRDEGLRLLALGTSATASEGNVRPRVGRKSSVSKAVAVETGSPRKDRKRDERRVVHVISCLNTYGRMPP

SEQ ID NO: 56257 - protein, 501 aa, Acidithiobacillus sp.
MMRTYPYSHAATARKERQIWDVLRAYRQSAQQIANDQWKSLFITGGLEKDGPICPADHVISKRYRQTCQRQVVGVLKSWLSNRKNDFRMLVTHSSLGKDQTENGEHLRIQLFFINKHGLWFKDRVVMRKETIPPEVMRLARNIFRRLMNMHNKPSFRHVGMALDAKVARVEAPNKAHNAEFPYWLTLATLNPRKPIHIPLYENPYALAADGDEKAFVQINVRRGTAIDGRPGALDIARIKEAAPVFSLERPRPQIVDTLGIDVGLRTLVATSMGELLGRNLIDRLSHLDAQISRLAAERQRQGLPVRSRRYDTLVNRLRSFLKNEIGRVLNGLFARVHPAKVVIESLDFRSPDLSRRLNRLVQNFGRTWFRQKLDMLSEQYGFLVEEVHAAYSSQTCKSCDYVAKNNRSSQSKFHCRFCGRKAHADPNGAEVIRQRRSLPEYALWRTKRQVLQATVGRFLKRWSGRLSGMQVDSALRRVVESNPYFADFRTALWPGSTPTG

SEQ ID NO: 56258 - protein, 370 aa, unknown
  TnpB Polypeptide
MLELFRQMLNDCIRIGLAENSTSLKSLSINAYSQLADYQVPSYYKLCAISGATGILKNYWKAKRKGRRVNEPYARRLQLTTCYGFKVIDGCLLVPFKPKQPIHIPLNRHTHEAFSEPNITIRSFTLTEKTLSIAFAKTVEAITPLGFVGIDRNLDNVTTADSTGLIEQHNLSRATEIKAVYRHVKSHMIRNDRRLRKSVFQKYGVKQHNRVQQILHHASKQIVLNAKRNQFGIVMEKLTGIRKLYRKGNGQGRDYRGMMNSWSYAELQRQIEYKARWEGLPVIHVNPSGTSVKCSVCGSRMKPEENRQLKCQTCGLTVDRDVNAARNILARALRFRAVGFAEEAMVQEPAQHQAVILRVDANQLTRRPPT

SEQ ID NO: 56259 - protein, 226 aa, Escherichia sp.
VKRLQAFKFQLRPGGQQEREMRRFAGACRFVFNRALALQNENHEAGNKYIPYGKMASWLVEWKNATETQWLKDSPSQPLQQSLKGLERAYKNFFQKRAAFPRFKKRGQNDAFRYPQGVKLDQENSRIFLPKLGWMRYRNSRQVTGVVKNVTVSQSCGKWYISIQTESEVSTPVHPSASMIGLDAGVAKLATLSDGTVFEPVNSFQKNQKTSQSHNDRQQKPRNDSH

SEQ ID NO: 56260 - protein, 414 aa, unknown
  TnpB Polypeptide
MIRNSKHSTKFTNLQKMKTLALFISEYRKIGQEIVDIIWNNGYEEFNIQEERLNCPKYLDYKKFNINTSLSARALSSLVTQICFSLSSATKKRKQILYAKNKLISEGKPLGRIDKILDKYKLIKPNFSNINPELSSKCCDIKDGNSFNYFLRIKSMGKIYGHVKIPIKNTKVSLKWLKNGKLLNSFSIGQQYISLRFNITNKNVNVGTKIIGIDQGLKDVATLSDHQITPKYDIHGHSLESIISTLSKKKRGSDAFIKSQEHRKNFINWSINQLNFNDVKEIRLEKIWNIGYKQRTSRRLSHWTNTLIRDKIKRKCEELEVPVIEQDSSYRSQRCSCCGLVRKANRKGKIYKCKTCKFEADADYNASLNHIVDLPEISWQFRNQRNNLKCGFYWKPSGLFNIDGVELRVPLSTD

SEQ ID NO: 56261 - protein, 367 aa, unknown
  TnpB Polypeptide
VVREKYPSVPSHYIHEAIRDASQRIKSFTKLKRKGLAKTDKPIVRKWSVGCDNQLWKLTLRGVRIATHKGWINIPVQFHKLFWRYYNGGWTLRSSVRWKLVKNKLYLCIVFAKSVEIKEDSPTRIYGIDINENNVTIYEYPSNKAITIVTNFSKIVLGYAYRRAEIQQKWSKRFGVKGNRRLKVSLRKLRERDVKRDVRLKLAKKIAETVKDGIVVLERLPKRFQDRVIEKDSRLNGLGIHRLKQSSIRGIHRLIIEMLVEHNIPYILINPSHTSSICPVYGSKLASITGYAQRNGWKPRIMKCSKCGFTHDRDVIGAMNLVKRCLLDVGLMPLAPKGAHDLHVEWLVATMKRGEEAQPVLARPTMT

SEQ ID NO: 56262 - protein, 451 aa, unknown
  TnpB Polypeptide
MHRDTFTHPARTFKSIDVPNVLIRSYRSLVFRMRMDDARLHWLLTEFRLIVNKSIRIANESGIRSRTRLAQVAYRGLAQEHDVYKQYIPSAFEAALGALKAHRRRLRKGKRSSVPYIRRLFLKAENQSYWLDRATGRIKIPVRSGEHLEYSLSVAKWHRSFLKDEDWKLGSMTIVPGKVIVVVRKEAPRIREPTSVIALDTNEGSLDGVLSTARGSQLVNASFERIPQIQLLHFRRRRRLDRKKRHDRRLARQLLAREGHRERNRVRQRMHRVSKIVVAVCKAKNAAIVLEALTLYGAGGRSRRMNRRLSSWPRREIHRQIEYKAALEGVPVVKVNPAWTSKTCPVCGARRRDRVGKVFVCEMCDWEMDRQINAGMNILKTALASNEALARAVRFQPGALRHDVVIPLYDLLREGGGAREEPSGVESAVARRLRKAAARQNHSLLEPSSAT

SEQ ID NO: 56263 - protein, 441 aa, Clostridium sp.
MQVVSSYGAEIKNKNIPIRHTLALYREAVCCLTEIYETVWTELSMIDQKKRRFNEAEHLVHETKKNHARFDFDARFPKMPSYLRRAAIQHALGSVSSYHTRLEQWKDGALSGKPKLVYENHAMPVFYRDVMYKPGEESEDAACLKLYDGHDWKWFCAGLLHTDMEYLRRHWSGKKSSAPVLEKRHQKYFLRFSYTEEVTLSKTPIEDQIICSVDLGINTDAVCSIMRSDGAVLDRKFINFPSEKDRLSHVLGRIRRFQKEHSSKQIGSRWAYAKRLNTELARKTARSIAEYAHENHADVIVFEYLEMKGKISGKKRQKLHLWKEREIQTMCEHKAHRYGIRVSRVCAWNTSRLAYDGSGPVSRDPKNHSLCVFQSGKQYNCDLSASYNIGARYWIREIIKTLPETERSSLEAKVPAVERRTSCVYADLLILKNEYGCSKAA

SEQ ID NO: 56264 - protein, 412 aa, Halorubrum sp.
VTELTKTLELKLVDPNAHKREKLRETRAAYQQALKEAFDARCTTLGEANDIVGDYQLSGYAKNALKRYVPQLTTTYGANELSDDHPVRFTNEGVKIDHKPENTIEWYVKIPHHEDYHLWVPAKPNPEQRDWLEAVIAGDADVGEGRLLKRDGTWYFHLIATRDIPLNSEVPPEQCTPIGVDIGEASLVTVCHRDENGSPTNPELWTDEGKTVRRLRKRYFTTMRRLQSRESERIADDFGDELWAQIDDILHTVTREVVEYAESVETPVLVLEDLTYIQESMDYGDYMNRRLHGWGFAKLHAQITYKAAERGIPVATVDPRNTSQECHACGEGGTRPQQATFKCSNDACWIEEYQADINAALNIADRYLSGESRSREHENDDDSAEDGASLTGPQDSQADAETQQSTLGTYAS

SEQ ID NO: 56265 - protein, 377 aa, Aneurinibacillus sp.
MLINKAYQFRIYPNKEQAVLINKTIGCSRFIFNHFLAKWKETYKETGKGLTYNTCSSQLPQLKKAFVWLKEVDSIAIQSSVKNLADAYSRFFKKQNDAPRFKSKKNKVQSYTTKHTNGNIAIVGNKIKLPKLGCVRFAKSREVEGRILHATIRRNPSGKYFVSLLVETGVQPLPKTNSEVGIDVGLKHFATLSNGEVFGNPKFFRTLEEKLAKAQRILSRRQQVAIKQKRKLSEARNYQKQKRKVARIHERVANARGDYLQKISTHLVKNHDILAIEDLQVSNMMKNHKVAKAISEVSWYQFRTMLEYKAKWYGRTVVAVGKTFASSQLCSCCGYQNKEVKNLNLRQWKCPSCHSEWDRDVNASLNILAEGKRLLSA

SEQ ID NO: 56266 - protein, 380 aa, Kurthia sp.
MPHQAYKFRIYPTKDQQALIHQTHGHCRFVYNHFLALWNTSYKEEGKGLNRSIMSKMLTKMKKQDDTAWLRNVDSVALQASYENLLDAFQRFFQKQNNYPRFKSKKNPVQSYTTKNTNNNIAIVGNQMKLPKLGLVKFAKSRDIEGRILKATIKYNASGTFYVSVLCEVPDFKPLPQTKEAVGIDLGITDFAILSDGRKMDNQRFTAKMEQKLKREQRKLSRRYEQAKKDGRDLRACMNYQKQRRRVARLRERVAFQREDFLNKLSTALIRQYDVICIENLNTKGMMKNHKLAKAISDVSWSSFVQKLMYKAKWFGRKIVEIDRFFPSSQLCHACGHRDGKKTLDIREWTCSSCDTTLDRDINASRNILAEGLRILNQQP

SEQ ID NO: 56267 - protein, 316 aa, unknown
  TnpB Polypeptide
MVVLCLAQVVEPSQNGLAVDETTGEPWWPENSKEAYNSGLESLADALRNFSKSRKGRRKGRRMGFPRFKSKDKAVPRFAYTTGSFGLIDCDPHALRLPKIGRVHCMENVSKRVNGAKVLRMSVSKRGGRWQASLTVERADLPIPSPPKGGSVGIDLGVKELVTLSDGTVIHNPHALKSNLRRLKKAQRNLSRKRKGSNRRRKAGARVARLYARVANLRSDVLNKTTAMLAHTYADISIEDLNVAGMVGNHGLAQSIQDAAFAEFRRLLTYKTARTGARLQRHRPLVSKLEDLLELRDGESQAAPVRARLPLRQVRA

SEQ ID NO: 56268 - protein, 181 aa, Cyanobacteria sp.
VDNPKFLRKDERKIKRLQRCLSKTQKGSNNRAKARNKLGRAHLKVSRRRNDWVCKLAQHVIQSNDLVAIENLKVRNMVKNHCLAKSIFDSEALASLRASAAWYRFREWLEYFGVVYGVPVITVNPSYTSQNCSNCGSRVVKTLSTRTHKCPHCGFVADRDENAALNILKSALKEWANTVGR

SEQ ID NO: 56269 - protein, 209 aa, Cyanobacteria sp.
LRKDERKIKRLQRCLSKTQKGSNNRAKARNKLGRAHLKVSRRRNDWVCKLAQHVIQSNDLVAIENLKVRNMVKNHCLAKSIFDSEALASLRASAAWYRFREWLEYFGVVYGVPVITVNPSYTSQNCSNCGSRVVKTLSTRTHKCPHCGFVADRDENAALNILKSALKEWANTVGRTEFEVSGEIPLCKNRGNLTRVRELEERESLTSNG

SEQ ID NO: 56270 - protein, 416 aa, Halobacteriales sp.
MWYDYRFRAYPDRTGVTAEAERHIDIHRQAYNHTRYEYDTLDTDEDKVGSAYQHQKRLTEWKDEWPVFSQAHSKALQKTVERFYDNLSNLSDKKEKGYKVGELRWKPPREYQSVTYSQSGFELKNTSGRTAILWLSKIGDIPICHHRSIPDNATIKEVTLKKETTGEWYVTFSLEVEDNALPKKPDVDDLDTKDCVGVDLGINNYIYTSDGDSVDWLDLSDEYDRLRREQRSLSRKEHGSNNWEKQRHGIAKVKRRIKRRIEDFQHKLTTWLVKEYDAVFVEDLNVSGMLQSEGNARNKQDASWRRFIEMLEYKGDLYGTHVVQVYPRGTTKECAECGVETDKPLWVREHSCPSCGFEVDRDANASYNVLARGLQELGLGQAEVTPVETATAVETDGGWSSSVPASRVIETGSLGA

SEQ ID NO: 56271 - protein, 403 aa, Natronomonas sp.
MEKRRTVPVRLDVDSDDDVLLRETVDEFLWTANYVTRHAFEGEYVTTSKTTLHDDTYEDVRDEGRLHSNHVQAARNKAADACKSVVERRKQAKKASIPHFTSPHLVYDHRTATFHNDYVSIATVAGRIEADYVLPDKERDTPHSAYFFSDEYETTGAELHYRNGNWMLHIHCKRNVETDTSEQATTENGTVLGVDLGVNNLAVTSTGTFWTGEEFDHWRREYEKRRGDLQQCGTRWAHENIESIGRKEEGRFKITLHRISNELVNEARETECSVIAFEDLTDIRERTGASWGHKWAFNRLYEYVEYKAAEYGIEVEQVDPENTSRRCSTCGFTHPDNRQSESFECLKCGYENHADYNAAKNIGLRYLRRNQTGDDGGAPVGVRLNSGTLNVNGEHEPPASLEA

SEQ ID NO: 56272 - protein, 403 aa, unknown
  TnpB Polypeptide
MAKKAYKYRLYPTKKQEKVLFWTLTRCRELYNAALAERKEAYRLAGKIISYYEQKRDLPAIKAEIREEYQGIHSQVLQDVLLRLDKAFKAFFRRVRNGEEPGYPRFLGRNRYHSFTYPQTGFSFTHDSHVCLSKIGSIKVKMHREMQGTIKTATIKHEAGQWYAVFSCEVEQPERLPVVDSEVGIDLGVTHFAALSDGTFIESPRYYRKSQKHLEKRQQTFSRKKRGSHRHEKERLAIAKAHRKIANQRRDFQHKQSTQLVKQHQLIVFEKLEIKNLTKHVKPKQDEETGQYLPNGAAAKSGLSKSILDAGWASFQQMCVSKAAYAGRAVLFVTPRYTSQVCSQCRAVRKKSLDERWHSCECGCELDRDTNAAINILWLGRSQRGVTCVETPVFSLGVLHRVQ

SEQ ID NO: 56273 - protein, 368 aa, unknown
  TnpB Polypeptide
LLGKTFGCCRKVYNSMLEARMKSYEMTGTQCRTKPTDYYADFPFLKEVDSNALTGEVLNLNAAFKNYFERKADGVGFPKFKAKHRDRDSYTSYRTKDNIRVEEGKLRLPKVGFVTFKDYRDVDWGGKCIKHVTVTRSRSGKYYAAIMVEEEAPEALPANGCSVGIDIGLKDFCVTSDGETVANPRYMKQAEERLAVLQKAFSKKSAKSNRHEALRKRIARLHEHIAYQRKDFLHKLSSRLIRDNQTIAVEDLDIRQVAEGDHAKSEHDTGWGMFMNMLKYKADWHGRTIVRVGRWFASSQICHCCSFRNGDTKDLNVRSWKCPQCGTSHDRDFNAAINILAEGNRILADGMAVKGAETLEAVREAHRL

SEQ ID NO: 56274 - protein, 413 aa, Succinivibrionaceae sp.
MILSTCFYIDNTGWFKEQFELSRCLFNQARYFFRDYYDKNKSIVNQTDLEKVLRTQDTKLNYYRKLCKAKLAQTIVISLYKNYSSFFSAIKEFKVHPEKFNGEPKAPKYKENPNVLYFDYQSARIKGQFIILNKDIKIHIPHNIFEKYKGDLKNFKTINFIPKFNKIKVCISYETEELNSDLDQNQYLGIDLGLNNLCSCVSEFDCFIINGKPVKSINQHYNKEVSKLKSEKPLIGDKQDFNYNKFNIFKLGFKRNLKIEDYLHSASRNIVNFCVEHKIGTVVIGRNKQWKDSIALGKQTNQNFVSVPFFKFINMLRYKCKMAGINLAEQEESYTSKCDSLAFESVEKHEEYKGKRIFRGLFKSSTGKVLNADMNGALNIVRKYLAKLKVADESFVKGIIGRGLFARPHIITF

SEQ ID NO: 56275 - protein, 421 aa, unknown
  TnpB Polypeptide
MRGRRTPHQQRAYRIQLTPTPYFENLCIRAKNLYNMALYLVRQEYFATKQWLQYIALYRQIKTHPAYLALKELTDSYIPQQVLRQVEQTWRSYFQAKKAWRIDPTQFQAKPRFPGYKPKNGRYHLTFPHPRVRVRGSQLLFPQNMLKRGFPAIPLGKFPFTPQTHLSARFLPFYDRYVLELIYEVPITPATLASAFPPPRLLGVDLGVNNLVATSDGFLIKGGVIKTINQWFNKQLAKYRAHAAHQKQSEPTHRLLRLFRRRSNQITNILHQSSRKLIKHCQAQQIDTLVVGYNPHWKQGCELGKRSNQNFVQIPFLNFLQMLEYKAAQAGIHVVQLPEAYTSQRCSQCGVVRKANRQSRGLYQCKVCLLRLNADLNAARNLIQNYQHHLASTKVIPRDPLSLKKGVFPDSGCVTHPVQNS

SEQ ID NO: 56276 - protein, 396 aa, Actinomadura sp.
VAVRRAYKFLLRPTSRQAGALAACLEDHRQLYNAALEHRRTAYRKAGVTVRYGDQSAELKHIRADDSDVQGRWSFSSQQATLRRLDKAFRAFFDRVKAGRKPGFPRFKGRGWFDTVTWPKDGDGCRWDSQPEHPTATFVRLQGIGHIRVHRHRPVKGRVKTIAVKREGRRWFVVLSCDEVPAEPLPTTGAVAGVDMGVASLITTSDGAHVPNPRHLAAAADRLADAQRDLARKKRGSVRRCKAAARVAALHAKVRRQRADHAHKTTNALVRDYDVIVHENLLITNMTRSASGTIEQPGRNVTAKSGLNRSILDAGWGVFLRVLAHKAESAGRELIAVDPRNTSRTCAACGHCAPGNRATQAEFRCRACGHTAHADVNAAINILRAGLALRDAAEAA

SEQ ID NO: 56277 - protein, 405 aa, unknown
  TnpB Polypeptide
MNKMRESYQVTWDFCRTKMMELKETYHLQSIFALSRAEDIWAAIETILYSSGRRLHFKKRGDLPEIRAKQSTRGLVIDSSQSGLIVKYGKVTIPCKYKAKDLWLWDEEKAILAYLAEPELQDAHAVDQMSKGIITDTYRPCFASLVCKKIRGRLRVYVHITVEGKAISKRRKDNTSRHYYGKGNVGCDIGTQTIAYTSNTEVGLENLAERGNSIQHVERQEALILRAMERSRRAMNPNNYNENGTVKKGHKQWIFSKRYQKLKQRHQELCRIAAENRVLAIREQVNHLRSLGDCFITEPPNAKKLQKRANPENPVDKNGRMKRKKRFGRSIKNRCPGYLQAKAKRLFESTGGTYVEVPILYRASQYDHTSDTYIPKKFISANVSSDRRNKGSKRLVFLLLTVLYQ

SEQ ID NO: 56278 - protein, 411 aa, unknown
  TnpB Polypeptide
MLLTERHIIKKSDPQFTEADKLCFLSKNLYNAGLYQVRQHFFEHKTFQNFVQSNENFVKSNNPDYRALPAKVSQQTLKMVEQNFKSFFGLLKAKKSETYTKKVKIPNYLSKEGKFVVTYTDQAFSKVLLKKGILNPSKTKLKIKTDKQNIRQFRLIPKGSHIVAEVIYEVAEEVLKKDNGKYASIDLGLNNLATIVSNVSKPFIINGRPLKSINHFYNKSKAKLQSILGDKKTSKKIQQLGYKRNNKITDYLHKASRFIINHLVSEGINTLIVGYNKEWKQEINIGSKNNQNFVQIPFTKLLQMLEYKCKLSGILFKKQEESYTSKCSFFDNEVVKKHELYAGKRVKRGLFKTGNNLMVNADVNGSLNIMKKAVGEVDFRYPIQVCSTPHKVKTAGLYPAKTLTKTNIVFV

SEQ ID NO: 56279 - protein, 262 aa, unknown
  TnpB Polypeptide
MTNDAIRIGLANNNVSALKKLSMLSYKELKRYRNVPSCYKLCAISKAAGILASRKKSIKRGHPTKDPYLKKSIVVSCYSFKIVNGELRIPIGRGKYEFISLNAHTVKILASDPDIKVRSFTLTERSLSLCIAKEVPEITGITSAAGIDRNLRNLATGNPSRVAYYDMNKIVEIGETTKGIIKSFVRNDFRIRKRITSKYGRRKKNRTQSILNLVSNDIITFCSLNRLAIVFEDITNIRSMYGKGNYQGRKYRRMMNNNWPFT

SEQ ID NO: 56280 - protein, 330 aa, Micrococcales sp.
  misc_feature (278)..(278): Xaa can be any naturally occurring amino acid
MRFRLYPSAAQEVLLLGQCGHARYVWNLGLEQRLMWARWKGPTPGFNAQAAQLTAARTAEPWLACGSQTVQQQALRDLDQAWQRFFAGTHRRPTWRKAGEHEGLRIVGPQALRVRRDNRARSSVLVPKVGWVWFKRSRDLADWRSYRITRDRAGRWHIAFAVVPEPILAPGTGGVVGVDRGVSVAVALSTGEMTSLAGLSPKEAERLLRLQRRLARARRGSNRRRKAKTLIGRLKAKEVDRRKDWVEKTSTDLATGFDVIRVENLNIKAMTRTARGTXPGWSRRLPAGSRRSKLRTRRRPVTPASTSHRRVARAKRPSCAWLAGIGRTPT

SEQ ID NO: 56281 - protein, 441 aa, unknown
  TnpB Polypeptide
MTKGSRVGISEKSDIQIADQYHMDALPTVVDLSHGSSMVDSMLVRYRYRIDPTPGQRQALARTFGCARVVYNDALRERERAYLAEEKLSDTEVQRRVITLAKSTPERAWLADVASVALVQACQDARRAHHNWLDSRSGRRKGRRVGHPRLRTKRLRQSIRLTRNGFTLHGEWLYLAKIGDIRVRWSRELPAVPSSVTIIREADGRYYASFVVARNATPLPPILRTAAADLGLTHFAVIVASDGSIERIANPQHLRAAERRLARAQRAFSRTQPGSANRTKARLRVAVAHRKVRDKRLDHHHKLALRLIRENQAVAVEDLCVAGLARTWLAKSVYDVGWAMFVRLLTEKAAQYDRTLTKVGRWEPTSQICSACGVKDGAKPLSVRSWTCATCGAAHDRDVNAARNILVTAGLAETQNACGADISPPFGAAVGVEAGTHRGVA

SEQ ID NO: 56282 - protein, 532 aa, unknown
  TnpB Polypeptide
MPDKTRPTLEPFCMPESPVGVRKPTLTDKLQNYWNSIHQPNSLPTLPPDSISKGKDLDPFWKPSVQAMSALLSLPTKTDSPGLALNLLNGSVSSMEQKSWFSTKTIFLQNEKWSKTYLPLFTSFPADSTDLENIKLKSRKIQIYPEPALAKIWKTWMAATRYCYNQAISQQKQERLGKLKLRNKVMQSDLPKWVKDTPCHIRQNAVFDAHRAYSASRNAKYRSIRNPRSTIKFNDANFRDRMWFKSKVKGLKFTASEPVPASCKYGTTLVLHRGNWFAIFPEEYDSRPSGSNSAIALDPGIRTFLTGYDSERVIEIGSGDIGRITRLCQYLDELMGKMTKVSAKQRRVMRKAASRIRSKIQNLVDELHKKAAHFLTTNYQVVFLPTFEASQMVKRAKRKINKKSARQMLTWAHYRFKQIIKHQADKNGSIVVDVSEAYTSKTCGNCGHIHRKLGGSKVFKCPNCRTVIDRDLNGARNILLRALSDSTCSVSNDGIAIVTSPALHSYVEKCERVNESVRLLSFSEYNEDSPGR

SEQ ID NO: 56283 - protein, 205 aa, Nocardiopsis sp.
MAGTWCYGCAPRPRSPHPLSARGVGIDRGVAKPLALSDGTFREHGPWMTMGEAERLRRLERRAARQRRHRTSGQPSSNRLRRTYDQIAGVRAKAKRRVLDWQHKVTYALAEEFGVVGVEDLHITSMVRSARGTVEAPGTNVRQKAGVNRAIAGQAWGRTVALLEYKLADRGGHLVRAPAHTHLAAPLGMPGHHRGQPRVTGPVRL

SEQ ID NO: 56284 - protein, 424 aa, Nocardiopsis sp.
MRTAYKCRAYPDPEQQAQLGRTFGCARLVWNKTLADRRTAYHQHGGNTSYKQTDQALTGWKKTPELGFLSQVSSVPLQQALRHQHSAFANFFAGRARYPRFRTRTGRQSAHYTRSAFRLRDGALFLAKHKRPLKVAWSWDEVDLASLDPTTVIISREADGRWYATFAVDTDAPDPAPQTEVEVGVDLGVKDFATLSTGEKIANPRHLERKARNLKRYQRRMARTQRGSANRCKAKRKVADAYRKVRHARADFLHKTTTRLVREHDLIAIEDLNVRGMTASARGTAERPGTRVRQKAGLNRAVLDAGLGEFRRQLEYKAARAGRVLAVVDRWFPSSKTCSACGYLLDKLSLGTRSWTCPSCRTRHDRDHNAAKNTLAAGRVAAREAVSGDAWGAGVSRQGSSLPLSAAKQETGPVRVAARAAPDC

SEQ ID NO: 56285 - protein, 393 aa, unknown
  TnpB Polypeptide
VIRSSKLSINEANTGKLTHVDSLFCEFRSVVNQLIDKFWRLDRLGIFLLTKGNKVDSWLSARLQQAAGKQAIQIIKSVRKKDRDIRYRRYKKIYFKLKRQDRLHRFTEKRFSELKLSWKIKPEYKQDVIEFDERFVDIQFDSNSFDVWIRLTSLGNKLSLKLPAKRNKHFNKFYGVGELKKSVRLRKDGLNYFVDVFFGVPEPEKCKSQKSVGVDIGLNKLLSTSDGKFFGTEFKDLLNKLERKQYASKSYLRTVAQVKNYIGESVNKMNLSEFGVVVLEDIKNISKNTVGRLNGTMRKYLSRWNYAYIRKLFVNKCEVGGSELIFVDPAYTSQTCPVCKTVDKASRRGELFTCSCGYRNDADTNGAINILLRGLGQEFIVPGLTQNVFILKT

SEQ ID NO: 56286 - protein, 402 aa, Streptomyces sp.
MQLRYSFRLYPSAGQRIGLARAFGCARVVYNDALRVRETARGEGLPFPKTGDLSKQLITEAKSRPERAWLGEVSAVVLQQSLRDLDAAYKNFFDGLKGRRPRMGAPRYKSRKDTRQAVRFTANARWSITTGQKLRLPKIGDLKVKWSRSLPSTPSTVTVVKDSAGRYFASFVVETGPDEIWPQTTPEVGIDLGLGHFAVLSDGRKIDSPRFLRRAAKRLRKAQRALSRKEKGSKNRDKVRIRVARAHARVADARREFHHQLSTRLIRENQAIAVENLAVKGLARTRLAKSVHDAGWSAFVTMLEYKAARYGRTLIRIGRFEPTSQVCSQCGFKDGPKPLHVRVWTCGACGAVLDRDINAAVNVAKAAGLAVTACGAQVRRAPVPAPRSEAGTHSTPQLPTAR

SEQ ID NO: 56287 - protein, 284 aa, unknown
  TnpB Polypeptide
MMLAHRVRLVPTAAQEAYFVRACGVARFAYNWALAEWQRQYVAGEKPSQGLLRKVFNALKDANFPWMREVTKNAPQQAMKNLGRAYANFFNDLKKYRRNEIPWKRVRVPTFKKKGKTRECFRADNGPDKQHPDAVQTDGMRVKLPIIGWVKMREEVRFAGRILSVTISRQADAWYASFSIEVQYEPEVRADARVVGVDLGITALATLSDGTPKTSAPKPLRRSLQKLKRLSRSLSRKERGSKNRAKAKTTLARLHRRIADIRADALHKRNRLLKAVLTASGLSC

SEQ ID NO: 56288 - protein, 163 aa, unknown
  TnpB Polypeptide
MKTSRWKTRFLYHRERRPAAQDGPQQTVTHKLTTDLVNRATIVIEDLNVSGMLANRHLSRAIADLGLFEFRRQLDYKAGMAGSTVVVASRWFPSSKICSACDVKYDTLTLSERTWTCSSCGTFHDRDMNAAVNLARYPESWAGSACGAEGAGDGQQTVVKPAA

SEQ ID NO: 56289 - protein, 400 aa, unknown
  TnpB Polypeptide
MMLAHRVRLVPTAAQEAYFVRACGVARFAYNWALAEWQRQYVAGEKPSQGLLRKVFNALKDANFPWMREVTKNAPQQAMKNLGRAYANFFNDLKKYRRNEIPWKRVRVPTFKKKGKTRECFRADNGPDKQHPDAVQTDGMRVKLPIIGWVKMREEVRFAGRILSVTISRQADAWYASFSIEVQYEPEVRADARVVGVDLGITALATLSDGTPKTSAPKPLRRSLQKLKRLSRSLSRKERGSKNRAKAKTTLARLHRRIADIRADALHKLTTDLVNRATIVIEDLNVSGMLANRHLSRAIADLGLFEFRRQLDYKAGMAGSTVVVASRWFPSSKICSACDVKYDTLTLSERTWTCSSCGTFHDRDMNAAVNLARYPESWAGSACGAEGAGDGQQTVVKPAA

SEQ ID NO: 56290 - protein, 417 aa, unknown
  TnpB Polypeptide
VFCVKRIERVRLYPTARQDAALRFMLDVTRELYNAALQERRDAYRLRKLSVSAKMQYAELTALRQPATWIDSRVAAVYRECEDAVLCRLDLAMQAFFRRCKRGETPGFPRFKARDRWKQLTFPHGDRALKLDTTQSKVTVPGIGSIKLRKGRNVPAFGRAWLVERNDRWYACFECERNVQPMPATGVLLGVDRGVHVLAVLSDGTLIPNAAVGEKRKVATKRLQRELDAASVFVGSGRGRRCVNRRDPKRIAAVKRLARAKEREGNARRDYAHKSARRIVDRADVIGIEALRLRNMTRSAKGTTEQSGRNVAAKAGLNRVVLDAGFGLLEQMILAKAEEAGRRVVRVNPRFSSQECSQCGTIARESRRRRRYECITCGYRNHADVNAALVIRRRAQLALMSEPIPAEDAGGRVRCAA

SEQ ID NO: 56291 - protein, 339 aa, Methanomicrobia sp.
MDRKTEEARATIKGKLELEDLERAKVFYTMRLFKEAVEKAHHLIKKGLSKGEIVKSLYWTIPNTHYCEAAYAKAKLYSEQNHLKLKNPLLFSTGKGAGREEGNRNIKIKGNEVKIKIAHADGKHEWVTGKLIIQKRYLPILNELEDYGYSAGISLKDNRYRLHISVPVELYAKKDNVKRVKKEAKNIASFDLNSDRINMTLMRSNGLLIEARNKNFPEVNSPGYSENKAKDTRLKALSELIKYATAHDVKTFVFERLKMKGAKNISSKTGNRKMSKFAAREFLSHAEIMIRKRGGEFKQVNPAYSSKNARIINQDLGMDVHTASALVLGLRYLHTPKNI

SEQ ID NO: 56292 - protein, 390 aa, unknown
  TnpB Polypeptide
VRRAYKYRLWTDADQERELAAMVETHRRLYNDCLHERKARYEAEKVTVKYAEQSARFKVQRATNPFYARLNFSSAQATMRRLDKAFGHFFRRVKSKAGKAGYPRFRGRDRYDSVEFPAHGDGIRLTGDRLRVQHVGTIRVKLHRPVGGRVKTVTLKREADKWYVVLSCDLGDVPVPPSANPPVGIDMGLEKFLSKSDGTTPEPNPRYLKDALPELRRKQRACARKAKGGKNRRKAHKAVAKLHATVANLRREHAHQVALKLVRRYGTIAVEGLSIRNMLKNDRLSRAISDVAWGSFLLTLKSKAESAGVSVVEVDARGTSQECSGCGRVVAKDLSQRWHSCDCGCSLDRDENAARNILARGLPAWTKPAGRNVGQQVKRAPRSRRVHATE

SEQ ID NO: 56293 - protein, 384 aa, Thaumarchaeota sp.
LFITYRYRLYPTKMQARLMEETLETCRRLYNDLLAETTKNHMSFYQKQASLVTRKTRSKYLQAIHSQVLQDVNVRLDKAFVSWFKGLTKKPRFKRRGRYNSFTYPQYENGFRITGNRLILSKIGSIKMKVHRETTGEPNRCTIIRDLERWYAAIQVEAPDVKIEQDKNKPPIGIDLGLMILAVLSDGATFENPHHLKQSTVRIKTLQKSLSRKKLSSRNRAKAKIVLGKAHRKIRNQRLDYTHKVSNHLAKNYSTVVFEDLHISKMLKNHNLAGAIMDAAWGQLRTFTAYKAERRGGREILVPSHGTSQECSRCHIVVPKTLDMRVHRCPECGLVLDRDVNAAQNVLRRGLEQARAEAQPLLVAHRRISKFVPRKQEAHGFSRG

SEQ ID NO: 56294 - protein, 438 aa, Goodfellowiella sp.
MSAPAVLWRGSHSIVILRGFARVFDADGVQLHFNFRVCPTPVQQQSLARAFGCARVVFNDGLRARQRARENGEQHISDGDLSKLVITAAKHTPERAWLGEVSSVVLQQALADLNMAYHNFFASVTGTRKGRKVAPPRFRSRKDHRQAIRFTRNSRFAVLDNGRLRLPKVGDLRVRWSRPLPSDPSSVTVVKDAAGRYFASFVVQTGENERLPPADPEVGIDLGLTHFAVLSDGTKITAPRFLRRAARALTRLQRALSRKQRGSRNRAKAVVKVARAHARVADTRRDWQHKLSTAIIRDSQAVYVEDLCVAGLGRTRLAKSVHDAGWASFTAMLEYKAARYGRAFAMVDRFFPSTRRCSDCGRVNEKMALDVRSWTCPCGSVHDRDVNAARNIKAAGQADFNDRGAQVRPGRVPARRGEAVTHPDAARSTRGMEGITVR

SEQ ID NO: 56295 - protein, 382 aa, unknown
  TnpB Polypeptide
MRTFEYRLYTTKEQDSLLMQCLIESRMIYNSMLEMMKAQYEHDGTFLSKYELENAFKGYGTHVPATTIQMLADRLSKSLKRFLAAKQNTIPNIGFPRFKKPNRWHSIQLRQYGNEKNRRDVMLAHDEKHLYIPHKLGDSVKIKLHRPMEGTPKTAHLVLRADGHWYVLIVCETTAKNEHVPDECTHADIGIDVGLKSFLTDSEGNTIDNPRYYRTSQATLRRKQRTICRRKKGSRRRRKACKSTAQTHLKIQRQRRDHHFKTAKQYADKYHHIVVEDLHIDNMVHNHHLSKSIYDAGWGQFVNILSAKAENAGHAVIRVNPRYTTQKCSTCHELVQKSLSVRTHVCPFCGYIADRDTNAAQNILQRGVGLGHSLQASTSRDT

SEQ ID NO: 56296 - protein, 480 aa, Burkholderiaceae sp.
MQTGYRFRCYPTPAQQAILLRWIGCQRFIYNAKVGEDRYYRAFQRKALALAGQHPPIDQEYARYKNAELTPWLSEVPSQVLRNGAVRWKQAYSRFFQKLGGRPTIQRRSGPQSIWLTSELFSFQPIADTPTGETRYRLHVGKGKFPVGGIPYTAHRPHTMPASITLTIDAGRWYVAFSVDDGLPAVTPEEIAAELATWSEADLRAAAVGVDRGITVPVYASTGQTAVLSRVQQQRMEKKERARQRWQRRMARRTKGSSGWHKAKYRAARCQHYAKNVRQDFAHQTSYHLVTGEETRLVVFENLRVKAMSARPKAKRDESGKWLKNQARAKAGLNSKILASAWGRTLTLAQYKALRRNKLVVTVPPHHSSQECSRCGHTHPDNRPSQAAFVCQRCDFRANADHNASEVIRDRGVALVRSGEFSAKGKKKTMRLRNKVGAGCSEPGSDGTSTPGETRVRHRAGNRKVHESPNPETPATSRRL

SEQ ID NO: 56297 - protein, 378 aa, unknown
  TnpB Polypeptide
VKTAIKGYKYRIYPTGGQKELINKTFGCSRFIYNHFLAMKIELYKTEQKSLSYNQCSELLTELKKEKEWLKEPDKCSLQNSLKDLDIAYQNFFRKIQKGNTNQGFPKFKSKKNNYKSYRTNFTNNNIEVDFEDNKIKLPKLKWIKCKIHRKFTGKILSATISQVPSGKYYVSLNVECEHEELPETNNSIGLDLGISDLLITSNGKTFENNKLTYKYEKKLAKLQRQLAKKQKGSKNFHKQRIKVAKLHEKITNTRMDNLHKISSQIVKENQFIFSEDLNIKGMVKNPNLSKSIHDASWSELTRQLQYKSEWNGRTYHKVDRFYASSQICNKCNYKNKETKNLSIREWICPKCGTYHNRDINASINILNQGLRDLKLVI

SEQ ID NO: 56298 - protein, 372 aa, Chlamydiia sp.
MKRTVALKLILTKDDETAFSETQSVFSAACNQLVPFSVENRCWNSVDLHHLCYYSLRERLPLLGSQMVCNAIKKVCCSYKALKIKKTQDVPTILFRENGSVHYDKRTYSLKGNTLSLFAIGGRVRCSFRTGPHQARYLKEGKAREGELIRRGKRWFFNLVLEIPDVQPNMVGTILAVDVGENNLATTSNGTIFGGGILRHKRDKFLARRGKLQSNGSRSAKRCLKRISGKEHRHVKMINHITSKAIVEEAVLCGANKLVLENLTNIRRRIAGNKRIRSRLHRWSWYELQQFVEYKAQARGIGIVYVNPAYTSQSCSICGSLGTRRKHRFACSTCGSYQHSDRNASINLLKLGESVVAPMAYVNMPMVAALCG

SEQ ID NO: 56299 - protein, 432 aa, unknown
  TnpB Polypeptide
MKSMAQLEYHYGLKVRIYPSDYQKQIIKVNSDASRFIYNEMVAIGKELWQLSRVRLPIDTVQDRIQQLKLRRNARQMSNHFQFLEDKRIDSLAKANAIQNYYKAWKTFRKVHGTGVPKFHRKSYAWRYQTNCQYLKQKTARLTNGTVFFEDCRHIVLPKLGRLRVKGSHQRLLDRQNEIRIGTVTITKDAADRFFVSLQLGSDTPFVSKLNRADRQIGIDLNTENFLTASDGQTIANPRCYRTIKGKLAKAQRILSRRQRRAKKEQRSLRESKNYQKQRLLVAKIHARVFDRRHDFLQRTSTTLIKNQDLVVAEELRSKNLLKNHALAMSIADVGWRSFLNMLAYKADLYGRQFITVSPENTTQTCHDCGFVMGSDGTEKLTLADRKWTCPQCHTHHIRDHNAALNILEKGFQKQQKAQPKGWTHSYGNLGM

SEQ ID NO: 56300 - protein, 411 aa, unknown
  TnpB Polypeptide
MRSQKLRLKLTKEQEKFAWWFSKVSRNYWNLLVDIDKRNNKGEFDEILSKNGNKTYHSNFYDREVYHLSQSDYLNLAKIVVAKNLEEDYEAWAWYYQLNQSFIYAFLVRELIKIKRQNKGRLNFRSVDKIQPSFNVRCDRFTDKRPSRIYLKDNGKLQIPTLGEVDFGSTREGFDLSCKKQVATISFDGKYWYLSYTEDVDTQVTDLPNSTDGVGVDLGIKTLATVSDGTTVPNIKDFRRVRILNKRLKRLQRKVSRKYFINKCNKHNKTKNIIKLEREIKLIHRSLRNIRINHIRKFVSDLVKTQPQYIAIEDLNVNGMRKNKYLAKDIANCSFYTIREHLIRKATERHIAVRLVDRFYPSSKTCSNCGSYKKNLKLNNRVYRCDNCQEKIDRDFNASLNIARTDRYVLA

SEQ ID NO: 56301 - protein, 408 aa, unknown
  TnpB Polypeptide
LSDILILCERHIIKPTNPLFSECDNLSFLAKNLYNSTLYYQRQSLFESNFQNYYAVNREFTHTNQPDYRALPTKVSKQVQMLVDRAFKSFFALVKKKTTEGYSPKVNPPKYLDKTDGRCTVPYPKGALSLKVDGYVKLSKTSIVVKTNVPKENIQGARIVPKGNHYVIEILYKVVSKPLRSELPKRVAFIDPGLNNLMTVTSNCFNPILINGKPLKAINQLANKEIANLKSKLSVQGLYTSPLLQSVYNKRARRITDMLHKITTQLVNHLDSHNIDTVIFGHNIGQKQDINLGKVTNQNFVQIPFTQLIAQLKYKCQLKGIRFIVTEEAHTSKCSFLDKESIEHHEKYKGKRVKRGLFKTSKGIRINADVNGSLNIGRKYLTKGGLYADGLHQSLVEFMVNPKLVNFA

SEQ ID NO: 56302 - protein, 393 aa, unknown
  TnpB Polypeptide
MKAYKTEIDPTPSQVELIHKTFGCTRYIYNQFVFENLENLASDKDYISAFDYSKRVNNDPTTPIWLKEVPSKAIKQALIYADRAFKDYFSKRRGKPKFKKKGSSESFYLIGTIKVERHRIFVPVLKWIRLKEFGYIPKNISSVTISMKNGRYYISCLCKDEVDERIPLSDYSMGIDFGLKDQFITEDRVIPSINKSLRIRKLEQRLRREQRKLSRKYEANMVDKVYYQTGAKKGQLKSYKWLKPLSECKNIQKQKLKVARIHERLTRIRTEYNRKALRSLVLERKPSSVAIEDLAVRNMMKNRHLSKTISKAQWHQSRLYLEILCKKLGIELRLVDRFYPSSKLCSDCGFKYKDLKLNERFWTCFNCGSKHDRDVNAAINLGQCREYTVLTAV

SEQ ID NO: 56303 - protein, 436 aa, unknown
  TnpB Polypeptide
MKLKGDLTALETSIRVYRQALSFIIPIINDEWEVLSEFEYTNQKYNLIEKWIHSTAKNQARFDFDKQFPKFPTYLRRSAIAKALGIVSSYRSNLKHWGEEPKGQAPKLSLTHYTYPAYYKGNLFRDFDPVRQTIELKVFKNGDWVYETYTLKTSDCTYYQRNLANKKQNAPIITKRGRRFYATFSYEENVPLIAEDKIEKICAIDLGLNTDATCCIMGADGTVYARKFIHFSEEHDQLNTQLGRIKRNQKRGNKKNTRLWKRVSGISQAIADKTAQAIFEFGSQCGVDVFVLEFLDFKGKQAVKRAHFWRYKRVFSVLGMKAHRYGLRIARVNARNTSRLAFDGSGKVKRGWEISKETPYSIIQFASGKIYNADLNASYNIGARYWIRHLLKTVSETKRLALEAKVPQVAKRNTCTLSHLINLRSELAVLTVRTQS

SEQ ID NO: 56304 - protein, 509 aa, unknown
  TnpB Polypeptide
MVAYARNNSLADTGATGLLSNPVCRSAIAGLVPQNSGTILRDRLLLCAASSPRTKLCKTWVQDLTGSERDCAPYWSKFVAEKSARLWSPTVTDYAALASSLWNGFAHDTVANSWFSTRISVHPSKKWSKTCSPLSTSSLADFTAEGSTCRCKRIRLFPTPEQRRTLKMWCGAARWFYNQAVEKQVSSRKSVQAAMLANCPMWATSAPYKIKQMAIEDETIARCNGFKFAKKTGQAFHLSFRAKKMRRDSLYIPKQSAGPNGIYPRLLGSMKSAEPIERPAYDCRLLHNNGKFYLLVPYDKPTRENQARGEVAVDPGVRTFLTFFSPDVVGKIGDLAINRIQRLCAWMDKLVSRKKWQAIRRMRERIQNLISDLHHKAALWLVKNFRMIVIPKFDAREMTIRKARKISSKTARKMLTLAHGRFRTILLDKAEEWGRTVVHVSEAYTSKTCSVCGKQHEIGGKKVINCCKSYDRDINGARGIFLRALVDTPAGSNAGALKEMVAACPQLST

SEQ ID NO: 56305 - protein, 387 aa, Desulfurobacterium sp.
MFYVYRFRLYPNKEQVKFLNRQIGHCRFVYNKLLEMAKEAYEKERRKWNYYEYKKLLPKLKKEFSFLKEANSQSLQEAVKWLDKAFKNFFKGLAKFPKFKSKKRTNSVSIPQHFCIEGNRAKIPKLKKPIRFIKHREIDGKIKSITITKTPSGKFYLNVLVDREIEPLPKTKKVVAIDVGLTTFCTLSSGKKIEKPKHLIESERKLKKLQRQLSRKKVDSQRFLKLRKRIAKLHEKIRNQRDDFLHKLSKRIIGDNQAVIVEDLNVKGMVKNLRLAKYITDASWRKFLWFLEYKAKLYGRELIKVDTFFPSSKLCSRCGYKNKELKLSDREWICPKCGTKHDRDVNATLNLLKEGFTRLKRVVGVDCSELMPVEGAVAPCEAGSPSF

SEQ ID NO: 56306 - protein, 404 aa, Escherichia sp.
MKRLQAFKFQLRPGGQQERQMRLFAGACRFVFNRALALQNENYEAGNKYIPYTKMASWLVEWKKDTETEWLKDSPSQPLQQSLKDLERAYKNFFQKRAAFPRFKKRGQNDAFRYPQGVKLDQENSRIFLPKLGWVRYRNSRQVTGIVKNVTVSQSCGKWYISIQTESEVSTPVHPSASMVGLDAGVARLATLSDGTVFEPVNSFQKNQKKLARLQRQLSRKVRFSNNWQKQKRKIQQLHSRIANIRRDYLHKVTTIISKNHAMIVIEDLKVKHMSKSAAGTISQPGRNVRAKSGLNRSILDQGWYEMRRQLEYKQLWRGGQVLAVPPAYTSQRCACCGHIAKENRLSQSKFRCQVCGYTANADVNGARNILAAGHAVLACGGMVQSGRPLKQEPTEMIQATALT
